United States Patent Application Publication US 2011/0183924 A1 - sequence listing, part 51

SEQ ID NO: 145070 - DNA, 301 bp, Homo sapiens
tcacagactttactgtgaagagcccttggcttcaacgccagatgctgaactagcaggggtgtactggtgtatgtggcgtgtgtgtatgagtgtgtgtgtgtatgtgtattagtgtatgtgtgtggtgtgtatacatgtgtctgatgtacatatgcatatgtgtgagtgtgtttgtgtttttgtccgtacgcatgtgtgtgatgtgtctatgtgtgtatgcacatgtgtatgttgtgtgtgtgcatgttgggagcaggggctgcaggagcctgcttttcatagctgccccaggtgatgtacc

SEQ ID NO: 145071 - DNA, 393 bp, Homo sapiens
tctctgtgcttaccagtccaagcagaactcagcagaatctacttgagagaaagctcgcaggagactagaaagtcattttaatgatgccagctaaacttctctttcctctcctccatctgctgttttccccaggtggagaagtaaaagactgtaaggtagggagggggcatacagacttttccagtctctgatccggcactgaaactcagggcacacgctctcctctgtgggcatggatgattacgtcctctgtctgagaaaggagacacgcactgtgctttgatggataggccgtaagtggcttccctgggtactttccagggcgactaggcaggggactctagaaaatgttcaggatggaagcatctgaacaagtaaggcaatcagaaggga

SEQ ID NO: 145072 - DNA, 319 bp, Homo sapiens
ttttcagaaacctgcattagatttgcttgtttgaacaacctcaaacccaaactcttcacggtggcattcaaagacctccattatgttgtctcaacttattttccaatcttattttctattgccctataatatgagtgcattaatttttgctaagctggtctaatgattcaaaaacaaaaaaaaagtgcttctcacttgcaaaacaagcactcaatgcctctgtataatatttgacctatctcttaagggtctgctcaagtcccacctcttacactgaagattttctagtcaactccatctttcagggagctcatctacc

SEQ ID NO: 145073 - DNA, 950 bp, Homo sapiens
gagaccccatctctgcaccaccaacaaaaaattagccaggcatggtggctcacgcctatggtcccagcactttgggaagctgaggtgtgaggattgcttgaggccaggagctcaacaccagcctgggcaacatagcaagatcctgtccctacaaaaaaaagtttttaattagctgggtgtgatggcacacacctgtagccccacctacttgggaggctgaggcaggaggatcacctaagtccaggagtttgaggctgcagggagccgtgattgtgccactgcactccagcctgggcaacagagtgagaccctgtctctaagaagacatttcttctggtgctttggtgatgcttctgctcagcctttctgtctgtagtctcagtccgatagtccagtctgctttgagggcccaccaggacctggaggaggggccagtttcagtcaagggtctgcagttgaccttgagaacttagcacattcattatctttttgtgggcacttccacctcccattagaaagaaaaagatgggcccagtgcggtggtggcttatgcctgtaatcccagcacattgggtatccacggtgggtggatcacttgagctcaggagttcgagaccaatctgggcaacatggcaaaaccccatctctacaaaatccaaaaaaatgagctgggtgtggtgtcacatacctgtagtcttagccacttagggggccgaggcaggaagattacttgaacctgggaggttgaggaggctgcagtgagctgagatcacaccactgcattccagcctgggtgacaacgtgagaccctgtctcaaaaaaaaaaaaaaagaaaaactcgagggggggcccggtcccccctttggccctattagggagtcggtttacaatcacttgggcgcggtttacaacgcctggactgggaaaaccctggggtaacccaaattaat

SEQ ID NO: 145074 - DNA, 346 bp, Homo sapiens
aaacccccacgcacagtcctacacgtaaggacacgagtcacacaaagcaagacaagtgtattcataaacatcacacacatttaggtaggcacacttaggcactcacagacactggtagtcaccaccatttagtcacagtaaaaagatacaaatatatccacaatcataggcagaggctaagttccagccagacaactgtcagtgcgcacactcttgcctggacacactgcttctagcaggtgctacccttgctcccaaggctgctctcctcacaggccttgaggcagagagagagcctaatccagccaaactggcaaaatctttcttctctatctcctcctgtagg

SEQ ID NO: 145075 - DNA, 407 bp, Homo sapiens
ggccaagtggggcaacaggaggcccgcagaagtgaactgtttccaaggctccaaatctagcaggtgatgggcagagccaacttgcaacacctaaagtccctctgcaccacgccagggccttgggaagctgtgaaagtttactaacatgcagttctgtcctaaagatgccaggattctaattctttccccagatcgcatagtcctaagctcccccttgccaattagagagggaggggaccctgcccaactgacaaagtttgagggaggaggtactcagcaggctcaaggccattacaaacagcacgcaggaagatgttgatatttccatttcatgctgggtgagggggaagaaaggacgctcaatttcagagcctgatgagaagccagaagctaggatgtcagttatg

SEQ ID NO: 145076 - DNA, 449 bp, Homo sapiens
tgtcccattttccaccaaactggcacattttaaacatgagtagttaacgtttgctgaatttatactataaacgaggcagtgtggcaagtgatttatctgttttatttaatcctcacaataacttaagtaagtactattgtcccattttatagatgagaaaattaacgaatagaaagttaaaaaacttggccaagttcattctgctagtaagatccagagactggcacttattaaaaaattgtaataataggccgggcgcagtgactcacgcctgtattcccagccgaggcaggcagatcacgacgtcagatctaaaccatcctggctaacgtggtgaaaccccgtctctactaaaaatacaaaaacaaaattagccgggcatggtgacggtcgcctgtagtcccagctactctggaggctgaggcgggagaatggcgtgaacctgggag

SEQ ID NO: 145077 - DNA, 288 bp, Homo sapiens
ctttgatcattgggagtacagagcaaaaaacaagagcagaggttggtttgcttgttattaagaaagtgtcatgtttacaggagcaaatgtaaaaatctgttagattggagaagaggaacttccttaaatgagggagaagtagattacaagtcactcaagtaaccgtgaaaatataaagatgggattgggtttgcaatagtgtgtgacagaggtggtaatcatggccgtgcttcccttttacctgcattgaagtagtctgctacaattcagaattactgttgtgttaaa

SEQ ID NO: 145078 - DNA, 350 bp, Homo sapiens
cacacaacagttggcaagctctgccctataggtaatcactttttcctcagttcttttagctgcttcttcaatttacctgtctattctaaacaatgtgcttgttttatcaggatgcttttggatgcagctattgaacctgacccatactggcttaaaataagaggacttaactcacaattggaattccagggacaggctcaggggctaattgatttggtagcacagtgatgtcttcagggccccaggttttctcatttccccctttagtcactggcaggctctatcctcagattaatcagatggttgcggcagtgtcaggagttggattcagatgcaacagtgcccatggg

SEQ ID NO: 145079 - DNA, 743 bp, Homo sapiens
aggtaggcactgaaataaatatttggtatatgaaaaagggtgtattgctaaactacaaattgtatttaccttaacttcttaaattctaggatccaatgtcaaattccacagagtctaacattataggttatattccatttttaaaaatcaacttttattctactcaaaattttttttttttggagacagagtcttgctggagtgcaatggtgcgatctcggctcactgcaacctccgcctcccaggttcaagcacttctcctgcctcagcttcctgaggagctaggattacaggcctgcacaccacacccagctgatttttgcatttttagtagagacggggtcttaccatgttggccaggctggtctcgaactcctggcatcaagtgatccacctgcctcaccttcccgaagtgctgagattacaggcgtgagccacagcactgagatatattattttccattgtgaaaaattgaaagtgacctaaatttccattaacagacaatccatctagattatgtgtcctggagctggggcagtggggaaaacagcatcctctatttgaaattactcaggtaaaataactccattcctttgagaccttaaataaaaatatccaaagtccaatttctttaaaaaatgaaattttggctgggcatgtggctcacacctgtaaccccaacactttgatggaggtgggcggatcacttgaggtcaggagtttgagaccagcctgaccaaca

SEQ ID NO: 145080 - DNA, 371 bp, Homo sapiens
atgggtgatctagaggatcccagcggcgccttttttcaagtttatgcatgaacctgacctcagacatcggccatttagtttctgttagcttctaactgagcacatttatttagtgcctgggctgtgtcaggcactttgcatgaattattagtgtgtttggtcctcaaggcaaccttgaggcttggagaggtcaccagccagtcacagtggggctggagttgggatttggaccaggccagatgaggggctgccctcaaaactgccagagttagagggatcctgggggtaaaagggacccaaagatactatctttgctgattcaaaattttaaagcagtgcataggccggcgcattagcaaaagaatattttt

SEQ ID NO: 145081 - DNA, 271 bp, Homo sapiens
ctgccctagtagagaagtgcaacacgtcataagtggtcaaaacatttttattggaagtaatgcatctgtgtgattttctgtttagtccctatttcagagctctttgttttttcttaaaatgtaaaatactctcaactttagcttgagaatacctgaagtgtttagttggacatttattatgagccagtaacatatttgcacaggagctctggaggagagcagtatcacttgtggaactctgagcgagttgtatagccacccacccatgcca

SEQ ID NO: 145082 - DNA, 545 bp, Homo sapiens
tttttttttttttttggtacagttgggagccgggagtctctctgttgtccaggctggtctggaactcctggcctcaagcgatcctcttatctcagcctcccaaagttctgggattacataggtgaaacaccgcgcccggcccagaacatttaaaagtgaaagtttttacataattatcatgtctgtaagaagtgttaaaatcttcagataaagtcataattttaaatcagttgggggatagcagtaacaactgtgtttatgtagctctttcaaagcttcaaagaatttataaataacacaaaatactttcaaagcacattattctctgtaattcctgaaactctgtgatgtattggaactaatattaccacccttttacaaaggaaaataagatacaaagtttgagtacgagtaacatttctggtcataaatctagtcagtgacactgataggactagaactcaagtctccagaaataataacccagagctgtttttactacaacattcacagttttggaatgtagtccatagttatttatagca

SEQ ID NO: 145083 - DNA, 253 bp, Homo sapiens
ctcttatatctttcctctaacccctccccagtaactataattgatgttttattaagcattttaaaataatattccatagatatagcatataaatattttatgatttaatttttttggctttgactttataaaaataaaatataaattgattcagtcatttataaattttctgtgactagctgttttttaacatgatgtttattaatatcgttatatgtaattgtagtttgttcattttcactaccatatagta

SEQ ID NO: 145084 - DNA, 474 bp, Homo sapiens
ttcagccttactcttgctgccagctggggaatggggaatggctataggaagggctggagacagcatggcgttgtcattggttgcatcaggtggttggaaatgcagggattttcctctctagcccaccccacccctttatgcaaatgaaatggtaccacaggctgatgcaagcctggccactgctaagtaattctgcatgacaattcgctcttgcttgccatggccagcttcctccaaaccaagttttaaggggtccaatccccaaagctagaggtgtctcctgatgttccccttctttcttatgtaggggggaggcggccctgccttttgtctgggtgtgtcttggtccagatcctaatcctttgcacccttatggtgatagtcacactaatggttttgctagtggctctttttttttgtgggaaggggatagtgtctggaagtagatgaatgaacacttgctggtgcagggac

SEQ ID NO: 145085 - DNA, 240 bp, Homo sapiens
tgggcaacaaaagccaaatcccgttaaaacaaaacaaaacaaaaaaaaactccccgcaggaagcctgcttgggtgacgccctggacccttctaaaggcttggcccacagttcccctgcacactcttgcttgctccccgcccgctgcctaagcgtgcatgtcccagatggctccccgcttctcgctggccctgcaagacgtgctgtcctcttctctctgggatctgtcagtgacacactgc

SEQ ID NO: 145086 - DNA, 208 bp, Homo sapiens
acacaaagccacagactctggcaaattatccaggggcaccaaggctccaaatggcacattgctgaccagtgtaaacatttatcttttaagctatcgattctaccccaagcctggaagtctgactgccaagaacagtatggccaaaaacactaggtgaaaaagaaaacagaatccatttttgtttcatgttgagaatgtgctgttttgc

SEQ ID NO: 145087 - DNA, 193 bp, Homo sapiens
ttagatctggcagttagtactggtagcttccaatttctcctgaggacggtctagtcgttttctttttttaattctcaaagccagggcaaagtctgaaataaattctagccgcattttccccctgcaaattggtattaccagtcttcagcaagaaaatgagaggatataaggtacacactaagctaggaaaatg

SEQ ID NO: 145088 - DNA, 257 bp, Homo sapiens
ggttcctgagattgtgacatcctgagatcctcagtatctgtctccttagaaccccagtctctgttaccctgactccctttgattctaataatatcaggatacagggaaccccagtttctccagcccagctcagcttcctcataacgctacacatctggcttaagagcttgtactttcttgcccctaggataccaggctctgtgccctgattccctgacacccccatatttgtaccactgggcattgtccctggcccc

SEQ ID NO: 145089 - DNA, 334 bp, Homo sapiens
ttcctcttcatcctctggggcagatttaatttgggggcaagtgccaggaatcacttcagagttgagtaagccaactggggtgtcttatttggggtccaaatgaagtgcgaccctaaggcagaagagtgccttgtgtggtagaaaacccagtggagcccttggggacaggttaagagattagcccaggagccctggagcgaaagaatggcctgcacccttgcagggggtgcaggggaggccttgagcgagatctgagggctcttcatagagagagacacaatcaaccctaatcagggcataagtgaaaacacacggtcccataaagtgtcctggg

SEQ ID NO: 145090 - DNA, 421 bp, Homo sapiens
aggtcttactcagggttaatatctgggggctgaatcctgtctggatggttccccatcaggatggggggcaaaacaactgacacacatcctcgcaggcccgtatccttacccatgtgagtagggaggtgttgccagtctactgaatacccaacaggagaacagactcaagcagctaaatggaccaattagtgaccacccaggagcaaagacatctgccaccgacctgcatagccccctgccccactgctttgctcagcactaggaggggagagggggcactcctcttatgggatctggcttctgggaagaggagaaacatgcctcacacagtacaggaaggagaggtctttcggaagtgtttttttttgtttgtttgtttgtttggggatggcaattcatcttcatctttcaccaggcaaag

SEQ ID NO: 145091 - DNA, 425 bp, Homo sapiens
agaggatccccaattagctggggcacaggcattttataacgaccacagcacctacacaattctcatgcagagaaacaccattttacagaaaataacttcccagtgttgtcaagatttgacctgagctttccaatgaacagctcaaggcagactgcacaattaaaaagagatcatcaagtactatagttaccagtaaggccaagaatagaacacaggtctgctgacccttgcaccaatgcccaatcaggcatgttcttttggatgctgacacccttctcaagttccaagtcacttgcgaataacaaagaaatgagttaataattctggtagacagaagaaaatgtaagccaggcatggtagcgtgcacctgtaatcccagctattcaggggaggatcacttgagcccaggagtttgagaccagcag

SEQ ID NO: 145092 - DNA, 524 bp, Homo sapiens
tgcctatccccctaccccacgttcttacacactccacaggatgtcttgaagcttccacactgctgcaagcctagcaggtcaaaatgcactgactttatctctctcatttccaaagtaatacttgttcatggttttaagaaagaaaatacagatgaaaaagtggaaaaggaaaaattcactctgatttgatcacccaagacaagtactaccaacattctgaaacatattcttaaagtcttttctctttgtactaaagtaaaaacactttaaaaaatctataggctcataaaaagcagatcacaaagcttccaaaatatacatttggccccacagtggaaccaatttaaatctgttttaaaataagtgtgtagaagctgttaaagcttttctgctctagtcatggcagaactccttccacattctctgcacagagctctgagttttcagtgcagaaggaacataatggtacttgtatgtgcacctgtgtgtatttaggggtggggttaggtctgtgatgtgcctcc

SEQ ID NO: 145093 - DNA, 368 bp, Homo sapiens
atgtgcatgtcctttatgacagttggagaaaaatccccaaggtcccatagcagtccctctcagccaccatgagatcatccctcacaagctgttcttggggtcagattggcactccagatatgagggccctagggagagcttcctaagggaagctgggagcaaggtggaaccccaggagagcgtggatgggcttccactgcggggagtgtcccgccggtccgttacaggctttccccaggcgccagcctgcgctgtgcaggagacaaaagaaaatcgaggccctgactgagcagatggtgcggaggaagccgggcgggctgcggtgggcctctgaggacacgaggagggcagggggcatggagacagcg

SEQ ID NO: 145094 - DNA, 276 bp, Homo sapiens
ttcatgtcgagacctttcatgccgccccatcaaaatctaatatggggagggagttggagaggatggatgggattggtagatgcaaactattgagtaatgaggtcctactgtacagacagggatctatatgtgctcttgggttacaacatgatggaagacagtataaaaaaagaatcataatatgtttgaagtacaagagaggttagagaatttatcttcctacaacctcattttattgataaggtaactcagggcatgcaggtacaacaatgtgac

SEQ ID NO: 145095 - DNA, 722 bp, Homo sapiens
ggggggtgagggttggggagtgaaaaataagattctcttaaaactctttgaaatacaacacatataagcaaaatatgtaaatgtgtataatgattataaaatgtgatgtaagcaatataaaggaacataaaggagatgactaaagatggcctgctctataagcaagccattggaatggtgcaaaagtattaaattaagagagcaaacagaaatctaactgtggttctgtcattaattagctatctgaactggaacaagtcactggaacttcctggttctcagattttttcagttctaaagacataaggtagactagtagaaatgtaacatcatttccaggtctgaaattctaagtttacagctcatttaaagtgtcagaaaaggaaaacatctaccttgcaccttagaacaaagtaaactccagatggattaaagatgtaagtatgaaaaattaaaccctaaaaatactagaagaaaacgggggaatattttcataacatggaataaaaaagcttctttgaacagtacatcaaaagcagcatcaaaaaaagaaaattggcatttggaaaaatatgtcaggtaataacagcattaaacaagaacaaaatgggaaaaaaccaaactgtaacatgcatcttttaagagaatatatttgaggctacagtgagccaagataacgccattgtaccctagcctgggcaacaagagtgaaacttcgtctc

SEQ ID NO: 145096 - DNA, 478 bp, Homo sapiens
aagacagacactagggaaaagtacatacaacatacttaaagagacaaatgtattacctggaataacttgaggaaaacgcaatactacatttctattgtgcaaacagtttcaattcatcaagaaggaatctcaggcatgagaacagataagagccagatagataatgcagcccttctcctccatcccacaattctctcctcttcatgtttgatatggtcccaacatgaccttcagatgtgggttcagatgccagaccctggcagttttaaaacagacaaatgtcactcttgtacaaagagtagaagtgacaccatcttcacagagaaatcttttccaattaccagcagacaggccgactcccagctggtgaaagcgcgggccaggggtaggccaggaaaccctccacaccctgccaggtgcccacacaatggctcggcccaggctcctggaaagagtttatttgccattacttcttgat

SEQ ID NO: 145097 - DNA, 339 bp, Homo sapiens
tcatggggaggagggtgttccaggacaagagagctggagggcagctggctcctgcccgggagggcagccgggcccagtgacagccccaggccactgggagctgggccagagggagggagctagcggagccaaacttaacagagcagcatgacccaccattctgggaagtgctgcctggcaggctgtttcactgaggttggcactctgcagagggcaccacagggcagctgtgtctgggtggaggaagtaggcagggtggacaggtggcagtgcccaccttgcagggacctcccccctccagctgccccctacttcctcttctccatcttctctaagaag

SEQ ID NO: 145098 - DNA, 455 bp, Homo sapiens
aaccttcccctctgcccttagagtaaacccagacactctgcaaggccctgcgtagactggccccccagctgccttcccttctgggcaccatggtgctggctttcccttgcccagtgcaccagcctctcccatctggagagcttttgtgctagctcctcccctctctgtgatgttcctttcagcccctcacaagagtgactccttcctggccttcaggtttcagctcacagaacacttggtcatagcagcttttagtgaccgtggtagctccaggtgccctgctctgcgtcctccgtctgttcatttccttcacatcccacagcacaatccatgatatggcctcgttgatctactgcctgctgtgttactgcctgccttccccactctccaaggcccagctccatcctggtcaacattctaccctcagaatctatcaaaggtctttcagtaagggt

SEQ ID NO: 145099 - DNA, 358 bp, Homo sapiens
acacactaacacctaaaattgacaacagctgaattctcattggaactggctgtgctttagtgaaggggagtggaagaggcaaaaggaaagtaattccttaattatttcatatgtcggtgtctacttttaaaagataagaccagccccctcttcccagagatttggttatatttacacaaccaaattgaaagatgcttttaagtgatgctgtaggttaacaaaaatgtaatacatttttgttgtacttctccttttagatccttttgagttctatgtggagtttatttgttggttggctatagcccatgttgctccgtgaactgggcaatgaaaagtgaagagttctgggagaatgtga

SEQ ID NO: 145100 - DNA, 244 bp, Homo sapiens
agagtatagtcaaactgtggaggaaacttcattgttaaaaaataaacattgtgcatatcaaacattgaagagtgtaaagtgttgtcgatggtaatgtgaacttattctaagttgccgaaaatgtttcgtgctcaatgcattttagaaacaacatttccatcagagtgaaaagaaagcaaagggagccttcttaaactatactggctacaataaccctgccaagcaatattttctgggaagcctt

SEQ ID NO: 145101 - DNA, 395 bp, Homo sapiens
aagcactgaacctcctggccaggaagaggcatgagaactgagtgaataactaagtcaccctttccctctgacacgtgaataacccagggggctaacataacactgtgctccgtaatccttagatctctacgggacgacttctgaattctagctattacaaattcagcaactgaccaatcaaaaaggcagaattcggccaggcacagtggctcactcctgtaatcccagcactttttggggctgaggtgggtggatcatttgagatcaggagttcgagaccagcctggccaacatggtgaaaccccgtctctactaaaaatacaaaaaatagctgggtgtggtggcaggtgcctgtagtcccagctactcgggaggctgaagcaggagaatcgctt

SEQ ID NO: 145102 - DNA, 394 bp, Homo sapiens
attttcccgcctcagcctccagagtagctgggattacaggcatgcgccaccacgcccagctaattttgtatttttagtagagagggtgtttctccatgttggtcaagctggtcttgaactccagaccttagatgatccgcccacctcggcctcccaaggtgctgggattacaggcgtgagccactgtgcctggccagaaccgaactattctttaacccagctataagaatattttacagctcttgtgcactttatccgccatgtacaaatacagctgtgagacattttatatttcacaaatatagccataattcttaagaaaatgtctctataaaaccttatccatattttgtaactctgctttgagaacctaaatatgaaattactatgttta

SEQ ID NO: 145103 - DNA, 536 bp, Homo sapiens
agatatgaaggtggatcaggcaattaattcacattttcccagaccatgaagtttgtgatcgttgtcaactttaagaaaattagtaagtagtgactccaggcccctcaaatcctagcgagggtcattcctggtgggaatactgccaagtgaggggtgaccaaaacgctgcatggcttgtcccctggtccaacctggaggtgggcacatggaccccaactcaaccaattagctactctgcctatgcacacacactcactttcacacatactttgaatcttgaactaccaacactagaacagaaatgtgtcttaagtatcttctgcggctgtgatggtgtccaggccaccagtggcagtcgttcctgacacagcaaatgttgctgtgttccctgttttttgtttctcatctctgcaaagcttccttggttcctgctgctcctgcacgacaagcctccttgccctccatcagttcccatgggctccaacaactctaataaaccctgtgagcttcagttagccagaaccgatttttgcagt

SEQ ID NO: 145104 - DNA, 313 bp, Homo sapiens
gtacggcaaccacttccagtctcttcagagtgcctcttctggacattacctacattactaggtaatcagattgttttcagtttttgtcatcatccatagtgttaggataaatgttgtttttgttaaatatttgtgtgtatcttgcattgttttcttgggataaagttctagaagtggaatgccagcataaacttggaattttgatatcagtattaaaaacacattctacatattctacaggatctttattttgaatcatataataaaaacataatcaaactatccagagacacctgagtttgaatccctcctc

SEQ ID NO: 145105 - DNA, 823 bp, Homo sapiens
cttattttgtttttccatctgtgtgctcccaactccggattgcttcccccggtgtgtgttttctgaagctctgtaccgctttgcggctctgccagtggttcttttctagttttgaataacacgtttaaggccgtgattgaatagcggttagtattctgcgttgtgaagaacacgtttaaacacgccgtttctcgcgctctcaacgtccgaagtgaaatcgcatctgcccccttctgtgagaaggtgaaaattgagcctgtatatttctcttccctgctggtatttgctaccaataaattgctacttttaaaaaacattgtccgaggccagcggatcatgaggtcaggagatcgagaccatcctggctaacacggtgaaatgccgtatctgttaaaaatacaaaaaaattagccgggcgcggtggtgggcgcctgtagtccagcctgggcgacagagccagactcagtctcaaacaaacaaacaaaaaaaacaaaaaaacattgtatctgttcataattgtgtatttgcatcttactaggaaacatttgtatcattaaatagtgactttgctacttactgtgagggcttgagcaaatggcatctatcttttgcgtcagtttccttatctgtagggtaggggtaatgtagccactgcaaggattcagtgaaatgagagagaactcacaaagtgcccccagagggctttccttgtgtgcctgtcttgttacggcttctaggaatctcttgattcgtaattaaatgtgctcactgtctactgcactccagcctgggcaacaagaccctgtctcaaagcaaaagaaaa

SEQ ID NO: 145106 - DNA, 371 bp, Homo sapiens
gactcagtctcaaacaaacaaacaaaaaaaacaaaaaaacattgtatctgttcataattgtgtatttgcatcttactaggaaacatttgtatcattaaatagtgactttgctacttactgtgagggcttgagcaaatggcatctatcttttgcgtcagtttccttatctgtagggtaggggtaatgtagccactgcaaggattcagtgaaatgagagagaactcacaaagtgcccccagagggctttccttgtgtgcctgtcttgttacggcttctaggaatctcttgattcgtaattaaatgtgctcactgtctacttcattccatagaacccccaggctctgccatttctttgaggatccatggggctt

SEQ ID NO: 145107 - DNA, 265 bp, Homo sapiens
tgagttgacagtgtaatgcagtggaaaggcataggttcaggagttacacagatctagctttgaattctggtgctgccatttactaactatgctcttgaaaaagttaattaacttctccaagcctcagtttacttgttccctaaaatggggatgagatagtaatattgatctaagtaaggcttattttgagaatttgagctaatatataaagttaataaagtcctgcacataatatgtgattaactaatagaacatgacaaaatgt

SEQ ID NO: 145108 - DNA, 449 bp, Homo sapiens
attgtattaggcatatttgggaaaagcaaatagacgtatgtgagtggggcagaaagttcaaatgggaaagtgagagaaaacctggaagataggttaatgaaacccatgtcatagaagactttgtaaacctctatgctagtatttccgagttttctatttagactcacgacatcagaattagactcctgggccacgcttctgatcagaatcatagggcagtaccctgaatctgcattttaaccatcttcctaggagattccaatgcacactaaaatttgagaacgtttcccattcaaataaccatcagggcagtgtggcctagaggtatgaggaagaaaggattcgtccttttggacgtccctctgccagggaagtctcaaagcagcattctttagctctgtgcattcattatacatttaggtaaaatgactgtttttatcttccaggct

SEQ ID NO: 145109 - DNA, 239 bp, Homo sapiens
tccgggccacttgagggataaaatataccttaggtgattaactgttgtattttaatgtgaatatttccaccaacattaaacagtaactccatgagttttctcatacctgttacactctggagttgcaacaagctgacatgaagcaagttgcaaacataattatcgtatttggctcctattcacagcaagggttcttcaagctgtacgtggggcagtcttccctcacatgaggtttatag

SEQ ID NO: 145110 - DNA, 518 bp, Homo sapiens
aaatcagcgttaccggactgagatgtctgagcggggatgtaatctgctctcttgagagttggtaatcattggtttgaaatgtgatgaaaccactcaagccaatgaaggctgggtgggtggggagggcaggggctggatccaggacttaacaggccaccaggtggctgggcgcagtggctcgagcctgtaatcccagcactttgggaggccgaggcaggcagatcacttgaggccaggagtttgagaccagcctggccaacatagcaaaaccgtctctaccaaaaatacaaaaattagccaggcatggttgtgcacatctgtaatcccagctactcgggaggctgaggcaggaaaatcgtttgtacccaggaggcagaggttgcagtgagccaagatcgtgccactgcactgcaaactgggtcacagagtgagaccctgtctccaaaaaaaaaaatttgggcacgtacagggggctccagagcttcccagggttcttgagcacacggtcaggggcgacc

SEQ ID NO: 145111 - DNA, 151 bp, Homo sapiens
ctgtccccgctcctcaccccgctgtttctgcttttctggttccgccctcgtgccctggagattatcgacttttttcatcacttcactgtggatgtggctggggttggggacatctgttcctttgcccttatggatgtgaagcgccacggac

SEQ ID NO: 145112 - DNA, 313 bp, Homo sapiens
tgacaaactctaggctagaaccaggtctgatttaaggctcaaggctgttctactatatggaattctccctcctctgagattccttggtggaagaaaatattctcctgaggacccatgtgtaaagcaggtacactggctctactctctagttgaaggtggctggggactccaaccttgtgtctgcttagcgggacacatagggtagccccattggaacctattggaagggtggcccacctcctcccgcagccactcggtcccagtgagcgacctgctcaccaaggaggctccttggagcacagtctgaagatca

SEQ ID NO: 145113 - DNA, 384 bp, Homo sapiens
taaaaattcttcgttcaagtgttcaatttccttaaaattttaagcgttattcctaacagtttgcactcctatgagaatctaatgccgctgctgatcttacaggaggctccagtgatggggagcggctgtaaatacagatgaagctttgctgcctgcctgctcactgcctgcctgctcacctcctgctctgcggcccagttcctaacaggccacagacaggtaccagtctatggcccagatgatgcagacccctgtcttaaacaaaaacaaaaaaccaaagcacacttaatgtgagatctactctcttagcaaaatttttgtttttgttgtcgttgacacggagcctcattctgttgcccaggctggagtgcagtggcgcgatct

SEQ ID NO: 145114 - DNA, 131 bp, Homo sapiens
tacagttttagaaaaggatcttagaccgaatgtacatgaatcaagtttgaagttgcattagaaacagtctttttttttgagatggagtctcgcactgttgcccaggctggagtgcaatggcccgatctctg

SEQ ID NO: 145115 - DNA, 534 bp, Homo sapiens
aatggcagtcttatatttaactaaaacgtatgtagtgtacttactactctactagaaatctgaactccttttaatctgaaatttctcacctctctcttttctctctcactttaattctagaaaactatcccttttatccctttaagtatttattctccacttaaaaaaaattatctcccttcttagattcctatcttctggatgtcaatacctttatttctgtatttgatagctgtcaatttttcttttatatttgctatttccttgtccttttatccccgtgaaatattctctttaatcttccaattaacaattttgttcttcaaatagatcaattctgttattcatctttttgttgtttgcagattgggcttagtttctattgtggtttcaactttagcagttgtctgcatccttcctaataccctgtttatcaaaatagagccctcttgccattgctgacaagcattgctggaaaggctttaattggcacactggggttatttactttgcctacatcttccatcctctttt

SEQ ID NO: 145116 - DNA, 334 bp, Homo sapiens
cacaatgacccaacctcactcaccacagaccagctattatttctggggaaccagcattttctataagagcaataaagtcagataatgctaggacaaaattcctgagacaactgccacattcagatggagagctactgaaaggccaaagtgaagtccactagaagaacagacatctggaggatggggcatgccccatgctcctctccttcttccacctgactgaccccaaagcctccgctcctgcagtgccaggtctcagctccattaggcctgttatggattaggacacagatcagccccgtccccactccaaaagtgggaacagccccactag

SEQ ID NO: 145117 - DNA, 514 bp, Homo sapiens
gacttgctccatgcagggttgccacaaacctccagtctataaaagacacagtgtctgcaaagcactgtaacatgaggttcaccttatacctagtactgtgtctgagtccctgacggtactagacgtccactgatgttacgtagattgagactgttgtgcaaccatcaccatcatccattttcagacctcttcatcttgaaaactctgtatctatttaaccccatttcccctcaccccaatccctggcagccaccgttgtactttctgattttatgaatttgacttactctacatacctcatataaatggaatcatacagtatttgtcctttttgtgactggcttatttgcttagcgtggtatcttcagggttcttctatgttgtagtttgtgtgagactttgcttcctctttaaggctgaataatattccacggcacgtatttcccatatgttgttttctgtattcatctaatgggcgtttgggttgcttctaccttttgggccactgtgaata

SEQ ID NO: 145118 - DNA, 399 bp, Homo sapiens
accagcgagaagattgttaaaataattgcccttgagagacaaagaagtctatcttctggaggagaaagctctctccacagagtcaaatgtctccactgagacacttccctggtatgacttcagttacctggaggtgctgcctgtggatgctctaatcttggggtggctctttccaaactcctgcctgtgcactcatgcattcttgcagaaacccacagtggcagggattcctgtcctgtgccgcacgtgcctgtggaattcttgtctctgggattgtcaggctgtcacatttgataaatcctagatttgaaaaggaaaaaaagaaacaaaacatttacatcaaaccaatatgcaacggccagagctgagaagaaaaatggtccaccccactggccttct

SEQ ID NO: 145119 - DNA, 187 bp, Homo sapiens
cagcagggtaatgacatgagacaggccaggcactaatctggatgaaggacctatttacacatgtaaagatccctatttaacttagctggaagagcattaccatgagatgctgcagtaaaacaagttacccatgaccattctcattaaaacatatctggtatccatttctaaattagattagttattc

SEQ ID NO: 145120 - DNA, 231 bp, Homo sapiens
taatgatactatgcctacctcatcatcatgctgtgaagattaaatgagttatgccatggaagtgctgtacattacccattgataatgtctcagtggcctctcaatgaaatggagtgtgacagagtgccacactctgaaacggctcatccccggtgatggtgctgggactagaacccgggcaacctcgcagtgccatgccctactgcatcactacgtccacctcgagggccc

SEQ ID NO: 145121 - DNA, 317 bp, Homo sapiens
gggtcttgctatgtcaatcaggttgcagtgcagtgtggagatcacagctcactacagcctcaacctcctgggaccatgtgatcctcccatcctagcctccagagtagctgggactacaggcatgtggcaactcatttggctaattttttgtattttgtgtaacgccgggttttcccatgttgcccaggatgatctcaattcctgacctcaagcaattcatctccttctgcctcccaaagtgttgggattacaggcgtgagccaccgtgccttgcttgcctgtgtcttttatggaagcccaactaatgtaaagaaagg

SEQ ID NO: 145122 - DNA, 324 bp, Homo sapiens
tggatgcatggatccggtctgaggaaacagagaagacatcaacgttatgcagtgaacaccaaagaagctctgaggtctaaggagtcccgggtcttctgggcagcacacagggtcactgtgatctctcaaatgagacctacggatccagcgcacacccagaggcacagacgcagaatcacgctgcccaacaaaggcagctcgcccctgagttaactcagggcgagctgcaccattttttcatgaccttgtaatatactggtctctgtgctatagtggaatctttggttttgcatcatagtattgtggtgtgttgaattcaatacg

SEQ ID NO: 145123 - DNA, 361 bp, Homo sapiens
acatgctgtaagggcacagccccccttggggaaagcccagttcagcaatgggagaagggctgccacggagggcctgcggggacatggaggtgacatcggaattgcttctccacacgttatttgctgcgtgaccttaggccagaaactgaacctctctgagctctgttcctcatctataacatgacaggtcctccctcccacggctgttcctagggtcacgtgggatcctgtgggtggaccacacccctggagctcagcacaggaagctgctattagaaactgcagaggtgagagggcagtggttgggaaatcctcccagagcgggaccttgcagaatgcataggagctcggcagctaggaa

SEQ ID NO: 145124 - DNA, 409 bp, Homo sapiens
actctgacaggcgagactaggatacatgagtggaggtgggagttttctggggacaaagaagtagatggacatctcaccctgtccccatgaccgcacgtggcacctgcaacaatctcctgtcacctctgcgctggtggcatccagattagctgctgctttcaccagccacacctcccaggcatcattcatgtcaacatttattgagtgcctgttgtttacctggtgctgttagtgctgtgaacacagagctgcataaaaccttgcccctcagcataactcctggggaacacacaggctgttgcttgaaaagccaatttatgcccagaactgttgcatgggccgtcaagggaagagtgatggtttagatccagtctcgttcttacgatgtgcgtatgcgagaccctgcctg

SEQ ID NO: 145125 - DNA, 446 bp, Homo sapiens
tcgagccggtaccgcacgagttcggagtttgagaccagtctggccaacgtgtaaaatgctgtctctactaaaaatacaaaaattaggccgagcacagtggctcatgcttgtaatcccagcactttgggaggcctaggcaggaggatcacttgagcccaggagttcaagaccagcttgggcaatatggtgaaaccttgtctctacaaaaaatacaaaaattagccaggctgctgaggcacacctatagtcccagcacctcaggaggctgaggcaggaggattgcttgagcccaggaggttgaggctgcagtgagctgagactgtaccactgcactccagcttgggtgacagagcaagaccctatctcaaaaataaatagagtaaaataaaataaaataaagagaaactcctctcgacaattccccagcctcccaacttgattcgtgg

SEQ ID NO: 145126 - DNA, 940 bp, Homo sapiens
tctttttgagagtctagctctgtcgccaggctggagtacagtggcgagatctcggctcactgcaacgtccgtctcccgggttcaagtgattctcctgcctcaggctcctgagtagctggggttacaggcacatgctgccacacccagctaatttttgtatttttagtagagacggggtttcaccatgttggccaggctggtcttgaactcctgacctcgtgatctacccaccttgtcctcccaaagtgctggaattacaggcgtgagccactgcaaccggcctgaagttcaatatttgcatacttttgtctttggcttgagagtttgaggatttatggtcaaaatactaccgtggtgaaaaaatacttgggttgtgttgttcatttgaaatacagttagtctgtttgttcctatcctattccattttaggtttttcctatctttatttaaattttatttatttgtttattttcagcatatgaaacactaacatggctccacgagtcagaactatatgagaagatatgttcagaaaagtgcccctctcctcccctgttccctcttacgcagttcccacccatcccagaggttaacaggcaatttagtttttgtttattcttctcatgtttctttttgcataaatgagcaaatacacattttttatttccttttttacacaaaaggtggcaaaatatattcttttgcactctgttaatcttttcacttaatgtactctagaaatctctctccataccaattggtagcagtctttcttattttttgttgctgtttaatacctcattgtattcactaaagtgtacttcatatgctttcctgtgtatatataggcatttaaggcgtaccagtattttgcaataaaaaacaatgctgcagtgaataattagccatgtgcatatgtatttttgtattattggaggtg

SEQ ID NO: 145127 - DNA, 296 bp, Homo sapiens
ccccccaccaaatgcagtgcatcctacaaagcttttgtgagcatcccacgtttgagagccttcctaggtgctgcgacaaacaaggatgcagtccttgccctcaagggggttacactctgctggggacacaaaatcaacccaagagaaagcagcggttcagagcctactggaatgaagtcaggtggtatcaactgtgtgttggtaattcagtcaagagcccccagggaggattaaaataacttgtagaggagattggcacttgagcagggctcagaaggtcacaggggaagattctt

SEQ ID NO: 145128 - DNA, 538 bp, Homo sapiens
attctagcccaagtgacagagtgagactctctcttaaaaaaaataataataaaaatagtacattgtaagttcctagaggaactaacaagggttcaagcaaaaatatatgtggcaaaaaatcatcaaagaaatgtaaatgctatattagaaaatatttactaagtccaagagaaagcaataatagagggccaaaaaagataagagacacactaaaaatgataaagttggcactcctgaatccagctatatcaataataataataaaataaaagatggtcaaaatatttggacagtttcaccaaagaatacatattaatagcaaattggttcatttaaaaaaaactactaataggaatttagcatggtcgaaagctgctctcagtacagctccaagaacctattttatttccagggaatatgccctagacacagccctacaatcgaccctgtacttctctagttccttttctgaagacagcagagggtaaatagggagcaatagaaagtcatcagagacaatagcccgaacaaaagtgga

SEQ ID NO: 145129 - DNA, 767 bp, Homo sapiens
aacgcagctgccagagcctcctcccccaggagcttgctacaagtgccagaaatctggccactgggccaaggaatgcccacagcccgggattcctcctaagccatgtcccatctgtgtgggaccccactgaaaatcggactgttcaactcacccggcagccacttccagagcccctggaactctggcccaaggctctctgactgactccttcccagatcttctcggcttagcagctgaagactgacactgcccgattgcctcagaagcctacaggaccatcacagatgctctagataactctcacagtggagggaagaacactgtgagcttctctgaactaccaaagtgaagaaactgcctagagcacccacctattttgctctcgaggagaagactcaagttattccaacattattttttgaactaactgttaaacatagtgtataaaggaatgacttcaagttttaaattaatttttggataaaacacaacgtttcagaggaattctgcacttgtaatgagacttagtagataaagaagagaaacagatggtcaaaataaccacaagctgaatgagtggtctgtgcacctgaacccctggcatattgcgttttcttaactgttatgtgttgagtggatagatgatccaagacagggtctggccttcacagtttaggtcactatttttatttctctcattctggtctaaagcaggcatatttggctacaaacaactgctgagatgaagaagagaagcctggagcaaa

SEQ ID NO: 145130 - DNA, 363 bp, Homo sapiens
tgcagtggtgtgatcacggctcactgcaatctctacctcttgggctgaagtgattctctcacctcagcttcccgagtggctgggactacagcgaaatgccagcacaccccactaattttaaattttttttgtagagaggaggtctcactatgttgcccagactggtcttgaactcctggcctcaagcaatcctcccaccttggcttcccaaagtgctgggattatagtggggagccactgtgcttggcctagattttttaatgttaggtcatcacatatttctgccattcattttcaaaggttaaaaacaaaacaaaaacaaatcaagagcttctctgcttcccagctatggcactgaaaact

SEQ ID NO: 145131 - DNA, 732 bp, Homo sapiens
ttcctcctccataaaagttggtgtattcacgtgtcctgggtggtgctgtttaccaagactggtctccctcagttttaatcaccatcctaacactcattgtatggagtagctgggttagaggagaatgcctagggttcagatggtctttctgcatttgtcactatttcctcattttccaagctaggttgagtcatattctgcctggccgactccaaaatggctttaaaggagttagcagtggtctcttttcaactctagttttgctagaatgggagctccatttggtcaaagttttgtctttctggctctgtagtgtattctcagtatttagaagagtgccttgcacactgtgggtactctaactattgaaagagcagaaaaaaatacaggaatgcaatgaaaaggaatgatgaccactaaaaacttccgccccagcatattctggtttccttacatctcagttttctgctctttgctgtcatttttttctctactcgcagactttactgtagtttgtaactgcaaaggtttctcacatcttttagtattagatgctgatttctgtgtcatttccagggttgtggtcacagaaagaagcccacatcatgttagttctccatcttaccagataaagcttagcttaatgtacttctatgccaatttctttgaataactaaactttcaataatttaatcaatcactgattaatccaagatttgtctcagatggggc

SEQ ID NO: 145132 - DNA, 433 bp, Homo sapiens
cgatctagaggatccatctcaggcaggacgacacagggagtgtccgcagaacgggcgcaccgagaacgggaactgctcttcgagtcctacttcctcttcttccttcttggctgctcctcctcctctgctccgtctcgtcctctcctctttcttctcttttctgtgtccttcctccttccttctccaacagcaaggatccgaggggaaggagtccatcactggcctagacaccataccctgaaccgccccccgtggtctcccgctgctttctgccactgcccaagggctggacagcaccacccctcctaattcctaggaattaggcccttcttggctctgtgccctgagccatgttctcctcttggccttgggctctgatcagatgctcagttgtctcccttctctgcttccctcacttgccagggtcaccttg

SEQ ID NO: 145133 - DNA, 349 bp, Homo sapiens
atcactggaagtcctcccaggagggaagagaaagagacctatgacatcaaccttgagctttccttctttgttccttttatggccttcctcactttatgtgagttctgggatatgaaagtgctcaggggtagggaaagctgtaaatccccagggccttgcactataaacttcatttcctccctttattgcagttaactgcccatgaactctattaatattttgcaaattgagatccctaaaacacatgttactgttaattttaacctcatgctaactaggatgtggtcaaattttcacaacaaattccaaggatattttgatatgccttggaaaaatgcatttaaaggtg

SEQ ID NO: 145134 - DNA, 126 bp, Homo sapiens
catggatttgctggtgcagtacaactaggcttaatagggcatgccacactgcacctggtcaagctagtgattaataataataatataagtgaacgtaataaattcccatattccccaaaacaatga

SEQ ID NO: 145135 - DNA, 225 bp, Homo sapiens
cacagctccactgccataggccaggccacaacttggagtgggcctgggagctcagaagtttcggaggacagagaactaggagccaggagcctccaagagccacagcgcccacctcacggagggctggggcagacagctggccccacctgggcaccatgccatacagagacccacgagtgccagagcagccacaggactggggttttgggaacagcagtagaggct

SEQ ID NO: 145136 - DNA, 792 bp, Homo sapiens
gcggcttctgttgtgactcgggcagcctatcccgagggtgcggagctgccgaggagcctgagccgagcggtactccgcagcatcacgtgccagggtggggggctataaaatacccgagccggggcgccgggcgggggacgtgaggaccagccctctccggggacccctttgttcccagcccagacgccaacacctctgcgtccccaagggcttgactgcccgtgtctgcgcggctcccagggcagagcttagaacactagaggagaggggtcgccgcgaactgccggggcttccagccacccacccctctcgacatgtcgcgctccttctatgtcgactcgctcatcatcaaggacacctcacggcctgcgccctcgctgcctgaaccgcaccccgggccggatttcttcatcccgcttggcatgccgcccccattggtgatgtccgtgtccggccccggctgcccgtctcgcaagagcggcgcgttctgcgtgtgccctctctgcgtcacttcgcacctgcactcctctcgggggtctgtgggcgccggcagcgggggcgcaggggccggggttaccggggccggaggcagtggggtggcaggggccgcaggggcactgcctctgcttaagagccagttctcttcggctcctggggacgcgcagttttgcccgcgggtgaaccatgcgcatcatcaccaccacccgccgcagcaccaccaccaccatcatcagccccagcagcctggatcggccgcggcggcggcagcagcagcagcggcggcgacggccg

SEQ ID NO: 145137 - DNA, 184 bp, Homo sapiens
ctctaaccctattaaaacctaggcagatctgactctgcatgtttcctgggcctgctggctttaccagatctaataaagaaagtggttttatctttgctcttactaacactgtcactctctgtactaagggtggtaataagggtgagaagagagtgggatctggaaagctgagcaccagctgttc

SEQ ID NO: 145138 - DNA, 345 bp, Homo sapiens
caaccagaatggcagacagggccttgccggccagcataaggatcttaggccaggagttctccctcctacctgcaccttagaaccatacggggagtttcaagaaaaactgcgtatcaaggctccccgggggactgtgatatgcagccctcgtggagaagcgctagggcagactgcagagttggggcactgcagagttctaaggaaaccatgaagggatcagatgtgggcttcggagacatctgcaggtgctgtaacagagcagcgaggagccagccagagcccagaggtgcctcagcagacagaggtgggggacaagaagctggaggaagacactcatccacacgg

SEQ ID NO: 145139 - DNA, 315 bp, Homo sapiens
caggctgcttcgtccatgcagccttccggattacgccggatgaaccttggtacttcctgccagtaccacttcactcctctatcctcccatctaacgcttaataaaagcctgccggctgggcacagtggctcacgcctgcgatctcatctaattctatttggagcaccactcgcatacctctagcgatggggaactcagcacccctgcagacattacacttttgggtagtttgatgcctagagtgtccctcctttttgcttctactgagccaagatctgtaacgctaaccctaacccctacccctatccaacctcc

SEQ ID NO: 145140 - DNA, 719 bp, Homo sapiens
gggggtttttctcacaccgattatcagttcttcaactctggtgccaactgggtgtcctacagttcaactccattctgacattactcagacttaacacagatcccaaaggcccagggctaggtcccgcaagacggcccccacttcagacaccaggcgtaagctccgggttgcccccgttcttctgactatctgtagatggcagacttccccaacccaccccactgaggttcacatattttactagagcggctcatagcacagaactcaggaaaacagtttactaactattactagtttattgtgaaggatatgactcaggatcggccacatcgaagggatgcttaggcgggcggagggggagggcagggactccagcagcttcatgccctgcctggacgagccacccgcccggcaccttgatgtattcaccaccttggaagctccccaaacccatcctttcagggtttttatggaggattcattcgctaggcatgatggattacatcattggccataggtgattgaatgcgacctctagcccctctgccctccctggaggtggagtggtgggatgctggaggtggggtggtgggatgcttgaggtggggtggtgggatgctggaggtggggaggtgggatgctggaggtggggaggtgggatgctggaggtggggtggtgggatgctggaggtggggtggtgggatgctggaggtggggt

SEQ ID NO: 145141 - DNA, 250 bp, Homo sapiens
taaagtattccagaccggttaactattgtgtcgcgttttctgctgcagtacctgactccagtctcctgaaacagaactcctcccatctattttctctgggtgtcatttactcatcaccctgacttcgtattttcagtaacttttggcagtatttggagggcccattatgtctctgacaacacctgtggtcagaataaaatcctgcttttcatcattttgtacgtgcctattaactcagttatcggtaggg

SEQ ID NO: 145142 - DNA, 210 bp, Homo sapiens
tggagcctgatgggaaaaatcacaaggccagggctcactaccttggccagcagggaaaacagactggaggagtcaagccaaatgtggacacatctgggcaggagacctctctgctgaaacacacatttctgttttattctatctattcagaccccatcttcaactggctctgaaaaagagacctcaccagtgtggtctgatcagtgtgtt

SEQ ID NO: 145143 - DNA, 343 bp, Homo sapiens
gaatattctgttagtctgtggctaatataattttaataaagttaatttaaatctgatagaaaaatgaaattttaaacgataattttagagaatgatattatatccagtcttcttttttcttttaataaatgagggaactattgggggaaaggaataaatacattttctttcattttattaagacaaatttagtaagcagaagaaatttgcatgtttagttataagggtttcttttttccttacaagttggaaaaaataattctaatttaagggtaactctttgacaatgaacactgtgagcagcatctggtactcgttgctttgtttgaaaacgtgagttgag

SEQ ID NO: 145144 - DNA, 396 bp, Homo sapiens
cacagatttttctgccaaaaaatctgaattggatcaagactctaaatctaatacaaatttaaaggaaaagaagttgccagtggaatataataaacaacacaataaggatataagtcagcaaaatccacaaagcaaactccatagggcaaaatatcttaagcaaataaattggaatgtgtgatggttaattttatgtgtcaacttgactgagcaacaaaggtcccagatatttggtcagacattattctgggctggacatggtggctcatgcctgtaatcccagcactttgaaaggccgaggtaggcaggtcacttgaggccaggagttcaagaccagccgggccaacagccaaaccctgtctctactaaaaatacaaaaattatccaggtgtggtg

SEQ ID NO: 145145 - DNA, 566 bp, Homo sapiens
cattggatttctgttgcgtttcctccatgttggagggtgtcggaatagagtctgagaagcagaaggaggtctcacttgaggtcaggagttccagaccagcctggccaacatggtgaactgtctctattaaaacacaaaaattagctgggggtggtggtgcatgcctgcagtcccagttactcaggaggctgaggcaggagaatcacctgagcccaggaggcacaggctgcagtgagccaagatcacaccacaggactccagcaaaagaatcacatgaggtaattcacatgtgagcatatacaaatgaggtagtattatcataactaatagtataagaggatggtaaatagggaaaggagagatatgacacttaaaaaaacctataccaaatatgcaattttgcctagagttggccctagtcttcaacttatagaaaattaaaattcttgcatacatatatatacatgtgcacaaatttatacatacaaaagtagatgtacacacgtatctgtacatatacactcaatattattcatatgtgcatgcatgaatgaacatacacataa

SEQ ID NO: 145146 - DNA, 637 bp, Homo sapiens
tatttcactctattttgggacaagaaaaaggggctctttggggccacttcctgccttcccctcaagtaggatctccagcctgcagagggtgcctagtccttctttgcccaagaaccagtccaagaagcctttcctctgtgcctgggaaatgcaaccttttcttgggagcatggtagggtgttggtgctgaagaaccaagcagcgacccgtcttgtagctgccatgttttgtcgaggggttctgggggtcctgctgctttagagccacatacttccacttcctgattcactactgtgagctggtcagatgcctagaagaggaacaagcgttcaaagtgaaagtgggcacattaccggaatagtgctggggagagtgctggattcttttccaccccaggcggactggtgagaagccaggcttggacctgtcctctgctcctagcttgcacactcagccctaaactcagagcagcacgcataccacccctcacacacaccccaccatctgctgtctaaggcccctgggcttcctgcaggatccagaccaatgtggctgggcttgggcttttatctgtcctgatcctggatttgtcctgaccaatgtaagtgtcgcccaataaaaccttctatgaccccca

SEQ ID NO: 145147 - DNA, 329 bp, Homo sapiens
ataacacttctctcttctgcatcatgtgctatttctataccgcatgttttttccctttaaggagcaagtaagtgggtaatcttatgtaactggtaagtccaaagtggcactggcttcgagcatagtgtccagtagaaatatatgggccgcatcatccagaggcctgaagcaatgtcatcagggctttggctctctcctcccatcactggcttagtttctttgtatttggacagactccctggcaatcaaagtactggcacgctctgactcaaatccctgagctttcagaagcccaggaagtttgttttttttaaagagtctatacctag

SEQ ID NO: 145148 - DNA, 474 bp, Homo sapiens
aagccctaagactctcccaggctcccagccagggaggcactgagccaagactgggcaaggaatgggccaggcccaccagctccccaaccatccggccaggacacagggcagcccctgcctgactgctgtccccaggagcctgcaccaggagccaggaaccatctgagctccaggcctgcatgacaaggctacatgagaaccagtattgattcatttcattcattcactccacaaacacaggtgctcctcgaccctccgtgaggccacgtcctgataaacccgtggtaggttagaaataccgacagctgaaatgctctaatacacttaacccacggaacatcacagctgagccttcttgccttatacacactcagcacacttccattagcctacagctgggcgaagtcatcccccaataaaaagaagaaaaaacaccaaattaacacaacacactaacaaaaacaaaaggggggg

SEQ ID NO: 145149 - DNA, 271 bp, Homo sapiens
aaaagaaggaacaataattgtgccaaaaagagccgcggccacgtatagcctattcgctgcacaaactgtgccctatgtgtgcccaaggacaaacccattaagaaattcgtctctcgaaacatagtggagaccgcagcagtcagggacatttctgaagcgagcgtcttcgatgtctatgtgcttcccgagctgtatgtaaagctacgttactgtgtgagttgtgcaattcacagcaaagtagtcaggaatcgatctcatgaagcccgcaagg

SEQ ID NO: 145150 - DNA, 218 bp, Homo sapiens
accaacattagggtcttaagttttcttgcttttcttgatgttcatgctgggatgttccatcactccagttttcctccaggctcctaaagaacccaatccttttctgtagctttgtaaattattactaccagaaagttcccttttgtgctggtccaacttcaaaattattgaagtcccacttcaaatgttatctcttacttcaaagtcttcccaactca

SEQ ID NO: 145151 - DNA, 425 bp, Homo sapiens
ctcagggatccccaaggctggcctgtggccagttggcagcacaggttagtgattatgtccagagagcttagatgcaaactctgtgatacaaattctagcatttcctggcatcaaaacatcaggcaagttattcattcaccctgtacttctgtttcctcatctgtaaaatggggaccacccttacctcatgggagcactgagagaattaaatgagataatacatgaaacgtgcttagcacaggttgtgacgtatcataagagtttaaaattactggttcaggtccctaaactcatccaatccacaagttttacgctcatgaaaactgaggcccagagaggtggtaagacctcctgggaggcagtgacctgctgccactggagtccttgaatattcacagatcatgacgggccctaagaaggtcctt

SEQ ID NO: 145152 - DNA, 376 bp, Homo sapiens
agagatggggtttcaccatgttagccaggatggtctcaatctcctgacctcgtgatctgcccgcctcggcctcctaaagtgctgggattacaggcatgagccaccgcgcttggcccacagcatagacttttaaagaccatgtaggcaagaacagatctttaaagggaaacctcagtttggcttttgaaagttcatctgattgaagttaaactgatgaaacatactccatccatgcattaccaaaaacgttggagcacggcatggcagtagtatctaaaacagattggcaaactatgggtctaagaatagtttttatgtgtttaaaggattgtaaaaataagcaaagaagaatatgtgacccatgaaacataaaata

SEQ ID NO: 145153 - DNA, 249 bp, Homo sapiens
ttttttttttttcacaagagttcatcggtggcccagacgggagggcaggggtaccatctcagctcacttcaacctcggcctcctcgtttcaagtgattctggtccctcagcctcccagagtgctgaaattacatatgtgagccaccgtgcctggctaagaagggatcgtttaaatttttaaaaataccttaatttatttttatagagacaggatctcgctgtgttgcccaggctggtctcaaactcctg

SEQ ID NO: 145154 - DNA, 435 bp, Homo sapiens
tttgggggcctgcacctgtcctcagggtgcagggccaatgcctccagcctcaggactcccctctcatagcccagactctgaccagctccctgccttgagccagagctggactgagaataaggctttgtttcctgagcatctgagaactggggctctgcaaggcagccagggctggagagaatgagggcgcacaccccagacagcttgtgggtgcaggaatagcctcaggcagacaggagtggagccaagggtagatttaaaacaaaacacaaaattactgatgcctgcaaacaaagtggcttctctcagagaacaatttggaaatggttaagatcatcttggaatagtccacataagataattcttctgaagacctttaggggtgcagctgaatttgtgtgatagaagtaactacacacttggattattttccca

SEQ ID NO: 145155 - DNA, 861 bp, Homo sapiens
  misc_feature (82)..(82): n is a, c, g, or t
  misc_feature (85)..(85): n is a, c, g, or t
gtcgggctacactggtggtctatccgtcaatccgaatccatcgatccatccatccatccatgcatccgtccgtccatccatncanccatccatccatccattatgtgtcccatttatccattcatacatccatccactcatccatctatccacccatacatctctccgtccatcatccatccatccacccatccatctattcatctggccatccacccatccatccttctatctatgcatccatacatgcatctgtccatctatccattcatccatccacccatccgtccacccgtcagtccatctggtcccacttccccctgccgggctgctgcagtcagtgtagagctgggggtggaaagagggatgagcagaggagcttcatgggctgtccctggaaggggaaaaggtggaagctcgtttcttgctgtgggcatgcctggtgtgtctgggaaaggtgaggagttcattattttgagaactgaacgattcatagatggggccgtgggagagaaggatagacaggtagtcaggggctatacctgcagggcctcatggggtgcagtgaggagcctggtttccatcagttgcagtggggacccctgagagggtttggagcaggaagggccatggccatgttgcttttgacacagacgcctttggctgcattgacagaagaggcagggagagaatgagtatggacatggggaagccagtgtggaggtgggggagaccaaatcggagatggaagggaggccaaaggaaagatgggggtggtcaggcccggggtagggtctaggagggaggtgacaatctgggagtcctggagagagagaggaagggacagctggggagagactg

SEQ ID NO: 145156 - DNA, 712 bp, Homo sapiens
cggacgcgtgggctcaccctttcctgagaatacagcctcctcttgctgacactccctctgtgacacagccttttccttggaccttgttggggaccactttcctcctcgccactcccttccagtcacactggcttgatttctgtcctttaattttttttttaatttttattttttgagacagtcttgctctgtcacccaggctggagtgtggtggcgtgatctcggctcactgcaaactctgcctcctgggttcaggtgattctcctgcctcagcctcctgagtagctgggattacgggtgtgcatcaccatgcctggctaatttttgtatctttagtggagatggggttttggcatgttggccaggctggtctcgaactcctggcctcgggtgacccgcctgcctcagcctcccaaagcgctgggattgcaggcgtaagccaccacgccaggctgatttctgtcctttaaacagcacaagcttgttcctacctcagggcctttgcacctgctgctttctctgcctaggatgtcctggaaccaggctgctggcatcaaattcaggctctgccacccattagctctgtcaccttgggcaagtaagatagcatgtctgagcctcagttctctcccctgtgaaatggagaaaagggaacctccttgttcaataggcgaggcatgtcaagcacctgccagagcctagtgatgcagag

SEQ ID NO: 145157 - DNA, 383 bp, Homo sapiens
atgaattttttggtttcccagtgcatacagaaatcatgtttacactatactgcagcaaacctattaagtgtgccatagcattatgtcttttaaaaagtacgtatcttaatgttaaaatacagcattgctaaaaattgctaactatcgtttgagtcttccgctgcttgcaatcgttttgctggtggagggtcctgcctcgatgctgatggctactgactgatggcggggggggtgctgctgaaggatgtggcaatctcttaaaacaggacaaccatgaagtttgctgctttgactgactcagggaaaatttttctgaagcatcccatgctgtttgatagcacgttgcccatgttagaacttcttttaaaattggagtcaatcct

SEQ ID NO: 145158 - DNA, 532 bp, Homo sapiens
ttaagacaaccaggaaaactcaaacgtttactcagaatcaattatcttactaagaagctgtaattgcagtttttacatatgtaccaagcactaaccatatgctcagtccccagcagatgtatgcatcaacgaggcctcaccatcatggtttctaaactatattgctgtcattatttcacattaaaatcattcttatctaatttccaaagatccatattgtgcctatatgtaattggtggattaataggtatttacaattgttgtagggcttcttagttcagctaaaagccaggttcttgtcacatggccatgagaaattaggctcgcagacactttgaaaggtaagaagaatggaatttattgggtgaaaaggaaaaaaagggaaatgggggctcttgcttgctagctggtttcctgcctcacagattgaatcccaggttccaccccagaacagaagaagccaggctggaatcccagactcctctcccatgcaaagggcgcagacttccatggctcatcctattctcccagt

SEQ ID NO: 145159 - DNA, 422 bp, Homo sapiens
tgctcacaaaagctagagataaaaacatcctttaagataggcaggattgtatgaccttcactcaggcctgggtcaagcttgttgggatgagaagatctactttgtgttttttcctcaagcacctcatggctttctgcagcccctcattattctaaacaacacatacatctttccatcatctgtgcaagctgtcaaattgcagagggagcaatttgagtatcagccattgatttggctttgttgcctcacagttccgctctggctttgttctcacgtcagggcaaataatggagagttgacttacacagcaatgagtcccttttacaggcgactttttaaaaagcacaaatgagggtttcatgaagggcaaccactggaaagatttaggaatagttaggacttcccaaagatgcactggataa

SEQ ID NO: 145160 - DNA, 122 bp, Homo sapiens
aaaaggtgccagtcactgctctcatcatattgccctgtgttttaactctggctttcacattctacatgaacacatgggagatgaggtcagaattttaaaacttggaataaaagctgttttgg

SEQ ID NO: 145161 - DNA, 480 bp, Homo sapiens
ataccgacctctgcacagagcatgcctccaccttcaactccacttgtcaaatcctactcatcctcaaaattccaggcaaaatgccactttcttcactaagccttccctggttccttgaattagacaccattgcttcttattttataaaggtccactctatttgggtccttggtcacatcttgcatctagcagtacacttagtttctcacttggtcaggcccccaaaagaatgtacattttttgaggacaggaaccctgtcttattcatcttactttgaactgtatgtaccatgacatcacaagtagccagggccatatgtttaggatgaatgaatgcagcaacttatttctcacaaagtctatacaacctgacttccccaaccaaaaacaacagccatggagcagcagtgcagtgatagagaattcatgggagggagcattcactatgggctgaaatgcccatggtatgtttgatggagg

SEQ ID NO: 145162 - DNA, 653 bp, Homo sapiens
tgtattgattagccaaggcagagggctgttaatcttgcacctgatactctgctataggctctggaagaatataatctagtataaggcacaaataagagacctcaaggtatctgagaactaactttgtgtacatatttgacaaaattatgttattgataattatacatacaggaagaatatatcatgttaatgaactaacattctggaaccatacacattttaatgttgaaagatgataaaaattaagttgaaccttttcacttgggatagaaaaattctcaaggatgtggtgccattttatctgtgactagtagataggattgggtatgtagcaaagggatagtgcttgaagcaggataatatcataaaaagatgcagaataagtatgatttatttggagaaaattacatgacaggggagtgttactgtgagcaagagatccagattagaaagattgtttcattgccatcacaggacatttagacttgattcagtaaccagtggaataatttcacattaatggttgattggaaatttatttggtaggaaagtaggtaacagtttatcgaatgagaaaaaaatagaaaaaaaacatgagtaacttacttttctccccaaattgaaactgaaatggcatgtgtgcattaagaaga

SEQ ID NO: 145163 - DNA, 420 bp, Homo sapiens
ggaattctatgctcacactttgctcagcacacataggcgttctgttgacagttggctctcaacacctcaagtacgtgtcagagggacgcgagccgatcagtttacccaagctccttacttattctcatttaccctctagaattttatttcctgcctcagaaagaagaatcccatctgccagaaggaaatatttgtagccaacatgacaaaagtggaatccctattttgtaacagctgtgaatcaaaacactagtgactgaaattaactacatcgtgcttcggaacagatgtgtgcacagaaaccaactcaagctctggtgttcctgggcaccatgtgtaaatcatccacagacaacacggtgggccatgttctcaccttgttgctatgcacgctcatttttaatgttctcctgaaccatt

SEQ ID NO: 145164 - DNA, 344 bp, Homo sapiens
acagagcactgtcagatcagtgtcacacggaggggcattatgggtgcacctgcctcttccctccccacccctgcctctgcctcagcacaggcctcatctccccacctgggtctcccagcgctcagtgctctccctgccaagccctcaaatgcagatgggaaaatggcaccctcggtgtctccaccatttgtgccgagttcttgcactggagcgcaggtgacatcccaaggtgacacaggggaagacccagggtataaagagccccaggataaacagataaacacgagcaccttccccaggcatctttgttagggggaatatgagagagagcagaatgtaaaatg

SEQ ID NO: 145165 - DNA, 175 bp, Homo sapiens
tgtttaacctgatcacaatcggaaagctacctttgaattcccacgaggtggggtggaaataaccttcctccccttagacactgcagaggttctgaaagttacattaccgatgttaatacccagccttcactaattctacacattcatcagtgctaactgacgaggagggtgagga

SEQ ID NO: 145166 - DNA, 504 bp, Homo sapiens
  misc_feature (457)..(457): n is a, c, g, or t
ggggtagtggtaggaggtcctgttggagagcattggtatccagtaaggatttaaaagtatttatttaacaaagaatagcagaaagtggacggttgattcacacttggtgcaatctcggctcactgcaacctccacctcccaggttcaagcgattctcctgcctcaacctcctgagtagctgggtttacaggcaccagcgaccacgcccgactaatttttgtatttttagtagaaacggggtttcaccatgttggtcaggctggtctcgaactcctgacctcgtgatccgccagcctcggcctcccaaagtcctggaattacaggcgtgagccaccgcgcccagtctgtttttggcttttttgagacaggttctcattctgtcacccaggctagagtgtagaggtgtgatcatggctcactgcagcctcagcctcctgggctcttgtgatcctcctgncttagcctcccaaagtgttgggattacgggcatgagccactggaccc

SEQ ID NO: 145167 - DNA, 364 bp, Homo sapiens
gcatcagcctcccaaagtgcctgtaataggcatgagccaccatgtccagcctctaatacggtttttaagtattctcggatgctcaaaactgatcgcaaaaccggatttcaaaattactatatagtttttgttactgtatttataaaacttagcacattgtggcttttaggttgctgttatggtgaggtcagcttcctgtcttggattttgagtagcttttgccctcctctagaacatggtgtgttcagttagatgctctcccttgatcctttgctcttcagcatgtcctaaacgtctctgttagacagaaccatcagttccacagtttggccccccttgagctccgtgttctctaccaccccac

SEQ ID NO: 145168 - DNA, 210 bp, Homo sapiens
agggtgtcacagttcaggtggccttatgtgggcacttctgtgtccaagggagctgcacttgtggcttgctggtgcagtgagatgggcgccagctgtttccctgcaagcacttaaccttgatgtatctgcactcaggaagaatgctcaggagctcctccaaaacaggtgcaaaatagaaacagggatgatgctgcagcagggctcaaggtc

SEQ ID NO: 145169 - DNA, 263 bp, Homo sapiens
cttctgggctgtagtccagcaaaactgcagtcttgacgtaaatgccccactgccttcacctgagcagggttctgaatccgctttcttaggtttgtaataataatgcggaaagcagctgagctcctctctgtgaatgtggcagcttcgctacctggctacctttgcaattcacatctgaaccattgatttaaacattttatttaaaaatctgaatgcaagagctgctgtttctaattttccatgattgagagtgctctggtttg

SEQ ID NO: 145170 - DNA, 721 bp, Homo sapiens
atgaaaagataaaaaatgagctgaagcagcagcagtgttgaaggcagcctctcagctcttgctcttcttacaccttttccctgaacataaagacacccccttttttctttaggcgatctatacctactctttacttctatcccaacacggtggtgaggacagtgaatcagaaccacattctggactaattggggttctatttcatattgccactcattgctctggccccagggacaccagcaatggccataaaccatggttctacctcaaccatgcagtacccaataagtagtgggtttgatgaaactgggcagagggaggggggaaatattttagtaatttgccttattttattttatttacatatttaattgctataatgttgttgtctattaaaatttcatttgctctggtagattcactgaaaatatatttaacaattgcttaattacctgttgtaatggcatattccgtgtgtgtgtgtgtgtgtgtgtgtgtgtgtgtgtgtgtatgtgtttaaaaccctgtgttataacctgacaggcaacataagcaatcattactttcaggagttcatataaaaacatgaaacaaaagagattttgtgttaaaaacagttgtctacacagaacacacactaaagtcatcctctgctctgttcacccttccagtttttctccgatgaccacagtctacaaggcttgattagaaatggctgcaa

SEQ ID NO: 145171 - DNA, 436 bp, Homo sapiens
tcagacatgttaggtaaaggttcatgtaaaaattgtaaagcctacacagatacaaaggattgttgttaccatccttcataagaaatgtcttattgtcctgaggttaagaaaaaattacttgtagttttttaaattataaattgaaacatatcattgtaggaaaatatgaatcatatataatgtatatgggagaatgtaaaaagcacccatagttgcatcactagataaccattacaaatattttgttgcattgttgtatttatttccttttttcagttctgtgtgtatgtgcacatgtatgcaagtatatgctgtgttacaagatggagatagtgctacacagtcaagttgtatgctgtttccccctgcccccacaacttcatattgtaaacatttccttgagtataatacaaattctgacacctgttgttaatgg

SEQ ID NO: 145172 - DNA, 385 bp, Homo sapiens
gcaaatgatttattaagctaaacaaataagaaggagtatcttagtaaataaggacagttggcatgtatgtaggtgtggtcttgggactttgccacccagaccagggatttgggctgtggggaaggatgatgaccatctgctccaagtgactcctactggctgatacacagagctcagttggcatcagtctcagaagagactgccagcctcccaatcagaaaataagcaaaacaatggcattgctgtcaagcacagaaatgaagtttaagatttaagtaataagtggcgactcagaaagggtcagaaaccttagagtgtaatccagacagatataagttggcttgattgtgaaatggaccatcctgacagttaatggaggatactt

SEQ ID NO: 145173 - DNA, 407 bp, Homo sapiens
gtcgaggatccccggcgcgctgagcagatacacccaatcaactcaaacacactttcttgctgagcctgctcagaatcgttcaagacagcactccaggaaacctctgtcaacaaatctaagtatttgccacacgtgttagccagatttgaagtacagacagcggaatgacacttatcccaacgcctcccttcctctcccatcctgacacatgagaaagctgaaaccaagagaaatgaagttgcctgcttagtttcaatagcaagtgtagtagtagaaataaaccaaagcccggtttctgggaccttccttttttaggtcctgaacttctataattcattcagacatgacccttcattgacatgttattaaattaaagacatactgcaggggaaggacgatgagtccct

SEQ ID NO: 145174 - DNA, 173 bp, Homo sapiens
tacaaaatgtctggtggccctattgtcacaaaacctgtataaaagtaaattcacaaatggctttttagaactgatgacaaaaagttactcgttatcacttttctacttaatttcctaaaagggcaatttgaaatcacactaggattctcacaattttggttgacactcaagta

SEQ ID NO: 145175 - DNA, 863 bp, Homo sapiens
tgagtagtgaggactggaggcgagtgtccccacacctgcctaatttttgtatttttttgtggaaatggggtttcaccatgttgcctaagctggtctcaaactcctgggctcaagcaatttgattgccttggcctaccaaagtgctaggataacggacttgagccactgtgcctagtcctgtcactttctgaaaaatcctatgaagcattaatagaagtaaaatcacacttaattatgcctgtttttaaatctgcatattgtttgattaatcacatcttttggccaagttgaaggcataatttatatattgtctataagaatcaataaactagtttctaaatatgttttaaataaataatttaaaaattaatttctcaaatatcctcaactataaagttagacctatttactgtttcttgtaggagcctattgctgtcaaaaatatctgaagttctattcagagaaaaatagaaatgcacaatgactgggacttaagctgaggaaagtcagcaacactgttcccatcattctaccataaatgtggcaaaatcttattgtttgtgacagatctatagaattagattttcttatatctaaagaaatatatataaatacataaacgtaggtatgtatagcatgaacagaatacagtgctatttgaccattgtcacaagacttatttataaaacctcctcaagctcttgccaatatcttagttaagattgcatctaaggtgggaggaggatgaagattgaagaactgtcaggtaatgcttgattacctgggtgacaaaattatgtttacaccaaacccccatgacacacagtttacccatgtaacaaacctacacatgtcccccttga

SEQ ID NO: 145176 - DNA, 163 bp, Homo sapiens
ctgggtatctgtctgtctgtgtttattctttcctttagtagtttggctggctggctcactgtctctcaggctgttttcctctctctctttctgtcacaatgtcaccattttaaagtgaacaattcagtggaattaagtacattcacactgtgcatgcaagcac

SEQ ID NO: 145177 - DNA, 472 bp, Homo sapiens
gcttagagccccaaactcctggggttggtcccatgtaagcacgacactaacatggttcttgggcccaaactgcagcaaagtaaacagatgtgggcttaacagcctccaggaatggaggaggcaaggggagaagggataagcagttgtcaaaggcaaggatgagagacagaagagagacaagggacccttgctacccactgatttaaagggccaggtcccaaaccctaagcacccatcatgagtcatgatcataatctcacactatccttagaaatggacagtagcacctgaaccaccattgatgaaagcccagaaaagatttgacttctcattgttatttgagtttgggactgaaagtttagatctatattatcatttgccagagataatattttaatttgttactatgtcctgctgataccttagctctacccaacctcgcttcccaccccctactcatgagaatcaaaga

SEQ ID NO: 145178 - DNA, 408 bp, Homo sapiens
gttaatggatgcctagtacaatgtaataaaaaaggatgcaaatacagattttatagatatggtaggttgagggccttggcttttaccatcttcatgaatcagaaagccatcagacaaactgtttatggcatcgacggatgaggaaaagcagtgatgtggaatagcaaggggaataagtgaaaagggtgactatcaattgcttcatagcatcatgatcctagcaaatactgagacatatggttacacattgctcacttccattgtacatggttataatacatgcacaatgtatgaatatacattggtagagactcagaaccagctttcaggaaagttccatgaagaattcagaaagaggggtgttctgttactacaaaatacaagttatgtggtgataacaaaggtttc

SEQ ID NO: 145179 - DNA, 388 bp, Homo sapiens
caatattccatctcaaaaaaaaaaaaagaaatggtgttccacagaaaaaaataaagcagttagctcagcttacaactcaaaaaactacaaatgcttttcttttctccaaaataaccaacacactagccagtatgcagtaaaaagtgctttctccagcactttgggaggctgaggcacatgcatcgcttgagctcagaagtttgagagcagcctgtgcaacacagtgagaccttgtcactacaaaaaaatacaaaaatcagccaggcatgatggcgcatccacttgggaggtcccagccacttgggaggctgaagtgggagaacagcttgagcctgggagccagacgccactgcactctagccttggcaacacagccagaatctgtctc

SEQ ID NO: 145180 - DNA, 264 bp, Homo sapiens
aattagttggaggaatagagagaaatgtgtatactctgtcttgtccagaaccagaaatctagttcacctatttctgttttcttgaatgatctgggttggctttttaagtctttgaggctccgtgttgcactcacctaattttagctcaataagatcatgttactgagtctactactctgtacatcaagggctgtagtggctcaattttttttttcaaagatcaaattttcaaagtccatatatttttatcaaatatgcccttag

SEQ ID NO: 145181 - DNA, 358 bp, Homo sapiens
ctgctgtaccccttccgagtcagagcgttaggagttgtttcatggtctgctttattctctgtgggtgaatttggatgcgctggtagccccggctttgtattttaatccagttttgggcagcaaaacctcttcaatgaatcaggtgtcatttgagagccatgtgtggatgtgtgatgatgctgggatagataaaaatagctactgtgtatatttctttttaaagggaactggagggaaacacatcagcatgttagtaagtggtctgttgtccaggtggtgaaatttcagatgattttcatttctcgtgcctgtgtctcaggtcctctggaaggcagacaccagggtggcattggaggtg

SEQ ID NO: 145182 - DNA, 425 bp, Homo sapiens
atgccccaaaggattataaacagaatgagtaactggaagttcaaatgccatccagcactgaaattgtccatctggaaaacagcagctttgatttttcagtcatcagtatgttgagatggatatttacaaaatccatgattattccctcaggagggaagctgcttataaaacaacttctgaggattttctggtcagagtccttctggaatcacgaatattttatgttttcaagggcgcctctgtcagatacctcaaggagagagccttttaaagtccttcgacaatgctcctattacttccctgcgggcggctccgactgttcagctctacataattttgctcaggtacctgtttacatgtttagagccatccgatatgaggctaaacagctgtgatgactgcaggctctttgtggcaacctgctg

SEQ ID NO: 145183 - DNA, 444 bp, Homo sapiens
tataaaaaatatatgctatctgccagggatgctgtgagaattcaatatgataatattttaaagttccctatgcaatgtagagcacacagtaagaactcaataaagcaaccatacataagatctggccaagtcaacttctctacagctttgacctggatatgagtatctttagatacaggactttcagagctgaatgcaatgttaaagattttaccatcaaatcccctcacttagaaaaagggaaacgttgaggttgaatttctgggtccctgaactcttttcactttctgtccagagaggaggtcataaccctggctgtcctttctggatttgggggcacacttgaggggtagggtcgggggagatagatcccaggttggagttcagtgttgcctaagtcattggtgatatctctcatctccttgggcgagaggaatctgggag

SEQ ID NO: 145184 - DNA, 103 bp, Homo sapiens
cagtgcgtttactgtcatgggttgcgatggggaagagcaggtgctggggggcagcaactcgcctcggaggactcaaagaagtgtcttaccagagagcattaag

SEQ ID NO: 145185 - DNA, 352 bp, Homo sapiens
tgtgctcattgtaccccatgcctggggcgtgatgctgctgccagcaggtggatgaatgagtgagtgggtgagtgaaagataagaacccagaagttcaaagccaaggccagggcttcattgctgaccagctgcctgactttaggtatgtgagcttcacttccctgtgcctctcacccctcgtcgaacaggaataatagcagccccgactcaccatgtggttgcaaggatgagctaagatcatgtctgtaacaaacagcgtgtaaataaacaactctcagaactctcagagccccctccgtatcatagcctggtctcagacgtggttaattcaaccagaaaaagctggaacagg

SEQ ID NO: 145186 - DNA, 314 bp, Homo sapiens
catgcatgcctgtgtctctctgcgtctgtgtgccttgggagtttgtttgcatatctgtgtgtgtgtgtgcgtgtggcagtggtgtttctgacttatcttagaaccacgtgaggacaccatgcttccccgcccagtcgcccccacaccccagcagcactacgggcctccctgcaccctgcagctgcatgcaggaaggcagcagtggcttcaggcagctcctgtcaccccctccatggtcctcgtacccgctgccctagaacgcctcttctggctgtttctcgccagctttctctgcacgatcagacgtggtggct

SEQ ID NO: 145187 - DNA, 664 bp, Homo sapiens
tgcaggacctgggaactgggggttggtgcatgtgtgcacgcacgtgtgtgtgtgtgtgcgtgcgtgctgggtgggtagggaggaagctgtgaaaccacatcccctcctctctgctgctgtgttgctgtgtgtttcagcagcacgtgggtgtcaccacacttcctagcaggtgtcaacctccaagactgttctgggctcttctcccagttggctgagttggaggtgggagtcccaactgtcccctgtggcttccagagtgggaccttgctgtgggataggctggccaatggtgctccctcccctgtgacccttctgttgggtgggtcacgaggaaggactgtgggtgttgcccacagacaggtggacatgtggcaaggacaccttgggaccttctttctgacgccccttgaagggggcactttctcagctttgagatgagtctctgtggatgtgggaagttcactatctcaagagcagcagccttggaaaatccaacacagaaccccgagtaggggcgggaaggggtcctgtcccgctcactggctgcctggcagagttctgcacaaggaagcgcctgtgttgctgtgggcggaggaatggactgagggctacattcgcttcctgttgccgctgtaactgcttatcacaaactcagtggcttaaa

SEQ ID NO: 145188 - DNA, 200 bp, Homo sapiens
atattattgtgttttgtctttagggcatctgatgcccctgaggaccagcctgcgggatagtctgtttttgcagggtttcttggccagaatcagaagagtgggattcaggacaaggccagttcacgtaacatagctcagagccatacaacacaacttgctccaaggatgttgggcattgtgcttcattaggaaacaaaata

SEQ ID NO: 145189 - DNA, 368 bp, Homo sapiens
aaacacagcagattctttttcaatttagacaaagtcatagataaacaatagaacattggatgttagtgtatatcgttttgtaacttgagctcctttgtgatgagacaaattcattttgtacagagaaagaagctagcagttttcaaggatctattaaattgtcaggcacaggacatatgtcatctcatttttaattctggaaacaactcattgagacataggaattatccacaatttacaaattactacctggaggtgtagagagatttaataacttgttcaaagtcatacagttgaggaggggcagcacaggaattcagacccagaactgcactccagcctgggcacggcacagagcgagactctgt

SEQ ID NO: 145190 - DNA, 285 bp, Homo sapiens
cttccctcacgcgagccgagaggccagcctggccaggacccatgtcaccagagcctttgttcaccaagtccagacatccaatttaggatgacatcatggaatccagcctggaatccttgttatgccccattttctttctttcttcctttccaagggttttgtttcttcttgaggctgcagaaacagaggctcacacacatccccaatttgctaagaatatttctaaacccttctcatcacaggccatcccctgcgtctgggcacttcataaataattatttactc

SEQ ID NO: 145191 - DNA, 211 bp, Homo sapiens
gagattgaacgaagagcgggttgaaaatacagtgttgaggtatggtggctcacacctgtaatctcgcacttcaggaatccaagcaggaggatcgcttcaggccaggagttcaagaccagcctgggcagcatagagacctcctttctactaaaaatttgggggaaaaaaaaaattagctgggcctcggggcccgcacctgtagtcccaccta

SEQ ID NO: 145192 - DNA, 305 bp, Homo sapiens
ggaactggggatttggcaccatctaatctagtcatttttacaaccccaagagaattgcatgtcatttccgctcttcagaggaggagctaaggtctgagagaccctgcagtcaccccagtacaagtcaggtgtacccgcctggccatactcagtgccctgggagctgggcccagcccataaaacctgtgctttgcagaaggcaccagagacaccagggtggtggcaggttactgtttctagaagagcaaaaccaatgcaagtgaataagccaccaccttgttagccagtgggagtttctctgggtg

SEQ ID NO: 145193 - DNA, 362 bp, Homo sapiens
caatcagggtttgttttcgtagcgtcactcctcagggaaaccgtagtagccaacaagcttggagctgctggagtttccaaagatctctggatcctgtagtcctcctcccgcgccagccaccgaagaacgctgcggacccagctcgctcctggtagcaagacccgaactgtaaggaacaaaaccctcgtgaaagaggagcaaacctttcacttcgctgcgttttaagacgaaagttagggtgggtttcgcttccaagttgaaggggcatgattttcccagaacttttttttaagaaggaaatattttatcagcataaaacatcagagtcgtggcagcagcccaaaggaaatcctttttctttc

SEQ ID NO: 145194 - DNA, 369 bp, Homo sapiens
caaggagttttaattgtcatatgtattggcaggtccgtacaacgtggttttagttataatgcagtcacatggtccccaaaggtcatgtttattgaggccccagttgaaaaatgaatagggagtgatagagccatacatcaaatatccttgttttcgttgttacttaggttattgactaagtacataatgcaagttgacattcatgataattctctgaaatacatagtgaactaaacatttaacacgcatttttctatttttgattatgaagatatgcccagtaatatgaaagccttggatgaaaaaataaattctgtggaaccttgtttataaatttacagaaatggtttaaggcaataagttgaagtc

SEQ ID NO: 145195 - DNA, 313 bp, Homo sapiens
tgtccagattgttacgcggctcgatctgactacgcggctcgattactacgcggctcgatctgactacgcggctgtgggtggtgcagaattggcggggtggtccgaactggctctccagcagggtcgcctcactccacagcaggctctgtggggacagatgcagctgcccagtgcccggtgggaatgtggccgggggctggagcgcctagcttaacgcatgagaaccaagacaagacgatgcttgaacatcgccctccccagttctgtgtgtaaccacttgtttctggtccctggcactacccaacagaccctg

SEQ ID NO: 145196 - DNA, 522 bp, Homo sapiens
ttgaccaaaataatcatattgtatttttcctattcagagggccttgaacaataaactgaatgagtgtgggggcagaccctgtactttcctagaatgttgtgcgcaagatggtgagcattgaatactggcatgttaatagagtagtgaaagaatagagtagaagcctatctatgttctctggcgaccttcctataagcaggccactttctgaataaaagaggagcaagtgacagaaaaatctaatgcatgcataagacagaaccataagacaaataactaccaacaacagcaaaaacaaaccaatttcaaggagccagagcaattttgcataaaggatggagctgcaagcaggaggataagcatcatagatagaaaaatattttgagctaaccaagacatttgaaggatcccaagatccatagctaaaaaagaatcaatgggcaatcagggcccaagaattgtactaaaaatctataaaaatggaaagagctcacctatcaaactgacatttaaaaaaaataa

SEQ ID NO: 145197 - DNA, 754 bp, Homo sapiens
gttgctccactcggccaccctcgacgacgcgagcgatttagattggtgtcagtatctaggatctactccaagtgaccaacagcaaaacaaattacgaagttcatagacgagatttgttcaacactgcaattgtttgttagatgtaaaccctgtgactatagtacgttgcttcttgttcttcacaattcatgacttaagtaccaaaatgcataccagttattatatattgccaagaattaaatgataaacttagagactgattagactgaaaatgcctaatcgatatatatattcttgtgcctagtactttaccacaaatacagtgtaatatcatcagtccaaaactgcattacttttgtaaaaacactggttaatttgtataagatattatagagctttttatgctttagaagttaaacaatatctttgggggggaactaatttattttcatcacttgaaatgtggtagctcttacaaagtttattgatttgatttttttaaaaatcaaaagccaattgaacaacaggatatatagactgataaatatttaggctgaatagtattttaacacttgtcttcaacttgatttgtctgtttaattgaaaagaattataagagttactgttgcattttctgacctactatttttaaaattcctgttgagtttctttgtgtttacaaggaaaggactgaactttttctcatcaaaactagcttttttccccacaaataaattatcaggttaaactttca

SEQ ID NO: 145198 - DNA, 792 bp, Homo sapiens
gaggaggtcggctttgttctcgccccgccctctccccgcctcctccctagatatcgcgagagggcgggtccgcttggcttcggcgtcgcgtcgctcctgcgctggagctctaggccggcgtctctccgcgagccgcgggtcaagtgccagtggctaagggtgcgcgagtagccgccacccgttcggcgttggctctggcgtcggggtcgttgtgtcgtgacaaccgctgcggtagccgtttccgaggcagcagttgcggccgctttagccctgagcgggatctgcggctgcctgcgagtctctgctgtgccgacccttctcttcgcggaccccacgccaagcagcgaccctgagccgacagccggagcgcccggcaatggcggcctcgacggcctcgcaccggcccatcaaggggatcttgaagaacaagacctctacgacttcctctatggtggcgtcggccgaacagccccgcgggaatgtcgacgaggagctgagcaaaaaatcccagaagtgggatgaaatgaacatcttggcgacgtatcatccagcagacaaagactatggtttaatgaaaatagatgaaccaagcactccttaccataggtaatgttacgtagacgtcattcctcttgtgacttacttccattttgcatttcatatgaacgtctggataacagcctatttgaatttgttttattgtagatttgttactggagcactagtgaagtcagtaacctaactgcaatttgtttagtaatggtttaagtgatgtgtaagtttaaaattaag

SEQ ID NO: 145199 - DNA, 3494 bp, Homo sapiens
gaggaggtcggctttgttctcgccccgccctctccccgcctcctccctagatatcgcgagagggcgggtccgcttggcttcggcgtcgcgtcgctcctgcgctggagctctaggccggcgtctctccgcgagccgcgggtcaagtgccagtggctaagggtgcgcgagtagccgccacccgttcggcgttggctctggcgtcggggtcgttgtgtcgtgacaaccgctgcggtagccgtttccgaggcagcagttgcggccgctttagccctgagcgggatctgcggctgcctgcgagtctctgctgtgccgacccttctcttcgcggaccccacgccaagcagcgaccctgagccgacagccggagcgcccggcaatggcggcctcgacggcctcgcaccggcccatcaaggggatcttgaagaacaagacctctacgacttcctctatggtggcgtcggccgaacagccccgcgggaatgtcgacgaggagctgagcaaaaaatcccagaagtgggatgaaatgaacatcttggcgacgtatcatccagcagacaaagactatggtttaatgaaaatagatgaaccaagcactccttaccatagtatgatgggggatgatgaagatgcctgtagtgacaccgaggccactgaagccatggcgccagacatcttagccaggaaattagctgcagctgaaggcttggagccaaagtatcggattcaggaacaagaaagcagtggagaggaggatagtgacctctcacctgaagaacgagaaaaaaagcgacaatttgaaatgaaaaggaagcttcactacaatgaaggactcaatatcaaactagccagacaattaatttcaaaagacctacatgatgatgatgaagatgaagaaatgttagagactgcagatggagaaagcatgaatacggaagaatcaaatcaaggatctactccaagtgaccaacagcaaaacaaattacgaagttcatagacgagatttgttcaacactgcaattgtttgttagatgtaaaccctgtgactatagtacgttgcttcttgttcttcacaattcatgacttaagtaccaaaatgcataccagttattatatattgccaagaattaaatgataaacttagagactgattagactgaaaatgcctaatcgatatatatattcttgtgcctagtactttaccacaaatacagtgtaatatcatcagtccaaaactgcattacttttgtaaaaacactggttaatttgtataagatattatagagctttttatgctttagaagttaaacaatatctttgggggggaactaatttattttcatcacttgaaatgtggtagctcttacaaagtttattgatttgatttttttaaaaatcaaaagccaattgaacaacaggatatatagactgataaatatttaggctgaatagtattttaacacttgtcttcaacttgatttgtctgtttaattgaaaagaattataagagttactgttgcattttctgacctactatttttaaaattcctgttgagtttctttgtgtttacaaggaaaggactgaactttttctcatcaaaactagcttttttccccacaaataaattatcaggttaaactttcaccaatgtctgctctgttttttgtttttggggggtttttgtttgtttttgttttttaatgtttttggtacactgggcagacttcagagcagttttttaaaaaaataaatattctaatgtagctatctcgccattccctttaaatacctgtcttaacctcctgcttttctttcctactcctttccacacatacgcacacaatcttctaccttttaaaggatcattaagactgtcaccacattaggagctctttctctcactcttctgtcatttgctgctatgttgaaattcttattttgaccatcaatgcctatgaattcttctaatacgtgaagaaaatagtttgagtagcagcagtgctataggtgggaaatacagtttagctgctgaatttctatacctctctgatttacagattgctaattaaatggctattattagtttggattaattagacttaagaaaacaactaactgagggttttttttgtttgttttttgagggttttctttgcatgagaattgtatgtaaccagtgatatgattattcctgaatgtacagacagaagtaagcctggacattgttaaatagtccctgctttaagggactacgataatgtgtactatgacaaacgtgctttattcttctaacgcagtaagaattaggtggaattttttccttcaaccaagtgcaggaaagccctgtgtgtcttggtttagttatggtttcatttctagccatacaattgatgaattgtgtacaacttttgttagtaccaaaataatctgttatatgaacagacttctaaaataacgtctgtatattttatatatagatacatatatgaaagaaggcttttattgaacagcttatcttccacttgcaggtttatggaaacagcagtatttgaaaataaataaaaagtgggagaattccttgctgttagaagaatgtggccattattttgattttttgaatgagatatataatcaaagtactgctgaactgtgagtgcagtattctaaacatttcagctaggaataccactgatttagaaacaaaactgtttgtctctggtttctgaatttaaaatgttgggattacctgtttaaatctgtcttgggggatgtagagattaagtctgtacatgtgcgtgcacatatattcatgcaccctctgattttggttttcttgtttctgagttcttagaaagtacccacatactcttttttttttttttgtagaagtagctgtcatagagtgaagaaaaggataagactttaaacagttgattctttttgtgttttctacaaactattttttgaaatttaaatcacaaactcattttctggtttttagaaagtagatgatgatttcagaggagtaaggcatgccaagcagcatgctcagtggggttttaggctgtcacatgcagctgagaaaaggtatgttcaagtcataagtaggtaattgatagggtatgaactagtcaaaatatgaaccattatgattcaagttagattttcctctggagagacagatctgaatgttcagttctagccaaggtagattttactttcaactttttaatcagtatcactttctgtgcttaactatttggtgttaccttgtctgttttcatttgtctaaaattctgcagagatgactaaaatttgacataatggtgtaaatggattgttaaggtaactttcagttgaagattaaagcaagatgccattttccccatgactttggttttgtttacatttttccctttcagttagtatacactacacgtactgtaataaaatacaataatatgacaaaaaaaaaacctcggccgaattctggcct

SEQ ID NO: 145200 - DNA, 1642 bp, Homo sapiens
gaggaggtcggctttgttctcgccccgccctctccccgcctcctccctagatatcgcgagagggcgggtccgcttggcttcggcgtcgcgtcgctcctgcgctggagctctaggccggcgtctctccgcgagccgcgggtcaagtgccagtggctaagggtgcgcgagtagccgccacccgttcggcgttggctctggcgtcggggtcgttgtgtcgtgacaaccgctgcggtagccgtttccgaggcagcagttgcggccgctttagccctgagcgggatctgcggctgcctgcgagtctctgctgtgccgacccttctcttcgcggaccccacgccaagcagcgaccctgagccgacagccggagcgcccggcaatggcggcctcgacggcctcgcaccggcccatcaaggggatcttgaagaacaagacctctacgacttcctctatggtggcgtcggccgaacagccccgcgggaatgtcgacgaggagctgagcaaaaaatcccagaagtgggatgaaatgaacatcttggcgacgtatcatccagcagacaaagactatggtttaatgaaaatagatgaaccaagcactccttaccatagtatgatgggggatgatgaagatgcctgtagtgacaccgaggccactgaagccatggcgccagacatcttagccaggaaattagctgcagctgaaggcttggagccaaagtatcggattcaggaacaagaaagcagtggagaggaggatagtgacctctcacctgaagaacgagaaaaaaagcgacaatttgaaatgaaaaggaagcttcactacaatgaaggactcaatatcaaactagccagacaattaatttcaaaagacctacatgatgatgatgaagatgaagaaatgttagagactgcagatggagaaagcatgaatacggaagaatcaaatcaaggatctactccaagtgaccaacagcaaaacaaattacgaagttcatagacgagatttgttcaacactgcaattgtttgttagatgtaaaccctgtgactatagtacgttgcttcttgttcttcacaattcatgacttaagtaccaaaatgcataccagttattatatattgccaagaattaaatgataaacttagagactgattagactgaaaatgcctaatcgatatatatattcttgtgcctagtactttaccacaaatacagtgtaatatcatcagtccaaaactgcattacttttgtaaaaacactggttaatttgtataagatattatagagctttttatgctttagaagttaaacaatatctttgggggggaactaatttattttcatcacttgaaatgtggtagctcttacaaagtttattgatttgatttttttaaaaatcaaaagccaattgaacaacaggatatatagactgataaatatttaggctgaatagtattttaacacttgtcttcaacttgatttgtctgtttaattgaaaagaattataagagttactgttgcattttctgacctactatttttaaaattcctgttgagtttctttgtgtttacaaggaaaggactgaactttttctcatcaaaactagcttttttccccacaaataaattatcaggttaaactttca

SEQ ID NO: 145201 - DNA, 3075 bp, Homo sapiens
ggcgtgctgcggtcgatctgagatcccaacgatggtctcagctctacgacttcctctatggtggcgtcggccgaacagccccgcgggaatgtcgacgaggagctgagcaaaaaatcccagaagtgggatgaaatgaacatcttggcgacgtatcatccagcagacaaagactatggtttaatgaaaatagatgaaccaagcactccttaccatagtatgatgggggatgatgaagatgcctgtagtgacaccgaggccactgaagccatggcgccagacatcttagccaggaaattagctgcagctgaaggcttggagccaaagtatcggattcaggaacaagaaagcagtggagaggaggatagtgacctctcacctgaagaacgagaaaaaaagcgacaatttgaaatgaaaaggaagcttcactacaatgaaggactcaatatcaaactagccagacaattaatttcaaaagacctacatgatgatgatgaagatgaagaaatgttagagactgcagatggagaaagcatgaatacggaagaatcaaatcaaggatctactccaagtgaccaacagcaaaacaaattacgaagttcatagacgagatttgttcaacactgcaattgtttgttagatgtaaaccctgtgactatagtacgttgcttcttgttcttcacaattcatgacttaagtaccaaaatgcataccagttattatatattgccaagaattaaatgataaacttagagactgattagactgaaaatgcctaatcgatatatatattcttgtgcctagtactttaccacaaatacagtgtaatatcatcagtccaaaactgcattacttttgtaaaaacactggttaatttgtataagatattatagagctttttatgctttagaagttaaacaatatctttgggggggaactaatttattttcatcacttgaaatgtggtagctcttacaaagtttattgatttgatttttttaaaaatcaaaagccaattgaacaacaggatatatagactgataaatatttaggctgaatagtattttaacacttgtcttcaacttgatttgtctgtttaattgaaaagaattataagagttactgttgcattttctgacctactatttttaaaattcctgttgagtttctttgtgtttacaaggaaaggactgaactttttctcatcaaaactagcttttttccccacaaataaattatcaggttaaactttcaccaatgtctgctctgttttttgtttttggggggtttttgtttgtttttgttttttaatgtttttggtacactgggcagacttcagagcagttttttaaaaaaataaatattctaatgtagctatctcgccattccctttaaatacctgtcttaacctcctgcttttctttcctactcctttccacacatacgcacacaatcttctaccttttaaaggatcattaagactgtcaccacattaggagctctttctctcactcttctgtcatttgctgctatgttgaaattcttattttgaccatcaatgcctatgaattcttctaatacgtgaagaaaatagtttgagtagcagcagtgctataggtgggaaatacagtttagctgctgaatttctatacctctctgatttacagattgctaattaaatggctattattagtttggattaattagacttaagaaaacaactaactgagggttttttttgtttgttttttgagggttttctttgcatgagaattgtatgtaaccagtgatatgattattcctgaatgtacagacagaagtaagcctggacattgttaaatagtccctgctttaagggactacgataatgtgtactatgacaaacgtgctttattcttctaacgcagtaagaattaggtggaattttttccttcaaccaagtgcaggaaagccctgtgtgtcttggtttagttatggtttcatttctagccatacaattgatgaattgtgtacaacttttgttagtaccaaaataatctgttatatgaacagacttctaaaataacgtctgtatattttatatatagatacatatatgaaagaaggcttttattgaacagcttatcttccacttgcaggtttatggaaacagcagtatttgaaaataaataaaaagtgggagaattccttgctgttagaagaatgtggccattattttgattttttgaatgagatatataatcaaagtactgctgaactgtgagtgcagtattctaaacatttcagctaggaataccactgatttagaaacaaaactgtttgtctctggtttctgaatttaaaatgttgggattacctgtttaaatctgtcttgggggatgtagagattaagtctgtacatgtgcgtgcacatatattcatgcaccctctgattttggttttcttgtttctgagttcttagaaagtacccacatactcttttttttttttttgtagaagtagctgtcatagagtgaagaaaaggataagactttaaacagttgattctttttgtgttttctacaaactattttttgaaatttaaatcacaaactcattttctggtttttagaaagtagatgatgatttcagaggagtaaggcatgccaagcagcatgctcagtggggttttaggctgtcacatgcagctgagaaaaggtatgttcaagtcataagtaggtaattgatagggtatgaactagtcaaaatatgaaccattatgattcaagttagattttcctctggagagacagatctgaatgttcagttctagccaaggtagattttactttcaactttttaatcagtatcactttctgtgcttaactatttggtgttaccttgtctgttttcatttgtctaaaattctgcagagatgactaaaatttgacataatggtgtaaatggattgttaaggtaactttcagttgaagattaaagcaagatgccattttccccatgactttggttttgtttacatttttccctttcagttagtatacactacacgtactgtaataaaatacaataatatgacaa

SEQ ID NO: 145202 - DNA, 3371 bp, Homo sapiens
gaggaggtcggctttgttctcgccccgccctctccccgcctcctccctagatatcgcgagagggcgggtccgcttggcttcggcgtcgcgtcgctcctgcgctggagctctaggccggcgtctctccgcgagccgcgggtcaagtgccagtggctaagggtgcgcgagtagccgccacccgttcggcgttggctctggcgtcggggtcgttgtgtcgtgacaaccgctgcggtagccgtttccgaggcagcagttgcggccgctttagccctgagcgggatctgcggctgcctgcgagtctctgctgtgccgacccttctcttcgcggaccccacgccaagcagcgaccctgagccgacagccggagcgcccggcaatggcggcctcgacggcctcgcaccggcccatcaaggggatcttgaagaacaagacctctacgacttcctctatggtggcgtcggccgaacagccccgcgggaatgtcgacgaggagctgagcaaaaaatcccagaagtgggatgaaatgaacatcttggcgacgtatcatccagcagacaaagactatggtttaatgaaaatagatgaaccaagcactccttaccatagtatgatgggggatgatgaagatgcctgtagtgacaccgaggccactgaagccatggcgccagacatcttagccaggaaaaaaaaagcgacaatttgaaatgaaaaggaagcttcactacaatgaaggactcaatatcaaactagccagacaattaatttcaaaagacctacatgatgatgatgaagatgaagaaatgttagagactgcagatggagaaagcatgaatacggaagaatcaaatcaaggatctactccaagtgaccaacagcaaaacaaattacgaagttcatagacgagatttgttcaacactgcaattgtttgttagatgtaaaccctgtgactatagtacgttgcttcttgttcttcacaattcatgacttaagtaccaaaatgcataccagttattatatattgccaagaattaaatgataaacttagagactgattagactgaaaatgcctaatcgatatatatattcttgtgcctagtactttaccacaaatacagtgtaatatcatcagtccaaaactgcattacttttgtaaaaacactggttaatttgtataagatattatagagctttttatgctttagaagttaaacaatatctttgggggggaactaatttattttcatcacttgaaatgtggtagctcttacaaagtttattgatttgatttttttaaaaatcaaaagccaattgaacaacaggatatatagactgataaatatttaggctgaatagtattttaacacttgtcttcaacttgatttgtctgtttaattgaaaagaattataagagttactgttgcattttctgacctactatttttaaaattcctgttgagtttctttgtgtttacaaggaaaggactgaactttttctcatcaaaactagcttttttccccacaaataaattatcaggttaaactttcaccaatgtctgctctgttttttgtttttggggggtttttgtttgtttttgttttttaatgtttttggtacactgggcagacttcagagcagttttttaaaaaaataaatattctaatgtagctatctcgccattccctttaaatacctgtcttaacctcctgcttttctttcctactcctttccacacatacgcacacaatcttctaccttttaaaggatcattaagactgtcaccacattaggagctctttctctcactcttctgtcatttgctgctatgttgaaattcttattttgaccatcaatgcctatgaattcttctaatacgtgaagaaaatagtttgagtagcagcagtgctataggtgggaaatacagtttagctgctgaatttctatacctctctgatttacagattgctaattaaatggctattattagtttggattaattagacttaagaaaacaactaactgagggttttttttgtttgttttttgagggttttctttgcatgagaattgtatgtaaccagtgatatgattattcctgaatgtacagacagaagtaagcctggacattgttaaatagtccctgctttaagggactacgataatgtgtactatgacaaacgtgctttattcttctaacgcagtaagaattaggtggaattttttccttcaaccaagtgcaggaaagccctgtgtgtcttggtttagttatggtttcatttctagccatacaattgatgaattgtgtacaacttttgttagtaccaaaataatctgttatatgaacagacttctaaaataacgtctgtatattttatatatagatacatatatgaaagaaggcttttattgaacagcttatcttccacttgcaggtttatggaaacagcagtatttgaaaataaataaaaagtgggagaattccttgctgttagaagaatgtggccattattttgattttttgaatgagatatataatcaaagtactgctgaactgtgagtgcagtattctaaacatttcagctaggaataccactgatttagaaacaaaactgtttgtctctggtttctgaatttaaaatgttgggattacctgtttaaatctgtcttgggggatgtagagattaagtctgtacatgtgcgtgcacatatattcatgcaccctctgattttggttttcttgtttctgagttcttagaaagtacccacatactcttttttttttttttgtagaagtagctgtcatagagtgaagaaaaggataagactttaaacagttgattctttttgtgttttctacaaactattttttgaaatttaaatcacaaactcattttctggtttttagaaagtagatgatgatttcagaggagtaaggcatgccaagcagcatgctcagtggggttttaggctgtcacatgcagctgagaaaaggtatgttcaagtcataagtaggtaattgatagggtatgaactagtcaaaatatgaaccattatgattcaagttagattttcctctggagagacagatctgaatgttcagttctagccaaggtagattttactttcaactttttaatcagtatcactttctgtgcttaactatttggtgttaccttgtctgttttcatttgtctaaaattctgcagagatgactaaaatttgacataatggtgtaaatggattgttaaggtaactttcagttgaagattaaagcaagatgccattttccccatgactttggttttgtttacatttttccctttcagttagtatacactacacgtactgtaataaaatacaataatatgacaa

SEQ ID NO: 145203 - DNA, 3388 bp, Homo sapiens
gaggaggtcggctttgttctcgccccgccctctccccgcctcctccctagatatcgcgagagggcgggtccgcttggcttcggcgtcgcgtcgctcctgcgctggagctctaggccggcgtctctccgcgagccgcgggtcaagtgccagtggctaagggtgcgcgagtagccgccacccgttcggcgttggctctggcgtcggggtcgttgtgtcgtgacaaccgctgcggtagccgtttccgaggcagcagttgcggccgctttagccctgagcgggatctgcggctgcctgcgagtctctgctgtgccgacccttctcttcgcggaccccacgccaagcagcgaccctgagccgacagccggagcgcccggcaatggcggcctcgacggcctcgcaccggcccatcaaggggatcttgaagaacaagacctctacgacttcctctatggtggcgtcggccgaacagccccgcgggaatgtcgacgaggagctgagcaaaaaatcccagaagtgggatgaaatgaacatcttggcgacgtatcatccagcagacaaagactatggtttaatgaaaatagatgaaccaagcactccttaccatagattagctgcagctgaaggcttggagccaaagtatcggattcaggaacaagaaagcagtggagaggaggatagtgacctctcacctgaagaacgagaaaaaaagcgacaatttgaaatgaaaaggaagcttcactacaatgaaggactcaatatcaaactagccagacaattaatttcaaaagacctacatgatgatgatgaagatgaagaaatgttagagactgcagatggagaaagcatgaatacggaagaatcaaatcaaggatctactccaagtgaccaacagcaaaacaaattacgaagttcatagacgagatttgttcaacactgcaattgtttgttagatgtaaaccctgtgactatagtacgttgcttcttgttcttcacaattcatgacttaagtaccaaaatgcataccagttattatatattgccaagaattaaatgataaacttagagactgattagactgaaaatgcctaatcgatatatatattcttgtgcctagtactttaccacaaatacagtgtaatatcatcagtccaaaactgcattacttttgtaaaaacactggttaatttgtataagatattatagagctttttatgctttagaagttaaacaatatctttgggggggaactaatttattttcatcacttgaaatgtggtagctcttacaaagtttattgatttgatttttttaaaaatcaaaagccaattgaacaacaggatatatagactgataaatatttaggctgaatagtattttaacacttgtcttcaacttgatttgtctgtttaattgaaaagaattataagagttactgttgcattttctgacctactatttttaaaattcctgttgagtttctttgtgtttacaaggaaaggactgaactttttctcatcaaaactagcttttttccccacaaataaattatcaggttaaactttcaccaatgtctgctctgttttttgtttttggggggtttttgtttgtttttgttttttaatgtttttggtacactgggcagacttcagagcagttttttaaaaaaataaatattctaatgtagctatctcgccattccctttaaatacctgtcttaacctcctgcttttctttcctactcctttccacacatacgcacacaatcttctaccttttaaaggatcattaagactgtcaccacattaggagctctttctctcactcttctgtcatttgctgctatgttgaaattcttattttgaccatcaatgcctatgaattcttctaatacgtgaagaaaatagtttgagtagcagcagtgctataggtgggaaatacagtttagctgctgaatttctatacctctctgatttacagattgctaattaaatggctattattagtttggattaattagacttaagaaaacaactaactgagggttttttttgtttgttttttgagggttttctttgcatgagaattgtatgtaaccagtgatatgattattcctgaatgtacagacagaagtaagcctggacattgttaaatagtccctgctttaagggactacgataatgtgtactatgacaaacgtgctttattcttctaacgcagtaagaattaggtggaattttttccttcaaccaagtgcaggaaagccctgtgtgtcttggtttagttatggtttcatttctagccatacaattgatgaattgtgtacaacttttgttagtaccaaaataatctgttatatgaacagacttctaaaataacgtctgtatattttatatatagatacatatatgaaagaaggcttttattgaacagcttatcttccacttgcaggtttatggaaacagcagtatttgaaaataaataaaaagtgggagaattccttgctgttagaagaatgtggccattattttgattttttgaatgagatatataatcaaagtactgctgaactgtgagtgcagtattctaaacatttcagctaggaataccactgatttagaaacaaaactgtttgtctctggtttctgaatttaaaatgttgggattacctgtttaaatctgtcttgggggatgtagagattaagtctgtacatgtgcgtgcacatatattcatgcaccctctgattttggttttcttgtttctgagttcttagaaagtacccacatactcttttttttttttttgtagaagtagctgtcatagagtgaagaaaaggataagactttaaacagttgattctttttgtgttttctacaaactattttttgaaatttaaatcacaaactcattttctggtttttagaaagtagatgatgatttcagaggagtaaggcatgccaagcagcatgctcagtggggttttaggctgtcacatgcagctgagaaaaggtatgttcaagtcataagtaggtaattgatagggtatgaactagtcaaaatatgaaccattatgattcaagttagattttcctctggagagacagatctgaatgttcagttctagccaaggtagattttactttcaactttttaatcagtatcactttctgtgcttaactatttggtgttaccttgtctgttttcatttgtctaaaattctgcagagatgactaaaatttgacataatggtgtaaatggattgttaaggtaactttcagttgaagattaaagcaagatgccattttccccatgactttggttttgtttacatttttccctttcagttagtatacactacacgtactgtaataaaatacaataatatgacaa

SEQ ID NO: 145204 - DNA, 3412 bp, Homo sapiens
gaggaggtcggctttgttctcgccccgccctctccccgcctcctccctagatatcgcgagagggcgggtccgcttggcttcggcgtcgcgtcgctcctgcgctggagctctaggccggcgtctctccgcgagccgcgggtcaagtgccagtggctaagggtgcgcgagtagccgccacccgttcggcgttggctctggcgtcggggtcgttgtgtcgtgacaaccgctgcggtagccgtttccgaggcagcagttgcggccgctttagccctgagcgggatctgcggctgcctgcgagtctctgctgtgccgacccttctcttcgcggaccccacgccaagcagcgaccctgagccgacagccggagcgcccggcaatggcggcctcgacggcctcgcaccggcccatcaaggggatcttgaagaacaagacctctacgacttcctctatggtggcgtcggccgaacagccccgcgggaatgtcgacgaggagctgagcaaaaaatcccagaagtgggatgaaatgaacatcttggcgacgtatcatccagcagacaaagactatggtttaatggcctgtagtgacaccgaggccactgaagccatggcgccagacatcttagccaggaaattagctgcagctgaaggcttggagccaaagtatcggattcaggaacaagaaagcagtggagaggaggatagtgacctctcacctgaagaacgagaaaaaaagcgacaatttgaaatgaaaaggaagcttcactacaatgaaggactcaatatcaaactagccagacaattaatttcaaaagacctacatgatgatgatgaagatgaagaaatgttagagactgcagatggagaaagcatgaatacggaagaatcaaatcaaggatctactccaagtgaccaacagcaaaacaaattacgaagttcatagacgagatttgttcaacactgcaattgtttgttagatgtaaaccctgtgactatagtacgttgcttcttgttcttcacaattcatgacttaagtaccaaaatgcataccagttattatatattgccaagaattaaatgataaacttagagactgattagactgaaaatgcctaatcgatatatatattcttgtgcctagtactttaccacaaatacagtgtaatatcatcagtccaaaactgcattacttttgtaaaaacactggttaatttgtataagatattatagagctttttatgctttagaagttaaacaatatctttgggggggaactaatttattttcatcacttgaaatgtggtagctcttacaaagtttattgatttgatttttttaaaaatcaaaagccaattgaacaacaggatatatagactgataaatatttaggctgaatagtattttaacacttgtcttcaacttgatttgtctgtttaattgaaaagaattataagagttactgttgcattttctgacctactatttttaaaattcctgttgagtttctttgtgtttacaaggaaaggactgaactttttctcatcaaaactagcttttttccccacaaataaattatcaggttaaactttcaccaatgtctgctctgttttttgtttttggggggtttttgtttgtttttgttttttaatgtttttggtacactgggcagacttcagagcagttttttaaaaaaataaatattctaatgtagctatctcgccattccctttaaatacctgtcttaacctcctgcttttctttcctactcctttccacacatacgcacacaatcttctaccttttaaaggatcattaagactgtcaccacattaggagctctttctctcactcttctgtcatttgctgctatgttgaaattcttattttgaccatcaatgcctatgaattcttctaatacgtgaagaaaatagtttgagtagcagcagtgctataggtgggaaatacagtttagctgctgaatttctatacctctctgatttacagattgctaattaaatggctattattagtttggattaattagacttaagaaaacaactaactgagggttttttttgtttgttttttgagggttttctttgcatgagaattgtatgtaaccagtgatatgattattcctgaatgtacagacagaagtaagcctggacattgttaaatagtccctgctttaagggactacgataatgtgtactatgacaaacgtgctttattcttctaacgcagtaagaattaggtggaattttttccttcaaccaagtgcaggaaagccctgtgtgtcttggtttagttatggtttcatttctagccatacaattgatgaattgtgtacaacttttgttagtaccaaaataatctgttatatgaacagacttctaaaataacgtctgtatattttatatatagatacatatatgaaagaaggcttttattgaacagcttatcttccacttgcaggtttatggaaacagcagtatttgaaaataaataaaaagtgggagaattccttgctgttagaagaatgtggccattattttgattttttgaatgagatatataatcaaagtactgctgaactgtgagtgcagtattctaaacatttcagctaggaataccactgatttagaaacaaaactgtttgtctctggtttctgaatttaaaatgttgggattacctgtttaaatctgtcttgggggatgtagagattaagtctgtacatgtgcgtgcacatatattcatgcaccctctgattttggttttcttgtttctgagttcttagaaagtacccacatactcttttttttttttttgtagaagtagctgtcatagagtgaagaaaaggataagactttaaacagttgattctttttgtgttttctacaaactattttttgaaatttaaatcacaaactcattttctggtttttagaaagtagatgatgatttcagaggagtaaggcatgccaagcagcatgctcagtggggttttaggctgtcacatgcagctgagaaaaggtatgttcaagtcataagtaggtaattgatagggtatgaactagtcaaaatatgaaccattatgattcaagttagattttcctctggagagacagatctgaatgttcagttctagccaaggtagattttactttcaactttttaatcagtatcactttctgtgcttaactatttggtgttaccttgtctgttttcatttgtctaaaattctgcagagatgactaaaatttgacataatggtgtaaatggattgttaaggtaactttcagttgaagattaaagcaagatgccattttccccatgactttggttttgtttacatttttccctttcagttagtatacactacacgtactgtaataaaatacaataatatgacaa

SEQ ID NO: 145205 - DNA, 1179 bp, Homo sapiens
gaggaggtcggctttgttctcgccccgccctctccccgcctcctccctagatatcgcgagagggcgggtccgcttggcttcggcgtcgcgtcgctcctgcgctggagctctaggccggcgtctctccgcgagccgcgggtcaagtgccagtggctaagggtgcgcgagtagccgccacccgttcggcgttggctctggcgtcggggtcgttgtgtcgtgacaaccgctgcggtagccgtttccgaggcagcagttgcggccgctttagccctgagcgggatctgcggctgcctgcgagtctctgctgtgccgacccttctcttcgcggaccccacgccaagcagcgaccctgagccgacagccggagcgcccggcaatggcggcctcgacggcctcgcaccggcccatcaaggggatcttgaagaacaagacctctacgacttcctctatggtggcgtcggccgaacagccccgcgggaatgtcgacgaggagctgagcaaaaaatcccagaagtgggatgaaatgaacatcttggcgacgtatcatccagcagacaaagactatggtttaatgaaaatagatgaaccaagcactccttaccatagtatgatgggggatgatgaagatgcctgtagtgacaccgaggccactgaagccatggcgccagacatcttagccaggaaattagctgcagctgaaggcttggagccaaagtatcggattcaggaacaagaaagcagtggagaggaggatagtgacctctcacctgaagaacgagaaaaaaagcgacaatttgaaatgaaaaggaagcttcactacaatgaaggactcaatatcaaactagccagacaattaatttcaaaagacctacatgatgatgatgaagatgaagaaatgttagagactgcagatggagaaagcatgaatacggaagaatcaaatcaaggatttatttcaagtgcccaacattaaaccaatttccgaagttcatggcccagatttgttcaccacttgagatggtttgtaagatgtaaaaccttgtgacctatgggaccgtggctttcttggaacttcaacagttcaatgacttaaggtcccaaaaagtgaatcccacagttattatcaaatgggccagaaattcaaattggttaacctttgaacccctggattcatacttg

SEQ ID NO: 145206 - DNA, 3771 bp, Homo sapiens
ataaaagatttccaagattaaaatattttgtcattgaattaagacagcataaatccaaaagttaccattaaaatagaggtaactgctgtttccatttgttctgtagtgaaagaagagttaagaactactgtattttaagtcagtgggtgaaaactttggaagataatttgaaataacctgttactaacaaaaacagtaaaaataaaaaacttgaagatattaaagactgatgagcataaaaagaaataatgaaataggtacagatgctgaaactcaatactgatgaaatttgagtgaagaaatacacagttttttgtggtatatatgtatgtaccatggaatatatataaaaaggaacaaaataatggcattcacagcaacctggatggagttggagaccattactctaagtgaagtaacccaggaatggaaaaccagaccttgtatgttctcacttataagcgggagctaagcaaaggcataagaatgatacagtggactttggggatgggaggggtgagagggggttgagggataaaagactacacattgggtgccgtgtacactgctcgggtgatgggtgcaccaaaatctcagcaatcaccactgaagaacttacctgtgtaaccaaacaccacttgtttcccaaaaacctattgaagtaaaaataaattgaggggaagaaaaacaataaaattacaattagttaaaaaaaaatacgcatgctaaaaagaggtttatattcttatttttctcctaaattgcaggtatatactttaaaaatcttaaaaaaaaaaaagatacaagatctggctatgttgcccagtgcagtggctattaacaggcacagttatagcacactacagcctggaactcccgactcaagtgatcctccctcctccgcctcccagtatgatgggggatgatgaagatgcctgtagtgacaccgaggccactgaagccatggcgccagacatcttagccaggaaattagctgcagctgaaggcttggagccaaagtatcggattcaggaacaagaaagcagtggagaggaggatagtgacctctcacctgaagaacgagaaaaaaagcgacaatttgaaatgaaaaggaagcttcactacaatgaaggactcaatatcaaactagccagacaattaatttcaaaagacctacatgatgatgatgaagatgaagaaatgttagagactgcagatggagaaagcatgaatacggaagaatcaaatcaaggatctactccaagtgaccaacagcaaaacaaattacgaagttcatagacgagatttgttcaacactgcaattgtttgttagatgtaaaccctgtgactatagtacgttgcttcttgttcttcacaattcatgacttaagtaccaaaatgcataccagttattatatattgccaagaattaaatgataaacttagagactgattagactgaaaatgcctaatcgatatatatattcttgtgcctagtactttaccacaaatacagtgtaatatcatcagtccaaaactgcattacttttgtaaaaacactggttaatttgtataagatattatagagctttttatgctttagaagttaaacaatatctttgggggggaactaatttattttcatcacttgaaatgtggtagctcttacaaagtttattgatttgatttttttaaaaatcaaaagccaattgaacaacaggatatatagactgataaatatttaggctgaatagtattttaacacttgtcttcaacttgatttgtctgtttaattgaaaagaattataagagttactgttgcattttctgacctactatttttaaaattcctgttgagtttctttgtgtttacaaggaaaggactgaactttttctcatcaaaactagcttttttccccacaaataaattatcaggttaaactttcaccaatgtctgctctgttttttgtttttggggggtttttgtttgtttttgttttttaatgtttttggtacactgggcagacttcagagcagttttttaaaaaaataaatattctaatgtagctatctcgccattccctttaaatacctgtcttaacctcctgcttttctttcctactcctttccacacatacgcacacaatcttctaccttttaaaggatcattaagactgtcaccacattaggagctctttctctcactcttctgtcatttgctgctatgttgaaattcttattttgaccatcaatgcctatgaattcttctaatacgtgaagaaaatagtttgagtagcagcagtgctataggtgggaaatacagtttagctgctgaatttctatacctctctgatttacagattgctaattaaatggctattattagtttggattaattagacttaagaaaacaactaactgagggttttttttgtttgttttttgagggttttctttgcatgagaattgtatgtaaccagtgatatgattattcctgaatgtacagacagaagtaagcctggacattgttaaatagtccctgctttaagggactacgataatgtgtactatgacaaacgtgctttattcttctaacgcagtaagaattaggtggaattttttccttcaaccaagtgcaggaaagccctgtgtgtcttggtttagttatggtttcatttctagccatacaattgatgaattgtgtacaacttttgttagtaccaaaataatctgttatatgaacagacttctaaaataacgtctgtatattttatatatagatacatatatgaaagaaggcttttattgaacagcttatcttccacttgcaggtttatggaaacagcagtatttgaaaataaataaaaagtgggagaattccttgctgttagaagaatgtggccattattttgattttttgaatgagatatataatcaaagtactgctgaactgtgagtgcagtattctaaacatttcagctaggaataccactgatttagaaacaaaactgtttgtctctggtttctgaatttaaaatgttgggattacctgtttaaatctgtcttgggggatgtagagattaagtctgtacatgtgcgtgcacatatattcatgcaccctctgattttggttttcttgtttctgagttcttagaaagtacccacatactcttttttttttttttgtagaagtagctgtcatagagtgaagaaaaggataagactttaaacagttgattctttttgtgttttctacaaactattttttgaaatttaaatcacaaactcattttctggtttttagaaagtagatgatgatttcagaggagtaaggcatgccaagcagcatgctcagtggggttttaggctgtcacatgcagctgagaaaaggtatgttcaagtcataagtaggtaattgatagggtatgaactagtcaaaatatgaaccattatgattcaagttagattttcctctggagagacagatctgaatgttcagttctagccaaggtagattttactttcaactttttaatcagtatcactttctgtgcttaactatttggtgttaccttgtctgttttcatttgtctaaaattctgcagagatgactaaaatttgacataatggtgtaaatggattgttaaggtaactttcagttgaagattaaagcaagatgccattttccccatgactttggttttgtttacatttttccctttcagttagtatacactacacgtactgtaataaaatacaataatatgacaa

SEQ ID NO: 145207 - DNA, 2578 bp, Homo sapiens
gttgctccactcggccaccctcgacgacgcgagcgatttagattggtgtcagtatctaggatctactccaagtgaccaacagcaaaacaaattacgaagttcatagacgagatttgttcaacactgcaattgtttgttagatgtaaaccctgtgactatagtacgttgcttcttgttcttcacaattcatgacttaagtaccaaaatgcataccagttattatatattgccaagaattaaatgataaacttagagactgattagactgaaaatgcctaatcgatatatatattcttgtgcctagtactttaccacaaatacagtgtaatatcatcagtccaaaactgcattacttttgtaaaaacactggttaatttgtataagatattatagagctttttatgctttagaagttaaacaatatctttgggggggaactaatttattttcatcacttgaaatgtggtagctcttacaaagtttattgatttgatttttttaaaaatcaaaagccaattgaacaacaggatatatagactgataaatatttaggctgaatagtattttaacacttgtcttcaacttgatttgtctgtttaattgaaaagaattataagagttactgttgcattttctgacctactatttttaaaattcctgttgagtttctttgtgtttacaaggaaaggactgaactttttctcatcaaaactagcttttttccccacaaataaattatcaggttaaactttcaccaatgtctgctctgttttttgtttttggggggtttttgtttgtttttgttttttaatgtttttggtacactgggcagacttcagagcagttttttaaaaaaataaatattctaatgtagctatctcgccattccctttaaatacctgtcttaacctcctgcttttctttcctactcctttccacacatacgcacacaatcttctaccttttaaaggatcattaagactgtcaccacattaggagctctttctctcactcttctgtcatttgctgctatgttgaaattcttattttgaccatcaatgcctatgaattcttctaatacgtgaagaaaatagtttgagtagcagcagtgctataggtgggaaatacagtttagctgctgaatttctatacctctctgatttacagattgctaattaaatggctattattagtttggattaattagacttaagaaaacaactaactgagggttttttttgtttgttttttgagggttttctttgcatgagaattgtatgtaaccagtgatatgattattcctgaatgtacagacagaagtaagcctggacattgttaaatagtccctgctttaagggactacgataatgtgtactatgacaaacgtgctttattcttctaacgcagtaagaattaggtggaattttttccttcaaccaagtgcaggaaagccctgtgtgtcttggtttagttatggtttcatttctagccatacaattgatgaattgtgtacaacttttgttagtaccaaaataatctgttatatgaacagacttctaaaataacgtctgtatattttatatatagatacatatatgaaagaaggcttttattgaacagcttatcttccacttgcaggtttatggaaacagcagtatttgaaaataaataaaaagtgggagaattccttgctgttagaagaatgtggccattattttgattttttgaatgagatatataatcaaagtactgctgaactgtgagtgcagtattctaaacatttcagctaggaataccactgatttagaaacaaaactgtttgtctctggtttctgaatttaaaatgttgggattacctgtttaaatctgtcttgggggatgtagagattaagtctgtacatgtgcgtgcacatatattcatgcaccctctgattttggttttcttgtttctgagttcttagaaagtacccacatactcttttttttttttttgtagaagtagctgtcatagagtgaagaaaaggataagactttaaacagttgattctttttgtgttttctacaaactattttttgaaatttaaatcacaaactcattttctggtttttagaaagtagatgatgatttcagaggagtaaggcatgccaagcagcatgctcagtggggttttaggctgtcacatgcagctgagaaaaggtatgttcaagtcataagtaggtaattgatagggtatgaactagtcaaaatatgaaccattatgattcaagttagattttcctctggagagacagatctgaatgttcagttctagccaaggtagattttactttcaactttttaatcagtatcactttctgtgcttaactatttggtgttaccttgtctgttttcatttgtctaaaattctgcagagatgactaaaatttgacataatggtgtaaatggattgttaaggtaactttcagttgaagattaaagcaagatgccattttccccatgactttggttttgtttacatttttccctttcagttagtatacactacacgtactgtaataaaatacaataatatgacaa

SEQ ID NO: 145208 - DNA, 541 bp, Homo sapiens
actcgtgcaagaagatcaccgtctacaaactattttttgaaatttaaatcacaaactcattttctggtttttagaaagtagatgatgatttcagaggagtaaggcatgccaagcagcatgctcagtggggttttaggctgtcacatgcagctgagaaaaggtatgttcaagtcataagtaggtaattgatagggtatgaactagtcaaaatatgaaccattatgattcaagttagattttcctctggagagacagatctgaatgttcagttctagccaaggtagattttactttcaactttttaatcagtatcactttctgtgcttaactatttggtgttaccttgtctgttttcatttgtctaaaattctgcagagatgactaaaatttgacataatggtgtaaatggattgttaaggtaactttcagttgaagattaaagcaagatgccattttccccatgactttggttttgtttacatttttccctttcagttagtatacactacacgtactgtaataaaatacaataatatgacaa

SEQ ID NO: 145209 - DNA, 198 bp, Homo sapiens
gctgcagctgaaggcttggagccaaagtatcggattcaggaacaagaaagcagtggagaggaggatagtgacctctcacctgaagaacgaggtagtttatttcctttactgctttcatcatggtgctagtaatttttgctaagataaatccattatttggaagatgagcaaatggttttcattttggggacacacagg

SEQ ID NO: 145210 - DNA, 451 bp, Homo sapiens
gctgcctgcgagtctctgctgtgccgacccttctcttcgcggaccccacgccaagcagcgaccctgagccgacagccggagcgcccggcaatggcggcctcgacggcctcgcaccggcccatcaaggggatcttgaagaacaagacctctacgacttcctctatggtggcgtcggccgaacagccccgcgggaatgtcgacgaggagctgaggtgagcgctgggagggacggcctgggagcccctccttcccgccgggcccgttacctacccagaccccaggggcgggcgggcggcgtggatgcggctcgggtgccgctcgagtctcttctcctgcccggctagccgcgggtgggagcgatctttaagaaggctgggcgatgacgtttatcatgcttccttttttttttttaagcatttgggcatatataatatttttaaacatcatcttt

SEQ ID NO: 145211 - DNA, 3466 bp, Homo sapiens
gaggaggtcggctttgttctcgccccgccctctccccgcctcctccctagatatcgcgagagggcgggtccgcttggcttcggcgtcgcgtcgctcctgcgctggagctctaggccggcgtctctccgcgagccgcgggtcaagtgccagtggctaagggtgcgcgagtagccgccacccgttcggcgttggctctggcgtcggggtcgttgtgtcgtgacaaccgctgcggtagccgtttccgaggcagcagttgcggccgctttagccctgagcgggatctgcggctgcctgcgagtctctgctgtgccgacccttctcttcgcggaccccacgccaagcagcgaccctgagccgacagccggagcgcccggcaatggcggcctcgacggcctcgcaccggcccatcaaggggatcttgaagaacaagacctctacgacttcctctatggtggcgtcggccgaacagccccgcgggaatgtcgacgaggagctgagcaaaaaatcccagaagtgggatgaaatgaacatcttggcgacgtatcatccagcagacaaagactatggtttaatgaaaatagatgaaccaagcactccttaccatagtatgatgggggatgatgaagatgcctgtagtgacaccgaggccactgaagccatggcgccagacatcttagccaggaaattagctgcagctgaaggcttggagccaaagtatcggattcaggaacaagaaagcagtggagaggaggatagtgacctctcacctgaagaacgagaaaaaaagcgacaatttgaaatgaaaaggaagcttcactacaatgaaggactcaatatcaaactagccagacaattaatttcaaaagacctacatgatgatgatgaagatgaagaaatgttagagactgcagatggagaaagcatgaatacggaagaatcaaatcaaggatctactccaagtgaccaacagcaaaacaaattacgaagttcatagacgagatttgttcaacactgcaattgtttgttagatgtaaaccctgtgactatagtacgttgcttcttgttcttcacaattcatgacttaagtaccaaaatgcataccagttattatatattgccaagaattaaatgataaacttagagactgattagactgaaaatgcctaatcgatatatatattcttgtgcctagtactttaccacaaatacagtgtaatatcatcagtccaaaactgcattacttttgtaaaaacactggttaatttgtataagatattatagagctttttatgctttagaagttaaacaatatctttgggggggaactaatttattttcatcacttgaaatgtggtagctcttacaaagtttattgatttgatttttttaaaaatcaaaagccaattgaacaacaggatatatagactgataaatatttaggctgaatagtattttaacacttgtcttcaacttgatttgtctgtttaattgaaaagaattataagagttactgttgcattttctgacctactatttttaaaattcctgttgagtttctttgtgtttacaaggaaaggactgaactttttctcatcaaaactagcttttttccccacaaataaattatcaggttaaactttcaccaatgtctgctctgttttttgtttttggggggtttttgtttgtttttgttttttaatgtttttggtacactgggcagacttcagagcagttttttaaaaaaataaatattctaatgtagctatctcgccattccctttaaatacctgtcttaacctcctgcttttctttcctactcctttccacacatacgcacacaatcttctaccttttaaaggatcattaagactgtcaccacattaggagctctttctctcactcttctgtcatttgctgctatgttgaaattcttattttgaccatcaatgcctatgaattcttctaatacgtgaagaaaatagtttgagtagcagcagtgctataggtgggaaatacagtttagctgctgaatttctatacctctctgatttacagattgctaattaaatggctattattagtttggattaattagacttaagaaaacaactaactgagggttttttttgtttgttttttgagggttttctttgcatgagaattgtatgtaaccagtgatatgattattcctgaatgtacagacagaagtaagcctggacattgttaaatagtccctgctttaagggactacgataatgtgtactatgacaaacgtgctttattcttctaacgcagtaagaattaggtggaattttttccttcaaccaagtgcaggaaagccctgtgtgtcttggtttagttatggtttcatttctagccatacaattgatgaattgtgtacaacttttgttagtaccaaaataatctgttatatgaacagacttctaaaataacgtctgtatattttatatatagatacatatatgaaagaaggcttttattgaacagcttatcttccacttgcaggtttatggaaacagcagtatttgaaaataaataaaaagtgggagaattccttgctgttagaagaatgtggccattattttgattttttgaatgagatatataatcaaagtactgctgaactgtgagtgcagtattctaaacatttcagctaggaataccactgatttagaaacaaaactgtttgtctctggtttctgaatttaaaatgttgggattacctgtttaaatctgtcttgggggatgtagagattaagtctgtacatgtgcgtgcacatatattcatgcaccctctgattttggttttcttgtttctgagttcttagaaagtacccacatactcttttttttttttttgtagaagtagctgtcatagagtgaagaaaaggataagactttaaacagttgattctttttgtgttttctacaaactattttttgaaatttaaatcacaaactcattttctggtttttagaaagtagatgatgatttcagaggagtaaggcatgccaagcagcatgctcagtggggttttaggctgtcacatgcagctgagaaaaggtatgttcaagtcataagtaggtaattgatagggtatgaactagtcaaaatatgaaccattatgattcaagttagattttcctctggagagacagatctgaatgttcagttctagccaaggtagattttactttcaactttttaatcagtatcactttctgtgcttaactatttggtgttaccttgtctgttttcatttgtctaaaattctgcagagatgactaaaatttgacataatggtgtaaatggattgttaaggtaactttcagttgaagattaaagcaagatgccattttccccatgactttggttttgtttacatttttccctttcagttagtatacactacacgtactgtaataaaatacaataatatgacaa

SEQ ID NO: 145212 - DNA, 3351 bp, Homo sapiens
aaggctaggtacgaggctggtttgaatcggccgagtggctaagggtgcgcgagtagccgccacccgttcggcgttggctctggcgtcggggtcgttgtgtcgtgacaaccgctgcggtagccgtttccgaggcagcagttgcggccgctttagccctgagcgggatctgcggctgcctgcgagtctctgctgtgccgacccttctcttcgcggaccccacgccaagcagcgaccctgagccgacagccggagcgcccggcaatggcggcctcgacggcctcgcaccggcccatcaaggggatcttgaagaacaagacctctacgacttcctctatggtggcgtcggccgaacagccccgcgggaatgtcgacgaggagctgagcaaaaaatcccagaagtgggatgaaatgaacatcttggcgacgtatcatccagcagacaaagactatggtttaatgaaaatagatgaaccaagcactccttaccatagtatgatgggggatgatgaagatgcctgtagtgacaccgaggccactgaagccatggcgccagacatcttagccaggaaattagctgcagctgaaggcttggagccaaagtatcggattcaggaacaagaaagcagtggagaggaggatagtgacctctcacctgaagaacgagaaaaaaagcgacaatttgaaatgaaaaggaagcttcactacaatgaaggactcaatatcaaactagccagacaattaatttcaaaagacctacatgatgatgatgaagatgaagaaatgttagagactgcagatggagaaagcatgaatacggaagaatcaaatcaaggatctactccaagtgaccaacagcaaaacaaattacgaagttcatagacgagatttgttcaacactgcaattgtttgttagatgtaaaccctgtgactatagtacgttgcttcttgttcttcacaattcatgacttaagtaccaaaatgcataccagttattatatattgccaagaattaaatgataaacttagagactgattagactgaaaatgcctaatcgatatatatattcttgtgcctagtactttaccacaaatacagtgtaatatcatcagtccaaaactgcattacttttgtaaaaacactggttaatttgtataagatattatagagctttttatgctttagaagttaaacaatatctttgggggggaactaatttattttcatcacttgaaatgtggtagctcttacaaagtttattgatttgatttttttaaaaatcaaaagccaattgaacaacaggatatatagactgataaatatttaggctgaatagtattttaacacttgtcttcaacttgatttgtctgtttaattgaaaagaattataagagttactgttgcattttctgacctactatttttaaaattcctgttgagtttctttgtgtttacaaggaaaggactgaactttttctcatcaaaactagcttttttccccacaaataaattatcaggttaaactttcaccaatgtctgctctgttttttgtttttggggggtttttgtttgtttttgttttttaatgtttttggtacactgggcagacttcagagcagttttttaaaaaaataaatattctaatgtagctatctcgccattccctttaaatacctgtcttaacctcctgcttttctttcctactcctttccacacatacgcacacaatcttctaccttttaaaggatcattaagactgtcaccacattaggagctctttctctcactcttctgtcatttgctgctatgttgaaattcttattttgaccatcaatgcctatgaattcttctaatacgtgaagaaaatagtttgagtagcagcagtgctataggtgggaaatacagtttagctgctgaatttctatacctctctgatttacagattgctaattaaatggctattattagtttggattaattagacttaagaaaacaactaactgagggttttttttgtttgttttttgagggttttctttgcatgagaattgtatgtaaccagtgatatgattattcctgaatgtacagacagaagtaagcctggacattgttaaatagtccctgctttaagggactacgataatgtgtactatgacaaacgtgctttattcttctaacgcagtaagaattaggtggaattttttccttcaaccaagtgcaggaaagccctgtgtgtcttggtttagttatggtttcatttctagccatacaattgatgaattgtgtacaacttttgttagtaccaaaataatctgttatatgaacagacttctaaaataacgtctgtatattttatatatagatacatatatgaaagaaggcttttattgaacagcttatcttccacttgcaggtttatggaaacagcagtatttgaaaataaataaaaagtgggagaattccttgctgttagaagaatgtggccattattttgattttttgaatgagatatataatcaaagtactgctgaactgtgagtgcagtattctaaacatttcagctaggaataccactgatttagaaacaaaactgtttgtctctggtttctgaatttaaaatgttgggattacctgtttaaatctgtcttgggggatgtagagattaagtctgtacatgtgcgtgcacatatattcatgcaccctctgattttggttttcttgtttctgagttcttagaaagtacccacatactcttttttttttttttgtagaagtagctgtcatagagtgaagaaaaggataagactttaaacagttgattctttttgtgttttctacaaactattttttgaaatttaaatcacaaactcattttctggtttttagaaagtagatgatgatttcagaggagtaaggcatgccaagcagcatgctcagtggggttttaggctgtcacatgcagctgagaaaaggtatgttcaagtcataagtaggtaattgatagggtatgaactagtcaaaatatgaaccattatgattcaagttagattttcctctggagagacagatctgaatgttcagttctagccaaggtagattttactttcaactttttaatcagtatcactttctgtgcttaactatttggtgttaccttgtctgttttcatttgtctaaaattctgcagagatgactaaaatttgacataatggtgtaaatggattgttaaggtaactttcagttgaagattaaagcaagatgccattttccccatgactttggttttgtttacatttttccctttcagttagtatacactacacgtactgtaataaaatacaataatatgacaa

SEQ ID NO: 145213 - DNA, 1152 bp, Homo sapiens
gaggaggtcggctttgttctcgccccgccctctccccgcctcctccctagatatcgcgagagggcgggtccgcttggcttcggcgtcgcgtcgctcctgcgctggagctctaggccggcgtctctccgcgagccgcgggtcaagtgccagtggctaagggtgcgcgagtagccgccacccgttcggcgttggctctggcgtcggggtcgttgtgtcgtgacaaccgctgcggtagccgtttccgaggcagcagttgcggccgctttagccctgagcgggatctgcggctgcctgcgagtctctgctgtgccgacccttctcttcgcggaccccacgccaagcagcgaccctgagccgacagccggagcgcccggcaatggcggcctcgacggcctcgcaccggcccatcaaggggatcttgaagaacaagacctctacgacttcctctatggtggcgtcggccgaacagccccgcgggaatgtcgacgaggagctgagcaaaaaatcccagaagtgggatgaaatgaacatcttggcgacgtatcatccagcagacaaagactatggtttaatgaaaatagatgaaccaagcactccttaccatagtatgatgggggatgatgaagatgcctgtagtgacaccgaggccactgaagccatggcgccagacatcttagccaggaaattagctgcagctgaaggcttggagccaaagtatcggattcaggaacaagaaagcagtggagaggaggatagtgacctctcacctgaagaacgagaaaaaaagcgacaatttgaaatgaaaaggaagcttcactacaatgaaggactcaatatcaaactagccagacaattaatttcaaaagacctacatgatgatgatgaagatgaagaaatgttagagactgcagatggagaaagcatgaatacggaagaatcaaatcaaggatctactccaagtgaccaacagcaaaacaaattacgaagttcatagacgagatttgttcaacactgcaattgtttgttagatgtaaaccctgtgactatagtacgttgcttcttgttcttcacaattcatgacttaagtaccaaaatgcataccagttattatatattgccaagaattatgcacgctctacgggtcctctatgt

SEQ ID NO: 145214 - DNA, 3610 bp, Homo sapiens
gaggaggtcggctttgttctcgccccgccctctccccgcctcctccctagatatcgcgagagggcgggtccgcttggcttcggcgtcgcgtcgctcctgcgctggagctctaggccggcgtctctccgcgagccgcgggtcaagtgccagtggctaagggtgcgcgagtagccgccacccgttcggcgttggctctggcgtcggggtcgttgtgtcgtgacaaccgctgcggtagccgtttccgaggcagcagttgcggccgctttagccctgagcgggatctgcggctgcctgcgagtctctgctgtgccgacccttctcttcgcggaccccacgccaagcagcgaccctgagccgacagccggagcgcccggcaatggcggcctcgacggcctcgcaccggcccatcaaggggatcttgaagaacaagacctctacgacttcctctatggtggcgtcggccgaacagccccgcgggaatgtcgacgaggagctgagcaaaaaatcccagaagtgggatgaaatgaacatcttggcgacgtatcatccagcagacaaagactatggtttaatgaaaatagatgaaccaagcactccttaccataggtatatactttaaaaatcttaaaaaaaaaaaagatacaagatctggctatgttgcccagtgcagtggctattaacaggcacagttatagcacactacagcctggaactcccgactcaagtgatcctccctcctccgcctcccagtatgatgggggatgatgaagatgcctgtagtgacaccgaggccactgaagccatggcgccagacatcttagccaggaaattagctgcagctgaaggcttggagccaaagtatcggattcaggaacaagaaagcagtggagaggaggatagtgacctctcacctgaagaacgagaaaaaaagcgacaatttgaaatgaaaaggaagcttcactacaatgaaggactcaatatcaaactagccagacaattaatttcaaaagacctacatgatgatgatgaagatgaagaaatgttagagactgcagatggagaaagcatgaatacggaagaatcaaatcaaggatctactccaagtgaccaacagcaaaacaaattacgaagttcatagacgagatttgttcaacactgcaattgtttgttagatgtaaaccctgtgactatagtacgttgcttcttgttcttcacaattcatgacttaagtaccaaaatgcataccagttattatatattgccaagaattaaatgataaacttagagactgattagactgaaaatgcctaatcgatatatatattcttgtgcctagtactttaccacaaatacagtgtaatatcatcagtccaaaactgcattacttttgtaaaaacactggttaatttgtataagatattatagagctttttatgctttagaagttaaacaatatctttgggggggaactaatttattttcatcacttgaaatgtggtagctcttacaaagtttattgatttgatttttttaaaaatcaaaagccaattgaacaacaggatatatagactgataaatatttaggctgaatagtattttaacacttgtcttcaacttgatttgtctgtttaattgaaaagaattataagagttactgttgcattttctgacctactatttttaaaattcctgttgagtttctttgtgtttacaaggaaaggactgaactttttctcatcaaaactagcttttttccccacaaataaattatcaggttaaactttcaccaatgtctgctctgttttttgtttttggggggtttttgtttgtttttgttttttaatgtttttggtacactgggcagacttcagagcagttttttaaaaaaataaatattctaatgtagctatctcgccattccctttaaatacctgtcttaacctcctgcttttctttcctactcctttccacacatacgcacacaatcttctaccttttaaaggatcattaagactgtcaccacattaggagctctttctctcactcttctgtcatttgctgctatgttgaaattcttattttgaccatcaatgcctatgaattcttctaatacgtgaagaaaatagtttgagtagcagcagtgctataggtgggaaatacagtttagctgctgaatttctatacctctctgatttacagattgctaattaaatggctattattagtttggattaattagacttaagaaaacaactaactgagggttttttttgtttgttttttgagggttttctttgcatgagaattgtatgtaaccagtgatatgattattcctgaatgtacagacagaagtaagcctggacattgttaaatagtccctgctttaagggactacgataatgtgtactatgacaaacgtgctttattcttctaacgcagtaagaattaggtggaattttttccttcaaccaagtgcaggaaagccctgtgtgtcttggtttagttatggtttcatttctagccatacaattgatgaattgtgtacaacttttgttagtaccaaaataatctgttatatgaacagacttctaaaataacgtctgtatattttatatatagatacatatatgaaagaaggcttttattgaacagcttatcttccacttgcaggtttatggaaacagcagtatttgaaaataaataaaaagtgggagaattccttgctgttagaagaatgtggccattattttgattttttgaatgagatatataatcaaagtactgctgaactgtgagtgcagtattctaaacatttcagctaggaataccactgatttagaaacaaaactgtttgtctctggtttctgaatttaaaatgttgggattacctgtttaaatctgtcttgggggatgtagagattaagtctgtacatgtgcgtgcacatatattcatgcaccctctgattttggttttcttgtttctgagttcttagaaagtacccacatactcttttttttttttttgtagaagtagctgtcatagagtgaagaaaaggataagactttaaacagttgattctttttgtgttttctacaaactattttttgaaatttaaatcacaaactcattttctggtttttagaaagtagatgatgatttcagaggagtaaggcatgccaagcagcatgctcagtggggttttaggctgtcacatgcagctgagaaaaggtatgttcaagtcataagtaggtaattgatagggtatgaactagtcaaaatatgaaccattatgattcaagttagattttcctctggagagacagatctgaatgttcagttctagccaaggtagattttactttcaactttttaatcagtatcactttctgtgcttaactatttggtgttaccttgtctgttttcatttgtctaaaattctgcagagatgactaaaatttgacataatggtgtaaatggattgttaaggtaactttcagttgaagattaaagcaagatgccattttccccatgactttggttttgtttacatttttccctttcagttagtatacactacacgtactgtaataaaatacaataatatgacaa

SEQ ID NO: 145215 - DNA, 3449 bp, Homo sapiens
  misc_feature (94)..(95): n is a, c, g, or t
  misc_feature (104)..(104): n is a, c, g, or t
  misc_feature (106)..(106): n is a, c, g, or t
  misc_feature (112)..(112): n is a, c, g, or t
gaaacattgaaaacatgaaggaaatcagaaatctttaaccaaaaatagggaattaaattatgactcaacaacttgtaacgattttaaaattacnnaaatcattntngcagantgtttacttgtatgttctcacttataagcgggagctaagcaaaggcataagaatgatacagtggactttggggatgggaggggtgagagggggttgagggataaaagactacacattgggtgccgtgtacactgctcgggtgatgggtgcaccaaaatctcagcaatcaccactgaagaacttacctgtgtaaccaaacaccacttgtttcccaaaaacctattgaagtaaaaataaattgaggggaagaaaaacaataaaattacaattagttaaaaaaaaatacgcatgctaaaaagaggtttatattcttatttttctcctaaattgcaggtatatactttaaaaatcttaaaaaaaaaaaagatacaagatctggctatgttgcccagtgcagtggctattaacaggcacagttatagcacactacagcctggaactcccgactcaagtgatcctccctcctccgcctcccagtatgatgggggatgatgaagatgcctgtagtgacaccgaggccactgaagccatggcgccagacatcttagccaggaaattagctgcagctgaaggcttggagccaaagtatcggattcaggaacaagaaagcagtggagaggaggatagtgacctctcacctgaagaacgagaaaaaaagcgacaatttgaaatgaaaaggaagcttcactacaatgaaggactcaatatcaaactagccagacaattaatttcaaaagacctacatgatgatgatgaagatgaagaaatgttagagactgcagatggagaaagcatgaatacggaagaatcaaatcaaggatctactccaagtgaccaacagcaaaacaaattacgaagttcatagacgagatttgttcaacactgcaattgtttgttagatgtaaaccctgtgactatagtacgttgcttcttgttcttcacaattcatgacttaagtaccaaaatgcataccagttattatatattgccaagaattaaatgataaacttagagactgattagactgaaaatgcctaatcgatatatatattcttgtgcctagtactttaccacaaatacagtgtaatatcatcagtccaaaactgcattacttttgtaaaaacactggttaatttgtataagatattatagagctttttatgctttagaagttaaacaatatctttgggggggaactaatttattttcatcacttgaaatgtggtagctcttacaaagtttattgatttgatttttttaaaaatcaaaagccaattgaacaacaggatatatagactgataaatatttaggctgaatagtattttaacacttgtcttcaacttgatttgtctgtttaattgaaaagaattataagagttactgttgcattttctgacctactatttttaaaattcctgttgagtttctttgtgtttacaaggaaaggactgaactttttctcatcaaaactagcttttttccccacaaataaattatcaggttaaactttcaccaatgtctgctctgttttttgtttttggggggtttttgtttgtttttgttttttaatgtttttggtacactgggcagacttcagagcagttttttaaaaaaataaatattctaatgtagctatctcgccattccctttaaatacctgtcttaacctcctgcttttctttcctactcctttccacacatacgcacacaatcttctaccttttaaaggatcattaagactgtcaccacattaggagctctttctctcactcttctgtcatttgctgctatgttgaaattcttattttgaccatcaatgcctatgaattcttctaatacgtgaagaaaatagtttgagtagcagcagtgctataggtgggaaatacagtttagctgctgaatttctatacctctctgatttacagattgctaattaaatggctattattagtttggattaattagacttaagaaaacaactaactgagggttttttttgtttgttttttgagggttttctttgcatgagaattgtatgtaaccagtgatatgattattcctgaatgtacagacagaagtaagcctggacattgttaaatagtccctgctttaagggactacgataatgtgtactatgacaaacgtgctttattcttctaacgcagtaagaattaggtggaattttttccttcaaccaagtgcaggaaagccctgtgtgtcttggtttagttatggtttcatttctagccatacaattgatgaattgtgtacaacttttgttagtaccaaaataatctgttatatgaacagacttctaaaataacgtctgtatattttatatatagatacatatatgaaagaaggcttttattgaacagcttatcttccacttgcaggtttatggaaacagcagtatttgaaaataaataaaaagtgggagaattccttgctgttagaagaatgtggccattattttgattttttgaatgagatatataatcaaagtactgctgaactgtgagtgcagtattctaaacatttcagctaggaataccactgatttagaaacaaaactgtttgtctctggtttctgaatttaaaatgttgggattacctgtttaaatctgtcttgggggatgtagagattaagtctgtacatgtgcgtgcacatatattcatgcaccctctgattttggttttcttgtttctgagttcttagaaagtacccacatactcttttttttttttttgtagaagtagctgtcatagagtgaagaaaaggataagactttaaacagttgattctttttgtgttttctacaaactattttttgaaatttaaatcacaaactcattttctggtttttagaaagtagatgatgatttcagaggagtaaggcatgccaagcagcatgctcagtggggttttaggctgtcacatgcagctgagaaaaggtatgttcaagtcataagtaggtaattgatagggtatgaactagtcaaaatatgaaccattatgattcaagttagattttcctctggagagacagatctgaatgttcagttctagccaaggtagattttactttcaactttttaatcagtatcactttctgtgcttaactatttggtgttaccttgtctgttttcatttgtctaaaattctgcagagatgactaaaatttgacataatggtgtaaatggattgttaaggtaactttcagttgaagattaaagcaagatgccattttccccatgactttggttttgtttacatttttccctttcagttagtatacactacacgtactgtaataaaatacaataatatgacaa

SEQ ID NO: 145216 - DNA, 750 bp, Homo sapiens
ctcctccaactttctactaggcagctcttcttgactcctttgccgtaccaaagagaatacacagtacaatggttcaaattaagactagtttagttttctttcacatcgtagtccagaattcctgggctttccagggagaccaagtgggtccatgaagttgcccagagatttagttttttttttttttgtcttgtgacttcaccatttaaagtattacactttttccacatagagaaagatgtcttgaatgcactgtttccagcacgttcaaagtgggagaggaagctgaaggcaatccgcttcctcttaagaaagtgactcagtaggccgggcgtggtggctcatgcctgtaatcccagcactttgggaggctgaggcgggtggatcacctgaggtcaggagttcgagaccagcctggccaacagctgagttaggcaacagctaagttaggcaatgtggtattacctgggtgactgagtagtcagttaaaacctgggatgttctattttgaaaatgaaaaatagaaggccctaggcgttatcaacccaatgatagaataataagaaattaagtaaatctattaaaatgacccaaggaaaatgacagggatgaagtttgtctgattggcttgtaaggccaaggttctttgcaccttctcacctgctctccctggcatggccagaaactcaggactatgctgtgcaagagaagtacacttcagtcttatttgagccattatattgtgtattg

SEQ ID NO: 145217 - DNA, 453 bp, Homo sapiens
gttcaagcaattctcatgcctcagcttcaggagaagctgggtttacaggtgtgcgccaccacacctggctatttttttgtgtgtttttagtagagacgggatttcgccatgttggccagcctggtcttgaactcctggctgcaagtgatctttccgcctcagccttccaagtgctgatattacaggagtgagccaccatgcctggcctgaaaaagaaaaacatgcttttaaacagcttcatgagatttcatcatgccagagctgatgtaaaccccacccccacccccactgaggcctttgagttgtgttgcgttcatccccattgtaaattctgctgggatggacatcctattacaccaagctttgtagctgtatttgttaccttcagctaatgcttcctagcagttgaattactaggcaaaaggtatggactctcttgaaggctcttcgtcc

SEQ ID NO: 145218 - DNA, 430 bp, Homo sapiens
tcttcaagtctatctgcagtaggtctaccaggtcaaatgcatctccatttgtaattagatagtgccaaatcaccctccaaaaagattgtgccattttacattcccactgacagttacaagtgtgctggcctacccaggcgctcacctgcattggataacaccaaaatttttagttttttccagtctgtgagtgaattaaaaagattttttttcttttttgagactccatctgtaagtaaataaataaacaaataaataaataaaaataaatacaatttaaaaattagccaggtgtgatcatgcgcctgtagtcccagctattcaggaggctgaagtgagaggattacttgagcccaggaggttgaggctacagtgagctatgatggcaccattgtactccagcctgggcaacaaagtgagaccctgtatc

SEQ ID NO: 145219 - DNA, 339 bp, Homo sapiens
ggctcaggatgggccttcccagaagcaggcccagagggaggctgctccagatcccctgtcccctggggctgtgggtgtccctgaatgtcagggccatgggagggcccctgggcttcaggggttggggaaagtgaacactctgctctttgtccaccttcgggaggacaccttcaaatgctgaccctgggcccctaactgacctgagacttcagagcttcttgggaggagctggggtcccccagcggagcctgggatggagcagggatggctgccccagggagggggcggtggggccttccatcctgctctgccctcctcgtcctctggccccagctcagt

SEQ ID NO: 145220 - DNA, 382 bp, Homo sapiens
tgtctcagtttcgggacgtggggacgccacgtgccattcccatgggccagtgagggcctggggcctctgttctgctgtggcctgagctccccagagtcctgaggaggagcgccagttgcccctcgctcacagaccacacacccagcccccctgggcttcaggggttggggaaagtgaacactctgctctttgtccaccttcgggaggacaccttcaaatgctgaccctgggcccctaactgacctgagacttcagagcttcttgggaggagctggggtcccccagcggagcctgggatggagcagggatggctgccccagggagggggcggtggggccttccatcctgctctgccctcctcgtcctctggccccagctcagt

SEQ ID NO: 145221 - DNA, 358 bp, Homo sapiens
tcgagacccgcctggccaacatggtgaaaccctgcctctactaaaaatacaaaaattagctggacgtgcttgcttgaacctaggaggtggaggttgcagtgagctgagattgtgccactgcacttcaggatgggtgactgagtgagactctgtctcaaataaataaataaataccttcaatgcctttccttatactttgaataaatttcaaacttcctttctcatgctaaaatgcgctgagcaatctacacctacccacctctcaagttcctcctctttgttcaagctttccccatgcccactggactccagccccaaccgttagctactggagtaggaacaactacatagtcttgcc

SEQ ID NO: 145222 - DNA, 330 bp, Homo sapiens
aggctcacatgacgaaggcggattggggagaggaacgaagagacaatagggctagtgggtcctaagaacctctcagccaagagcacaaaacacagctgtgctagatgggtgtaatggcatgcacccagtcccagctactcaggaggctgaggtggggagggccaatatgctgccagcctgggcaacacagcgaaattccatctctaaaaaggaagccacaaaggccacagttgtgcttcttactgttcacacaattggtcaaaaatcttccagcgcatcctctcattcagcgtagcatttaagagcaagagctctggaatcctagattca

SEQ ID NO: 145223 - DNA, 196 bp, Homo sapiens
gtgacccaggctaaaaacaatccttcccttgtgaacaaaatgagggtttcatttctaagtcagctccaacatccaatatgcagcttcctctgttgtatctgttcaaaatgtgaaacagcataagagatctctgactaaacgagtgtgcaacacgggtgcgtgggcatgcctgggagcagccgcctcggcacaccct

SEQ ID NO: 145224 - DNA, 419 bp, Homo sapiens
tgctttccctgcctgtaatgtttccgacaatatcttcatcagttgcctcacggaatgccttattcaccattacagttttccatactgctttgcttccgacaaaggaaaccacttcacagcaagggaatgaagcaatgggctcataagcatggaattgagtagtctcaccccatatccctccaatcagaagcagctcacctaatagaaatgtgtaatgactcactggaaaattcagttatggcatcaaatgagagacaacaccctgaaagcatttctgatttacaggatgaagtaagaatatgccttgaatcacggaccactggcaaccctgtaacagaatacatggatttggtaatcaaggaatagaagtgagagtgactcctggctgggtgcagtggctcacgcctgtaatcccagca

SEQ ID NO: 145225 - DNA, 272 bp, Homo sapiens
tctgaggtgctaacttatgaataaattgcatagactttggaaaaaggccattgttctggttttgcacctgtattcttggttgagagggatgacataaacaaggtgtttcatggtagttcaaaaaatcagatataccaaccacccactgattgactctataatttagcatgggtttgtttttgtcctttgaagtagatagacagagaatttctggacagatttgaaatggatctgatagtctatatatcaagcaaatagacacacctgtcaca

SEQ ID NO: 145226 - DNA, 197 bp, Homo sapiens
agaacatgacagcgtctgggctgtacagatgaaaaagcagtcttggggtcgttgaggttcagataaagggaagagttggaggagggaggggctgtcagaattctcttctccctttcctcaggagagagaggacgtggggcctgaggcctgggttggccttcatttccaatcttgggaaggagaagaaacacctaaat

SEQ ID NO: 145227 - DNA, 401 bp, Homo sapiens
taaacaatgtatgaacattcaatggactataattattcagccttaaaaaggaagagcgttctgacacattctacaatgtgaataaaccttgaagacgttatgttaggtgaaataagctagtcacaaaaggacagacactgtatgattccacttatataagttacctatagtagtcaaattcatcgagacagtaagtagaatggtggtttccaggggaggatggatgaggaattattgtttcatggatacagagtttcagtttgggaatacgaagaaaattttggagacggatggtattcatggttgcacaacagtgtgaatatacttaatgccactgacctctacacttaaaaattgttaaaatggaaatttttttgttatgtatctttactacagtaaaa

SEQ ID NO: 145228 - DNA, 343 bp, Homo sapiens
ctacctgccatgtacacactaagcctatgctcaagcccggacacccagattccacagggaggcacctctgcagcctgcacaaagtctcatgtgtagaaaacgcttttggtaaatgaaagcaagctgcatcttgttacacaaacgaggcttccttgacctgtgtccacggctcagacttaacgtgacaagaatgtccttccccagcccctcagctaggttaaggtttgatttgacagaagagacccgcccatcacatgacgagcactaggagcccattcaagtccaccaatccacagcctcccataggtgggtcacttgagtgggggcacagctcatggccaag

SEQ ID NO: 145229 - DNA, 320 bp, Homo sapiens
ctcagggaggacgggaatgaggacacaggaggtcctctctgctgtgctgcaggccagtgctagggtgggaccagcaaatcacagtggagcatttgcccagttgtccagggtccttggagcctataaagagtggggaggagtcagaattcactctgatggttaagacctgtgctccaatgttcagcactgtggaactctgcccagcagctggttttgtgggagtttgtgaatcactccaatagggaagactccgaggcttctcctagacggcgacctgacctcctagctctggtctgcagggtctgctgaccctgcccaca

SEQ ID NO: 145230 - DNA, 734 bp, Homo sapiens
ggggcaggcaccttggggtgaggaggtatcacaaacctgtcacccaggcgggtcaatatctgtggcccagaccggtctgagggggctgggtcacagaggaggaacataaagacgtgagggaagaggagacggaggccccaggggagcgaagagacgtgacacgctctggtttagggggctgggccttgcctggggaagcagggggacctgccaggcccttgggagggagggtgggagtaccactttggctcgagtatccactggagggcgaaagtgtccgttctggggaccgtggggggcgccgggaaccacccggagacaagccaggtacccagctgttggctgggttgggtggacagggtgctgcccccgccccttctgagccaccagtggtgggtggccgaggcagctggggctgctgcttacgctcaggcttagggggcaaccctaatggcccatcaggcactgctaagccccgctgatggagggagtgggtccggcggggagggggtggaggccgcttcagcttacgcagggacacactccggccagacaactgcccactgctccgaatgctgagtgtgtctgaggcctcagcagtgctgcccccactgggagagcccctcccactgcctccctggggagggggtaccacgctattgctagccgtagagctctccggctggccctcagagccacccttagaggagagggtggaaccgtcagacacaatg

SEQ ID NO: 145231 - DNA, 305 bp, Homo sapiens
gagaaacgagatgggggtgaagctggagatatttcggatgataatctacctcactttccctgtggctatgttctgggtttccaatcaggccgagtggtttgaggatgatgtcatacagcgcaagagggagctgtggccacctgagaagcttcaagagttagaggaattcaaagagaggttacggaagcggaagcggcgggaggagaagctccttcgcgacgcccagcagaactcctgaggcctccaagtgggagtcctagcccctcccctgatgaaatatacatatactcagttccttgttattc

SEQ ID NO: 145232 - DNA, 329 bp, Homo sapiens
gagaaacgagatgggggtgaagctggagatatttcggatgataatctacctcactttccctgtggctatgttctgggtttccaatcaggccgagtggtttgaggatgatgtcatacagcgcaagagggagctgtggccacctgagaaggtaagtgatctctcctccctgccagagggatggaggagctggattcttgtatccgggatgggtttatagatgaaaattttagcccaggcgcagtggcctcatgcttgtaatcccagggcatgggaggctgaggtggttagatcactctaggtcaggagttcaaaccagcctgccaacatgg

SEQ ID NO: 145233 - DNA, 464 bp, Homo sapiens
tctcaacctcccagtttccatccaccccacaacccacagcagtccacttccactcctgctagagtctctacctgcttccttgctgctaatttcaagggaattaagttaaattccctgtctgtcctcatctggcttgatctctctacatcacttaatgctgtcaacctgttcttcctgaaattctcttccctctcttccctcttgtatctgtaatcactggactcctctcctcatttctttcctatctctctgtccagtcctgtttggtcccttgcatgtaagtggggagaaaacagaagcctattaatagagaagggccagtgggaacaggagagaggaggtcttgttgaaggaggataaagacagcacaggtggaggcagtggcttcaaaaagcaaaataccatgctaacctccctgcgagactgaagcaagaaggtaagaaaggcagaatgtgacaaagacc

SEQ ID NO: 145234 - DNA, 432 bp, Homo sapiens
taaacagcagtattgatatgggggatgggttacctgtgaacaaagacttgggttaattaatttgacagtatcattaattactgctgaaatcattggttttggtcagaggtcaggctcttttagcaattgagggcaggtcccatgagagttggagacactaagtaatgcaagagtgtcactgctcaaccatctcaggctgtaggacgaaggcctttcctttctgcctgggccattcagctctctggattaaaccagtttctgctttacttcagtgtctaaggtagggctgggacacctccccctatgccagtgagttgtgttgagtgaatggggaacatttccagtttggatccatacagtgaaccagtgttaaatgtttaagcgctaatatctctcaggactttgcttaattcatatataaaggaggtaggg

SEQ ID NO: 145235 - DNA, 138 bp, Homo sapiens
tcatatacacacacatacatggacccatgtgcacacactatacacacatggacccatgcacacacactcggacacacacctgcgtgtctccctcatatacacacacatacatggacccatgtgtacacactatacaca

SEQ ID NO: 145236 - DNA, 830 bp, Homo sapiens
gtgatgtggggatataattatggctggtgcacgtgctggggtcaggacacagaatgaggaagtcctgggttcttggatcccggagcccagagcagaagcagagaccaggcaagccaggaagatgaagttgcgctctggaattccttggcccttaaatgtacaagtgcggcaggagcagtagtggcagcctcttttgcttgtctcctccagttcctgctatggagggtcccaaggaatcctctgttcactggggcgagttgatgaacttggctcaatggcttagatatgaaagcatttctggcacatgtgtgtagtcaggggaaatcacgatctgctggagctttgctggaacgttcagaggacggtttcatttcatgaaaaactccatcgtggttgggcccggtgactcatgcctgtaatcccagtgctttggaaggccaaggtgggaggatcacttgagatcgggagttcaagactagcctgggcaacatagcaagacctcatctctacaaaaaaacttttaaaaaattaaccgtgcatggtggcacctgcctggacgctgaggtggaaggatctcttgagcccaggagtctgaggctgcagtgagctatgattgcaccactgcactgcatccccggcaacaaagtgagaccttacctcaaataaataaataaataaataaaatttaaaactccatcctccaagaaagaagtcaggtcggggaagcctgattcctagcagaatcccacagggaaggagaaagacaagcaaagggtttcttactaagcagcgctgcaattggctacagggaacattgcgtttttcaggcc

SEQ ID NO: 145237 - DNA, 805 bp, Homo sapiens
gttagtgctattacatcttttctcaaatggagcatgcacatacactgtggatattctttttatgtgtaatgtttactaatgtagctgagatttgggggaaagaacatgatagttgggtcaaatggacctgcattcgggcctctgtccatatgttactgtgtaagctccagaaagaaatgtcacctctctgggccattttcctctgaacagtgagtatagcactatcaccttcttataccctatggtgttttggtgatgatacttgcaaacagagtacccattacaggtggataggcaataaatatttatttgatctgaatgccgtagacatgagcttggattttttttgtatgtggaatttctactgagggaggagtcacctctgagccagatttcactgacttagattctcttaatcatgatttctggcgctttaaggtggcttctactcaaacctcttcctttccctgaagctcccaaggcattttcttcatggctgtgttccctcccatctcagtacttcttcctaatcctgaggccttctggtcactctagtcacttcttcctaactccatctcaataaaaaaaaacaaaccaaacaaaaaacagtaaacgggccgggtgtggtggttcatgcctataatcccagcactttggaagtctgaggcgggtggaccacttgaggtcaggagtttgagaccagcctggccaacatgccaaaaccctgtcttggtgttttttcaaataacaaaaattggctgggcgtggcggcgtgcacctgtaatcccagatactcaggaggctg

SEQ ID NO: 145238 - DNA, 400 bp, Homo sapiens
agcttaaatccgaggttgagcctgtcctactctgcagctagaagtgctgctgggttcaattacactccccagtgccatttgaatggcccttccatgaagggtagactcctggacagtgcagtaagttatctagaggtttgtgtttgaaatagtctctggttaaaaagatgcttctccttttttgacacccctcaccaccccgaagaattatcctttctgtcattttctagaatatcagggccctcacaccacatggttaaaatcattagtaatgctctgagttatccccgtggagacactaacagctgcagcaaactggaactgcacctgttttcaagtgctttctgcttcacccgcctcccacatgtgtcggcgctgcaggtggaagagcagataaagc

SEQ ID NO: 145239 - DNA, 158 bp, Homo sapiens
tcccagcccccagccctcctcattcatttgtgttacatgcctggcccctggaagagtggacaaaggtgcttgtcaggacatgtcactcctccacagtcacctagccctgagtaggtccctgctcagcaaatgccccaagatattcaggagccgacacc

SEQ ID NO: 145240 - DNA, 198 bp, Homo sapiens
cttcctacttggtttactagctgttggaaaggggtattgaaatctccagctataaatatggatttgtctatcagttattttgagcatgtttctagatgtgcaggttgtataatgagagcctataattgaggcatatattttgcctgatttatgtagttgctacttacgattcagttgctgtagccaaagaagaggtga

SEQ ID NO: 145241 - DNA, 336 bp, Homo sapiens
cttacacagcacattaacgaatgccacgttactcttacaatggagggctaatgagaacaggaagtgggatggcatcaacaagagcaaaaagagccaatacacagtgaggctaaaaaagtgacaacagttgtggctggcacactggctgccttcagccttcctaatgatatgctttctcaatggtctaatgcttatttaaaaccttggctttttttttttttatttttttttggaaaaggggttttttttttttgccccggtttgggggcagggggggtttttttaggtcaagggaaacttttcctcccagaggaaagggaatttttttccttaacc

SEQ ID NO: 145242 - DNA, 309 bp, Homo sapiens
aattatgtcaaggaagcttccttgaccttataatttggactaggttaaattaggattttctaattaatcactgtttttctccataaaacaaagatggaaagtgctaagagataacaattaaaacagctaatatttattgagtgttgactacaggcaagccactgtagcattttatacacattatcacatttaattttcataagaacctaagataggtaccattataacccctatgttatagaagagaaagctgagacacaaagcagtaaagcaatttgccgaaaggcacatggccaataaaaaacagca

SEQ ID NO: 145243 - DNA, 437 bp, Homo sapiens
atctctgaatggcattttggtcaatatgccaggaatcttttgatcccagtagtttacttttggcctctggatctccactttcctgtctgtagcaaaggaagcatcattcttgatagaccagttctgcaacattctgggagtcatgccagagatatgcctagagcctacccctccatctcttccaaaaagtttctaaatacctaatctaatctactgtatttaatccctttctgcttaaaatacctacagtaggcagggcgaggtggctcatgcctgtaatcccagcactttgggaggccaaggtaggtggatcacctgaggtcaggagttccagaccagcctgaccaaaatggagaaaccctgtctctgctaaaaaaatacaaaattagctgggtgtggtgacacatgcctgcaattccagctactcaggaggctga

SEQ ID NO: 145244 - DNA, 559 bp, Homo sapiens
atcaaaatagaacaactggggacctaagccaatatgggaacccagatctgactcctgaatttaagccctgccttgcctcatggacctacttcattgcatccttcctggccaccattcctcaaccaaaccttcttcttaaggaagggggaaaaatgagctaacagctgctaggagatttggaatgaatgtgaagttctccaggttaaaatggagaccaagggaaattcatatgattccactttcctcatctctctggatccctcatcgagccagtaatgtattcccccttcttgctaacacactttttaaaatgttaatagactgtaaattacttttctttttatacttcttaaaataagcgtttcctcttgtagatggcaagacgacgctggagttacgggcttggttttattactgtcgagatgagatggactggagagagctcatacagcttttataggaactattttatttataagaattttcctaatgtcagatggatgtgacatgcctggtttctttctgcccgctattgagagaagagaggtatttagcatgg

SEQ ID NO: 145245 - DNA, 651 bp, Homo sapiens
aggaaggggtgaagagaaaagaagaacaaagaaagaacagtggaaggaagaaagtcattcaaatggagaggcagagtggcagagtagaaaaagccaggttctctactcagactggagagaggatcatacctctgtgtgctgtgtgacctggtgcaagttaagatgtcataagagacctcagatctcacatacggaaacaagagacgacccgtagttcacagaaaacaaagatgcgtatgaagaacctatcacctagtgggtatccataaatggtggttgttgctggtatcctgtgcccgcaacattccacacaaacacacatagagaaaagtaatagctaatgtgcatctgtgcatcaagcacatccaacttgctagaaatggggttaaatctcacattatcttatggcaataattttcagtcaagattctgagtgacagtcaacaaaaaccaactttggataacttaagcaaaacaaacaagcaaaatttgttcaaagaatattggttacgtatggaacactctctggagagccaggcttgcgtgctctgaagctcaattccaagcccaagattaggtcccagaactagtttagtgaggggatccagagctggtgctgtgcatagctagctcagctttgatgctagatgc

SEQ ID NO: 145246 - DNA, 563 bp, Homo sapiens
aggaaggggtgaagagaaaagaagaacaaagaaagaacagtggaaggaagaaagtcattcaaatggagaggcagagtggcagagtagaaaaagccaggttctctactcagactggagagaggatcatacctctgtgtgctgtgtgacctggtgcaagttaagatgtcataagagacctcagatctcacatacggaaacaagagacgacccgtagttcacagaaaacaaagatgcgtatgaagaacctatcacctagtgggtatccataaatggtggttgttgctggtatcctgtgcccgcaacattccacacaaacacacatagagaaaagtaatagctaatgtgcatctgtgcatcaagcacatccaacttgctagaaatggggttaaatctcacattatcttatggcaataattttcagtcaagattctgagtgacagtcaacaaaaaccaactttggataacttaagcaaaacaaacaagcaaaatttgttcaaagaatattggttacgtatggaacactctctggagctggggcctctctgggtgcaggctgtatacta

SEQ ID NO: 145247 - DNA, 173 bp, Homo sapiens
acacctccagctcctcaaatgacccttcttcgattgttgcaactaccctagttcagaaccttaatatctcccagaaggattataagatcagacccccttccttgtcatggcctttcctttattgtccccagttctgattgatcttttttttttttttctgagatggagtctgc

SEQ ID NO: 145248 - DNA, 330 bp, Homo sapiens
tgcccgctgtcagccaagtgtaggtggactgtgatccgccttgctggaattaagacagtgggaaagccatacttggaaggaaataattacataataattacaacctgaagggttgtactgcgttctaggtgtccaagtttaacttggtccaagggaatcagaggaggcttccttcaagaagtaaggcttttgctgagacctgaagatgttagaaagtgaccatcctagggaccatggagggatgttgagttccgatatagtgaacatcacttttggaaggtgaggacttggcccttttgtgggactgaattgacactagtgtggctggag

SEQ ID NO: 145249 - DNA, 450 bp, Homo sapiens
gcctctggagctgtaaaacttctttcaacctatggtaattatgattgttaaataaaacaaaaggtcaagacacacaacttaagtagctgaatagcctacacgtttttgattatttgtgaaatataatcatctttagacaatagtaaataaaagatatttcttgtttacagatatttcagtgtaagttaattgtgacttggttgtaagcctatgttgaccaaaaggttaaaccacaggcaggagaacttaaagaaatgtaatgtgagttttgttttgagccaagcttgagaactactagcccagtaaagagactccacacaaactgagaatgcgtcccagagtgggccacacgagacacagcatttatacatttctgttatatagaaaatgggaaaagggggcagtgaagcaacggtgactttcttaattcagattggtgctcggtgacat

SEQ ID NO: 145250 - DNA, 233 bp, Homo sapiens
ctactgagcagaaaggaaaatcaggggaatagggagctgggagtcagatgccaggtggcagcctgaaaacccattgttaggaagttcactctgagcggcgagtaggaacttttatcttggcaactttaatggagaaagaacagggaggcaggtagcaggaaaaacatgggcccctaagtcaggagacacagtcccaggcctggccctgggacacataagctgcagcaaaacta

SEQ ID NO: 145251 - DNA, 293 bp, Homo sapiens
ttcttgcagacagctctgtctactctcccatctgatctgtgcctcccctctccagctcctccttcttttcctaaactgcctgcccatttcactcgcccgtgcagcatgccaggcattaactctgtctgtaggatcaaaaagatgaactggaggatgtcccagcctcaggcagacaaacaagatcattgcagagaatttctgttgccatgggctgggcatcatcctagagccgagaagggggctctcaggggtgccaccctgccttgatccttcagctctgcaaggaacccacg

SEQ ID NO: 145252 - DNA, 835 bp, Homo sapiens
ccacagctgccactttgaggacacctgggctggactccagctgtgccctcaagctctgttggccccggtttcctggtgctgcccacctcccacctcccactgttgtagtgggggtagaatgaggcaatcctgtgaaatgagctggaagtagacaccatgtatcttttcattagagaagcaaacccccaaaggagaagcattgtcaggcttctctctttgccatggcctttgcctatacccttgagcagtgatctgagtcggctgagatgcagatgttaagcctgggcagaaaagcgctgctctctgcatggtccgggagagacccctctccagccggtggcatgctcgttacgcaacactgcctcatgtccccaggttcatcctgacggggtggtggggcttgatggagactggattcctgcctcccaacccccacaatcttctctcccatgtaaaaaacaaaaccatttcattctggttaaacctcctcctcgttggaaatttagaaagtcaaggaaagctgaaaagaagaaagtgaaaattatctgtcattttcagtcagataaaagttaatatgtattgagcccttcagctgtgtctgccagtgttctaaatcctcaaatagatcatctaatctttcaacaaccatatgaagtaaggactgattatcctttttttataaatgaggaaattgagtcacaggggggttggtagctagtctaggatcacacagtttgttggagggggtagtgtatgcacgtgcccactttttcataattagggttatactttacacatttctgaatcttgtcttttcttctgttaacattgtatc

SEQ ID NO: 145253 - DNA, 282 bp, Homo sapiens
tcaaacctaaggcctttgtggcatgggctcacaagggaatatcctgatccatgggttgcaaagattcatgggagaagcatggtttcccaggcggagtggcacaatctctcaccacttcccttggctaaagctggaggttcatttggctccacaccactcacaggtgggctgttgcccgaccctgctttgcttcattctctgtgggtggagtaaattgcctagtcagttccaatgtgagaaccggggtatttcggttgaaggtgttgaattcattcacccttc

SEQ ID NO: 145254 - DNA, 393 bp, Homo sapiens
ctcgtctgccgtgtttgctgtgtggatgtgcgttaggacagtgagctcgtcttctgtgtttgctgtgtggatgcgtgttaggacagtgagcccgtctgccgtgtttcctgtgtggatgtgtgcgttaggacagtgagctcgtctgctgtgtttgctgtgtggatgcgtgttaggacagtgagcccgtctgccgtgcttgccggagaagtgtgagggcctgctgctgccagcccctgttccaggaagctccaggtcccctcgccacccaggaactaagggttaacacccagcgcatggaggcttcccagaccctctgctctgacctttggggcctggaccccagtgcagtgaaggccagaaagcggcaggggcgcatggtgcccgggggcagcc

SEQ ID NO: 145255 - DNA, 301 bp, Homo sapiens
ctacctggctttgaatcctgactccacaagttctcagctgtgtgactttgagtttattacttaacctctctgtgctccagtttctgtagctgtaaaaggatgttttcaaaaaacagtattaggccaggtgtggtggctcatgtctgtaatcccagcactttgggacggaggacaaggcaggagggctgcttgagtccaggagttcgagaccagcctgagcaacataccaaaacctagtctttacaaaaaataaaaaattagctgggcaagttggtgtgtgtgtgcctctggtcccagctac

SEQ ID NO: 145256 - DNA, 420 bp, Homo sapiens
tatgacggttgacagtgaaggactctgttcctcagcgaggaccccaaattagaaacctgggtgctgtgcttacacttcatgtgtgggtgatgaaggggaaaccatgggattgctaaggctcaggttccaccgttgcaaaatggggctaatacctgcggcgttggatgctgggaggattttgaggtcttatccatgtaaagtgataacagcacctgacacacaattgctctacgaggacagcagcgactattgtcatttaaagaaataaatcatcatatcctctcacttacccttcattcagtaagttggcaagacctgtagattttacttactttaataccattgactctgccctggctttctaatccttctggtttggcacttcttacacaattcccgccataattggatggatcacac

SEQ ID NO: 145257 - DNA, 329 bp, Homo sapiens
tctccaccagattagagacttcctgagggcaggggggtgatattcaggttatctccctgtgagtcctactataccatgtatgcacctttttgctgtttggattatgaggaaggaataggggtgcctgggggcagctgctgattatcaacttgtgtaagcatttcagcacagtaatgaccagcatagcactgtttccatctgcagcccctaacacgtgatctgctgcatagtaggtgctcaataaagatttgttgatggaggccaggcctggtggctcacgcctgtaatcccagcactttgggaggctgaggcaggtggatcatttgagg

SEQ ID NO: 145258 - DNA, 422 bp, Homo sapiens
ctcagtgtggttcctggcccagcagcagccacatttgttagaaatacacattcttgaatcccactcagatctactgaaactgaaaacctgggagcagggcccagcaatcaagagtttttaacaaaccctcctggtcattttgatgcacacgcaagtttgagaacctgtgccctttaggaggatttccttttcctcactaaaagccccctgaaagatgcctcagggtatgcctctgtgccctactgcccactgctgctttcctgtttcctaggaatcccctttatgaagtacccatcctccagaaagatttcttacctaccttgaaaggatcttggcttctccacaaggttactccatcctctgagcagttatttccgattctacttttgaatggtttcttttcagatcttcctcagtgcttt

SEQ ID NO: 145259 - DNA, 188 bp, Homo sapiens
acttcttctcccacgccaggacaggaggacaattagcaccaacaccatcatcctattaataactaactgtactgttctgtactgttctaaggactttttttgtttgttttttgaaacagggtctcattctgtcgcccagactggagtgcagtggggtaatcacagctcactgcagccttgatctccca

SEQ ID NO: 145260 - DNA, 256 bp, Homo sapiens
tagactgaatgtaggaagacagagggggatgagacaagccacaagttcagccgggagatggagggttcaaagaaagtttgcccaggctgccgcagctcacagacttctctctgcccagaactggaagaaacactaaataagttactgggaatctagaggcttgggtgtgaatcccaccagctgatctaggggaatctcattttcccaatcagtaaaatgagtgtgttagactagatgagtcttatgggtctggctt

SEQ ID NO: 145261 - DNA, 173 bp, Homo sapiens
atagacgacacacttatgtttaaccctaaaaataatatgaagcacattctattatgaagaaagtagatccttaaaaatataaaatatgttagcttataaataccacaatatagctgataatttgccccatgaaatatggcaaagtacaactgaaatcattttaatgacccttg

SEQ ID NO: 145262 - DNA, 438 bp, Homo sapiens
gaacgaaggccacactttaacaccatgagctcttgtgagagctccctcactatcatgagaacagcacgggggaaaccacccccatgatccagtcaccttccaccaggtcccttcctggtggggacacgtggggattacaattttagatgatatttgggtggggacacagagccaaaccatatcaccagacaatcatgatgtttgtgaatgaagacagttttacttctttctctccactttagataccttttatggtcatgtgtctcttaattgtgaggatgcattcagagaaatgcattgttaggcaatgtcatcattgtgctaacatcatagagtatactgcaccaaatactgtaggcaattgtaacacaatggtaaatattttagtatctaaacgtaagtagaaaaggtatagtagaaatataatcttatgggacc

SEQ ID NO: 145263 - DNA, 263 bp, Homo sapiens
ttctcttagctgtgcaagagttttaccttcatttaagatgagattaacattacctttctttgctactttttcaaagaactgttaatagtatactgcatagacatgaataaaccatctcttttctcattttcatcaactttttcctaaagcatgacccttctctcagaatatatatagaaaaaaatacagatcctattgcagctgaactgaatttgaagttccccatataaactgaccaagaggtactgtgagaaaaacagcag

SEQ ID NO: 145264 - DNA, 296 bp, Homo sapiens
tacaccggctactacttcggggctccgccggcaccggcgactgtctggtgagtgggccgggccaggcgttggttcccagcccagctcaccctgagggactgggagctttccatgcagttgattgcctgccttcatgtggtttctgagctcacctggctgtgttcctcctccgcctttcattatgatggctgtccggtattcatcctcactgtttttgttattgttgttaaatgaacgccttgttcttgaacccacactgcacatcttgactggcaggggtgattagtttagaaaaa

SEQ ID NO: 145265 - DNA, 405 bp, Homo sapiens
  misc_feature (24)..(24): n is a, c, g, or t
cggtacccgggttactgcactgancggaaactgcactgacaatcaaaccctcaggaaatgctgtaggatcccccttcaaaatgcacgcagaatttgaccacttctcacaatgttaccactatggccccagtggagccaccctcttccctgggtaacgctcagtctcctaaccccgttcctgctgctctaccgcctcctacaggccttcccaacatagccgccagcaggggcctgtaaaaatggaaggcaggccaggtcaccaccctgcccagatccctcacacactcccatccccctctgagtaaaggcaaatccttcccaaggcctaggaagcccaagatgacccgctcacaaccatcactgccactctgacctctttgcccacactggtctccctgctcctcc

SEQ ID NO: 145266 - DNA, 196 bp, Homo sapiens
tctaagaattcacagtaatttctcttgaagcctcttgcctagagatgaatgcctgttgtttggagtagtcctaatgtgttagtgtattgaagcatgccttatagcaacagtatcctgaccctgaaaagctgtgttgtggattgacattatttgtataaatgagctatgttaaataaagaataagggatttacaatc

SEQ ID NO: 145267 - DNA, 338 bp, Homo sapiens
aaaaaaaaaaaataaagcatgtcttaaagcataggtgggtgatccacaatttcaggaatcctaaagcaggaaatcaaaattacattagttgaaggctattttcaaccatattgagttgaattagtagtctatactatgactgaatgacagttgtaacggtgcgtcttcctcttaatgggtccatgagatcttgaattcaggaattttatgacgctttggaaaaaatgacttaaaaaaacagacaatattaaagtcctttatccatcagagaattcaggtcagagaagaaagtaatagctaatagattatatgagatcaacctagaaagaactatgttc

SEQ ID NO: 145268 - DNA, 124 bp, Homo sapiens
aagaagagtttcgaggcagaataatatatatatttagagaaataatggctgaaaatttttcaagtttgatagaaactataagcccacaggtccaagaagcttaataaaaacgcaagcaaaatac

SEQ ID NO: 145269 - DNA, 542 bp, Homo sapiens
actatttataacacagagtgccaggaggagctgcagctagaaagcatacaaatgtttttagggttcagaagaattccggagttctctgcatatttccaccacacaagaggaggattccgattctggcctgacctttattcccttccttattccttgtcttttagccaaaatcacatatccaagagcctggccggtgccagggtgggcctcctcccctcacttagtcaagaaactcagatgctgccacagtcacaccgctgaggcaggacaagctctgggcactggacaaggcacagggatgtggcagtgaacacaggaatcccactcatgctgtggtggcctcctgtggggtcacaggatcactgaaaggaccccctgagggggtggaggaggccctggacccaggcctggcacatggcacatgcatgatcaaagtattaagtagctgttgttactacaaggccatgaaaatagtgcaagtcaggagtatatcagtaaagaacagaggcccatgtttaattcaaaataatgtccaaaaacta

SEQ ID NO: 145270 - DNA, 693 bp, Homo sapiens
cggacggcgtgggtcgacccacgcgtccgggtttttctgcatgcacaacttggggagtttgtacagacattctctgctttgtttcacaacatccttaggagacaagctaaagtgcctgttagcgctatattcattttaaagatagacaactgaagtatagaaaggttaaagagcttgcataattactccaacagccgactgaaacatctcacaaacagcaaaaaaggtttgttaataagatatcatcttcttgcgttctagtcactgggaaatattctttattttgataccagttttgttcagacttcttagattttcagagcactgatacgaagaagataatcacagaaactgtatcagatctaaagcctctttaaatctttccgactatggtaaagtatattttaaaagcagcagtctctcacactggtgctaccagatatggccccataagcatctggctctctgtagttatagaaaaagtcagcagctcgttttgtttgttttttaagcaggagagaaagcttttgccattgtcagattaagtgttgggccttgttgctatttgcaaaataaacagctttatttccttcccactcacccttataacccagggaatacttggcggcaaagagaaagtctctaggagtagctcaacttggtcttgccctttttcttaacattcagaccccc

SEQ ID NO: 145271 - DNA, 237 bp, Homo sapiens
gctttaaatcattccccttcgacagtttagttttaactatactgtatgtacccaagccaaggatgggaggagaagcctcagtaactagaattgttattaaaaccatatatccaactccactggcttttctggaaacctctacctaaaggacgtttaagtcgtctattaaaatatttcagacttgccctgaaggaggcaccaagaagtgccacaactttgcaggctagtgaccacaca

SEQ ID NO: 145272 - DNA, 158 bp, Homo sapiens
ctggggtggggatgagttctgggagggcagcttccttccagggtaccctcagagcccacagggcagagtggcaatccagtctaggtcagaatgttcagtgtcttggtccttgctgtcctccttcctgcgcaaaaggaaacaggatccctgtgtgggcc

SEQ ID NO: 145273 - DNA, 233 bp, Homo sapiens
tcactaagctcaaataacccacaaaagcaggatatgcaaatcatgggtgcaacctggcagcgtggagtgtcatagaaacacattttcttggggacgcagggaatgggtccacgggccatgctcacagctgccactgtcagtggcaaaggaaggtacgtgtgtcacccttattccacccagacattacgaacactccccaagaaggacctttctcaagggagtcagcattcggg

SEQ ID NO: 145274 - DNA, 475 bp, Homo sapiens
gttacttttccttaaaaacagttattattttttctaagtatttcaggccttgcattggagacgagggttaggagaggcggtgtggctgcctcttgtgtggaatggggaggaaggagagaaagcctgcggtgggttgcggggatgcttttcctcgcgacactagcttctccctcccccgcccttgcgcttggttggatccagatgggtgggaagggatggaagttgacgctaaaaatcaccgaagggcaggtaagccggggcggggtgtgacggtgcgggcctcgccacccggcaggtgtgcacccggtcgcttccgcaggtgagcgcagcctttctgctccgtcgggcctggtgtggcagcggcagcgatttaatggtccttaaagcttccgatctcaaaatggaaagactgaagtgtcaagatgacttttcaggtggccctggtgtcgggcaatcaaggttcctcttcgcccct

SEQ ID NO: 145275 - DNA, 820 bp, Homo sapiens
ttatcccttccctctattgtgtaacagacaaaaggaaaggggtgcctatccatctaggcttgttgtgagagccactccttctcagtgttctttactttctgaaaggccctgtgactggaagtcatcctcttttagttttagccccagcctctctatctcagttgctgagacttttctgctcctacctcactccaggcagcaagggtttcatttctaccatactgaaagtggcatgaggccacatgggcccttgagctcactggaagatagtctgggagttctgctgggcactgctgcttcttggcttatgcgtggatgctctaaatcaggcattccggcagatcttaagatctggtgtgagatagccccaaggactggtcaacccaggaacatattacaggatggagtctacttatagtccagagatttgcctcctatgccttgatttctatcagttctccatacttgcctaaatattctttgagactgcttttaccctgtgcggccacttggggtctcacgatgtccaaaaacacttccttttaatttgctgtaaaagcactattttcctcacgaggctttaaggaaagtctgaagttccaatatccaggagacttgtgccatttctcaggtctgtcccctgtggcacaggaaacagcctcttaatattaagtctcagaaatacacacattctgaatagaaccaggcagataggtgttcctgggcctcagaaccctgctactcatcgttcctggcttctgaggtgtgtgatggaagtcctagccaaatctgcatggctgttatttaaacatatttgtac

SEQ ID NO: 145276 - DNA, 373 bp, Homo sapiens
aacagctgtgcaggacataaataaagcttttctgacttttatgcacatagtcttaaccataaatgttacatcaattttttttgtattactcatgggagacaagttattcttctaaggatttgtccttttgtttttttaaacctaaggcacatggaactagactgggcattaaagttttgaaagtccttagaattgggcaatttcttgtaatattggggtaactgcaaaaagagggggagtgggtattgagcctggtggttaggctcagagccaagagagaagtttcccagaaactgttggatctattttctaccctcctggaaattccatctcttttcattaaacttgtccatgatatgagctgttgttctcc

SEQ ID NO: 145277 - DNA, 344 bp, Homo sapiens
cattcaggggaccaagaggaggcctgctgtggtcaggacacggaaacaaggtggactgggcaagagacgagatcagagaggtggggagacagatgagtgaatcagagaggaagaaaatgatattccaagcctaggccctgtgtgctttacacatgtatctcacttaatcttcacgaccatcccttactgctgctgtcatgtaaaaggtaccattggtgagtactgggactgaagagtagcccatcacacacacacacacacacacacacacacacccccacatgaaccctactaaagtttgaaaggaattccttcagggcttagactttgtaatagctctctgg

SEQ ID NO: 145278 - DNA, 1000 bp, Homo sapiens
aggcaaagattttttagctatgacatcaaaagcataatccataaaagaaaaaaaattgatgaattggactttatcaaaattaagagcttctgctttttgaaacacactgttaatggaatgaaaagtcaagccacaggctggaaaaaacatttgcatatcacatatctgataaaggatttatatctaaatatataaataactcccaaactcaataaaacagctcaataagaaaaatggggaaaatattttaatggacacttcatcaagagagagatatggatggtaaataagcacatgaaaacatgctcaggaaaatgcaaattaaaatcacaatgagatgctactacatatctttagaatatttaacattaaaaagatttacagtatcaagtattggttaggatattgaagaattggaattcttatatgttgctggaatgaccactttggaaaacagtttcttaaagagttcaacaaaaaatataactcagtaattctgttcctagtggaatgaaaacaggtgttcatacaaagacttgaacaggaatgtccagagcagctttattgtaatagccccaaactagaaacaacccaaatatctatcaacaggggaacagatacacagatttttgacatattcatataatgaaatacttctcagcattaaaaggaataaactacttatacatactaaaacataaatgaatctcaaaataactacagagtgaaatataccagacagaaagggagtatatagtatatgattccatatatagatatacgattctagaaaatgcaaatcaatttataatgacagaaagaagttgtggttgcctgggtaggcagggattggattgggagcttacaaggaacacaaagaaactttggggtgatagacatttttactatcttgattgtggtgatagtttcaacttattgtatacttcaaatatagtttatgtaaattatacctcaataaagctattgttaaaaatctgct

SEQ ID NO: 145279 - DNA, 211 bp, Homo sapiens
gtttccccacagagaatggctgattgcctcacctccttaacgtctttgcttaaatgtcacctttttaatgaagtcttatccttcctttctttaaaattgtattgtcagttcccatccctcatgcttatccttgcctgctctattttctttttcataggacttaacacttttataatatatttatttgttacatttattgcctattggttct

SEQ ID NO: 145280 - DNA, 580 bp, Homo sapiens
cgtctcccttgctatgtggctttgggtagttttcctacttttttaaagcctcagtttcctcttctgtaaaatgaggccaataatattattcccccacaattgcagtatgtggaactgcagcacaacgcttggtgcataatagtgaggtaggaagtgggactcgactccagaggcggggctcgggcaccggaccacattgaggactagctaaaacagaaccagggcagaagcagctttccaatcagacacgcttaccagtgtgacatgtcggtttaccattgattgccatggtaacacctgggagttactgtccctttcccattgattgccatggtaacacctgggagttactgtccctttccatggcaatgacccaatgacccaaaagttactaccctttccctagagatttctgcataaactgccccttagtctacatgttattaaaagtgggtataaatgtgactacaaaactgccctgagctgccactctctgcctgtgggatagccctgctctgctggggctgtcacggagctggaacactgccacttcaataaagctgttttcttccatctcagc

SEQ ID NO: 145281 - DNA, 822 bp, Homo sapiens
ctgcctacatgctaagatttaagtaatttcactgttaatcggtgctgtttctaataaaaatgaaagattacattcacaatagtaatttttcaactttggaaatggctttgctacagaagatggaaattacagaacagtgtggaattttgtcacagtccatttatttcaatactctgagcactcctggctaacaatctaacctcaagggttttcagaatttgcagcagaagtcggtgttggcagtgcaggtgccttccttaggacattgtcggagacacatgcaaatgtctctgctggcagccaggctccagagaccctgacctggtgcaggcaggtgccgctgcagcgggtcagttcagagatgcatgcaaatgtctctgctggcagccaggctccagagaccctgacctgatgccggcaggtgctgccggcagcaggtcagttggtttaacacccagttgtgcattaacgggtgggctgtaaatttacatggtcgatcagagagacctctgtccacttgctgttgtcagcagctactctgtttaccacttgtcaccagttttctccaaccaacataatgtcccttttctaatggcaaagaataagcagattaaacccagacatgtaggctgattacttagagaaaccagcctccatcatcatacatcaagatcgtatctatccgcttatcagtacatctgtgtgtatcccgttatgtagggaatcttgaacactcacacactccacactcacacaccacacttacacacacacactcatgttctctcacagactcacattttcttacacactcacacagtc

SEQ ID NO: 145282 - DNA, 284 bp, Homo sapiens
gtggtgatcagggcgtagcttgtgaaggggttgggggtgtgttgagcacactggatcgtattgaattgtgtttcctaagtgaccgtgctagctcaggctgcagtgacaaagcaccacagactggggtcttattcctgggggctggcatttgccatgaaggtgtgggcagggctggttcctcccgagccctctctcctgggcctgcaggtgccgtctttccgtcttttccctgtgccttcccggggccatcctgcgtgtgtctgtgtcctcggctctcctggaga

SEQ ID NO: 145283 - DNA, 519 bp, Homo sapiens
atggggtttcgccatgttgcccaggctggtttcgaactcctgagctcaggcagtccgcctgcctcagcctcccaaagtgctgggattacaggcgtgagccaccacgcccggctgttactgtttttcaactgtcctgatttagaacagtttcttacctgttctttcttttgtgatgttgatatttttgaggaatacagaccagtgattttagagtgttaccctcagtgtgcgcctggtgtttcctcatattagatacagattagatgtctcaggcaggaatgatgctgttttgaattttgatgaagtctaattattaaaagtttcttttatggattgtgcatttgttaccaaatttcagaactcttcctagtgccctggttctttggagtggagaatggcatttggaaacctatgtctgaatgttaggtgtgcttggtagtgttagtgtgtgggcgctcctcggctttcagtggacagagccagagaatatgtgcatgtcctgagcctcctgttcgtcct

SEQ ID NO: 145284 - DNA, 217 bp, Homo sapiens
gagcctgggaggtcgaagctgcagtgagtggtgaaagtttgaaaatcactgtcagagcccaaagccctggtcttgttattgtatagtcagcgtcagagacaactgtgaagttttcttcactctggatgcctaggtgttaatctgggattgaggacttctgcctctaaaaacaatgattccagctttggatataagatccagttgtttatgaccccta

SEQ ID NO: 145285 - DNA, 374 bp, Homo sapiens
ctccagcaaccctactccaattgtgaccatcaaaactgttcacagacactgcctggcgtcccctagtgggggagtaaaatcgcccatggcggagaagccctgctccagagggaatgttcatacccccactcatccaggacaaggaggggcttctggtgttactgggaagggacacaacctggccttggggttggctggaggtggctgcatctctgcagtggcactatttttgggtctgtctgccgagctcctctggatgtgagccctggcccttcctttccagttgcttaagacccatgagtggggtgggtgcgagggacgtcagctccatggactcagcacctggaactgcgccagggggagtatgtgtccaa

SEQ ID NO: 145286 - DNA, 949 bp, Homo sapiens
tgtgtgtgtgtatgtgcgtgtgtgcgtgcgcacgcgcatgtttagcaattcttagggttaagacaattcatttgataggcctgggttgatgaactcaacggaagttgatgtgaataaaaatgaaaatgagggcttggcgcggtggtccacgcctgtaatcccagcactttgggaggccgaggttgggagttcaagaccagcctgccaacatggtgaaaccctgtctctactaaaaaaaatacaaaaattagctgggcctcgtgggaggcacctgtaatcccagctacttgggaggctgaagcagaattgcttgggcctggaaagcggaggttgcaatgagctgagattgcaccattacactccagcttgggtgacagagcaagactgtgtctcaaaaaacaaaaaaaaaaagaaagtgagattgagttcaaagggaagtcattgcaaggaggcagtgccagtactaaacttaatacctccgtcctgtgtagacacatccactttgttgaatggaaagctggcctcttactacccttcaactactttattttttctgatgacttgtaataaataccgtctacctggaagtcagtgtgttacaattagaatgtgaggattagaagaaactaatataggtaggactaggaaaaaataataggttagagtgataaagtaaaaattttaagaatacatgcaatagtataaaaatcaaaagatataaaaagattatgtatcaaatataaagctcttatcctctagccatctgattcccttccttgagagtaactagaatagtttcttatgtcttatttatcttttaggagtagcctatgcatttacaagtgtatacatacttttttgtctttccttgaataaaccaataaaatacttatatccttttgaaaatatacaaaaggtagcagcatacaatacacaccatttaccattt

SEQ ID NO: 145287 - DNA, 406 bp, Homo sapiens
ctgtactcacctattttggaaccactgtttcagaaagcaaaacagcagataaagagagacaaatgtacttgttattaaagacactttgagttgagttttctgttacttgcagcctaatacatccaactgatagggtggagttaagaataccttcaaagcataattgtaagggcctgaggagataaaatagatagaaatgcactgtaaaatgttaagtagcatataaaacgaatatgtttttattattgagtgcttaattctctgtcttccacatcttcataagtgtcatttttttcaagatctttaaaacaaaacaatttccaaatataattaatattacctcaacataagtggagaatgataagatagcaaatagaaaattgatcctgggttttctgtgataact

SEQ ID NO: 145288 - DNA, 506 bp, Homo sapiens
gctaaagccctcatcatccctctcctgttctgcaatggacaacggagtaaggccagcagaagaggtgaaagcaccgatgagcagaatggaagcaagaaagagcaaagaccaaacgggcagagagggggcaggaggaggacaaaggctgggcagatgtgctcaacaccagcgcctcccccaggccctctgcagggacagctggatgacttgaactctgggctctctagctggcgcagtcccaccctcttaatgccaatccctttttgtctccatgaaacactatgagatgattggccagcatggggttgacccgtgccatggacaaggatgctgatttgggacagtgtcactattttccaaaatgccatagcaaagtgtgtcccaggaagaggctgcacaggtataccagcccaggggtaactaacaccacttatgtagagctggctgcaagggctggccggcaggaatcacatctacacggagagaaaaattagttgatcttcgga

SEQ ID NO: 145289 - DNA, 245 bp, Homo sapiens
ttgctgtgtatccttggaaggtgctagggcctgtaaaaggctggtgaagcagtgctcatgttttctctacttggttaaaataaagaaggagtacgcccacgtgtgctggtacgcccatctggatgtgaccttttgttcagttgagctggtaattgcaagtccggatcttgacctcagcctactcattcctaacccaagtccagttcctctccatctgtggggtggtccatgtgatcctggcatag

SEQ ID NO: 145290 - DNA, 410 bp, Homo sapiens
aactattatatattagggttttgaacttctatgctaacataggtacataatattctttttttctgtgaaaaagttctcagaaatgtgcagaagaatacttttacccatttgcttttactttatatgtcagacaaaaatctaaataaaaagagtctcacagtgttgcccaggccggatccagtgaagtgatgtgatcatagctcactgcagcctcaaattcctgggctcaaatgatcttcctgctttacccttccaagtaggtagggctacaggcacacaccaccatgtccaactaatttatgtatttttttttttttggtagagatggggtctccctatgttaccaagactggtcttgaactcctggcctcaagtaatcctcttgctttggctttccaaagtgttggcat

SEQ ID NO: 145291 - DNA, 517 bp, Homo sapiens
cttagtagaacttctttcctatacacatgggcaaacaatgctgttccacagctcctgtgtctccatgtcctcattttaaatactagtggacatcacctgtagtcctctgtcctacttgcagttctcaaggccaaaaatctcactgggcctggtctaatcagctgtggagggcaggttgttcttgttcttagccctaaataggtgacagtagcctttagtgaaggtggccagtggggttgtgaggcacgcccggcggggcctgctacagtaggagccatagaggcaaatctgatacattagcgtctcttgtgtctggccaaggcgttcctcattgtaaaatgcgatgctttctatagcatgtactcttgttcatacattaaaaacaacactgttggccaacgattgtttttttcagtggtaggggtggattttccttcgttcattccgtctttcgtctgttctccttacagccttgagcacagagttgttacttgactgtactgttttgggggtgtag

SEQ ID NO: 145292 - DNA, 342 bp, Homo sapiens
cacattccagaagagggactcagaggtcgttggaagtgtatgccaggaaccactgagcaaggcccttgtctctctttgtgggccttcttcagacacttccccctcatacacgggatctgggatcattaaacatctcattgtcctttggattcaccagcttttgaaagtgctgctcctgctggaaaagccctcgcttccactcttcacctagaaaacttctattcattcattaaggcctgacgtcacgttttctgggaagtcttccttgcttatcccctgacaaatttgattttttgtcaaatttgtattatttatatctttgtgttattaaatttccatcac

SEQ ID NO: 145293 - DNA, 498 bp, Homo sapiens
gttgcttcttatagataagcagagagagtggtttcttgagatagaatctactccttgtgaagatgctgtgaacactgttgaaatggcaacaaaggatttgaatattccataaacttagttgataaagcagaggcagggtttgagaaaactggattgactccaattttgaaaggtccactgtgggtaaaatattatcaaccagcatcacacgccatcaagaactctttcatgaaaacaagtcaatcaatatagcaaatgtcattgttgtcttattttaaggaattgccacagccaccccaaccttcagcagccaccatccagatcagtcagcagccattaacaaggagcaaagaccctccaactagcaaagaatatgacttgctaaaggcctagatgattgatagctttttttttttttgagaccgagttttgctcttccagcctgggcaacaagagtgaaacaccatctaaaaataaaaataaatgaataaaaaaaaa

SEQ ID NO: 145294 - DNA, 398 bp, Homo sapiens
aaaagcaaaccctgaccaaaacactccctcccatatgcaagtatgtttaaatatttgtatgagaatggagaaagattgcagagactgggaggatggattagaggcgggagggagaaagggaaaagaagaagaacactatagcaaaatggaaactaagattataatgtgcttgtgtaccagatggaacttctaataagctcccagcctattagagtacagcgctgaaaactagacttcaataattaaagtccttgctctgccacttaccagctggggattttatcagcctcagtttatcatacataaaatgcagataataatggtatctatattatgcatttgatctgaggattaatggagtgaatatataaagaacagtgcttaatacatagtaaata

SEQ ID NO: 145295 - DNA, 190 bp, Homo sapiens
gttggggtcaggatatcttagacttattaaatccctctttattttcactaatgatcaccctttgagaatcaagtactggtgagcttaaaagcattatcaaatgaacccttttaatgagaactaagcagcctgttcatctgaacattaaatgattcaaaagtacagatatatagattacaaaaaatccttc

SEQ ID NO: 145296 - DNA, 494 bp, Homo sapiens
tcactgagcacctgccctgtgcagagcactgtgttccctgtttaggagaattagaaagatggcaagattttgttcctctccttaagccttacagtctagtgaagataatctgccttgagtagggaagaaaatatgttcctcttttaggtattttaagcagttgtttttcctctcacttcagttctgaagattttaagattaaaaaccataaatggtttttgttgattaaaaggacaggaaggaaactccatcataacttacaggttatgatgatattgcattatgataactctgtgaccagtgataccatcttgagtttagagctgacccagagaagttaaactggcctaaggtcacccagctggtaaactgaaagagaaggcatctgaatctaggtaccgctgattaaaacccatgcttcttctgtaatactgtaatcccccttaaaggacttttgcagttattgacattttctcccagaaaaaaaaacttac

SEQ ID NO: 145297 - DNA, 505 bp, Homo sapiens
ggaattccacccctacccagcagtactgaagcatcccccaaccctttctccttgggtagtgtcagaggaggcttagtggagcgtcagggctttaactgtcacccagttgtaacaaagccctcctatcatgatgttagtaggacggactatttgggaagcaagaactcccaccctgcccaatagatacaaggacccctctgcctattctgggtgtcaacggaggccatgtggcaggggctggatttccaccttcacctggcagtggcaaggtggagtgtctccttcctctgctggagtggtatccagaaagccagctaaaacgatacttaaaatccagggtctcataattcagaaatgtccaagtgttcattaagaatcattgtttgctgggcacggtggctcacgcctgtagtcccagcactttgggaggctgagccgggtagataacctgaggtcaaaagttcgagaccagcctgaccaatatggtgaaacctcatctttacta

SEQ ID NO: 145298 - DNA, 248 bp, Homo sapiens
ataatttatccacaggctcactgatacattgacatgctctctaaaatagagtcttatttataataatattctacaatatcaaagtaacattttgcctcttttcatttggcacccatatctttctctgtactttttaaaatctttttgttcatgcattgccattgtcatttaaaaatgtgatggattttttattaatgtccttgcctgtaggttaagacgcggtaccagagctcgcaattcgataatca

SEQ ID NO: 145299 - DNA, 488 bp, Homo sapiens
agctacctattccaagtcttcaggtgctccctataaagagaggacactcgattcttcctgaattttttattttgccttcgctttctcacactaagttatgcttatgcttcatggtcatatcaagctcagtttgggagatggggagataatatttcttctgtgagaaagtgttttgaaatgtcacaacaatttttagaaacagagatgggttttgctttggtctttaagtcttcctagtcttttgatcccactgttttgtccattagtcagcttctattatttcattaccaatattcatcttctccagaagcatttttcaatcagtaaatacatttgaaaagcataagaacctctttttaaaaatgacttatccagtggctcacgcctgtaatcgcagcactttggaggctgagccgggtggatcatgaggtcaggagatcgagaccatcctggttaacacggtgaaaccccgtctctactaaaaatac

SEQ ID NO: 145300 - DNA, 152 bp, Homo sapiens
aacgggaatgtttagcaaggcctgttcatttagatccctcaaggtgcccctctgccttcagagatgaagatgtttgtttgctccaggtggtgtgaggacaccttcctcatgaacatctcatgacctgcgtcaggggagaaggaaggggaagg

SEQ ID NO: 145301 - DNA, 165 bp, Homo sapiens
ctctttctctttctttatctctctctctttccctccttcccttccttccttgtctcttctttctttccctctctccctcccactctttctttctttccctccctcctttccttccttcctctttccttctcttctcttttctcttcctcccttccttttccttcg

SEQ ID NO: 145302 - DNA, 757 bp, Homo sapiens
ctctcctcgcattgcccaagatgctgaaaggaaagaaggccaaggggaagaaggtggctcctgtcgtgaagaagcaggaggccaaggaagtggtgaatcccctgtttgagaaaaggcctaagaattttggcattggacaggacatccagcccaaaagagacctcacctgctttgtgaaatggccctgctatatcaggttgcaaaggcagggagccatcctctacaagtggctgaaagtgcctcctgcgattaaccagttcacccaggccctggaccgccaaacagctactcagctgcttaagctggcccacaagtacagaccagaaacaaagcaagagaagaagcagaggccgttggcccaggctgagaagagagctgccggcaaaggggacgtccccactaagagaccacctgtccttcgagcaggagttaacaccatcaccactttggtggagaataagaaagctcagctggtggtgattgcacatgacgtggatcccattgagctggtcgtcttcttgcctgccctgtgtcataaaatgggggtcccttactgcattatcaaggagaaggcaagactgggacgtctagtccacaggaagacctgcaccactgtcgccttcacacaggttaactcagaagacaagggcgctttggctaagctggtggaagctatcaggaccgattacaatgacagatacaatgacatccactgtcactggggcggcaatgtcctgggtcccaagtctgtggctca

SEQ ID NO: 145303 - DNA, 319 bp, Homo sapiens
ttccatattaatttttactaggcaacaataaactctaaaggtataaagttacctgtgtaacaacagcttcctcctcaaaggtttctataagggggccaattaataccaactctagaacttatttgggttaacaacattgaaactgcactgaaaccacccactcatttctctgaatccgaagactaatccaaaggtgaccacacgcaaccactgctgactcaagcaagtgtcttagaaaggaaagacactatatccccatatatattcttatgaggtatttatttctcactttaagtggggaagattaacacactgaaac

SEQ ID NO: 145304 - DNA, 249 bp, Homo sapiens
cacgtgatggcacaaccacacagcgggggcacacgtgatggcacagccacacagcgggggcacatgtgtgatggcacagccacaaagtgggggcacgtatgatggcacaaccacacagcggggtcacacgtgtgatggtacagcacacggtgggggcacacgcatgacagtacagtcacacgtcagggcacacacgtgacagtacagccacacagcaagcacacacaaacgtgatggtacagccacatg

SEQ ID NO: 145305 - DNA, 432 bp, Homo sapiens
agctgggactgggaatgactgggtcacaggtgagggttattctggagcactcacagggaatactcacaaggaatgctcacgggctgcaatggctcagtaatcttgggcttgggtttaggagaagttggctcttaggaggcccaatctagagaatgaagcttccaagcaggaaaggcagggcagcacacaggtgactatcagttcaaactagagccctgcccatgggcagggtacagggactcacggaacaggagagctagagtaggggagaagaacacttgggggtcagacccaataagtgaaacgatgggcttgggctgcccaccatcactataggctaagagaaggccaccacgaagagacatcccagtgccaagggctcccccagacacaggtttatagcagcaaggctagtgcagcccccactatgaa

SEQ ID NO: 145306 - DNA, 332 bp, Homo sapiens
ctcgaactcctagtctcaagtgatctgcccacctcggcttcccaaagtgctgggattgtaggcataacattataggcatgagccaccacgccctttctttctcttttgtgacagggtctcactctgttgcccaggctggtctcaaattactgggactcaagggagcctcctgcctgagtctcccaagtagctaggattataggcatgcacccccacacccagctccttgatctttatgtatctatgaagccctccttgtaaactgaaggggcagccgtgttaagaacccctggaggaaatataaagaagtctgggctctggagtcagacact

SEQ ID NO: 145307 - DNA, 1470 bp, Homo sapiens
aatctaaactgcaaaaagcggtggtaagtttttgccatcacaatcctgtcttattttgatgtagtcagattgactggttggagtgttatttaggatcataaaggtaagtgggaaatgggtatgggaaactaagaagtcttggaaattagtgttgaataactttgaagcccttttatttgctggaatccattgggaggtttactttgctgcaataaactaatcaaaaaagtgatcggtggagcttgtgattggttgttgcaaattctttaaattattctaagtgcttggctacctagatgatagcagaagctagatcagatgaacctttttacctgagtattttaggacactagaccaacatttttaaaaaggactgtgaaatgtaaaacttaattttgccgtgtaaggacttttgaaaagacaactactatcttcccttaccattttattttaaaagtgactcccaatatttaggaaggacttaaactcagagtaatagagtaatttaacttgaataactttaagttaatgaaaaaattactacactggtattttctcatttactctgcatcactgaaaaatttatcgagttaattagtccatagactggcatttgggaagtgctataatacagttgttgaaagaactagtgtacttacaaagctgatattgactagtagattaataagccacatgtacactgttactgagatttaagacgtttttattgtgttaaattgtaagtgccatgtattaaaggggacactaagaactatagtgtctataaggaatgataaaaggctttgatagtctagagagtgagatgtggttgaagaaattggtgagtcttatttttgagaaggtaagtttaaagatagggagttttcttcagattgagtgaccttcatatatgagaaagaatagtatttgttctgtgttgttctgggtagaaaaattataagaaatgggagcttctggttttacgttgaatattctctaatgagaattctttcctttccttttccttcctccctttcccctcccttttctctcccttcccctttcaaataaggaataaaactataaagaacaaaaagcaacaaaaaaaatataaaaataagaacataaaaaaagaagaaaaaaaaaaaaaaaaaaaaaaaaaaaaaaaaaaaaaaaaaaaaaaaaaaaaaaaaaaaaaaaaaaaaaagaaagaaaagaaaaaaaaaaaaagaaaaaagaaaaaataagaggaggaagagaaggggaagaagagaagaaagagcgaaaggacggagggaaagacaaatgaagagggaaagaggaagggagagagaagaaggagacgaaaaagcgcaagaggagaaggggaggcagaagagaaggagacagcagcggcggggggaaacagggggaagaggaaagggagcagagaagggacaggagagcgaagagcaaagggtagggagacca

SEQ ID NO: 145308 - DNA, 226 bp, Homo sapiens
tggaagaatgattcattcatttcaaatttggcaacttaaacagcagcaaattataattttcccatcataacccaaagtcagtatattggcttctcagcctttgagggcccttttgtaccttcttttgctttgacaacagcaccctctgctgggttttgtaatccatcacctctaatgggatcgacccaaatcgcaaacggaggcctccctgcaacgttgcacacag

SEQ ID NO: 145309 - DNA, 447 bp, Homo sapiens
agccggccccgcccacgtagattttgctgtcccctttacctgcagtcccctcgtctcttgcttacccatcttccacacacttagccttcaacatcttaatctgtcctgtgtccttttccaggccatatgtgtgtgcccccagtgagagttcatcttaccgctcaattgttagtctttgcaagttcctctatcagagcacttatctcagtgtgccttatggaataattttgtcataactacctcctacctccccctaccactgcctgataaattatgagcttatcaaggcagggatcagcctttatttctctctctactgtcagcacagtgacatctgcatgggagttttgtaatgatggctttcttcttgaactcgggttagtagaaaggaaggaaaaatcactatatggaaacaaatgagatggatgtttctgagtattacaaatc

SEQ ID NO: 145310 - DNA, 997 bp, Homo sapiens
  misc_feature (969)..(969): n is a, c, g, or t
aaaggaggagatattttgaatagatgcaacatcttgcttctctttttattctgacaaatttttctgccctttattgacaattaactacagagttactaaaattttatttttgctttgatagctatgctttttttttaaacctttgttttaaaaatagatcatcttttttttttcttgtccttaaagaactctgtgatatttataatggttttgatcttatgagccaggtaactatttggtaatcattccttatgaagaaatttaattttcatttcacagagttttcattagcaacttccttaaatatatcttcatgagtgtaatgaatgtggttcagtaccttctgagctatctggatattagtagagtggcctggcatgttgataaatggagtgacctgtcagagtaaacctcctcaatttcttgtaaacatgaattattgttatttaattgcaacttcatttcaaaagaaaggaaagatgccacgtacatctaacaaataaaaataagtcactagaacgaagagtacaggaaagatgaggaaaagagaaaatttcttgtgtgattatcatgtctaaagatccattcccttagcacctaatctatttccaagcaattcacaattcttgagagaattaataaactttttggctctcagggtaccttagagagtatttttcaaactttttttttactttaactcagtaaatacagatggccttccatatccattggttctgtattcatgtattcaaccaaccgcagatttaaaatatttggaaaaaaaattgcatctgtactgaacatgtactgacttttttcttgtcgtgatcccctaaacaatacagaataacaattatttgcacagtgtttatattgtattaggtattagaagtaatctaggatttaaagtataggagaggatgtgtataggttatatgcaaatactataccattttatatcaaggncatgagtatgagtatctgtggatttggg

SEQ ID NO: 145311 - DNA, 343 bp, Homo sapiens
cgcctcggcctcccaaagtgctgggattacaggcatgagccaccgcacctggccaggtacacttctttatatgacctgtcctagtccccttggacattcaggtttggagccctgacacttggctacataggggaagagataaagctgcaaatgtgctgaggggaggtatttcttcatcctggtacctgataaggactttgccgagcttttgagccagcacttgtggaaggagtaggatttcaacatgataaggaagaggggctttcaggtgaaggtcagaagatgtgaggcagctggaaggtcaggcagggacagtggaattgttgaaacctcccatggaatt

SEQ ID NO: 145312 - DNA, 331 bp, Homo sapiens
ctccaccacatcaggctgcccacaggcacagctctttcctgcctggggggcttgaagaagttacttaacttccctatgcatcagtttcctcatagtaaaaaagacaattactgtacctatctagtaaggttactgagaggatgaaataaattaacttaaaggaagctctgtatgggtttaccatgattattagttgtatatccaacttcctcagcctggaaggaagggtcttctcccttttctctgccttgcgaactcccattccttcttaaaaatatatcccgagtgtcacctcctccagggagccttcccagctctctctccccactcc

SEQ ID NO: 145313 - DNA, 276 bp, Homo sapiens
gtttgggtcaaaaaaccactttattcacagcaagattggagttactcatgattccagtgacataatatcccgtgccctacatgggctcaatttttctgagatgctgctcacagcccaggatgctgggttctctgaaagactgtcttgaaattatcaatgagtgtgatgcttagggaacacccccaacatatttcattatttagaaagaaagaatttcctgagtagttaggctccctaacatcttcaataaaatgaccacattctgttctttcttgt

SEQ ID NO: 145314 - DNA, 839 bp, Homo sapiens
ctactgcacccgcccccacgcatgtctttaaggtagcatttgaccgtggttctcattttgcgtgtttatatattatctctctctatctaaaaatagtgaacagtgaagtgaagtagaactaactctgtgccaggcagcattctaagtgccgataaaccttacaacaatgtcgtgagttagatatcaccatcctcattttacagttgaagaaactgaggcacagagacataaataatgtacccacatcacgtagtaagtacaaaagccagaactcagacccaggcagcctggccccagagtctgttaaccctatactcctctggttctcagaaatgaagatacatgtcgattaagtttatccacttaaaattgctgcttggtgttgcactgaatgccacaatctacccattcctctaattacagcattacaattctgtaatacgtattcttgtgtaggtttctttgtgcaaatgtgaggaaatttttccaggttatatatctaaaagtagaatgactaggccgaaggatagcctgtagtcagcatgactaggttttgccaagttgctctccagtgtcccagtttgtagtcccaccagcagtgtaggaaaattcccactttcccagtgccagctcttggtattgttgactttaaaaatttttgaaagataaagcagtatttcgttgtttggacttgcatttctattttacaaaaataccatgaggtttaaatggcaacagtaaacttgcaagatgagttattaataggatgatcatataactggtcacccaaaccagaacatttgtgggagaaagggtgttccagtcccacagagtacagg

SEQ ID NO: 145315 - DNA, 659 bp, Homo sapiens
gtttgatatgaatttgttaattgtttatactcaggtaataagtgttacctcagtcatagcatttaatattttatctgactgtccctaaggctgaaaaccaacgaatatactaacacgaagataatactagattatatttgtgtaatattttagagttttcaaacactttaattttatttatttatttttttgagacagagactcgctctgtagcccgggctggagtgcagtggcgccatctcggctcactgcaacctccgcttccctggttcaagcgattctcgtatctcagcctcccaagtagctgggactacaggcgccggcccgccaccatgtcctgctaattttttttttttttcttgagacacagtcttgctctgtcgccaaggctggtgtgcagtggcgtgatcttggctgactgcaacctctgcctcccaggttgaagtgattcttgtgcttcagcctccccagtagctgggattacatgggattacaggtgcacaccacaaaggccggctagtttttctgtttttgagatggagtcttgctctgtcacccaggctggagtgcagtggcatgatcatggctcactgcaacctccacctcatgggttcaagcgattctcctgcctcagcctccagagtaactgggattacagg

SEQ ID NO: 145316 - DNA, 217 bp, Homo sapiens
gatagtcaactacaaattacttaaaaaaaaaatccagaactatgcatacgtcggcaattgtcccaaaaataagaatagaaaacataaggaagggaagaaggcttacgaaaccaattagcaagtgaaaggaatgatgtgatttggatagatctttaaggataatggcagggaatcatcttgtctagaagtttcctgtcattttttttctctgacgaag

SEQ ID NO: 145317 - DNA, 398 bp, Homo sapiens
gaggcagcaatgagctagcagtgagctatgactgcaccactgcactttagtctgggcaagagagcaagatcctgcctctaaaacaaaattttaaaatgagaaataaaactggcattttgacatatcagctgtgaggtgcatcacaagaaatcctgacagtgttttttcttgtgagtgacatacttttaaaataaaatcacggccaggcagagtggctcacacctgtaattccaacactctgggaggctgagtcaagtggatcacttgaggtcaggagctcgagacctgggcagcacaacaacaccctgtctctactaagacttccaaaattagccaggcatggtggcgcacgcctgtagtcccagctattcaggtggctaaggaagaagaatcacttg

SEQ ID NO: 145318 - DNA, 309 bp, Homo sapiens
caccactgcactccagcccacgtgacaagatgatgagaccctgtctcccctccaccaaaaaaaaaaagaaagaaagagaaaaagaaagaaagaatgaaagaagaaagaaaaaagaaagaagaaagaaaggaagaaagaaagaaagaaaaagaaagaaagaaagaaggaaagaaagaaaaaggatgttcagtgtaccaggagcttctctcaggtacccagagaatgcatcaccggctcctccatgaactctgtctgcactatgtccatctgctggagagctcctcacccaatacctggcccagaagctgc

SEQ ID NO: 145319 - DNA, 350 bp, Homo sapiens
aagtactcctcacatgcagaaagagattaatgattagaagacaacacacggaaatgtgacaattattaagtccgtgaaccgattataatgttagtcaagtatgactcatgggattgtatctggctttgggtttgggtgttagcaataatcatttggaatagctcctttagcaaaccagtcacctcattttgctctttctttacctcaaaggagaggaacaatgaaagaggagccttgcctggagtgcatgagcacactcaagccaatgtgtgatcaatggagaggtgggggtgtagggcactaactgaggctctggacaaagggaaaaagtccttcgtgtcagaaatctg

SEQ ID NO: 145320 - DNA, 553 bp, Homo sapiens
tgccacggaaatcttccgggcagctagagttagtccggggccctctccttaagatgcgtcagtggacctaggacgggggaaagtaaaggcttattataaggtttcgattctgcttcgttcatgtactttgtatgtgaaaccttttttcatattcttagtcttccttctttgaaatggctatatggctttctgtcaggattctggaatagtgggctcaaagtgtgtggtggcatcgataaacaccggtgtttatcgatgccacttcctgagatcattttgaatgttctaattaaaaagtgcaaagtataattttttgtcataaattatacatgctatgctattatatatgctaagccaaacctagcaacaaggctgagtgaagatgtggctcctgggtcatatgctaggctttctttcggcaaatggacttgctctccctcagttatgttacatacctactcagatcaggtctcagcaaatgtacaaattactatgtcatcagccatctggatcacttgggaatagtcacattggtgaacgctgtaagtcatat

SEQ ID NO: 145321 - DNA, 370 bp, Homo sapiens
tacgagagagaggaagagccagaataagaatcagtggctcatgtgcttaagactcacatgggaagcttatttaaaatatacacttctgggccaggcacggtggatcacacctgcaatcccagcactttgggaggctgaggcaggcggatcgcttgagcccaggagttcaagaccagcctgggcaacgtgacgaaaccccatttctaccaaaaaaaaaaaacagaaaaattagccaggcatggtggtatccgcctgtagtcccagttatttaggagactgaggtgggaggatggcttgagtccagaaggtaaaggttgcagtgagctgagactgcacgactacactccagcccaggcaacagagtcagact

SEQ ID NO: 145322 - DNA, 838 bp, Homo sapiens
acaattacaaatatattttttatttcagattgtatatattcctaccagatggagataattacagctttaaaaatttttattttttcattttatttcagacattgacattaaatttttatggacacataataactgtacatatatatggggtagaatgtgatgttttaatacatgtactcaatgtgtaatgatcaaatcagggtaatttgcataatgatttttctgtagggagaaaattcaaaatctactcttctggctattttcaaatatataatatgttattgttaactatactcatcctactatgcaataggacaccagaacttattcctgggttctacatccgttaaggcaaccaaggatggaaatatggaaaaaaaaatgcgtcgtacgaacatgtacagacttttttctgtccttattccttacacaatatagtacaataactattgcatgacatttacatcggatattatgagtgatctagagtgatatgaagtatatgggaggatgtgcaaaggtgatgtgcaaatactatgtcattttatatcagggacttgagtatccttgttaccctcaggagatcctgaaaccagtcccccatggatactgagggctgacgtatagtcctatcctcacggaactttcattctaatgggggaagactgactataaacaaaatatatgtaataggtggggtaagtaccgggagaagtaacaaacggggcaaagtgagttatacagctccattcttagaaaccttggagtacttttcttagtttatactcgtggtggtttcctttgtctcctttattacatgggactctgacatgtgccc

SEQ ID NO: 145323 - DNA, 252 bp, Homo sapiens
agaagagtcaaagcggaccacacttgatgaggaagcaatgaagggaatcaaagagacgaaggtatcccggtttccagactatggttaggtagagaatatatagcagagctggatgaagattcttggcatattagagttatttttagactttcagatagaagttccacaaacaggctgggtgcagtggctcatgcctgtaatcccagcactctgggaggccaaggcagacggattacctgaggccaggagttc

SEQ ID NO: 145324 - DNA, 263 bp, Homo sapiens
atgaacatactgccaattcttgttacaactacaggtaagttatccatagttactcaatttctcttcttctatattgtccgcaaatagtagaaataatcctcaatgggatataagggattaaacatggcatgaatttgtgtgcgtctatgtgcctttgacgaagaatcaaattttaaaatatttgaagagatttattctgagccaaaaatgagtgaccaatggtccgtggcacagccctcaggagatcctgagactctgtgcct

SEQ ID NO: 145325 - DNA, 321 bp, Homo sapiens
ctgatgcccatccatccatgccagccttccacgagtcccgtgtacctgcgggtgctcagtgtgcacatatttatgtgtacgtcctgccccctctgtgggtgtgcatgcgtgcctgggcacgctctgctgtgtgtagcacaggcttgaagcaagcagcacctctgtgtgtgggcatacgtgcagaggaggatgtgctgctgccggctggagcctctccagcattaagaggctactgagaatgcgtgtatgttgcaggtgtatgtgtgtgtgtatggaaatggttgcaatgcagagctcagaaggagaagggccattaaagaa

SEQ ID NO: 145326 - DNA, 313 bp, Homo sapiens
aaaaatcttcaaatgcaattcagttttatgttgaagaaattttcctttcagttgaactgaataaggtgacaatctgtcccgtttgccaattatttgtgattttaagtttcgcctcaccttcagtcttatttatggcttttcagctattcattgttgccaaaataaatacaaagaaaaattttatcctaacttaatcaattttattactaacaatacttgaaaaataattagaaagttcattttaatgcaaaggctaagaagaagcattatctatttgttctttcctatacttcaaatattttctctccatatc

SEQ ID NO: 145327 - DNA, 209 bp, Homo sapiens
cacaggtaagtcgtcgtagatggtagtgttggtagcaacatgacaggtaaatcacatccaaatacagaataaatatctcttctgaaaaggacaaattactaacctctctaggatgaaaagggtcactggagtccatcccttatgaggtagatggctcaactggaggagtgtaccatatagggacacttagcagtgagaccaccagctca

SEQ ID NO: 145328 - DNA, 149 bp, Homo sapiens
cttatgcttacactagtatgcaagaagtgagtaggtgcttttaaaatcagaattctttggtcagttattggtgtgtggtggtgtttttactgactttttcagagaggtgtagcaggtacagttctaatcgtgcatatttcgaaactaag

SEQ ID NO: 145329 - DNA, 764 bp, Homo sapiens
ctttgcttttcttgagggagtataaaatagtctcccttctcccccaactaaaaatctgaatgacactggcactttctagtcttcttatgccaagtcaacttcccttatgattgttcactttgcactttctctctaggaccttcacttgaacttctctcctcggccaaagagctgcctccactggaccatttgcttccctccaggattttctagttttgggcagtgaacaatagaaggcactttgcctccccaaaatcccgtctaactggaagcctcttgtcatcatctattttcaagtttttttagttttttttttttaagctttaattttagtgagtcagtgcagggaagccactgaaaacgcatataaacaaaaatgaattttcatactgaccatagtcataaattgtacaaaagtattcatcatctccactttgacaaagggttgctattttcaaatgaccttttcttatggggattctcaaaatataagatgttacagtggtcaggaatgtggtaatctctttactaccagtgattctatttcttaacagaattttgcttcccagtgcagatggtttgatatagtaacattcaaagcagccagcccttaggaaatgccaaggccaatatttgaatgcagatacaagttttaacaaaggaaaatgtagtatatccttgtagctgtttgcctgtgaatattcccctggagggctaatacactattcttgaatctaatccaagtcaagccaactctaaaaatc

SEQ ID NO: 145330 - DNA, 568 bp, Homo sapiens
catgcacatttcagggcataagaatatactggactcaggggttaggagcatacacatatgtcacaatagtaaagcaaaaatgatgtgacacagattagttttaccaagacaggaaagttacttatcattctagatagatttaaccaattttctttctgtttacttgctcccccaaattaagttagcttatacatcctatttctctactactgaaactagataatggtgactacaatattgttagagcaaaacataacgatttcagctactatttatgacccagtattataaatgagagtgagagattaaaatgacttgatcaaggttaaaacagtgaagcccagatttaagttctagttgccatgaatcagtagtctgtgtgtctttctatttactgtcttataagcaaatggatctttctaaagacctcaacgaaaaaaaatcagaggggaaagaccaagagaaattaaagtaggactacaggatccaaacagaaagatgggtcagtattatgaatgtaatagttttgattaggaattagttatgttacataacttaaacatttaaa

SEQ ID NO: 145331 - DNA, 1246 bp, Homo sapiens
ttttccttggaggatttttatgaattatgatttcctttatttctgtccataattttgtgcttttgctataccaggattttagtcgagattcaatgttatcacctgccttgaagtcttgtctcttgacaaatttgcataattctgtgttgtattaattatctagtgctgcataacgaatcactcccaaaccttgtggcttacaaccacagtcatcactgatgatcttttacagtttctgtgggtcaggattccaggggtggcgccaccaggcacttctgccttggggtttctctcggagttggagttggacatcagctggggctggagtcacctgcaggctggcctggggtcgggcagggggatctgcttccaaggctctgcttcagaggcggctccctcccacggtaggcgcatggtttcctgtctccaaagtgggcctctgcacaaggctgcttggatgacctcatgatatggtggctgctgaccagggtagaggctggaaccccttggatggcccaacctgggaggtactagccatgcctctgccattgggcccggccacacaggttcctgccctcttctccgctgcccttgtgcctcccgtgtcctcgctgcgtcctaaccaaatgctggactggcagagactgaaaacgccccacggggcccctgtggcttgctcactcgggctctccggagagtgggtgccaaccccctgcgccctgagcatcttggctctgcttggcttgcagctggatcccctttttggactttggggctgcacacgcaccttgttctggagcgaatgggctcgtgagagccgcaggccctgaggcatggcctaactcaggcagagtagttggcgaaggccccagagggacccaggctatcgtcctgcagctgccggaaaaccatcaaggatgctgacatcaggagcacagtgtgatgcacgaccgggattgctcgttcaaggtatctttcatgagatcgtttctagtttcccagggcccatggccgggtgagctggggttgtccttacctgggtgactcctgttgctctcacggggccggtgctggggatgaagcgcagggaccaagcatgttggggtgcggcccaaacgcgttgtgaccccagggtgccgttccgtccgccttggggctgcccccccacctgggtgcccacggtcttcggttaacccgggctgtttctggcggcgggccgccggcgcccacggggtgcgaggctggc

SEQ ID NO: 145332 - DNA, 262 bp, Homo sapiens
ttggagggacataaacattcagtacgtaacatactataaattcttcatgtaggttcaaggttcaaatgtatattacccatttggtctgggaattcttaagataaaagattaatatagaagtggtatcaagcagtgatggtatccctgcaatgtctgtcagaagcaataaaaaatcttctctggaggaacattccctcaattcaggcagttgaagattgctacaaacagagtcctactaaatataagttcacaatccaattac

SEQ ID NO: 145333 - DNA, 168 bp, Homo sapiens
taaagcatgaaatcccccttgacttaacacagtaaaggcttctcattcacaagcagtttgcaagagattaggtggccctcctccttcgtgtgccacattgtctggacgtgtggtctctgggatgtctgcagcagggtaacagtgggctgcaaccactcaagatgtttc

SEQ ID NO: 145334 - DNA, 817 bp, Homo sapiens
taaaacataaccacatactaacttggtgtcatcacagttagtttcaactctggttcctgaaaacatagttctgcctttctttccaatcgatatttgaggccagtgtgtttcaaagaggctcaccattcccacaaatgtttgacatgccagaacccattcatccaaccctgggattgtggtcaaatgaaagctggaaataggcctgcttttcctaggccaattcagtcttcaacttgcaagctcagtgccatccaattctcaaacccaatcctgaccaaggccccatccagaggtctgtatctgatgtgcctgcgatgaaggcaggagggagcctagagcagtcacatctcccctaccctcactgcatttgaatggatatacctgggctcccacttataagtgagaacatgaggtatttggttttctgcttctgcatcaatttgcttaggataatggcctccagctatatccatgtcattgcaaaagacatgatttcattcttttgtatggctgcatagtattccatggtatatatgtaccacagtttctccatgtggtagaagtgaccagtgttctcaagcctgtatgcctgtctggctgggccctgattatttctccaggggttaggctttacctcttatgttcccaggcacaagctggggtcctcccaaactgggcagaccatgtgctcgatttcaggacccgtattacctagagattttgttcttaggtaataagcccaagtttgcttctcttctttgaagatggtcatttagagtgctggctacttcacttggggcaagcccaacagccagct

SEQ ID NO: 145335 - DNA, 133 bp, Homo sapiens
aggggagaatgagacgcccagatgggcagtggtgggcaggcagatgtgagcaaagaagtagttcagggacgtctggcagtgtgccgcacacaagggcaatggtacaaggtgcaaatgaaatctgcctggaagg

SEQ ID NO: 145336 - DNA, 603 bp, Homo sapiens
  misc_feature (15)..(15): n is a, c, g, or t
accggttcgcatgtnccctatagatcttcccactatagctacatagacgggtgtgctcttttagctgtcttaggtagctcgttagatttcttggtgtcttaacagatctctcctttataaagggtaccttttcccttttgaaattagttgattacatgtttgaaagtttgaggagttgaatatggtttgaaagtaaatagaacggactggtgtaatttccagtaatgaaacaagctgatttttaacaaataatatatttgattttaaacttactgtatacaaatttttacttgtgtaaaatataatagagatcagattatttgctatgtagaaaaggtttttacaaaagtataaacagacagttcttgcatactttaaaatgtcatttcttgcttagaacaaatacacttaaattctctatatacattattctgtatatacaaaatcaggtattattgatagtttccagcagtgcctgagttttagcagtatgagttctcatttttgtggtatgtagtgatggtgtcttttcttagattactcaagagattaactctagaacaagttaaacctttctctcttcacttgggaaaaaaataaatt

SEQ ID NO: 145337 - DNA, 400 bp, Homo sapiens
tcaagtggttttcctgcctcaacctcccaagtagctggattacaggtgcatgccaccatgtccagctaatttttgtatttttttagtagaggcagggtttcaccatgttggccaggctggtctcgaactcctgacctcatgatctgcccaccttggcctcccaaagtgctgagattacaggtgtgagccaccgcgcccagcgcaaaatactaatttttttgtgttcttcataatactctgaattataataagcttataagacagttttgagtggggtggaaatcgtcctattcctcttcaataatagaattcacactttaatgttagtattgaaatattaaagtatatttttgataaaatgtgcttgatagagtaaaacctatcagtggaatggttttgg

SEQ ID NO: 145338 - DNA, 411 bp, Homo sapiens
tagcttctgtagttaattagggaagggggaagcaggtgattgaaaaaggaccgagaagttagacatcatgaggaataggagttggagagggaatgaacaagtccatgatagacttgtcaggcagccttgagggaatttagataaccagcattggtactcacaagtcatcagagttgtatgattttttttttcctctactacagcccagcagctggtaatggttaatcaaaatttaaaggtgtcattagtggcaaaaaaagggtggggggaagattcagttcaatcactcacattaaataaaagagggcccattaactaaaaatattttactttaactattttatttgatttttttattggacttttccttgtggtaagtttgggaaaatagtgggttttggatgagagttc

SEQ ID NO: 145339 - DNA, 401 bp, Homo sapiens
agacattgtggactccaaggagaagactaaattgcacatattttactttctcacagaatttaaggtaatttacttctgaaggatttgaagataatttcctcaaactgaattaaccaataacaaagattttaaaactccaacaagctacccccagaaaaatcaataatttgtacaacaggtaagtaccaaatggaaatacaaatctgatctaggtattttaatgtaataaaatgttacattaagttaaaataatgtgggaaacacaagtttatttaaaagaaaggaaaaattagaaactatatgacatatgaactagaagtgaagcacagtgggaatgttatttggctagttcccctcaaccctttaaacaaacaaacaaaaaaagacaacagtaaaatatg

SEQ ID NO: 145340 - DNA, 452 bp, Homo sapiens
ttgatctacgtgggtgcatgaactccgccaaacattgacgctcaagaacctttgctataattacagaatccaaggtttggtctctggtttaagggattttaagcaaaagcaaactggcacaagagagagttcaggggcaggagcacacttctttagacctgtaaaataatacacctttagctggtcttgaagctacacttgctgaatgggcttggggacagaccagagttagaggacagcagagggactcccctctgctccgagcccatgctgtctcaaccctgtgctaatgccccttgtccctgaagtcccatttaatgggcctccagcccacctcccaccttccaaaatgctctaactcatctgtgcaaagccagtctctttgaagccagatttaaggacatcaaatttaaggacatctctaagtctctgctaacagaacgtgtaggctg

SEQ ID NO: 145341 - DNA, 341 bp, Homo sapiens
aataggagtgacttctatgcaatgtaaattactttcatttctatcatcctgtcaactttgagctgtttggttggggaaaagcaggtagttgtggagggaggaaaagataaacattatatatgttttaaaacgcatcctcctagtagttgctaatctagatgattaaaagcatgcattatttaaactgcatttgtctttccaggtgcatgcctgcttctcaaataggttataaaccgtgttagagatgaggaaatcaaggcagatggaggccaaggaatcagtttttatactacaggggagggcatgacgtttaaggccacactgcccactgagtctcgtcc

SEQ ID NO: 145342 - DNA, 230 bp, Homo sapiens
aggccaaacatggaaaggatttcctggttctcaacaccccctggatgctggaaatcatgtgcctgatttctgacaactcccagtggaatcttgtttagcggaccttcccccaccagcaccccaattctttgaccataggctccttgacttggtatccttcagcacctagactgacgcctggctcaaagcagaggctcagtaaatcttccctgcatttgcatatgaatgaa

SEQ ID NO: 145343 - DNA, 311 bp, Homo sapiens
cgtgtttgacaacagaagatatagaataaatatttaattttgcactaatgaacagtgctagttaaaagacatggaatacataataaataaaattcagcaaaatataatggtcccaaatcagggaaaatcagagaagaacttgacaaactggtcacctgcttgagttgagacacataaagttcacttttgtttatatttttcaccttcatgatttttatcccttttctcctctttcatatattcgtatgtacacaagtgtatacacatggtacatctttacatttcaaaacaaaccccaaacactgtgtgca

SEQ ID NO: 145344 - DNA, 180 bp, Homo sapiens
atctacgttaggatggggttgtttgagtggtggtttatttctgactgcttcattttatacttgtattttaaatatacaagtttttgtaaacattcctaaaacaaaacagatctgtttttattttgaagaagatcggacagattctgatataatgtttggagaactaaattatacacagaa

SEQ ID NO: 145345 - DNA, 103 bp, Homo sapiens
tatctctacaaaataaccttagccaggcatggtagcttgcacctgtagtcccagctacttgggagacccgaggtagatcacttgaacccaggaggttgaggct

SEQ ID NO: 145346 - DNA, 202 bp, Homo sapiens
cagagtagttctacctccatggctcagtgtctaagcaagagccaaagaaagaaaatcccagaaacaccacgtaagagttgggagggaagccagattctagacaactagtttcaaaggcaagccaggcctacatgcctgtgggttttaagtgttcactctggtaagaatccatgaagcaacattagattcttgaaaccacagt

SEQ ID NO: 145347 - DNA, 135 bp, Homo sapiens
ctctgatggccccgccccaccccaggagctgagcgtagactaggggagacagcactcagccctcacccaggacacgcccagtgcctgggaggaccctggtgggtcctgcggtgcaagcagtactgaggggccttg

SEQ ID NO: 145348 - DNA, 226 bp, Homo sapiens
aaaagcagtgtggggagagtaacggttagagatgaaagggtgaaggatggcgacagggaaggccaggaggccagtgagctgcccacggcattctgcatgcagttgtggtagagaatgtgggcatctggagtcctggagggtccttcagcccacttcctcagcctcccgagtagctgggctgtcgggctagtcggggggctagtcggggctgtcgggctagtcgggg

SEQ ID NO: 145349 - DNA, 572 bp, Homo sapiens
aaaagcagtgtggggagagtaacggttagagatgaaagggtgaaggatggcgacagggaaggccaggaggccagtgagctgcccacggcattctgcatgcagttgtggtagagaatgtgggcatctggagtcctggagggtccttcagcccacttcaaggcaagtctcctcactcacctgggaagcagagggcaccaggctgtccaagggaagaggaatactgacaaggcccgaggtgccacctacccccaccccatctgtgcacacacacctcagagcaacatggctctccccagctgccgtgaagggtcctcaatcttccttggcacgatcaagttatttacatgcactgattattgagggttagcatttatttctagttagaataaaatcccagggatgggacaggcccgtgggagaacatgcaggagtctactgccaaaacacaggtttcccactgtggatccccactccccagtctgcctgagaccctagggccagctctcaggtggtctgcagcacgccagctcactgacagctgcaccagcctagcggcaaccccgttggccgta

SEQ ID NO: 145350 - DNA, 366 bp, Homo sapiens
ggggtagatcacgaggtcaggagttcaagacccgcctggccaaaatggtgaaaccccatctctactaataatacaaaaattagccagacatggtggtgggcgcctgtaatcccagctactcggggggctgaggcagagaatagcttgaacccgggaggcagaggttgcagtgagccgagattgtgccactgtgctctagcctggtcaacagagtgagactctctctcaaaaataaataaataaacaaataaaagtttgttgatccaataggaataaaaataacctgtcatactaatctcatgtttgtatgtaacaaaagtatgaaatacaagcataaaatgttttgtgaactttaaagcataatgc

SEQ ID NO: 145351 - DNA, 498 bp, Homo sapiens
tgtctgctcccttactatctaaccttgtggctttgctactctagccaagctctttcctccaattctcagtggggaagctaaggcccagagcatggacaactttctcaaaattcccctaagagccaaaggtagtattgagactttgaaccctaaccctaggtaatctttgtcccttgaccctctctatacctaatcattctcttgtccctctggttggttctccccaaaacacttatagggaaatgagatgtggtgacaatcaggggcctagaaaagtcaaaggcagccaaagaactcagaagcttatgtgcatgtcctgtaggcaactcactgtcctggtctaagtgccacagcttcccttcccaaaggagtttcataagaggccctcaagggtgactgggcagatatgaggcccttccctggaagctaaaatggtaggagaggtgaccagggctgggattaagggcccagcagatatcagggtttggaggccagggt

SEQ ID NO: 145352 - DNA, 300 bp, Homo sapiens
actcagcacccaaacactccgcacccacacagcacccaaccactcagcacccaaacacacagcacccaaacactcagcactcactcagcgccaaaacactcagcacccaaacacacagcacgcaaacactcagcgcccactcagtgcccactcagcacccaaacacacagcacccactcagcacccactcagcgccgaaacactcagcacccaaacactcagcacccaaacacacagcacccactcagcgccgaaacactcagcacccaaacacacagcacccactcagtgccaaaacac

SEQ ID NO: 145353 - DNA, 219 bp, Homo sapiens
acggcctcctaaagtgctgggaaccctcgtgtgctgcagctggaggcggacacagggacaggccctctggagaggctctgggcttcctctgtctagaaaggccactgctgtgtgtgcagcagaccaagaccagcagtgctgcccccagacgctcaccctacagaaacgttcactgcccagtggtcatcaagttagaaccagaaaccagcaagaagcctg

SEQ ID NO: 145354 - DNA, 375 bp, Homo sapiens
ccgagtatcgatagccagtccagcttcattcactcattcatttcttttctttcatttcaggagaacatttagcagtgttttgttttatttattttattcaaagggaaatcctcatgtgacactagcggtgaaaataacttgtatttgtaagttaatgtctgctgtacatctgagtacacaattgtctttcacagaagatggagcaaagtattacggaaagttcattggcttctgagtctgagagaaatgggttcaaatcctgaatacgttccttatctgtgtgatcttaagactcatcatttaatattctgagtcagtttcctcctctataaaacaagaatcagacggggcacagtggctcacgcctgtaatctc

SEQ ID NO: 145355 - DNA, 348 bp, Homo sapiens
tttttaaatagagacagggtctcactatgttgcccaggctggtctcaaactcctggcctcaagcaatcctcttgcttcagccttcatacctgtaatcccagcagtttagggggctgaggcaaaaggattgcttgaaggaaggagtttgagaccaccctggacaagtgtagtgagacctcgtctctacaaaaataataataataataataataacaacaactagccaggtgtggtaatgaggacctgtagtcctgtctactcaggaggcaagatctttgagcccaggagtttgaagctgcagtgagccaggagcttgctattgtactccggactgggagtctacctctt

SEQ ID NO: 145356 - DNA, 319 bp, Homo sapiens
tgcaagatatttttctaaacatttagaaattgaaatgtggtccggcacagtggctcatacctgtaatcccagcagtttagggggctgaggcaaaaggattgcttgaaggaaggagtttgagaccaccctggacaagtgtagtgagacctcgtctctacaaaaataataataataataataataacaacaactagccaggtgtggtaatgaggacctgtagtcctgtctactcaggaggcaagatctttgagcccaggagtttgaagctgcagtgagccaggagcttgctattgtactccggactgggagtctacctctt

SEQ ID NO: 145357 - DNA, 288 bp, Homo sapiens
actatattaagttattcatagcaatgggaagaaaacagtttgaaaacctggaatgagctatgacttagctaggttagtataacgaatatggtcttcggtctgataaacctagtttcagtatagattctgcaacttagattggaaaatcaacatttctgagtctaggtttcttcatttgaaaataaagctaacaatgtctacttttgtagggctgtgacacctgtagaatacgctcattcattaaatgttaattttcctttcttatttatgaagtaatatgaatttaaa

SEQ ID NO: 145358 - DNA, 335 bp, Homo sapiens
caaaatgtccaaagctcaacttaactgtaaaacatgttcttccattcgtgttccattctttgttaatagcactatgtcatcatccttgtcaatcaaaatagtagtgtaagatatctttctggtgacaaagtccttcctgttgatttttccttcaaattatatcctgaatatatgttcccttcctcatcataaagccttacttcaagttctcaacatttatccctggactattatatcatctgtccacattaaacacaaggactatctttctaaaatattgataggcttatgtaattcttttgtttaaactccttcatagacactattcatcacct

SEQ ID NO: 145359 - DNA, 890 bp, Homo sapiens
cctatctctatgaaaaaaaggagaaacaaattttttttaaaggaattaggaataagtattatgaagagtatcaattaaatattaggaattaaattgcagtattttgtccagctgtgttactttggtctcatttcctgccaaagcagataaatgatattttattttattttattttattttattttattttattttttgggaaatggagtctcactgtgtcgcccaggctggtgtgcagtggtgcaatcttggcttattgcaacctccacctcctgggttgaagagattctcctgcctcagcctcctgagtagctgggattacaggcactgccactatgcccagctaattttttgtacttttaatagagatggggtttcacatgttggccaggctggtattgaactcctgacctcaagtcagcccacctcggcctcccaaagtgttgggattacaggcatgactcaccgcggccagccatatgtatgttttcgtgtggtagactgtcactctacacttttagagacatatttttagagatagaagaaaaaaatatagactacaaaaatgtatggaaggaagaagatgtgtgtgtgtgtgtgtgtggtgtgtgtgtgtgtgttattctggtcctggcttaggtaaaaccattttttgtggagaataggctgataatttgccaccactttggggaagaataaagcactggctttattattttgaggacgctaactattctccccatggctgcgtgtcacaccagctccttgaaatacataacagtcctagacttcttaatttcgcccgggatttataatatttcggtcacaaactggggtatactcgggaacacaccttggtgtgaagggaaaccgaccaagcctaaaaaatc

SEQ ID NO: 145360 - DNA, 589 bp, Homo sapiens
tttctggtgcaggaggactgttaatattttagaccgggctcctcaaacatgtatgcttatttagtgaggagaaaatgtgcatttgaatcctgcaaaccctcgagaagtttgcattaattaaatagtgattaccagaatattctcttctaaaatatattttatttatcaaatgaatacccttctgagcccctctttatccttcctgtgatggctaaactaatttcatcaaattttgatttctgtgtggtgatgttgtgaacagtgcctgaaataataaaattaccctgagcagattgcatataaaactgtttgcaatgggagaagcagtctttggggctgtggtttcctttggctgcagtgtaatatattcctttgtttcttttgtgaagtatttattgtgggtctcctgtagtctgagtttcttgtggaagtgggcttgtgttttgcttttgtagactgacactgagaatagcatccaaacatctttttcccaccaaggcatcaaactccatcattaggaattccttcatagaatcaaagaatcagaaagagctgaaacatagaccacggacactcaaattgtttatcc

SEQ ID NO: 145361 - DNA, 690 bp, Homo sapiens
gttcggctgctcctgtttatcctatttattctccgtcctgaagaaccagctagacttggctgtgattaatcgcagaggaaccagaaactcccgggggagagagacccaggggaaagttggggaagcggggctgatcaacagcaaaaatctgccaaaaaagttcgagagagccgggcgctgtggctcagcctgtaatcccagcactttgggaggccgaggcgggcggatcacaaggtcaggagatcgagaccatcctggctaacacggtgaaaccccatctctactaaaaatacaaaaaaagttagcggggcgtagtggcgggcgcctgtagtcccagctactcatgaggctgaggcaggagaatggcgtgaacccaggaggcggagcttgcagtaagccgagatcgcgccactgcaccccagcctgggcgacagagcgagactccatctcaaaaaaaaaaaaaaaaaaagaaaaaagttcgagagccctccaccacctgttcctggaccaaactgagcgtcaggctgctgtttctcctggttcagtaaggagatgcagatgaactggagaggaagcgagtttttatttctgcaaccagttacagggagaaggcctggaaattatcaccagaccaacttaaaattacaaagctttccagagcttatataccttctaagctatatgtctacg

SEQ ID NO: 145362 - DNA, 264 bp, Homo sapiens
tgtgttgagaggtatggagcgggggtccccaattcctggactgtggacaggtaccagtcaatggctttttaggaaccaggccacacagcaggagatgagtggtgggtgaatgaccattgccgcctgagctctgcctcctgtcagatcagtggcagcattagattctcataggagtgcaaaccctattgtgaactgcatgctccttatgagaatctaatgcctgatgatctgaggtggaacagtttcatcctgaaaccatccccg

SEQ ID NO: 145363 - DNA, 273 bp, Homo sapiens
cttttacaaggtttctgcttccttggcctcctctcctccaccctcagccccattctaaccacctcttcattcggataatcttaatgaaaaagtttttcaaatgtgggatgcaattagacaaagctgccttatgtcactggcacacgtctccgaaacaccagtatctcagattcaatttggctattccatttatgaaatattttaaagagtatatctcccattctaaggcagctcctaaggataatatattgatcactgcttcacatattttaa

SEQ ID NO: 145364 - DNA, 336 bp, Homo sapiens
gggggaagtccttcaggaaacttacaatcatggcagaagggcaggtccgacttacatggtggccgcacagagagtgggaacatgtgaaggagcaactgtcaaacatgtataaaaccatcagatctcagctgggcacggtggctcacacttgtaaccctagtactttgggaggccaaggcaggtggatcaactgaggtcaggagtttgagaccagcctagctaatgtagtgaaatcctgtctctactaaaaatacaaaaattagctgggtgtggtggtgcatgcctgtaatcccagctactcaggaggctgaggcaggagaatcactggaactcaag

SEQ ID NO: 145365 - DNA, 373 bp, Homo sapiens
ggactttaacagtgattatcaagtgccttccaagagacagcagcacttccgtgcatcacggaacattgactgttcctctccatccttttcccaggtcattccagagtagcgcagtttttgactgaaccatgtagaaatttgcttcagttctacacaaagatctggaacagtactttatttttgagcagatggagcctttttggtacctcctggcaagttggtgttggtgtctaccagaaaaataaggtcactcctaacctggatgactgggttgaagtagctgtttggactgagtaaagggagacttcaactgaattaaacttaactttcatatgatgtttttctgaggctgtgtgaaaatagaaaccaggaa

SEQ ID NO: 145366 - DNA, 627 bp, Homo sapiens
gaccccatttcttgttacctctcaactgatgccttcctcactctatcagttctctatagatgcataacaaacttaatggcttgaagcagcattttatgtgctcatgattgtgtgggtcaatgatcggagcagggctcagctggactgttcttccgttggccttgcctgggatcacttatgtgtcatctgatcgcctgatgggagctgggtgctctgagaaccttgctcacctgtctggttggtgctggctgttagctgggccacatgtctccagcaagccagcctggacttcttcacacagaggtggagagatccgtgtgcgggaacggaagcctacgaggactcttttgaagcttaggctgggcaattgcatagtatcacttctgctctgttctgctggtcaaatcaaggcacaagctgggccagattcaatgtttgaggaaagagattgcacctcttgatagaagagctgcagagagtttgcacccattttaaatctaagattgtatgatgtcattcattccttggttaaccttggccatttctttccatttttaattaatcactcattgatttttttaagttttatttttaattgtggcaaaatacacacaacataaaattttc

SEQ ID NO: 145367 - DNA, 233 bp, Homo sapiens
aggaggaaagtcctaggaaaatcggttctaactaatttatgatcttttccaagtaaaaatgtgacaaatgagcaggctgttcaaaataattaagggtccgtggtttgcttggtttcctatctgagtttgtacttttctaacaagcaacttctgggcttttggttactattacataaaggaatagacttttaagaaaaattaacattagagccatggaagtgtatataattctc

SEQ ID NO: 145368 - DNA, 263 bp, Homo sapiens
cagcctcccgagtagctgggactacaggcgtgtgccaccacgcccagctaatttttggtatttttagtagagatggggtttcacgatgttggccaggatgctcttgatctctttacctagtgatccgcccacctcggcctcccaaagtgctgggattacaggcgtgagccactgcacccggcccaaatatttaacattgactgtatgccagggactctgctgggcactgagagtgcagcaatgaggaagagcagggcccattc

SEQ ID NO: 145369 - DNA, 263 bp, Homo sapiens
aggtgcactcttccttactggtagaagattgtatttggttcctttttctgcataacaaattaacccaacatttagcagcctaaaagaacatttattttttcatggtatccgcggtcaggaaagtgggcgtggctaagctctgtgcctttgcctcaagggttcaccaagttgtggtcaaggtgtccccccagggttgtggtttcatcggaaagcttatctggaatgatccactcccaagctcacacacacggatattgtaagga

SEQ ID NO: 145370 - DNA, 377 bp, Homo sapiens
acactacttccaaagttgtagattttttttttaattttcagaaaacaaaataggattttaattatagaggataaagaaatgaatgtttttagttcgcctagaagggaaagtaatttttcatactctatttgcacagcactgtccaggcccaatctgtttaccaattattatacatcaaagtttaccaattattacacatgaatttgcacaggtcctttgaggaaatgtgtaatggcagcataagggaccagcaaaagctggaacaggaagataccaaaaaaagaagagagcgagtcaagcaataatggggagctgaacattattcttaagagcaaagccacctgtttcatattttaaatgatgaaaaaatatgtttt

SEQ ID NO: 145371 - DNA, 256 bp, Homo sapiens
  misc_feature (32)..(32): n is a, c, g, or t
  misc_feature (51)..(51): n is a, c, g, or t
atgacatttacatgatcggagtaagtctaggngcccacatatctgggtttnttggagagatgtacgatggatggctggggagaattacaggatttcagtattttaaatgtgaccaccagaggtctgtatacctgtacctgtcttccctgagagagagctgcaccatcactgcgtatccctgtgactcctaccaggattataggaatggcaagtgtgtcagctgcggcacgtcacaaaaagagtcctgtccccttct

SEQ ID NO: 145372 - DNA, 407 bp, Homo sapiens
agcccaacacccttccactgcagctgagatttcagttaatcagcttgggcaccagacaactgcttggcagaggacttgatagaacagatgtcaggagttgtgttccagatacccagaacagaaaacagataagaccatagcaaaggacaaagcctatagctcctgagcttattcaacatgtcaccaaagaggctaaattccacgtctcaaggatgcaatcgagaaacagagtgatgaagtccatacaaaagtggtttgaaactttgatcaaacattggcatcgcctggggagctcgaaaaaacacaatgtctgtgtcccattcccagatattgatttaatggtctgggatatggcctaggtttcaagacctttaaaagtctaacatggtctaatgtacagctttagt

SEQ ID NO: 145373 - DNA, 220 bp, Homo sapiens
ccaatctgtctgggggtagagcctagaaatttgtgttttgaacaggctttccaggagattcttttataaaccgatatctgaaaaaacactgtatatattttgccatgtttgttctaggtttggattatgagtttgggtattactgtttttattgtttgagtagcgactaaaaatcaactgttcatttaaagggcatttgttaaagttttatgtttcatgt

SEQ ID NO: 145374 - DNA, 295 bp, Homo sapiens
aagcgattctcctgcctcagcctcctgagtaactgggattccaggtgcctgccaccacgcccggccaatgtttgtatttttagcagagacagcttttcaccatgttggccaggctagtctcgaactcctgacttcaggcgatctacccacctcggcctcccaaagggctgggattactggcatgagccaccgtgcccatccttgtttatggttttatgaacaaccgtttcaggagagggattggcataaaggccagattacacaactcctaggagttcattccccgtaaagggaa

SEQ ID NO: 145375 - DNA, 682 bp, Homo sapiens
  misc_feature (650)..(650): n is a, c, g, or t
tctattctcttgatagaaactatttctttctacggtggatttttgttctgcctttgtgttgttttactttgcctgtatgcttttcttatcttttctagtttactagtcatgtatcctacattttagatgccttttcttgatatcatttaattttaactttatgtaatctatttaaaaatttttctcagaatataaataatagttgcagtagtagaactaaaggtagtgtcagaaacagtagggtggtgcctaccatgttatgttagtgaccctgtgtctttggtttagggatctagtggaacatgaccagctatccccttttgcctgagataccctcagcttttgatcatcactactgagtttttacatgttttagtgaaactatgaattactcaaatgttgtgatttaaaatgtggaagataagctgttgatatgctagttcaaaaagcaattcaaactgctatgtgacctagaaaaacaccggtgtttatcgatgccaccaggctaatcgaatttataaaaagaaaatctttcctccttttggttaaatccctttgcggttttctgagcgcgaaaaaaaaattatcaccatgtaatagagtgtagataattcttagaaactagtagtaggatgttcagggagcccagnaggaagcaagattccattggcggtcagtagaa

SEQ ID NO: 145376 - DNA, 310 bp, Homo sapiens
aataaatatatgaaaattcctaaattctttcataattaagtaaatgtacaccaaaataacaattcaatttcttatctctttgacttagaaatttggtgtgagtatttacgaggcatttctccccttaggtgaagtagaagatttaatatcctgcctctttacatatttctaccctttagggataaaaacctgtgagaatattgtagtttcattgtttagtaattcttttaaatgaaatgtattagataaatttcttcctgagtcatggtttttggctttaaacaatggacactgatgctgggataactta

SEQ ID NO: 145377 - DNA, 709 bp, Homo sapiens
tttttttagatggagtttgctcttgttgcccaggctggagtgcaatggcacgatctcggtccaccaaaacctctgcctcccgggttcaagcgattcttctgcctcagcctcctgagtatctgggattacaggcatgcgccaccacacctggctaattttgtatttttagtagagacggggtttccccatgttggtcaggctggtctcgaacccccgacctcaggtgatccgtccaccttggcctcccaaagtgctgggattacaggcatgagccacagcaccaggcctgttctgtccccattaaacactcacctcctactcctccctcctccagctcctggcacccaccatcctactactttctgctgctggaattcgactactctagggacctcatgtaagcagaaacatacaaatgcttgtctttttgtgtctggcttctctcactgagcacagtgtcttcaaggttcatccgtgttgtgacatgcataagaatttccttcctttctatggctgaatgatattccattgtgtggatggaccacatttgttgatccttccatccatggatggacacttgggttgcttccaccttttggcatgtgaacagtgctgctacgaacatggttgtacaaatgtctcttcaagaccttgctgttggccgggtgtcatggttcatgcctgtaatcccagcacctttgggaggccg

SEQ ID NO: 145378 - DNA, 636 bp, Homo sapiens
ccatgcagctgacagtgtctgcaccagaatttgaaactggaacatctgttacttctcttttctcacactgcctctgtgaagcctgggggtgagagtaggtgccagtaggcactggaatgctccaggagaatgcccgtgtctaatgacaccttataaacacttgccgccagcacacatatgtgataaaaacttcaataatggaaacgtgacatgaggtggatagaatgaatggacactttttgaatcaagcctcttcattttctcactactacctgctctgcatctaatttgtcttgagtacacattgaaaatgtgtttccactaatattgaactcattgaagaattgaagatgagatgctaaatttattagtttcgtggatcttatatggtgtcttcttaaaccttatgcctcatttttaatttacatgtgagttggaagtgactacacctgctttgtcattgaagtctgcatttttaagtaaaggtgaaagggtgtgtatgaaaacttctgagatacagaaaatgaaagagactgatagtcgcttattaagggacaccaaattctaccatgaaggttttattttttcccagtagcataacatggctatttctacattttaaaaaatctctgaaac

SEQ ID NO: 145379 - DNA, 274 bp, Homo sapiens
atttaatagcatttaacttgagacccttatctatcaaagtcataaattgcaaacatgtctaatgacctctggtgcaatgtaaaaactgaatccactcaagatattaaaagatctatatgagatgcaaagatattttaaagagaaattgtttccaaaatgatatatcaatttaatggggaagcgcggtgtcatcaagggttacatcaatctcagccaaggctcccagactcgggctagcattgacgaacaccactttttgcaactacatttagtt

SEQ ID NO: 145380 - DNA, 515 bp, Homo sapiens
cagagtggtcatttaatcggacattctcttcatgatacaaccacctaaaaaaacccttgccatctctcatcggcattctggtgtggtgtccaacaattatttgccttgaaagaaattgtctctttgtgaaacagtggcattcttactatgaagtttgcaaagtacattttaatgcttggtggagtaggatagagcaatttatttttgggaagtgaattttgaaggaaagggtatagttttgccatcagacagatgtagcttcagatcccaggttttgccctttctaatgatgtcatgttagttccttaagtcctctgagcttccttttttttcactgatagagacaaggtctcactatgttgcccaggctggtctcaaactcctgagctcaaatgatccttccgccttggcctcccaaagtgctaggattacaggcgtgagccaccatgcctggtcccatatcttcacttaagttgtttcatctgaatttaccagtggccactttgcattgtgaa

SEQ ID NO: 145381 - DNA, 395 bp, Homo sapiens
  misc_feature (341)..(341): n is a, c, g, or t
gctgaaggccccgtcccttattcctcactctctgactctggttgctattgcattagagctctactcttatgccacagccctcaatgtctacagctgggatctctgtgcctattgcttacaatattggaagcaaggtaagagtcttcaacactttccactgtcaggactggacctgcaggaaagtctaacagatttgaactccagtgctcccttcactgctgacgtggccttctgactacctaagggcgcttagttcctgcctgtgtttaaatcagttgtctgactacatctcaggactgagaactgtaaataccaatccttgaaagggaccatggtgcggncctgtgagacataagaaccagtcaattactcacagtttgaccactctgacagtg

SEQ ID NO: 145382 - DNA, 797 bp, Homo sapiens
gtggcatatgcctgtaatcttagctactcaggaggctgaggaagaagaagtgctagaaccccggcagtgagccgagatcatgccattgcactgcagcctgggcaacaagagtgaaaaaaaaaacaagttgctttgtggaagaaagtaagtatacacagggagaaagagatctgatgaccaaagcagggaatacgtgtttggagtccacggcatcctgagaacttcttgggaatagagtctaggcccccagtgctgtcactctcacccatcttcttctacacatgtgagatgtttcaggacccagtggcttttaaggatgtggctgtgaacttcacccaggaggagtgggctttgctggatatttcccagaggaaactctacagggaagtgatgctggaaactttcaggaacctgacctctttaggaaaaaggtggaaagaccagaacattgaatatgagcaccaaaaccccaggagaaacttcaggagtctcatagaagaaaaagtcaatgaaattaaagatgacagtcattgtggagaaacttttaccccagttccagatgacagactgaacttccaggagaagaaagcttctcctgaagtaaaatcatgtgaaagctttgtgtgtggagaagttggcctaggtaactcatcttttaatatgaacatcagaggtgacattggacacaaggcatatgagtatcaggaatatggaccaaagccatgtaagtgtcaacaacctaaaaaagccttcagataccgcccctcctttagaacacaagaaagggatcacactgg

SEQ ID NO: 145383 - DNA, 716 bp, Homo sapiens
aaatggccaataaggacatgaaaagatattcagcatcaggtagttattagggaaatgccaatcaaaacacaatgagatcccacctcacacccattggattggctgctattaaaaacaaaaaacccagaaaatagtgttagtgaggatgtggagaaattggaactgttgtgtgctgttgcaaggaatgccaaaccgtgcagctgctgtggaaacagactagcagttcctcacaaaactaaaaatagaattaccatgtgatccagcaaccccacttctggatatagacccaaactgaaggcagggtcttgaagaaatatttgtatgcctgttttcatagcagccttatgcacaatttccagagaatagaagatacaatggaatattattcagccttaaaaaggaaggaaatcctgacatatgctgaaacataaattaaccctgaggacgttatgctcagtgaaataagccagtcattgagattcctagagtatcacatttgcagagacagaaggcagaatggagaggtggccaggggctgggggcggggagggggagccggtgtttcttggggacagagcttcagtttgggaaatgagaacattctggagcggggtggtgtgatggctgcacctctgtgtgaatgcgcttcatgctgctgaagtgtgcagtttaaaatggttaaaatggtaaattttatgttgtgtgtattttaccac

SEQ ID NO: 145384 - DNA, 413 bp, Homo sapiens
gggcgttcagaggatccctgatatgcgtctcagtctcctgaatagtgggactacagttgcctaccactgcatatggttatatatccatctttagaacacggttcaaacagtatgacattctacgtgaatagtaccctgcagaatttgggtgtggcaaccttgatttgggctttcagactatatgtgcaggacatattatctcaaactatgcattaattttgcgtgcatagttctaataattttaattgtctcatccagtcgaggggttgacagactagaacagaccaggctcagttcacatgctgcctatttttgtaacacttttttttgtttgttttgttttgttttgtttattttgccctacaaaaactgatttgagtagttgtgacacaactatgtgagactgcattgag

SEQ ID NO: 145385 - DNA, 294 bp, Homo sapiens
tatactgttacgcagggagacagacgctaatcaaacacaaacacaatggtgtaaacagggtgacaagtgctgtgaaaaggacaccgtgtgctatgagagtggcaaacaaggtgacatcaagtttctctttcagtggccaggccagatgatctcacaaaagatcgagaacactttacatgtcctctctgtatgtttacttctctgcaatcttttacagtatctttgtgaacgagcagaagaaatgctgtgtgaatctaccatttggagatatctgagtaggtggatttatagcag

SEQ ID NO: 145386 - DNA, 341 bp, Homo sapiens
ggcttttttggttggttttataatattaaattagtaatataaaaaacattcaactgggcgtggtggctcatgcctgtaatcccagcggtttgggaggctgaggtgggcagatcacctgacatcaggagcctgaggccagcctggccaacgtggcaaaaccccgtctctactaaaaatacaaaaattagccgggtgtggtggcaggctcctgtaatcccagctatgtgggaggctgaggcagggagaattgcttgaacctaggaggcggaggttgcagtgagctcagattgcaccactacactccagcctgggcagcagagcgagaatccatctcaaaaaca

SEQ ID NO: 145387 - DNA, 277 bp, Homo sapiens
tcttgttttcaccaaggggaagccatttctaaatatctagtcctagaaattagcatagaagtgcaggaaaggtctgatcagaagggactcatgttaacattatctcactgctttatttcaagagtaagaaaacctctgaagcagtgactggggaggtgggggataaatgcaacatgccattctgccgtgtattataattattgagaacttgttttgtcttttcgagtcatctgtaaacttgttgtaagttcaattttgtgtctctgttacccggtat

SEQ ID NO: 145388 - DNA, 267 bp, Homo sapiens
gaagggaccaggctgggagaagtggggcaggggtggggcatggagctccacattcggttaataagtctgtaaccaaaaacccatccatcttggctggcaggtggctgactgaatttctattattagctgacaggtgatgtcacaaaacctgtcatggatccaactagggaatcctcagtggaagataaatgagaaagggactcaggttataaacagaggtgccctctggttgacctctagtcactgtagacctgggacatatcagct

SEQ ID NO: 145389 - DNA, 527 bp, Homo sapiens
gggtggtggggatgctctgggaagtggaaggactcgaaaacccccagtggaataaaacattccctttgctacttgtgggaagaaaaacaagtatataattcattattcctaccttcaaagaattgactaattgtggaaaaaaatatttaacatacatgaaaatacttgagactacagcaacccaggcaaaatgtctgcagaggtattgctacatgaacaagcattcctctacagaaaaatttaggcaatcctttaacaagaggatgaccagagatcacaaaggcctaaaaacattatataggtctttaatcatcaacattttaaattaacttctcattcttcacgcagctcaaaggaataagtatataatttgtgtccagggaaggcagggtagagtcctatagatgttttagataatattgaaaagtcataaagtgttggattcacatgattttagcactgttttctggactataaaaatccattcattgaatatgcatctacttactgcaaaataaataaatatc

SEQ ID NO: 145390 - DNA, 201 bp, Homo sapiens
ggccactgacccactagtgaaatgttagggcattgctagattggatcctgtttatttaagggccgagagaaagagaaagctaacattaattgaatgcctattaatgtgccatcatatttggtacactattatctcttttttgctttcccagcaactcgggaagtttatattatctctgtttttccagcaagaaaagtagct

SEQ ID NO: 145391 - DNA, 309 bp, Homo sapiens
tcgcacgtcctcgcacgcgtcatcgcacgcagaaacatacacctcgcacgtcctcgcacgcgtcatcgcacgcacaaacacacacatcaacaggtgagaaatatttcaaattaacaatctaacattacaactaggagctgaagaggataaagaactaaaaaaggaagcttttcccaacgaaagacaagagatcagcatctttacttctgagcagctgcagggccaagtgttggtacaggtccctggggtagagaatgaaccatttaagagaatggcaggtgatggcaaaagcgaggaggagaagcagca

SEQ ID NO: 145392 - DNA, 403 bp, Homo sapiens
aactcctgtggaggagaacaaccatttctgtggaagccgcagaccagaaaaagatgctgtctcccaagccagggttcctgttatggaagctgtctctccatacccccaaccccttcccccaagctcttttcagccagtgaatcagcttccctagtcctgccagcttgcaccctattaagcaaagcaacttagtttgcaaaggcccctggagatagagaccttcacagcaaactttatctgagacatctctctatcttttttggcataatatgtgttcagagagccagtttgccactgtacaacctgagaactgttatttccattctgttaggtcatccatggcgaagctgtacaaagggctggcttcccagtgtgccaatgctgggcaagatgcttcccccac

SEQ ID NO: 145393 - DNA, 440 bp, Homo sapiens
acagcgcttcttcagccttcagtttactggaagtgaaagaaaagtcttggactagtcttcgacgatactttggaggacagagaaaaatgctgctgctgaacctatttgaggtgacagtatttccagaagcagaaacacacaggtgcaagcacccctatttttaggtgcctcaaacctcagatatttattaaatgtctagtaagtaccaggcacaatgtaagaaaactgataggaaggagtttaaaggtacaagcttggagggaatgagaatctgagaatcccagagactgacgcagcctgatggccattcccactgaccttgtgtccacgtagacacctgtgttcctaggctgccacctcccttcctggtgggcagttagcccccattttgtctgttctggaggtgtgaaggggagggccatggcagccagagagcgagg

SEQ ID NO: 145394 - DNA, 841 bp, Homo sapiens
taataataatgattccatcagttataccagaagctaaagtattatgctccccttgccaattgcctactcttaagaactgaagatagatcatctctgaagacaaatgtggcttggcactgcttcctacgagtacctttctaaggcatagcatgtcacctctacagggtcaagtagctactgagatgctgaggaaccaagttactgagctgagtcactcctaagtggccaagatggcaggagggctgaattctccacctgggactctttgcagggtccaaacattgactagctcgcttagaggtggggcaagggctccttgagcaatgtgtttcattctttagccagacagtatcagcaagatatttttagcccaattactaaatgcagaaatgtgagtttgaaatgcatgcctcaggagttcactcaggtaacgagactgtgtgattatgactctcagggcgtgtgtttccttcacatgtcccggattttcagaatagttctgattttcgaacattctgttctacccttctattagtaaaattctgtttgggcagatatcctaattctatagggaagtggttgggaaaatatggtcactgtagaccaagatagagatcctattaaagacttggtggttgaggaaaaagtgccacatactataaataggtatgtcttcccctttacctcactgatgagtcagaagtgacagaaactaactccaactgggtttggcaaaaagggaatttaccagccttgtgacggaaaagtccaggggatgcatggctggctggatacagattcccgaacaatgatccaaccgacctgcctctcttcacctctt

SEQ ID NO: 145395 - DNA, 471 bp, Homo sapiens
gacggtagaacgctattacatcctatgtgggtaattgaggagtatgctaagatttgcgtagctgggttggtttaatccacctcaactgcctgctatgatggataagatttaggactactctctgctttttatgataattaactgtcatttctccttagacttttcaatttatgtctaacatcaacatgcttgtccccattatatttctttcttatggattcctttcttatggatttttttctctaattcttgtaacaaaattgttgttccaggaaagtatacctagttaatttgggtctttatagcctctggcaccctgctgtttatgtgccttagcttaaggagcacttctttatttgattatggcttaacttgattttcaggaaagagtactggactcaaagtcaaaatctgtacattttttttcctgatttaatcactcgttaaccttgcaacctggagaattcactt

SEQ ID NO: 145396 - DNA, 240 bp, Homo sapiens
cacctccataggaagaaagctcctcttctttcctgggagctccagagaaagacctgtcttaattctgattggactgactcacctcctcccttccttgaaccaatccctatggcaggaagataaggaatgacctgaactgcccaggctactcctaaggcatttctaagtccaaaccaggtagaccaggacattccacaacagtggggcttttttttttttttttttttttgagacagtctt

SEQ ID NO: 145397 - DNA, 674 bp, Homo sapiens
cagatgaggatgctaaaggtcatgaaggttagagggtaagtgacttgctcagggtcacgtggcatgcgtgtggcagagtcagggtacagcacatgtgtttaacactttccattatcccaagattcttggctaacctccctggagagcctcaggaaacatcatgataagatagtcattttgctaagagcatttttgattagtgtcagttctgcccagcttgtctccttcataagattgaatcaagagctactttgttttatacatgatctatgggatatgaaggactgtgaataacaaagtattggtgtattcataagataataaagagaagcccagtaccagagggcccttgtggcataatagaaacagcacagactctggagtaaggcagaactgggtatgaacaccccctttgccattttctagcttttggctcctaggtgagttatttcatctttcttgagccccattatatgtattggtgaggaagctccctgctgggtgccatttgagagttagagataagacatgtattacagtctctgtcccactgtgtgcatgtagtaaatattgggtaggtgaatgaatgagtgaatggtagcaattattacacttaacttctattttgttaaaatgtatttgactcactaaaacataaatctgaaccctgtcag

SEQ ID NO: 145398 - DNA, 682 bp, Homo sapiens
gtgaatgaaagagaattccagttttgtgacccacttggaccaggtggatggttggcccagggaagggatggagcagccacactaacttgagcttagaattgagcctttcgtaatccaaggacatgagtgagggaaagaaacacacaatgaggttattatttcagtctgattctgagagggctattttatatataatttttatctagaaaaacttttcaaaagccatttactaaattaagcccctcaagatctccaacaatgtttatccacagaccaaacaccaaaaactctaaaagtttaaccgtaaatacggttaaactaaatacgcaaaagcagatacagtcatcccttgatatccatggggaatgtgttccaggacctcctgcgaaaaccaaaatctgaggatgcttggtatttgcatataatctgcatattctctctaggttacttatgatatctaatacaatgtaaacactatgtgaatacttatactgtatgaggtttttatttgtttttttaattgtatttatttattttttaatgttttccatcctcagttgaacccatgggtgtggggcctgcagatatggctgtaatttcatctttagtattgacataatggagcagctgcagtggctcctagtgtttcagaaatctgcctctgctcacactcagaaccaac

SEQ ID NO: 145399 - DNA, 271 bp, Homo sapiens
ggcagatgacttcttgaagcgttccgagggagaatgaatctcagtagtaagattcatttctcactcaaaacagtgcttcattataaattactgtccttttctatgccagtgacagattgcatgctgattgagacactggataaattgcaaacaaaaatggacctttgtcacaggccactaggaagtgagatggagttagcatagcatggatcctctctggaagggagcttccagccctaagggatggctgggatttatgagggtgcttcag

SEQ ID NO: 145400 - DNA, 193 bp, Homo sapiens
caccctgttgtgtgatcaaatagtatgttttattcattcgtttttttttttaacccgttaaccatccccaccttacatctcccctaccttcccaccacacttgtcatcctctagtaatcatccttctactctgtctgtctatgagctcaatttttttttatttttagatcccacaaatgagaacatgggatgt

SEQ ID NO: 145401 - DNA, 288 bp, Homo sapiens
gagaagctctgacatggtcccaggatgctaaatttggatataggggccagaggcagtggctcatgcctgtaatcccagaacccaccactcccaccttgggaggccaaggtggaaggatcacttgagtccaggagtttgagaccagcctgggcaacatggggagaacctgtctctacacagaatatttttggaggattgcttgagcccaggaggttgaggctgcagtgagccgtgattgcagcatcactgcactcccctgggtgacaaagtgagatcctgctaccaaaa

SEQ ID NO: 145402 - DNA, 305 bp, Homo sapiens
ggggatgggagccccgcccacatcctcccctccagccgcccgacctcgcctagcaggcccgggtcccggaagcccaggcagcgcccgagtccgcagctgccgtcggagctgggacgccgctgcctccagctctgggaagcggctggggctcacctggggaccacgtgcggaggtactagaaagcatgcaccgactagtcgccgtaccttccaaaaatacccatgggagtctgggcttccctgagtttagtgtaactgctgcccaaactgatgattaaaacactgagtaatcaccatttaccctga

SEQ ID NO: 145403 - DNA, 758 bp, Homo sapiens
atggactggtatcttcaaagcaaaaatctaaatgtctttaacatattctaattataatataaaagcattattcacaaagaaggttttttaaaacatatgaataatgtttggcaacagttcacattcaatgtaagaatcactaagactcctgagtagcagtaatactaaataataacataggccgggggtggtggctcacacctgtaatcccagcactttgggaggcaacgtgccgggggggtggatcatgcggtcaggagatcgagaccatcctggctaacatggtgaaaccccgtctctactaaaaatacaaaagaaattaactgggcatggtggcgggctcctgtaatctcagctactccagaggctgaggcaggagaatcgcttgaacctgggaggcagaggttgcattgaaccgagatcacgccactgcactccatcctgggcaacagagcgagacttcatctctagaaaaaaaaaaaaactaaataataacataaatgtttatttaataataaccactaacattcattaagttgttatctgaaggtactgttccaaccactttaaatgaatttatagaacctcacaacaactcggtaaattccattattatctttatttcgtagttgagtcttaggcatagagatcttacctaagatcatagagtgaattaagtatcaatatatgtttcatgtatttgtataacagaattttaagtttattttatgaagttatttaattgaacccaaaatatt

SEQ ID NO: 145404 - DNA, 335 bp, Homo sapiens
gaccgatactagagaaagaaggaaagaaagaaagaaagaaagaaagaagaaagaaagaaagaaagaaagaaaaaagaaagaaagctggcttaagggtttgaaaagtagtgtaatcaacgaacaaatgagttttgccatgacaaatttaattaaaagcctcattgatatttgaaataaaaatgtttttagttagcttccttttgaaaaatgattaacgtcatatagcttctttttcattctctctttcctctctccctttttctttttcattttttctctctctttttctttttcattctctctctgtttcctcccttccttctttctctttcttt

SEQ ID NO: 145405 - DNA, 467 bp, Homo sapiens
aaggctacttactgccaaagagaagtttcaaaattcatttatatagtgaacatttattgagcacttataatgtgctaaacacactgagatacaaagattggttaagtctttcttttctttctttctttcttcctttcttctttcttttccttccttccttctttccttccttcttttctttctttcttccttctttctctttctttcgaaagaaagctggcttaagggtttgaaaagtagtgtaatcaacgaacaaatgagttttgccatgacaaatttaattaaaagcctcattgatatttgaaataaaaatgtttttagttagcttccttttgaaaaatgattaacgtcatatagcttctttttcattctctctttcctctctccctttttctttttcattttttctctctctttttctttttcattctctctctgtttcctcccttccttctttctctttcttt

SEQ ID NO: 145406 - DNA, 776 bp, Homo sapiens
ctcccaggggcaggaaaacaaggagaaaccatcattgattgcggctgccagaagccgtcaccacctctcaggcccctcctcgcctgaccttggggtccagagagaggacatgccagtctccccactcccatggtctcacagcagcagctgcagggacagccaggctggtctgggatgggggtcgagggtgggtcctctctgccagctccaggttcagctgctgtctcagggttaggctccagctcaacccctggggctgctccctggctttctgagaagatgccgtcaggcagattccatctcataacgtttcctggaggaaaacgttccgacaatgagcgttccaacaatgaagggatctgtctctgatcctggggcctgctcatgaggaaactgagcctacccatggcaactgagagacaaagagggaccacgggacggtgctctaactcacccaaagaaagcacagagatgggcacaaaggtaacaacacgcaacactgagggatgcagacctgagggccccatccctcagcatccaatcccagtgcttccccttccggtgaagacctcctgctgaacagatgaggaacagaccagagacttgccctactccagtgggatgcaagcccatgcccacactgccagggagtggactgtcaacaacccaaggccaggtatgcagcctcagcaaggacatcagctccgctttggacacagcagtctcagccttgccttgagggtcatgcaatttgaggacatgccctcaggagccta

SEQ ID NO: 145407 - DNA, 341 bp, Homo sapiens
caagagcagcctgggcaacatagcaagacctctgtctctaaattagaaaaaaaggaaactaaaacaaatgaagagtatgtgagctagtatatgaaaagcacttacaacaaggcctggcagagaataagtgccagttaaatgctaaatgttattaagaaatggacagaaaaggacctcagtatagaatcttgcttgctccagagagtaatagtgataataatagtgtttggttttcacatttgagcacttactaggtacatcagactttgtctatggatatataccccaactatagcctacaaatacacacacatacatacacacacaccatctcaaaacag

SEQ ID NO: 145408 - DNA, 1111 bp, Homo sapiens
tttcatcgatatgcttctctataacgaatcacatcacatcccttctgtgactagcaaatatttcattttatagactacaataatcacctacaaaaaataaaattaccaactgtcatgattttgtttcccaaaactactggggcaaactactgaatgctagaactgttttctttctaatcagggtatacagcgcccaaacgacagcggtcaaccactgataataacaccacaaaataacaccgggtgcccccaaagccagagctctttgtggttccatcaagtatgctatcaccaaactacaatgacaggtcacgcaaggtgaaaaagctcccaaagctcaggaaaggactgacaaaataccaactatcctcaacggggtggtgatgacatcgtcccaacgtcccgctccctccctccttccttcccagagctatgcgggggctttctggagacccccctacccggaaccggaaaagcgaccatcttccctaaccccccggccggaagtggagcgtagccagccggagcactcaccctggaagaacaggacgcccagcagagggaagagagcgcagccacggcttccagctgctcctctctgctgcatcccggcagctcttcagatgcttgcacaccttgtttacagctcccggtaacgacacaggtaacaccggaagtgacgtcagagcaggaggccgagagacaacttaaatggcgatccgaagttaccataggaacctggcttctttccagaaccacacctggtttcactgaccagagatttattaactttcaggcgggagctaaatgctctcttttgcttgaaaatgaagtaggctacggacttggaataattacaattttgtttttatggaattctgcagaactaaataattttgatgctctgactgcatgtcagacatcgtttttacgtctcgagatttagttgaaggttctcagaatacactactgtaaatttagagttcagaaacacctgggagatcatacagtatagataaatatatattaggtgcttgtagtgatatgtgccacaagcctcattggttggtgtcctttttagtgtaagtattgcagcctccaaaattgggtg

SEQ ID NO: 145409 - DNA, 383 bp, Homo sapiens
acaagttggttctctatggggctctggggctgcctctggggctcaagctggggactggcagtcagcaacaggggagttttgccactgtttctgagctccttggcttccctgtccaggagagtccctgattactgagatccttggatgggggagatggagctcctgccctggagaggtcttgccttgaaatagaagataggccagtgaggaaggaaggtgagcagatggccaagctgagagggactttaaggatcatctagaatctagattccaggccaacccctccatttcgtagatgaggaaactgaggctcagaagggagaagtgactagtccaaaatgacatggcccataaatggcagcactcagacaagaacccaggtg

SEQ ID NO: 145410 - DNA, 308 bp, Homo sapiens
tcttatggaaggaaaactacatttgttaaatcacattatcgtaagttagacaaagatcatattcatattttaggagtagattccattctttcatggctaaagtttaatctagaaatacattttccccacaaactatctagtttctccagaattaacatctttctcaccaaacaatagtgtttctactataccagcatgctggatgatctatgaagagtttatactgtgtatcacatttactgactcggtaagatcacactgtcatatcatgatgtatttattaatttctcacactcccattttgaatt

SEQ ID NO: 145411 - DNA, 869 bp, Homo sapiens
gagacagggtctcactccagttgaccaggctagagtgcagtgatgcagtctcaactcactacagccttagggctcactacagcctcaacctcccaagctcagctgattctgccacctcagccccctgagtagctgggactacaggtgcatgccaccacacccagttaattttttgtatttttagttgagacggggtttcaccatgttgcctgggctggtcttgagctcctggattcaagcaatctgcctgcctcagcctcccaacatgcgggggttatgggcatgagccaccacacccggactgttattagatacacatgcttataattgttatttctttctgatgatagacacttttatcattataacatgtccttctttgtctctcataatttttatcttagtgtctattcataaattagtatagccactccagctatctttcagttagggttcacatgttatctctttttccatccctttattttcaaagccttttgtacatttgaatttaaagtatgtctcacatagacagcatatagttggattgtgttgtagttttcttttttaatccattctgccaatctcttccttttaatgaagcatttcatccatttatatttaatgtaattgctgatagaacaggatttatgtctgccattgtgctttgtgttttctttttcttttattttttctttttcttatttttttttgagacaaggaattataaagagttcccatatatcccctatccccacaaatgtgcagttgtcttttaaattagataggaaaacaaaatcattacaaacaaaaatacatttatgctgtcttttatgtttacctatgtagtgacttttaccagtgctctt

SEQ ID NO: 145412 - DNA, 330 bp, Homo sapiens
tggcctacctaggtcatgtgcttcaactccataatttcccagaacctcatggatccccaaggggaaatatggggctgttggaagacttagatgctgaagaaacagccaatgaatgtccagtgagtggcctttgagagtggcgtatcatctgagtgcaggagcttagaagcagctgcacattaagttgagagactggaggcaacatgtgtagaaaacccaaagagtttggctcaattttggtaaccaagaagcctatatgaaggatttttctccccaaaattaaggcaatatcagtgcatattcatacacccaagaaaagaaaccacaggg

SEQ ID NO: 145413 - DNA, 265 bp, Homo sapiens
cccagcctaaaaagctagacatggtggtggccacctgtagtcccagctagctactcaggaagctgaggtaggagaattgcttgaacccgagaggcggaggttgcagtgagccgagtccacgccattgcacttccagcctgggtgacagagcaacacttcatctcaaaaataaaacttgtctactattgcgattattttgcattgccgggttcgggcaccactggtacagattctgtgtcagctttgtgtgtctggtggggcagag

SEQ ID NO: 145414 - DNA, 477 bp, Homo sapiens
caggctgagtgcagtgacacaatcacagctcactgcagcctccacctcctgggttcaggtgatctgcccacctcagccttccaagtagctgggactacagacatgcgccagcacgcctgggcttgagcaattcagtttccctgcctgagtgttggtgacctgtgctgtgaaatagagagagacacctacgacctgctgtcagagcccatcaaggttatcaatactctggctgaccatcatcatcgtgggactgactttggtggaagtccttggttacgtatcattattgcatttccgagaagttataaagttgtccttaccctctggacagtttacctttggttgtctttcctgaagactatcttccagtctgaaaatggacatgatgtatccacagatgtacagcagagagccaggaggtccaaccgccgtagacaggaaggaaataaaattggcctgaaagacgtcattactcta

SEQ ID NO: 145415 - DNA, 507 bp, Homo sapiens
acaggatatcttttcctgtgctgtatgctttgtttcttcaaatggcaagtgagtttcttcttggaccagggcatgttacataggtccacagtgctttctctggaatggttggggctgtatgtgtttcagagttcagaatttttcagattttaggaagatagtacaatgtataagaggtgtattatgtaatccccaggtggggtctaggactgcaccctgtaatcaggcacattcacacagctctccagtgaaatgtgagtattcacagtaagggggaggagttaagattataaatagccatgactcagtttaggtcagattttgccgctcattgaattttgacatcgagcttaaggaaaacccagttttcataatgttgtggatttcagcattctggataaggaattacgaatgtatactgcatttcacattctgtaaccccaggctgtttcttagacttagcagttagccggtgggaagacctttgtgaacgtgagacatgaactg

SEQ ID NO: 145416 - DNA, 130 bp, Homo sapiens
ttgcttttgtgccctcctccccataaagaggttggggggtggggtgacaagtatttgccaggctggtatgaagctgaatcacaggaggctggaactgtacacagattgttggccaaagtcagagaagaag

SEQ ID NO: 145417 - DNA, 940 bp, Homo sapiens
ttatgatcataagtttcctatgatcccagcaatgacccatgactaaagttatggggatgaccattcccagtagctaccaaaaaaacccataaattccataagaagaaaattaacaagtttataagatctatatagaaaaaataaataaaagtaagaaagccttgctatagaatataaagggaaatgtgaatagatagaaacattaacatgttcctgaatgggaacactcaatactataaaggtgataaaagaaggttcccaaggggagccgtatgtgccatatattggaacatattataaagctacagaaactaaaactattaggttggtgcaaaagtaattgtggtttttgccattattttcaaagctgcatttacttttgcacaaacctgatatatgatataggcataccatataccaacgttataatgcagaattctgaaacagactcctttataaaggaaagttaagtttgataaagggggaatgataagtaagtggggagaggagaggcttccattgtattgagaccacactgaagatccctttaaaaatataaaatatataaatgtctaatggattaaagactctaacagagaaaacagtctgtaaaaatgctagaaaaaagtatcttgggctggatgcaatggctcacacctgtaattccagcactttgggaggccaagatgggaggattgcttgagcccagcagtcaagaccagctgggaaaccatctggaaaagctaaaatagtggcatggaggatgccagtccgctatagagcgagagagcactgaccaagcaggggggggacgccacgccactgagaagggccgtcaaaaaggggtgaaacccggcacaagccgttgaagcaaaagaaacagggccgaaaggcacaaccggtgcaccccaaatatgtacacacagactcaaccggacac

SEQ ID NO: 145418 - DNA, 762 bp, Homo sapiens
ttatgatcataagtttcctatgatcccagcaatgacccatgactaaagttatggggatgaccattcccagtagctaccaaaaaaacccataaattccataagaagaaaattaacaagtttataagatctatatagaaaaaataaataaaagtaagaaagccttgctatagaatataaagggaaatgtgaatagatagaaacattaacatgttcctgaatgggaacactcaatactataaaggtgataaaagaaggttcccaaggggagccgtatgtgccatatattggaacatattataaagctacagaaactaaaactattaggttggtgcaaaagtaattgtggtttttgccattattttcaaagctgcatttacttttgcacaaacctgatatatgatataggcataccatataccaacgttataatgcagaattctgaaacagactcctttataaaggaaagttaagtttgataaagggggaatgataagtaagtggggagaggagaggcttccattgtattgagaccacactgaagatccctttaaaaatataaaatatataaatgtctaatggattaaagactctaacagagaaaacagtctgtaaaaatgctagaaaaaagtatcttgggctggatgcaatggctcacacctgtaattccagcactttgggaggccaagatgggaggattgcttgagcccagcagtcaagaccagctgggaaaccccatcttgacaaaaaacgcttaaaaattag

SEQ ID NO: 145419 - DNA, 393 bp, Homo sapiens
gctgttagcacaagctgtcatatctgcaggccctatttcaataactgctttaagtatccagtgtgttaaatatcacacacttgaagactttacttggctggtatttactgaaggtgacagctagtaaaagttccaaacaggcttatgaaatatgcaattaagactctggagaggagacttgagaggaaagatggttagtacaaaagaagagcaaatctctggaagcttttgtttgatttgattaattaccttagatttacattggaggaggaggatctcaaaggcagagtttggagtgatggatgcctggtgactttgttctacagcccacctgtgatctaggagcttgagctcttcaggcagattcagccacagagatggtccgttccctgc

SEQ ID NO: 145420 - DNA, 432 bp, Homo sapiens
taaggaatatctctcctcctccattaaagtctaactagtcctgtcaataatgatcctgccttctctgaactccaaccatacatagaaaaaaatttactctttctgtttatatgtatattcattgtttccttaactagctaaagaaagaactccttgaatacagaaacctcactccacacttaggaaatgttttacctctcaattattttacaaacattaacttcatttaccctaattaagggcacatgccttgcagtgggaggaagccagggaagaatcctatcacttactagatgtgttacctttggcaaattatttcatctctcttggcctttttccttatccggataatagaactgtcctcatagagttattaatcagataatgcataaaagccccttagcatctacctatgattgataaatggtagtt

SEQ ID NO: 145421 - DNA, 336 bp, Homo sapiens
caggttctctattaaggttaatatcacttcagagctcactatatcatcttcttatttatagccagatttaggaaaagcagtgtatattaggctgcaatgagggaagctttttggattacttataggcagaaggaaagggaaatttttgtaatgcctggctgtacctggaagatagagaaaagtggaagaagtttgagggagatgtatgtgttcaaataaaaagatttctaagtttgaattagttgaactgtaagcaaaactagtaatgcaggtgtactgttctcccagtggggaagaaatgaagcggggaaaaggataattcattttgttgaccac

SEQ ID NO: 145422 - DNA, 468 bp, Homo sapiens
agggccagcaccgagtcctgaacatcctgctctagtcccacatcggcccaggggcgttgagctgaggacagctccctaccccctttctgtgcttggccgactccagcgcccgttcttctgcccctccttggctctgcctccccaccccttggctgaatctctcctcctttcgtgcttgttctccaggtgacttattcaggtccatattttcattacccttgcatttcattaattttctcatttattttattctgtaggtttaggacattctttaaaacatgcaggttctgaattttaataatataaaagtcctctgtgagtgcccatcacattgcttttctgtcctccctacattaaagttagcactgatgcctttatgtttaaggaaagcctcctgcagaggggctctgcccatgtaagttcattagaaggcaggtgtacagcctctgtcacctgaagacctcttaa

SEQ ID NO: 145423 - DNA, 134 bp, Homo sapiens
tttctattactgctcatggggtttctatgatgttaggggagggatgcttgaaagcatgacaccaatattatcctttaaaaaaaagagtagggacctcaaaggatcttgtggaactaccttactctttcaagggt

SEQ ID NO: 145424 - DNA, 288 bp, Homo sapiens
gtggctacacgaaaccacaccgtgtgccaagggaaagggcacacctcagctttccacactaccctcccatcccccagttcctcctggggccatgtggaggcagaccacgggcaagtaggatggtgtgagagtgtggtgttcaccctctggccaaggccacaagcagcttcagtgggggggctgatagcttctctaggcaagaggagccctaggctggcaagggctggacacaggattccacgccggcaccatcctgtctcagggcagagttagataagctactccgag

SEQ ID NO: 145425 - DNA, 561 bp, Homo sapiens
gcaggcaactcgagtttggctgagaaaagaaaagagagatgggtagtagctggaggggatgtgggtttcagaaggtacatatgtatacatgtacagataagagacttaggcatccttaactgctgaaggaaagacaccagcagacaagtggaggccagatgcataggccaaataaacagtggaacaaggcccataaggttcctggagaggaggcaggtgtgacccacagcacagctggcacgctgattttcagtcaagaggaaaagcaatgagaatggctgtggaggaagggattatgtttagtgctgcagaggtcaactgacaaattgttattattattatttttgagacggagtctcgctctgtcgcccaggctggagtgcagtggcgcgatctcggctcactgtaagctccgcctcccgggttcacgccattctcctgcctcagcctcccgagtagctgggactacaggcgcccgacaccatgtccggctaattttttgtatttttagtagagatggggtttcaccgtgttagccaggatggtcttaatctcctgacc

SEQ ID NO: 145426 - DNA, 570 bp, Homo sapiens
aaatgaataatgaaatgctgggtgtggtggtgcactccagcttgcgcggtagagtgagtcttcatctctaaatgaaataaaatgaaatgatgaaatgaataatgaaatgccaggtgcggtggcgcactccagctttgggcaacagagcaagtctctgtctcgaaatgaaatgaagtaaatgaataatgaaatgccgggtgtggtggtgcactccagcctgggcgattgagcgagtttccatctcgaaatgaaatgaaacgaaatgaagaaatgaaataatgaaatgaataatgaaatgctgggtgcaatgaaatgaagaaatgaaataatgaaatgaaatgaataatgaaatgtcaggtgcagtggcgtactccagcctgggtgatagagtgagtttccatcttgaaatgaaagaaatgaaatatgaaatgctgggtgtggtggctcacacctgtaatcctagcactttgggaggccgaggcaggtggatcacctgaggtcaggagttcaagaccagcctggccaacatgatgaaaccccatctctactaaaataaaaaaactagccggg

SEQ ID NO: 145427 - DNA, 477 bp, Homo sapiens
caaacaaaaaaagggtatcctgcttaacggtttagaattagttggagctgagtcaattctccagactaagattaaaacagccttagtttctaaggaaggtgcatttgccactgcttggaaagggtaacctgacaaagccgctagccacagcccctggggacaagaagactggaacaaaagttcccaaacctggccagtcaacaaagtacccaaagaacttaaggtttttttcatgtaacaacagtccctactctatccccaccctatccacttcccctgactgcaagattctgaatgaaaagataaggagtagggtttgagaatctgcatattaaagctctccaggtggttctaatgattaccagattgggaactactaaactaaggcatttgcccttctatttcccaattttagcctctcttgggttagtcccagtgttccaagtattttacaagaacgcaccgggggtacaaaag

SEQ ID NO: 145428 - DNA, 428 bp, Homo sapiens
tttttttgagacggagtctcgttctgtcgcccaggctggagtgcagtggtgcgttcttggctcactgcaacctccgcctcccgggttcaagcaattccctgcctcaacctcctgagtagctgagattacagacatgcatcaccacgcccagctagtttttgtatttttagtacagacggggtttcaccatgttggccaggctggtctcaaactcctggcctcaagtgatctgcctgccttggcctcccaaagtgttgggattacaggcgtgagccacggtgcctggccatatttttaaaaatattaatagagcctgcatttcattacctttccacttggtgattccacacacatataggaaatccaaagtgtgatattcattcactgcttccgtgaataaaacaactacttgattagaaaaaaatgac

SEQ ID NO: 145429 - DNA, 156 bp, Homo sapiens
acccatatcacagagttgtggcaatatatataatctgccttaggacaatgcatgaagtatagcagatgctgaatgtcttaggggatgtaattatatcacctgtattttcacctgctgtaatttacctgtgtttgccccagtcatcaagccaaaata

SEQ ID NO: 145430 - DNA, 393 bp, Homo sapiens
acatgtgattcttctgcctcagcttttcgagtacctgggagtacaggagtgcaccaccatgcccggctattttttttgtgttagtagagacggggtttcaccatgatggccagactggtcttgaactcctgacctcaagtgatccacctgcctctgcctcccaaagtgctgggattacaggcgtgagccaccatgcctggcctcccaaaaggaattctaaactctttgagggaaggatctatcttatacatctccatatcctctctggcaattaacataatattgcgtgaacattctagactaggaaggcagatgtgtcatactcatgctataatttctctatgctgtgcccatagcgaacattgctgattggtcttagaatcttttcccact

SEQ ID NO: 145431 - DNA, 577 bp, Homo sapiens
cacagtggctcacctctgtaatcccagcactttgagaagccgaggcaagaggttcatttgaggccaggtgtttgagaccagcctgggcaacaaagtgagaccccatctttacaaaaaaatttaaaaattagcagggcaaggtggtacacagctatagtcccagctacccgagaggctgatgggagaatcacttgattgcccaggagtttgaggctgcagtgagctatgatcatgccattggctaggcaacagagggagaccctgtctcaacaaaaaacaaacaaacaaaaaaaaagatttaataatcctaatacttatctgcaaattcaaaagaaaataaaacaggccaggcatttgagaccagcctggacaacataaaaagaccccagtctctacacaaaacttttaaaaattaaaaatagaaaacacacaccacctttgtttcctttaaatccaaaatcagaatcagtcctaaatactgaaacattaactattctcctaactctagtctagaaaaggggagctatcttagttgaagatgaccctcccaggaatgacaaacacaagatttatggca

SEQ ID NO: 145432 - DNA, 482 bp, Homo sapiens
ttgccctctcctcacagttcagacacaccaaatgtctcactagctcctttggtgcctctgtgactagaataccatcttcccacttcccctaggaacaaaatcctatttgttctaccagatcgaacacaaatgtttcctcctctgggaagtcttctcctctccctagtggcgggactggagagtccccccatacagtctcggcaccattcacgcttctctatcacactttctttttttttttttttttttttgggaggggacaaggtttggctcggtcccccgggtgggatggcgggggcccagattacaggctcactggaaccttggcctcccgggttacaagcagattttggggcctaagcctctaaagtagctggaattaacgggggtgtgccaccaggcggggctaatttggggcgctttaagaaaagaggggggggtcccatgtggcccaggcgggtcgggaactccgggggccaagt

SEQ ID NO: 145433 - DNA, 1297 bp, Homo sapiens
gggccacgcggaggctcacgaggaggccggcggccacgcgcatcccgtagcccaggtggcccagggctgcaccccggcggcctcggcgccatggagtcctggtattcgctgatggcgcactacgatgagttccaggaggtcaagtatgtgagtcactgcggcgcggggggcgcttgcggggactttctgcccgcaggccaccgggcccaggccgggctgcagctctggaagcggcgcaagttgaacctgctgtcgggctggtgtttgcagccggcctctgctccatcctggcggctatgctggtgctcaagtacctgggcccggtcgcggccggcggcggagcctgtcctgaaggctgtcctgagcgcaagacttcgcgtgcaccgctcgcttcttggccgccaacctggacgccagcatcgacccatgccaggacttatactcgttcgcctgcggcggctggctgcggcgccatgccatccccgacgacaagctcacctacggcaccatcgcggccatcggctagcagaacgaggagcgcctgcggcgcctgctggctcggcccaagggtggacccggcggcgctgcccagcactaggtgcgctccttcttccgcttgtgcctcgagatgcgcgagatcgaacgactgaacccgctgctcatgctggaggtcatcgaggactgcgggggctgggacctgcgcggcgcggcggagcgccggggggttgctgcgcgatgggacctcaactggctgctgtaaaaaagtgcagggcgtgtacagcgccgccgcgctcttctcgcttatggtcagcctggacgacaggaactctttgcgctacgtcgtccgtgtgagtgcgcgcgttgagcgccccgccagctgccgtagacccggggcgcagtggccttgcccaggggtccctgagggcgggaggagggtgcgcgagaggagaggaagggaaagcaggggaggggagggagcgcacagtggcagcgcgcgggaggaggtcataagtaatttccccggggtaactgcggtgttcagcggtgcagccatttcccagccctctggcaggcagtggggagcgggtggggtgcgcggcaatatattcaagcttatgtacaaagcatttgaggtctagttgaagaaacaacttgaagaatggtctcgcagcaattacaaacaaatacccttcagcaattacaagaaggctttcaatgactgaacccgaatacttggttgtctgggttaaacatacgcatttgggtgatggccgctatattcttttttgtatctgat

SEQ ID NO: 145434 - DNA, 272 bp, Homo sapiens
agagagtccttctaagaaaaggagggcatcccgaaagcactcagctttaacttagtggcaggcagggttggattgacaggcccactggagcagctgacatacagaattctcattccattttggtcacttccctctcactcactttctggaaccctgagggcctgtttttctactccagagtcactgcacacaacctgtgtatccctgtgatcggaaagatgagcaccatgccaggactgcccacccgggcctgcttttatgacatagatctt

SEQ ID NO: 145435 - DNA, 268 bp, Homo sapiens
tatgattggctttcagtccaccatttacattattaacctttaaaaaaaattccattattttttaaagagatttaaataatatgaaaaaatgtatgtatttatccacacagttgccatttctagagctcttcatttcttggcgtgatccttgtcttcattttccttctgtctgaaggaaaccactcaacatctctcgtagtgtgtatccggtaatgacttctttcacattctgtatgtctgcaagtatttttttccttcactttcgaaa

SEQ ID NO: 145436 - DNA, 411 bp, Homo sapiens
gaaatattattgggtaaataacataatgtccaggaatggaggagaaagataaaattggcaaaatgttaataatatttgaagcagataaagaatatatggagttcattatacagatgggaacaatggctatcattattcataatagccaagatactgaatcagttctcctgacttttgtgcatattttgaaataagaagttttttaaattaatatttattgggtatctactgagtaccaggtattgcttaggtatttgacacaaaaataaaatggcctcaagaaaaaaaaaacagtaaagcagattcttaacccagggtttatccagggaaatatccatgatttctatgggtggctaaatcacaggtactgccattactgctgttttattgcctatattcataataaaaaag

SEQ ID NO: 145437 - DNA, 727 bp, Homo sapiens
ggaagaagggagctccccccttctatttgctttctgtttctaacaacgatggcacagccgtggttttccagaagctgagcagtggctgttcactcctgaaggaatagtgggttccagggtgcggttttccacacttgtagaaccagcttcatctctccactcaaagatcaccgcaccgtcagccggtggcgcctcttcagaggtttgaatccgagctctgtggagtccccacatttctgaggtaccagttaccaggagagtggtgtccacgcctgagaggtttcactcccagctcctggaaaagcttccacattttaatgatcccagccttgcctctggttcccagccctaagcgtggcggcttcctattgcagttatctctgtgatacctgagagtcccctttttgcctcctacctcttcactatctgttgacagttgtttgttcaatcatctctcttagaataattgctatggtcttggtccgagatataataggcaaccaggttttcagctcctggaaaagagccatgagacccaggtcctcttctacgcaatcccaagctcaggtggatttttcactagctttcctcaatacaacatagggatccctccctagatgatgtgattcacccccgtggggatagctgcgagattaggggaaactgatgttttacctacaccctggtcatgaagaccttgctttgctccctccttcattcctaccct

SEQ ID NO: 145438 - DNA, 147 bp, Homo sapiens
tcttatggaaaaagataatttaaaatattctctaaaatgaatggtttttcttttttcttaagagatggggtctggctatgtttcccaggctagagcacaatggctattcacagatgtggtttagcacactgtggactcaaattcctg

SEQ ID NO: 145439 - DNA, 243 bp, Homo sapiens
ctgtaggatattttgataatgaaagttattctgaagaataagtatcatggaaaaagactaattgtataatatatgttaagaaacggccaggcacggtggctcacgcctgcaatcccagctctttgggaggccgaggcaggcggatcatgaggtcaggagatcaagaccatcctgcctaacacggtgaaaccctgtctctactaaaaatacaaaaaaaagagaaaaaaattcgccaggtgtggt

SEQ ID NO: 145440 - DNA, 258 bp, Homo sapiens
caaatgaagaggacacaggagaggagatctgggtggatttcaaatactttttcactgaagtagtcattcatttatggagtaattacttactaatgaccatccgtccaaagcatggatggggcaaaggagataaaagaatgactcagaggtcccctggacctcaaggagcttgtgctctgctgagatgggaggcaaaccccagatagaggaagggcagagagtgtggagcatggatgctggagaggacaggatggatgc

SEQ ID NO: 145441 - DNA, 373 bp, Homo sapiens
ttttttaagacgtagttttgctcttgttgcccaggctggagtgcaatggtgtaatctcggctcaccacaacctccgcctcccaggttcaggcgattctcctgcctcagcctcccaagtagctgggattagaggcatgtgccaccacattttgtatttttagtagagacggctttctccatgttagtcaggctggtctcgatctcctgacctcaggtgatccgcccacctcggcctcccaaagtgctgggattacaggtgtgacccaccgcacccggccccattttacatttttaagtcatacacttctttctaatttttccatagctccacattactaaaatcctgactttgttagttacttaccagctaatt

SEQ ID NO: 145442 - DNA, 349 bp, Homo sapiens
aggactaattttaaagaaaatacttcagtcactgagaagtatatggatcacaacataggggttgcacaaatgtcagcaaatcactgctactaaaaatgtagtaattaaagggtgttatagagatttgacaaagaaaataggtattaatgttatttttctctcaagtaaaaattaggtaggccaaacaggtaatattttaagttaaaatatcaactatacagttctgtttagttcagagtccccaaaacttcagtcagctgagtgtaacatttgtactttctccctatcctcatactagttttcatgctgatttttaaaatcaacacactttttaaaaaagcataagtaa

SEQ ID NO: 145443 - DNA, 414 bp, Homo sapiens
ccccgccccagcttctaactggttttgcatatgctctgtcttcagtcccctactcaggaactcccctactcaggaaccttccgtggctccagtgttatcaacaggaacatgtcagaactggggctaaaatgcaggctggtttaaatacctgtctccccccacccccgcctcttctcacaaaactgctgggctagtctctttagcataccaaataatgttttcaggcctttgtctatgctattgcccctatctgcatacttttttttttttttttttttgagacagagtcttgccctgttgcccaggctggagtgcagtggcatgaacttggctcactgcaacctctactactcaggaggctgagacaggagaatcacttgagcccaggaggcagaggttgcagtgagccgagat

SEQ ID NO: 145444 - DNA, 150 bp, Homo sapiens
atttgcgattctcactcttctaacacatcctgaccttttgtggcttcctgcctttgtccttgcggtgttggctgccggccataccctctcatcttctctgcctgtagaaatcctaccattctgctgacctcagctccagagtcccatctg

SEQ ID NO: 145445 - DNA, 400 bp, Homo sapiens
gcatacaagaggaaaatgttgacagtcaactcatctctaccttgccatagctcccttgtctatttattttttggacacagatggctggcccaagcgagcacacccaatatccactagttggtttcagttaccttctgtcctggaagaaggttcttatgggcatcaacatgtctgtttagctccttaaattaccatagtggttttcataggttcatgccccatgtgggtataccctcaatagccctgtgttctgtctgaccatgtggcaagccatggctactgcccatgaatatgtatatgctcaaacttcaggactcatattgttgcctatatttttttcattatgaggaaaacagtttacagattaggacactgagctgatttactcttaaccttcttt

SEQ ID NO: 145446 - DNA, 207 bp, Homo sapiens
caaggaggtgaactttcaagaaaaataagtgcttggaatggaagaaagaacatttcatgtgagaagacaagtacagaagtagagagtaggagaggcttggaggggaaataataaataatccttacatgatgcttgtttatgcttgctaaatctttacttcagttagcacaaagcaggaacacaaatacatgctattgcaatttgaaa

SEQ ID NO: 145447 - DNA, 993 bp, Homo sapiens
ttgggacttcccttctccctgtgtctctgctcttttccggggcgtggcacccggtcaaatcgggggaagcgaccttctcccaccggatgggccccctctatttgtctagttcccgtgggaaaggcatatccactgggccaacttttttccagcaattctggtggcagccagagcagaactcagcctctagcagatgcccaagaagcagaggagaagcagagtctagaagctcccctcctggtgtggagcctggggtgtaaagggtacttagaaagcactggtatgaatgccctgtttattcatcacagtcctctcaagcattcagtcattcagcaaacatcgatcgagcaccttctctgcgcctgaccctgtgctgagcaccagggcccagatgaatgagacatggtccctgcaaatgcacacacataccttttcccataatgagaaagggctgagtacaggggtgagatgggacaggcagggatgcggtcaatccaacccaggtggaggagaaggaagactttccagagaaagagtcaacaggttggtctctagcaggccagtgctcagtgcctggtggatgcctggtatgcatgtgctaaaagactgaccaaactagacttagaagcaatagaactctacctggaggcactgcagtgaagtccctccttcctggagggaacgagtctctggctgagcacatggtgaggcaccaagtggagacagcttcctgtgtgaggcttacgggagcccagccctggcctgggattctaatagcagtgggcatgaccctccagagatggcagctttgccatgaccggcctctcatcatcatgtgtgtggactcccgctgaaaggtgtctgcctggaggagcctggaagagagctcacctccagccttgatgaagtggcatctctttggcacttggcctgacttcctagacctccctggggctggaagagcctgctaggggtcaatatgtactgaccctc

SEQ ID NO: 145448 - DNA, 405 bp, Homo sapiens
tctaggcctatctgattccaaagtggttgagggaaggagattcagtgataactagagtagtagacatacagggctgagcaaattccatgtagattgaatttcttcttacttttgagtaatcctgagaacaggaaacatgagattactaaacgtttccattttctacagaaaggtgcacaaacataacatgattcattggagaaggagatttttttttacacgttcatgtatagagttgatgactttaaattattccaatgttctatcaacagaagtgtgccaaagaatgtgttcaatgccaaaaatacagaaatgaattaaacctggtctttgatctcaagggggctcataatccagtgacggagagagtgctagtctagcgaacagatgatgggttggaaaaat

SEQ ID NO: 145449 - DNA, 329 bp, Homo sapiens
catcccccaccaggaccccatactttcctcccatgggtttcctatggaatgttgctgcttcaacttctgagagcctcttgctggggggccccatccctagcccttgcctccctgtgctgctttaccttctttttgggaggataactgccctctgttttcagcaccccaataagaaagaaaaagtcatgaccagaagtcagtgtcagtgattgctgatgtgtggaaacatctgatgaatgaagagtttgggtaaaaaataaagggaactgatgaaaaccacttgtgtgtgaagcctatatagtggtgtgtgcctgtagtcccagctactc

SEQ ID NO: 145450 - DNA, 137 bp, Homo sapiens
agacctcaattaattgcgcgttgaagagaggaaaagtggatttggttttatggtgtgtggaatagaaagggagaattaggagacttgattagcttaggcttaatttcctagtgacctccaaatgtgcgcattctatt

SEQ ID NO: 145451 - DNA, 714 bp, Homo sapiens
ttattacatttgacagtgtctcaataataagatatcattaaattcgttttggaacaagacaaagaatgttggtagagttgttggaagaaaaaggcactgatactactgttatttctctttagattaatgtggccaaattaattagaaacacagtgttgctctgttgcccaggctggagcgcagtgggaccatgtcggctcactgcaacctctcctttctgggttcaagtgattctcctgcctcagcctcctgagtagctgggattacaggcacctgccatcatgcccggctaatttttgtatttctggtatagatggggtttcaccatgttggccagaccataatactatggtattatgtggtcatgagttctaaggtcaaactgtcttagttgttaccttggttctgccaccaatctgggtgacctttgttaatttagctcaatctgtccaatttttaatttccttgcatataaaatgggatataattagttacccaagggagtatggtaagggttagaagaatctgatatatatttagtgcccagtaaatggtaacattgttaaatgggaggaaataatgagaggtcaggaagatctatgcattttagttttctcataattgtagtttagatgcaagtgttacccatactgatattatatagtcttagattttttttatttaagggtacacatgtgattattttacttagtt

SEQ ID NO: 145452 - DNA, 403 bp, Homo sapiens
ttcctgtaaacttaaataaaattattattttctctttttgctgtctgaatgcatcactgttattttctgctactgatttgagggtaaggtggggtagtaaaaaaatgttctcccactattgcaggcatctgaaatatgaagttagagaagtaagttatgctttttggctttatttccagttcacactcccagttcctgcttcttgaaaactaccaatgtgatcaggttcttccatatatgtcttcagagacagtctaccatatacaaacaaataggaatacatacacattttttcttcttatacatcaattgtagcatgccatacagtttgacaccatgcttttctcaataaacattattatgccttagagatcttttcatctcagtacctaaagcacttctt

SEQ ID NO: 145453 - DNA, 146 bp, Homo sapiens
atgatttttaaattaagttataaacatcagtatactttatctctaaacacttcagcataaatattcatagaggtttttttttttctttttcttgagacagggtctcactctgtcacccaggctggagtgcagtggtgcaatcatga

SEQ ID NO: 145454 - DNA, 171 bp, Homo sapiens
ctaataaaataatgatgatgaaagtactataaataattgtatgccaataaattggataacctagatgaaatggaccaactcctagaaccacacaaaaatatgagtataactataatcagtaataagattgaatcaataaaagcatttgatgaattcaatattttttcataa

SEQ ID NO: 145455 - DNA, 356 bp, Homo sapiens
ctttattagttttgtagtctgccaagtaggcagtcctgctacactgcctggagaggtgacagtttatgccagaggagactgaggggagtcctttattttacctttacttactcaatctgggagtcagattaaaatttttttctatggtgttttttgacttttagaacttttccgaaagttggattttggaaaaaggtggaaagtgttttatgaaagttggatttcagaaacacttcgaaagtctgtaaagtgatacataatctgttctctctatatacagtaggaaaaggatatttttcagcaaggatgcttgtaaccttcaaacttcggccaaatttgtaatatagtgggcactt

SEQ ID NO: 145456 - DNA, 500 bp, Homo sapiens
gggattacaggcgtgagccaccacacctagcagattgtctgtcttttatgcaggtggccagaccagctccccctcctgggcttggggctatgcgtgtaccctcaaaccactcctcttagctcccctcttgccccacacaccccagagatagccacttgtttctgcagtgggatacatgttgagcaaaatagggcttaagtcagagacctgcagctctccactagacaccacaggcctatggtttcttaccctgaggcacctgcctcacacaggccctagagacctagagagaagccagccctgttccagctgttcccacagcgtgcggtcactcctccccagccagccctggggagctttccatgcctccgggttttggctctgcagggacagagggccaacctctagcctcctgggctgggggaaccacccaaacaggagttttcttccctgctctgtgctctgtgaccatgggccagtcactccccctccctgggcct

SEQ ID NO: 145457 - DNA, 453 bp, Homo sapiens
acatcatgctaggggctggggtgggctgcagaataagtccatggcatggtccttgcctttagccgacttccagtcctctggggaggacaaaagtacacaaccgatgtgagagctagcctttaataaggatagattcctacaaggtcagagagtacccagaaggcaggaagcttagtggaggaggcaagacatgacacagggcctggagaatttggagtgggaagctgtctgctaggcagggaatatgggcttgaagagatagagacagtcaaggttctgggagatcttgaaagccatgttgatatagtcacaggagagggaggttcgtattcttcatgcaagtggcgctcagtaaggacagaaccatctaaagaagataagcctggctgtagctccacaaagaacagcctgacccctaatcctggggtctggggctggggctgggctcgtgac

SEQ ID NO: 145458 - DNA, 330 bp, Homo sapiens
tcacattcttacattagctggcccctgtctacttctgtggatctcatttcagcactactttactactctcttggtcattttctatgcttaagccacagcggactttgtatttctcaaatacattaatctgcttatcctttgtgactcttgtactagctgtttcctttacctgtaattctgtggcccacatcttcccatggctggctccttcatttaagtctcagcttaaatgcctctaaggtcttttttgaataaactaaattaatgtatttagtcaaataatatctttttttaatagcacttaccacgatttgaaattctttggtacaa

SEQ ID NO: 145459 - DNA, 396 bp, Homo sapiens
aaagcctgcctgcctgctttgtgtgtgccttccctttttcttgcagtggccctgtgggtttgcatggccctctgtggccagcctcaggatctagggtcctctctgcttgtagtataagctttgaatgctgtggcccggagcttttccacagcctgtgtttcctgcttctggtctgctctagagaaattcaagtcaggtttggcctggcttggccaacccgagcttgccatgtacctgagtcccaagggtgtctgtcccctaactctagccacctgttggggaggtaggaaggtctgggagggagatgctgaggagagcagagtcgtgtgcagaccaggtgggactggactacaggagagaccaggtgggactagactacaggagagccctgggggg

SEQ ID NO: 145460 - DNA, 734 bp, Homo sapiens
aaaataaattctcaagaatagcttaattagttttgagaaagaagaacaagataagagatttgctctgctagataacagaacacattctaaagctattataactctaaaaaatgtagtattgatgcaggccaaacatatagatttagtggaactgattcgtgagtacataaagagataagattcacttgtctacaacgtgcaccttgacttatgatggggttacatccctaagttgcaaataatgtaagtgcaaaatggatttaatacacctaacctactgaacatcatagcttagtctagcctacctttaatgtgctgagaacacttaacattagcctacagttggtcagaatcatctaacataaagccgactgtataataaagtattgaatatctcatgtaatttattgaatactgcattgaaagtgaagaacaaaatgattgtgtgggtactcaaagtatgctttctactgaatgcatatcacttccatgttagctgaaaaatcctaagtcaaactctcataagtttgggacaatctgtatatgggatttggttttgactgaaggtagtgtttcaaatcagtaggagaaagatttgtactaagaaaattgaccatttggaaaaaataaggctagctcttgtaacctcatttcattcacaaaactaaattctacattgattaaagaactgaatatttaaaaataagtaaaagtgtgaggtctataaaatataa

SEQ ID NO: 145461 - DNA, 633 bp, Homo sapiens
ggttcggttcaagtcaacaaacaagtgaagcagcagtttctgtgtgctggagtatgcagagagggctaggacttagcgatgcggtgggcacagactatcttcacggtcactttgaactaatcttggggtgggggttgaacaaccacaaagaaagagctctgctatccccagtttcaccctatgcccttgccagaagcagttactctctgacaaacaaatgtctccctgtgcctcaaagctgacacatctacagcaaggcttatgtgtgctgaagttaacatcccaagaatatcctggaagctgcacctgaagagctttccagcagaagtcaaaaagcacttttcataccccagatcactagtaaaatgaagcagtgcttagcattttaatacaaggcaatatcaagatttcaggtcaactaatatcctctattttattacacgaaataaaatatattctattgccagcatgtattagaaatttgtgcaattggagagacctgaagtcttcaattttccatgcttcagctattacttttaaaaataatatgaagtgttggatatggatatagaagaaagcatttaaacactcatggtctagcataataaagagactttcagcattgacacttat

SEQ ID NO: 145462 - DNA, 465 bp, Homo sapiens
aaaagggaaaggttaaggagaatgtagttaattctaccagaagaaactacctcagtattctcaggctgcacccatagtacctgtggcactaaaatcttaggatagaagagtgctaagaaggaagaaagaataataaaaataatgttttgtgttttttcctcatattagtgataatgaaaatgtgtttaaattcaggcctcccataaagtattgcgtatcataaagtctaaggcaggtacctgaccgtgaaaaactacattttgaagcactgatgactgataagagagacacaaaatgtttaacctgtaattttggtgaagccattggaaattagcaaacctacactatgttttctctacatttggagactattcatctgttaatgtagatgcaaaagaaagtcttattcaaggactccaaagacatatttaacacaatattaaacattgaacctgcattttaagc

SEQ ID NO: 145463 - DNA, 476 bp, Homo sapiens
tatagatgcgtatgctagatatctggatcttataatagactgtatattcctctgagtagataccacagtagtgtgactgctgtatcatatggtatcctaaggaatctccacattgtttcccatagtgattgtactagtttacattcctaccagcagtgtagaagtgttccctgtttaccacatccacataaatgtctattatttgttgttttatgtattatggccatttatgtggatgtggaaaaactggaaccctcatacaatgttggtggcaatgcaaaatgctatagccactttggaaaacagattagcttttcctcaaaaatgtaaatataagccagaggaagtggtagaatgcctgtagccccatctcagctaatttttgtgtttttagtggagacaaggtttcatcatgttggccaggctggtctggaactcctgacctgaagtgatccccccacctcggcatcccgaag

SEQ ID NO: 145464 - DNA, 216 bp, Homo sapiens
agctttgcccttcatttggctgcagctgctaacttaagggaagagagaggctcgattggggcactcaggaagtgggcaggtggggctctgggtgccctacccctacttcagccgcagcaactcagctttcacctgtcatgggactggacttttgtgtaagatttcttttaaaggattcttggttaggcacagtggctcatgcctgtagtcccagca

SEQ ID NO: 145465 - DNA, 209 bp, Homo sapiens
caggcaaaatccttaactagtttttccctaagtgcaatactagatccctcattcatgttttgcagcaatactgacatgctttattcacaggttttctgcttcgtaatgaagttgtcattgcctggtccttatattagaagacgtgtttgcaaatttggactgaaatggatacaaaatgcaatagtagtagttgtattgaaaatatattg

SEQ ID NO: 145466 - DNA, 419 bp, Homo sapiens
agggctaacgtcagaggcggaccccaaggacacgtgggtatgctcagaggccagcatctgacatcgaggcagcaagtgaagaagaaaggcctcccaggaggtgggtctcgccatctggttctgggcaggtgacctctggaaagctacgtgttactccaaagctcagtttcttcctctataaaaagggtacaataaaagattctctgtctcatgtggttgctgcagggaaaaaaatatagtaactatggttggacaactgacaatgaatagataaaatcagccaaggaataggcaaaaagtgttctttttatttttatcgagacaaggtctcactctgtcgcccaggctggagtgtagtagtgtgatctcggctcactgcaacctccgcctcccgggttcaagtaattctcctgcctcag

SEQ ID NO: 145467 - DNA, 549 bp, Homo sapiens
tgagaaagggccatgtgagggtgcagcaagaaggtggcagtctgcaagccaggaagagagtcctcaccaggaactagtcctgccaaaccttgatttgggacttccatgctttagaacaccgagcctgtggtactttatatggcagcccaagcagaagggttaaagacattttagggattgtaggaagagggatataaaaaaagtagaagcaggatcctcaacctcagtgtaatcaatgtagttagtgttggctctctctgtgatttgagatctgactctgcaggcccacctctggaggcacagacttaattgagctagaattttttttttttttttttaaggcatggtctggctctgtcgctcaggctggaatgcagtggtgtgatcatggctcactgcagccttgatctctcaggctgaagtgatcctcctgcctcagccttctcagtagttgggactataggcatgcaccaccacacctggctatttttattttcattttttgtagaaacagggtctcactattttgctcaggctggtcttgaactc

SEQ ID NO: 145468 - DNA, 357 bp, Homo sapiens
taaataaaaagccataaagaggaataaagtattgatcctgcagtatggatgaaccttgaaaacatgaggctaagtgaaagaagccagacacaaaaggccagactgtacaggactccactcctatgaaaagcccacagtaggctcagaaatagagacagaaagcagattggcagttgcttaaggctgggagttggggcaaaggaaaaaagtagtgactgctaatgggtacagagtttctttttggggtaatgcaaatgttctaaaactgactgtagtgacagctgtacagcactgtgaatatactacaaaccgctgagctttcaatgaataaactgtatggtatatgaattatagctc

SEQ ID NO: 145469 - DNA, 532 bp, Homo sapiens
tgcactccagcctgagcaacagggcaagactccatctcaaaaaaattttttttggatttatatttactgagagggtctgttactaaggtatttagatttggttggatttaactgctaaaatgttgtagagtctgaatctatggcatggtaaagaataatcacagccattcagcaagttgtgaagcttctggttgggatgaaagaaacttcaagctgagaggaagaatgttctgaaatatttgggaggtttggcagactcctttctcaggggtatgttcatttgggccagtgattctgaagcccactttgcagatatcttaggtgtgtcatgaagttttacaagaacattgtgagtagttgcaataacaaaaggaaacaaatgtttcatattactttccattatccgtgtctcaggtattcttccagagatactttagccatgtgtaagtgaatacacttccatacaatatcatgcgtaaaacacatgacattctgaaccctgccgtttttattaaagaaaatttcaaatgta

SEQ ID NO: 145470 - DNA, 386 bp, Homo sapiens
ataccccaaatatatttctgggtaagaatctttgaagcctggacccagatcataatttaaggtcttggcctgtctcttatacattaaaatttaagacataccagccaattcatctcaaccttattcccagtttataatcatttttctctcaacttctggcctatattacttagtcctctaatccttcaaattagaaaactcattcgttcatgcaataaatacttatatacggtttaatttgtgccatgctaagcagatggatatgcaaagacaaactctttaggagttcatattagtgaaatctagacagagctcaactatgtcaggacatgagtgtgaggaagatgtgattaaatttcttgatcagatgaccagtgagccagaca

SEQ ID NO: 145471 - DNA, 333 bp, Homo sapiens
tctcactctgtcgcccaggttggagtgtactggcgcgatctcggctcactgcaagctccacctcccaggttcctgccattctcctgcctcagcctcccaagtagctgggactacaggcacccgccaccatgcccggccaattttttgtattttttagtagagatggggtttcaccgtgttagccaggatggtctcagatttcctgacctcgtgatctgcccatctctgcctcctaaagtactgggattacaggcgtgagccaccgtgcccagccctaaattgaattcttaaatccctcttgttcataaagcagtatatttggtttacaggaca

SEQ ID NO: 145472 - DNA, 459 bp, Homo sapiens
gtcttgaaagaatccacttcgtcatccagatcagtgatgcagatggcaatatttgttaagaacggctcttcctgtagttctaagaaattatctgactagaaagatgacaggaaaagcactattatgagactgcccagtgataagttattctgggcacccatggtaatgcgctgggccccaaggtattagaatttagtaacagcggccgggcacagtggctcgcacctgtaatcccagcactttgggaggctaaggtgggcagatcacctgaggtcaggagttcgagaccagcctggccaacatggtgaaaccccatctctactaaaaatataaaaatcagccgggcttgggggctcgtgcctgtaatcccagctacttgggaggctgaggcaggagaatccctgaacctgggaggtggaggttacagtgagccaagattgcaccactgcactccagcct

SEQ ID NO: 145473 - DNA, 499 bp, Homo sapiens
tattgcgtgtgtctgtgtgttggtgtgtctgttggtgtgtgtgtctgtgtgttggtgtgtgtgtgtgttgcacccacttgcactttcttgaaccctgcttgatgtctgtgcctctgttcccgtatccctgctggttcctttctgtgctggctgtcagcagagctgcgagtgtggatgccaggctggagtgagtgaaagagcaaccgctggtatgggccattcgctgggggattttggcagagaaaaggagcaaaatacaagtaacggaagcttgggggtcaatggaagaattgtttagaggaggggagacttggcaaggtttgaaagcagaaggggaagggtgcataaggagggacatttggaaaagtgctggagaggggagcagagggaagctgccagggaggtgcaccagcagagattggggtgagggcacaggaaaggacacagaaaccccaccccaggacttgttacccagctctcagattgctaatgcccagca

SEQ ID NO: 145474 - DNA, 463 bp, Homo sapiens
tcccagctactcgggaggctgaggcaggagaatggcttgaatccagggggcggaggttgcagcgagccgagatctcgccactgcactccagcctgggcgacagagcaagactctgtctaaaaaaaaaaaaaaaatagatattgaaatgcccgagttccatgctgggtctccccaggccccttggaggctgctgtctgcagaggaaagccggcaggaagccggcagacagagaattcccgggtgctccgaagggtgaggtagaggcagcaggggccaggagagaggtgttcgaggaggtgacattcccgttgagcccagaggtgaaaaggagccagtcttgctaagatgtgagagagagctctaggcagaggcacgcccatgcaaaggcccgggggcaggaccgcctggcatgttgaagaggtcctgcagtgaggagacctgcatggctggagcagagagagaa

SEQ ID NO: 145475 - DNA, 307 bp, Homo sapiens
cctgcctgatagaaaatctgctttaataagaaacaagaactcactcagtccgtccggagagcccctagatatgtggcagtgtactaagcactatgagaaggaaataagatgttaaaaaatatcattaaccaggctcggtggctcacttctgtaatcccagcactttgggaatctgaggcgggtggatcacctgatgtcaggagtttgagaccagcctggccaacatggtgaaaccccttctctactaaaaatacaaaggccgggcacggtggctcatgcctcttatcccagcacttcgggaggccaa

SEQ ID NO: 145476 - DNA, 443 bp, Homo sapiens
gcgtaacccgtcatcaccaggaacactgtcatcacaagtcaccagcaccagcaccatcatcaagcacatcacgagcgtaccagtcccaccacgtagtcaccatcaacaccaccagcatcatccccatcactatcaccaccactactaacatcatcacccccatcaacaccaccatcacccacatcaggtgggtcagaacataagcttatgttctgacccaccgtgatttatcagaaaggaaaaacttacaatatgcatatttcctatgcataggctactgctatgaattgaaattcttaaattccaaagattaattaaaatgtttctcaagacacataaactgttagaatctgcttataatgaggctgaagttgagtaagaagagaactggcatttaggacgctacttttcttctgtcgagtactgtcaagttttggttctgc

SEQ ID NO: 145477 - DNA, 287 bp, Homo sapiens
ttcaagtgattctcctgcttcagcctcccgagtagctgggattacaggcatgcaccaccacatctggctaatttttgtatttttagtagagatgggatttcaccatgttggccaggctggtcttgaactcttgacctcaggtgatccacccaccttggcctcctaaactgctaggattacagatttgagccaccacgcccagccttttcttaataatttttaaaatgataaggagcatcattaaaagcaagcctattatctataataataaaatgtttccatgtaat

SEQ ID NO: 145478 - DNA, 456 bp, Homo sapiens
aatatctgtacatacttagaaataaaattgcagagcctttcttacagattgcatcatttcagacttccccaaggaagagtgaaagtgcttatctaccatgcctttactacagtgttatcaagcttttaaaatttggatcataggtggacacagttaagcaccatagttttaacttgcatttctcttctcatgaagttaaacaacatttcatatgtttaagaactatttatatttgctttactataaactactactgatattccctgccaattatcctagtagacagttaatatttttgttaattatttttagaatctctttgtatattaaagctattaatctatgtgtcagcattagtgctacttactcccagtttctcatttctcttttgatgatgttatggttgttatctacacatatacttctttatctttagactacaggagaacatgtcag

SEQ ID NO: 145479 - DNA, 300 bp, Homo sapiens
tccagtctgggtagtgtgttttagcgaggctctctgcaagccagccactcctgctctgtacctactcctctctggctcctgggctgtagccacaagggtcctgtgtgtcacccattccaccaggggccaccaccctccttaatggctgctgcctgtcctgctcaccccaactggagccgccaagaccaccctgttccacacttgtgccctcagccagatgtcacccctccccctccctagcacagcaccctgtttattccctttatatcatttgattcatcttgtaatcatataattatc

SEQ ID NO: 145480 - DNA, 379 bp, Homo sapiens
gaccttctctaatgtctaagagcagagtgaaagtgagcaggccatctgaggagagagagacttccctgttggctcatcatgatgcttaagcagagccaaaaagctacttggtagggatgtcaaggaagtgagtcaggtgttttcagcaccgcgactctgtcattgtgtgcctctctccttaatacctcagaattagaataaagtcttgataacagtagtggcaccagtcctgtggtttgttttgcgatgactgtgtggttgttaaactttctaagtgaaacaccatagtgtcgggagcaatgccgacaagcctggccacctttggtctacagcagatattgcaagctggtatcccgtggccacagtcaggcttggtgat

SEQ ID NO: 145481 - DNA, 238 bp, Homo sapiens
tggtcttcagccccattttttctcttttagagaacttccctgatctgtgatgaaaacttgtctcctctctctttaaaatatcttctctcaaatctgactttactgatactgtttgatctcatttatgggtaatttaaataatcatttcatctcagacattaaacactaactctttgagaatcactcagctgagttgttggggatacttaaaacacagtccttgttttgtttttttccc

SEQ ID NO: 145482 - DNA, 540 bp, Homo sapiens
tctgagatggagtcttgctctgttgcccaggctggagtgcagtggcatgatcttggctcactgcagcctccacctcctgggttcaagcaattctcctgcctcagcctcctgactagctgggattacagatgtgtgccaccatgcctaatttttgtatttttaatagagacagggtttcgccatgctggccaggctggtcttgaactcctgaccttgtgatccacctgcatcggcctcccaaagtaccagggttacaggtgtgagccactgtgccccgcctagctgtggattttgagagtccaagttgactgtaggtaaatttgtagaaagacaatataccattttgccaattagcaaaagccaaataagaacacagtaaattgtatttaaaagaaagctcacccatttccacagacgttgagcatttaagaaatgctagacatctgaaatataaaccatgaaattgacaggttgggtgaacaaaactgcagtgacaaggctgaatgaatggctggaggtaagccacattgaaacaaattt

SEQ ID NO: 145483 - DNA, 271 bp, Homo sapiens
ttcaatatgaagcacaggggaatttttagggcagggcaacttctgtgtaatatgacagaggcagatacatgatccagtgctggaggtggggcctggtgggagatgcttggatcatgggggtgaatcgatccctcatggcttgctgctgacttgctgacagggagttcttgcaagatctggtcatttaaaagtatgtggcacctcccctaccactctctcttgcttgctcctgctttcaccatgtgacgtgtctgctccccacaaccacctg

SEQ ID NO: 145484 - DNA, 370 bp, Homo sapiens
ttgcagattttcaattacttctcagcaaacaaaatagttttatttgcattgtttactcggcatttaatttaaaaggaatccgattgattgtttttaaagaaagatgaatttggagggttgggagaaaataaataggtaaatgtttgagtagccctacatctgtatttttgttttgagtgaaacaagtgtacaggatttggcctaaattcaatcgagtctatcacacaatctcaaaatgcctcctgtgcaatttgtcaaaagagagatttttggcaactgcatataaaactcttgagatttgtaatgaagaacataatcagaagggaaaaaaagcaaagttgcattttctgcgaattaaaactggtaaatc

SEQ ID NO: 145485 - DNA, 196 bp, Homo sapiens
caacctgctttcagagtttgaactcaaaaccagcaatatatatgctgcatcagataagtgtatttcattgattttgaaaactcaaagacatataatactgcatcctaagctttaaaaagacaaaagtttgttggctaatgtattaggtaaagaagttatctgattttaataaaaaagggcaaaagtaggctgcagt

SEQ ID NO: 145486 - DNA, 104 bp, Homo sapiens
ctaataattgcaatagaaatatataccgttttggatttgtaaacatcttagaaaaaatacctagaaaaaaactcttaatgagcaaatggattaacatgtctgct

SEQ ID NO: 145487 - DNA, 408 bp, Homo sapiens
tcagtgcctatcacatgaatcaaaatagagcagatgtaaaactctactgaagatgtcaaaagcttgtgcatatttgtgaactctagaaaagtttattgactttcattgaaatgttctttttttctagtttattggtcagggttcttagttttcgacaacagaatttaaatcggttggtttaaactgagagatttgttagagggaatacaatagtttccagacacattgggagacctaaaggaacagactgtattttcaacttctagaaacttctagaaccacacctttgaactggcctgctacagagctgcctgttttaaatagcctagcactgtaggttctatttaccttaattcccctagcccactccgtgttagccaccactgacaaccccagatgaacaaaacc

SEQ ID NO: 145488 - DNA, 403 bp, Homo sapiens
aaaaccttctttttctttaggtactattagaccatggctctaatttcctaagtaagggaatattttatatataacagatattttgctgttattcaaagatgtgtaagactgtcagttcatacaacttgatatggagtgagtgtcataaattaattattcccactctctggtctaataacctacaaaattattaggaaagtcacttactagcgttttacctttactctcagtatttctttattccttttacttcttcttcagccttctccttttcagagctttcagagtttcttatggacaggaagacctagagaaagtatttccccttctccttgatgatagccagaatgaggacaagaaagtattggagagacttagatgattcagaatgtaaattaaccag

SEQ ID NO: 145489 - DNA, 491 bp, Homo sapiens
taagttcaataccacctctctgcttcccccttccctgcagaaatctcctttctgagcttcccagtttgctaagtgacaactacaactttccagctacttaaaccctttggagtcatccctgacgcttgtctttcactcataccccatgtctagttcattggcaaatcttgtcagctggaccatgacaaaaatatccagaatctgagtgcttggccctacctccattgttgctacccttatgtcagccactgtcatctctcatttggacaatgatagttgcctcctgactggtttgcctgcttctgctctggccacaccatcttccacccacctcctgctctgatctgttctccacctgacatctggaatgatcttcttgaaaccctggtgacatcatgtcactcttctatcattttattctgaatataacccaaattttcatcattgcgtacaagacccatatctgatcttgggccccggtcactgctctg

SEQ ID NO: 145490 - DNA, 291 bp, Homo sapiens
ccacgttgcaactttgtttgaaataaaggggtgttggccatgtctagaagcattttgtttttgtgggattttactgtcaccagacctgactccagtggtcctgctctgtctagctaaggagtgaggggtgtctgtctgtagagattatgctgagctcccaacaatgacttgtgggactagagtaagccctaagattggtcccgaacaccgaccaagtttcacaccgcggggttctctgctgaagggttgagatgtacacatgagaagatccaacagcatggggctgcaagg

SEQ ID NO: 145491 - DNA, 370 bp, Homo sapiens
aagggaagttgaaactaggaattttgcataggaataagggaaagtttctttaatttttgccagcccattccatattgaaccagataggagaggtggttggccagattgagactcatctgttgttttctggaattctccctaggtctccagagaaggacaggccggaggatacagaggtttctctttgcacaatcagggcaatcatttggaggagtggaacctgggggtcacctgtcaggctccagcactgaactagaatttcaacccagttggaaatatttgatctccgcttccacaagaaaaagaacaattaaagccaggggtagaaatgagaaacacctccagggcttctttggtcccttgaaatact

SEQ ID NO: 145492 - DNA, 225 bp, Homo sapiens
ccagaaggacatattccactagcactaactcaatgggtgggtctactttttaattgtctatttattgtggttcagcaacaaaatcttaaaagtatgctttcaaaatctctcaaaagaggaagtagtcatattacagaatccctattgggaaccctccttggtgtctcttaccctggggaagtttattctcatccacctctttgcaggaatgctaatgagactaca

SEQ ID NO: 145493 - DNA, 443 bp, Homo sapiens
aacaactgcaacaacaacaatgtaagacttattaaaagtacagcaaatttggggactaattgaatgtgactttcaaagccaatggcagagactagagcatgtactttgacagggttcatagtcatttctagtgaaaaatattgacaaatgatagtgtgctttatgtcacaagaattttatagcagctaagttttgtgtattaagaccacatgatgtattttcacacattccaaaaataaactgttataaagaaatactgagaagaatactctatttaatactccattaagcagtagattgaaattaagaactcaagaaccatgaaagcatgatataaaagaatgtgatgacattaagccattcaaaatgtaggtgtataaatattttaaattaaataattgttttatataatctagttataaaattgaatgaaaatgtttaaa

SEQ ID NO: 145494 - DNA, 366 bp, Homo sapiens
tggttttcaaactctgctctgcaagaccctagtgacactctggtggtgtctcagaggttactctggagagccactcatacctttgagaatgttcagatcttttcatcaaagcggctctactttgatcagttgggcttccgtaaaatttggggaaaaaagggttccattttctaaaaatgaaatgttctcaaaaatttgaagattattgaatgaccaggccaatgaggtttgtttctccaacatcataatgtttagtacttgtagacacttatatttctattgacaacatactggagttactaagtaccaccttatagctagggaaaatctttccatatttgtcaatgccagaacccttttaaattg

SEQ ID NO: 145495 - DNA, 577 bp, Homo sapiens
tccccagcagcggccggcgcccgaggccaactgagtggaccccagtgggggccaccaaaggacaatggctggtggttctgggcgccccgagccgcccgcgctggggtcgggggcgccaaccctggacctggccaaaagtgctgctgaggtccggctcctgagcggtctgggttcggggagacgctccagatcaggggctcgcgtgcaggaagtcggacaggcggtccttgggggcagcccggggcgcatgaagcccaaggccgccctgcaaggggcaccgctgccagcagtggggtcgcaggtcctgcctcttaagggtccggctccttagcctttgtttaattttgcctctgccctgtaacacccagtctgggctgttggacagcggcaagggccgcccccattttcctttgccaaaagggcgacagctggcaaaagatgcctgtggccaaatggaagaggtgccacccagcttttgtgatgcagaaacgtttaaaggcttcggagtgcacactttttacaaagttaaggcaccagagcagatttttggaaggaagttgtgggttgacaggcgtaa

SEQ ID NO: 145496 - DNA, 771 bp, Homo sapiens
tctgaggtggcaccaggcaagatcctatatcagggtctgaatcaaacagtcttcagccagtgtttattgttgccttgaagattaacaactctccaacaactaaaggtcttccccagccaggccactgttctctgcattaggtagacctgggcgtgaatcttagtgttatcacttcagaggcgtcactgtaggaaacacctcctaagctctctaggcctccattttatttccttatctttaagaagggggatggagctgctgtgagcctgaagtaccatcaagcactgaaaacatcaggcatgtagaggaggggttaaaagcggctcctctgtaatcacatcacatgaccttgaccaagtgacataattccctaatctaccttctccttatctgtacagtaagcctgtgaacctcatgggcttcttgtggggattatgtgagatgatgtgtctaggtacttacttgttggtaatagtagtgatgacagtggtagtagtagtagtaagaaactgttatcacaggctgggagtggtggctcacgcctgtaatcccagcactgtggaaggtcaagtccagaggattgcttgagcccagtggttggagacaagcctgggtaacaaagcaagaccttgtctctacagaaaatcaaaatattactcaggtgtaatgtcgtgcacccgtagtccccactactcaggaggctgatgggggaggatcgcttgagtcttacaggtcaaggctgcactaagctgtgatcatgccactgcatgc

SEQ ID NO: 145497 - DNA, 291 bp, Homo sapiens
gggatgcagtggtgactggaccagcctcatggctgggtggctctgccctcatgcggctccccatccggtgagggaagcagaccttcagaccccagagtggtcaggtctgtgatcggggaagcccaggggagtgggaacccagtggaggtgcctaacccagcctaggggtcaaagagggctcctggaagcagcttttgggctttggaggtggaatagagattcatcaaggagccgtttctaccatcttctccacctgcctttcttcagtgaaactctcacgacagctctcct

SEQ ID NO: 145498 - DNA, 336 bp, Homo sapiens
gttgaggcaggaggtcacttgagcctaggagtttgagaccagcctgggcaaaatggtgaaaccttatctctacaaaaaatacaaaagattagctgagtgtagtgttgtgcacttgtagtcccagctacctgggaggctgaggtaggaacatcacctgtgtctgggaggtcgaggctgcagtgagccatgatcatgtcactactttccagcctgggcaacagagtgaagccctgaatcaaaaaaataaaaataaaaagtatatagtaccaatttacttacaataatattaataattttcttcactgtagataatctcctatcactgtaaatgatctt

SEQ ID NO: 145499 - DNA, 297 bp, Homo sapiens
caagccaaaatcatgtctcatctgaatttttatcccccttcctgcttctgcattggccctcaccctcagtctattctcaatacccaagcaagaatataacatagtatcatggagatcatgccactctgctcattcacttttaaggacttctaattccactctgggtcattattgtacagattatacagctctactcatgctccccaccaggcacacctctttgatcacagccctgttgctcttcccctcatgcctctgttctagttttgctgtacccaacacttcctggtgctcttt

SEQ ID NO: 145500 - DNA, 265 bp, Homo sapiens
ggattacaggcgtgagccactgcgcccggccggcaaaggaaacatttttaaagggacatatccattttcacagagcaggcaaaaggattaatttatagctaaggtggactgatctaaatattcaaatgatgttagcaggatttgctttttctccatttctcagcattgctttcttctgggtagtttcattctaggctggctgcctccatattatggtatgaagaattcagcagaacaaaatttctcttcttgtcaattgtcacaa

SEQ ID NO: 145501 - DNA, 636 bp, Homo sapiens
gaaaccctgggccagggccaaatagcacataatgcctctgccttccaccttccagccagtaagtgcaaaattcctaagaaatgaaatcaaaatttctcctctttaatcagcttttaaagtgttgacctagttctgcataaccttgtccttttctgtatttttctatggaacaatttttggaagactttcagagttttggggggcaaatcgtgtcttctatttttcaccaaagggaaagattggggcagggtaaactggtagtgggcagactggagtgtgggagagcatgaaataagaaccaggtattcggccaggcacggtggctcacacctgtaatctttgggaggccgaggcgggcggaccacttgaggtcaggagttggtgaccagcctggcctacatagtgaaagcctgtctctactcaaaatacaaaaattagctgggcatggtggcacacgcctgtagtcccagctactagggaggctgaggcaagagaatagcttgaacctgggaggcgaaggttgcagtgagccaagatcgcgccactgcactgcagcgtgggcgacagagcgagactccatctcaaagaaaaagaaaccaggtattctttcagggttaattctgacagttttttgaa

SEQ ID NO: 145502 - DNA, 659 bp, Homo sapiens
gtctgttgcatcaaatttatcataccctgtcctcgagaagcttcagcgagcaccatttgcatctttaatggttgtaaactccaaatctgtatttatgaactgggatttgtgttaaaggccttcttagatttatcagattcttcattgcttcatttcgtggtgattatttggaccctagaccttgcttcatcttgcagctagaatccttgctaccaaatcaattaccataaagttgctattcttacacctctttcattgtgtaacaaaacatgataaatgttctttctgttgcaccaatttttgcaagctatgtgttttgagttcatttttttttccagtaagggaaacagatttttcttgaactgttatattcttgccctattcctggtaattgttgaccatatgtacaacagctagcaaaatgtatgcctttgataaggttcactggcctcataaaacctgtaaaaaatattctttgccaagtaccgttctttatctacttatcataagaaatgttagttgttggccaggtgtggtggctcacgcctgtaatcctaacactttgggaggccaagacgggtggatcaattgagttcaggagtttgaaaccagcctggccaacatggtgaaaccccatctctacgaaaaaatacaaaaaa

SEQ ID NO: 145503 - DNA, 612 bp, Homo sapiens
ctggaggctgaggtcgaagaattgcttgaacccaggaggtggaggttgcagtgagccaagatcgcaccactgcactccagcctgggtgacagagcgagactccatctcaaaaaaaaaaaaaaagattaaaaaaattccttttttaagacctgcaagattcttgagagaccagcacccaaacaagggtcatatgttggggggccacaggatattgtaatcactgcctcctgggcagagcgactgcagctctcccagcctccaaaccccagcccagggtgcttggaggtccctgtaactcctcacgctgccacctgccactctgtcctcaggggttcccagcttggagaaatagaggccctgcggagggatgcagtagagagaccctgcccctttccacactaagatctgacctagtccgaaggtgaaatgtatgtcccaagaaagactgagaaaactaatcaaggcagaataacagtcatcactgcaatccacaccagcaaccaatatggcctgcgggctcactgtgtcctgtgcttcactgtaagcccttacctcgttgaactctcacaaccccacaagctaagtactaatctgatcccactttcaaagggt

SEQ ID NO: 145504 - DNA, 169 bp, Homo sapiens
tggactgagggtttgctagggaagggtttgcagggggctgggccagtccttagacagcgatgggggttcagggagcctttagcagggaagtctagggtgcctgtgcccgtgcctgcagaagggaagggtcaggagagaagtgaaggctgtggcagcccggtcctgagag

SEQ ID NO: 145505 - DNA, 422 bp, Homo sapiens
gacttttagtggtaatgcgtgtgtggctctgcactgtgttcttggggtctaacataatgtaggcaatctgaaggttactgtccagtgtgggaagcaaaaggaaatcacggtataagttttgctttctttaatagcagaaggggctacatcctactgtgggaatgcagaaaagggagtgataagctgccttcatagactgtgctttcattttttgcaaaagtaaatgtaatcaatatgaatttgtggaaagtgtagcatatattgccatgtgttatgactttgagcttattttaaaataaagatggatgcctgtttctgcctaacatgttagtcagtgttatcaaagacaagaggcagaccattcattcactcatttccaaaacactgaatgccattctgtgcctagcgctatacaagacatc

SEQ ID NO: 145506 - DNA, 166 bp, Homo sapiens
gaaattgagttgcaggagtaaaactgatcttacaggctttaaaagaggatataatgaggtgatgtgtgtaatgcatacatagccaggcactttatagactgtaaagtgctgtgtggtgttattattttcatcatgactctgggagaactggggtaacagaagcaca

SEQ ID NO: 145507 - DNA, 244 bp, Homo sapiens
cccctaggggagggaatgtaacctcccaggtattagtggattaggtggtccctgtcagccaaaatgatcttctaaagaagagcataggtgtggcccatgggcagctgacacctgccagctggggatgggccggtgcgccagcctgggaagcagatctggagatagtagccacttggcttttcttggtttgcccgtcagtgggatggggctgaaggtagcacctgcttcctaaggctgctgtggc

SEQ ID NO: 145508 - DNA, 165 bp, Homo sapiens
gtcacgctcggccctgttggatgatctactttaatttttccgtgactgaattgttctagaaatcaggtcagctgttctatagacaagagtgctgctgctttatggcggcattattttggtcttctattccctatatttccttttgactacaaatctgctatagag

SEQ ID NO: 145509 - DNA, 770 bp, Homo sapiens
actcaacagtcatatagtcctctctatgtatggaggaaataccatgctaaatattggggatacaaagattattagatgggcccctggcctctggaaagcattgaatagtaaagggataggcatacaaaaaatataattctaaatagtcatgggtgtggtagggaccatgctgcaaagacattgcaatctctgcctataggactcacagaaggcatctctgaggagtaatatttagctgaaatctgaaggagaagtggaagtgggccaagtgaagtggagaaagttatagtattggtagtaaataacttaattgatcacatttttcaatattgagcatggaatcttttgttttaaagaattgcatgctcgatattttgaaagccaccattagatagtttttaagaatatccaatgaaatgtaccaccgtatgtgcttggaacccattagtcataacttggtgatataaagtacgttcttgacctatgacaggactattattgctggagttgctgtaccaaaaaatgtgatcatatttgccatctggtgaaatatactgtctcgcccaggttgaggtccacaagtgactaaatgaccaaaatgactaaagccctaagtagcccacaattactcagttgcctgtaggtccacatggagaatggaaagttgtgtttcatcagatctctgaactgaaggtcatggtgggggcagggaaaggatgcacagtgctttatcttttattttcctttgtagtttgaggtgcgtaagttct

SEQ ID NO: 145510 - DNA, 764 bp, Homo sapiens
tcgactttcattttagattcaggggtgcacaggcagattagttacatgggcatgttgcatgatgctgaggtttggggtacggatgatctcgtcacccgggcagtgagcatagtatccagcagctaattttgcaaccctccccctctccccgccctagtagtcctcagtgtctattgttatatgcatcatttttctaaagtgatgccataattgaaaatctagacaaaatatgatagttttttttactttaagaaaaccccattaaaatatatatttagagagaaacgtattaaacccttacatttaatttgatgtagcaaatttactgaatctgtaaaaattacaagtcaatataaatacaataaatctctgctctgatttgaatgtatatcttcatttatagtgtgtgctttactgacacagccattttttctccctcaattcactcaaatccagccccacctgttttgtctgtgctcttgtgtccaagtggctgtgtcctgggaaagatgagaagaaataaggcctgatctcagactcacagggagttttcgtttctagttgaggcatgatataaagaggtaactgatagtaattaaagttattaagaaagccaggagaggtaatagaaggattactactttggtcagatcgtatgtaaatagcccatgggtctttgaaatgccagagaactgaaggggggtacccaacctaatggttctagcatccacccttcctgcagcatgcagacgttagcagtgcct

SEQ ID NO: 145511 - DNA, 532 bp, Homo sapiens
tgatacatggtctcactgtgttcccagactagagtgcaatgtcgcaatcacagctcactgctgtcttgacctcctgtcaagcaatcctcccatctcagccctgcaagtagctgggactaaaggtgtgcagcaccacatctggttaatttttttttcttgagagatagtttctcactattttgcccaggctgcagggtaacatttctacagacaataaagcacaccagaagaatgtgtaaacaaaactaatatttttaacataatataaaaaaccaaggccttttctctcatgttttaattttctaaaaagataattcactacttaaagcatacatactatcaacaaacaattaaaaatttactttttaagaacttcacaatagcagcaaaaagcatgaaatatttagaaatctatgtaccaagagatgtgcaggatttgtatactgaaaactagaaaatattgagagaacctaaagacctaaataaagggagagatacaccacattcatggatcaaaagactattgtcaagg

SEQ ID NO: 145512 - DNA, 131 bp, Homo sapiens
ccaagctggacagccctgccactgtgctccatggccacagatggccagcccttgacagaatggctgcctgctccttggaccccacacagctggcaaaccagccctcagcactagggcagcctggccccagg

SEQ ID NO: 145513 - DNA, 308 bp, Homo sapiens
agagcatggaattttatttctttttatcacttgaaaaaatcacttccctcctaattcagtaaaactgggtggaggccacttcctccacaggtgagagaaataaaacttgttgatctgtcattgtcaggaattttaaagttaaccatttattttacatattttgaaaatggaaacaaaaggcagacaaaacccagaatgagaaattggggcacattctccatgctttcaaataaaacctctacctacttttttgtcattttaagatggtttctaaattagaaaacaagtgtccttaacttgaataggtt

SEQ ID NO: 145514 - DNA, 196 bp, Homo sapiens
ccagtcccaggttatttttatactgtggtttgtgcccaaggccaggaaggggaaagagttcgcatcctcacactccctgcctttccccagacctccgaggtgttatattctcccacaggacagaagtatccaaccttctatctctggctgctcacccccaccatggggacccaggcatcctgcccccacagcctgg

SEQ ID NO: 145515 - DNA, 765 bp, Homo sapiens
ccacactctcttcatgactgaagttttctaggaagtttaatctttgctcaggaaagactttcagtgttgatcttcttcaagaagttcttgatttttttcaggtcgttaatatttccatatgttttaggaacagcctgtcactttctgcaggctagcccactgggatttcggctgggagtggattcagtctgttgattatctgggtgaggtttgacatatgaacaacatgagcgttcctgtgaatgtagtgtccgtttactggcatcttttttgtttctctgcagtgtaaagatgttatacctctttcattaaatttatccctaggtagctgatgttttggaatgctattataaatgttatttttctttaaatctccttttccagcttcctgttgctagaatataaaactatggttgactttcgtaccccatatcctgcaattgtgctaaatttgctattagttctagaaattggtttgtccattcttgtgggttttctgcatacacagtcttgtcatctgcatgaggccagttctccttctctctgtccagtctgtgcggttgactccttttcctccccgcctggagatccccgtggtgtcgactggaagcatggaggcaccttggggaggtattgggcattttgtcgtgggcaggggctcagctgtcggttccatagaggaccttccagataaggaggcccctccagcccctgactgccgagcttgatttccaggaagggttgtggaagtcaccgagtgccctc

SEQ ID NO: 145516 - DNA, 177 bp, Homo sapiens
gactgtgtttccaattcattggcaattgcctgaggaactttcatttagactttttgtgggattttactaagctctaattggaccttcctttaattttataatcgtgtattgtgtatgacttcttcttgccaaggtgcctaagaggagctgacagctgtttatttagtatatgcagtg

SEQ ID NO: 145517 - DNA, 185 bp, Homo sapiens
aggtgtgagccactgtgcccggcccagagacttttgaaagtctaaaatggattgtatcatagctcacatcactcctcttcccactgcaggataaaacccaggcctctcactgcaacacacaaggccccgaatggtcccgctcccctctccgttcgttcctctttctcttgcccaccacgctgcag

SEQ ID NO: 145518 - DNA, 424 bp, Homo sapiens
caacatctaaagaaactaatagcttttcattataatattcgtgcatgccattctgcttggaaggaaacatattgaaagagggaaatttaagcagagtaggtgatacctgcttcctcctcaaggaataaagaattctgccatcaaataaatgaaaagggtatttcaagaataagaaaccagttgtacaaaggcatactggcatgactagtgtgtttggagaattttaagcattagttaatgatatttgcccaacaaacattaagttactggagtgctgtttttcctgggctggcataatacaagcctccagcccactgattacagtggggttataaggctatcaaaattttaaacagagtggatggtagtatgctgtttttacttcatcttggtacatgagtacgatatagttaaggctttgtgc

SEQ ID NO: 145519 - DNA, 264 bp, Homo sapiens
ttcctccaagcctcttgcctcacaataaacataaaaacagatgaccctatcactccagactgtccttcataatggcaacaacaacaataatacaagcttttaatttttgaactcccactgtacggcagacctttatctcattattggaaggagtataaagtaaggcatgaaaccactggacatgaatgagcagagagggtgggctagggatctagttggcagttaacactgatgaccttgggggatgaaaggcctcgacatgaa

SEQ ID NO: 145520 - DNA, 395 bp, Homo sapiens
gacctggggccggtaggttggagtccagagtcagccctgaatgagtttcggtgagcagggcaagaggggagcagggatggtatagaaaaaaaggcagaaaagtgcaaggtgtgaagccatggcttgcacggttagtagagagcaaagagactagctgcagttgactcgtccactgatcaaatgatcagcttgtagggctgtacaaagtaatatatcactgctgttccattcactaatcactaatgtgacacaaacctcaatattaaaacagttataaaaattctaaattttcctgcacccaatcattggagctaattctatttgtacccgttcgcttctcctgaaagtccatgcacatttccacagcaaatgaaaagagacaacatctacactta

SEQ ID NO: 145521 - DNA, 175 bp, Homo sapiens
ggatttgctggtgcagtacaactaggcttaataggtcctcatacaaaaagaaaatttgggctaggtgcgatggcttacaccatctacccagcactttgggaagctgaggcagtagaatcacttgagtctgggagtccgagaacagcctgggcaacataagagactccatctctac

SEQ ID NO: 145522 - DNA, 233 bp, Homo sapiens
tctaagaaactcgggaggagaaagtaatcgtgaaacgccgcacgggggaggggtgagaagggccgagaaacgcggaggtggtgtgaacgaatggaacagcagccgctgtgtcactgagtattacatcacacccagcctacacacgcacggggcccggcgctcacacacacgcggaggacagccagcacgcaccgacgcagcaccgacgcagcgccaggaggggccggggacac

SEQ ID NO: 145523 - DNA, 443 bp, Homo sapiens
tcatcttcagtaggataaaatctaagcactttcgtgtaacactgaaggtctctcctgacctggttcccaccttactgtactgtctcgtttcctttcacacctgctaggtactttatatactgtagtgagcaaaacactagacatggaccctgtcctcaggggaggagtaatagcagtcagcttttattggactatgtgccagacactgatttcctcctctgagaagcctttctcgtttatgtttgcataccatgtattatagctgttaccattttattgtgaacttggtctgtctcttcactgcactgttggaggcctttgattgtttctttaaagctcttccaggggcagggctggtcgggttgggtccaggtccacgtgggcccgtcctttttatttataacttttcggggaatcctctaagacgtcgaccttgcagggct

SEQ ID NO: 145524 - DNA, 249 bp, Homo sapiens
cggatcatgaaaattgacaatggaaaatgggcatgccattctggaacttttcccagcttttttccagagccaggtctgtcctgatgtgagaaatgatgtcctcatctgccaaatgagtacaataacattagctctacctaccttgctgggctgatgaaagaaacagaggaaataatacatataaaaactgtgctgattgaaaggagctatgtcaacatattaattcaggctgtccctggttggagtatt

SEQ ID NO: 145525 - DNA, 952 bp, Homo sapiens
taagagacgttgtcttggtgtagtgcagtggctcagttatagctcattgcaacctcgaactcctgggctcaagtaatcctcctgccttaccctcctgattagtcaggactacaggggtgcaccaccttacctggcttatttttaaatttttttttgtaaagataggatctcactatgttgcccaggtgggtctggaactcctggcctcaagcagtcctcacaccgcaggctcctaaagtattgggattataggcatgagccaccacacctggctacaacatgatattttgaaatacatatacattgtagaatgacaaaatctagctaattaatagtattataccattttaaaaaatacactaggtttgctaacatgactaggaatttatgcctttgatttccagacaatgcttgaaatcccccatttttacttaatctaatttcctgtagactccattaatttggctaggtaatataggatctcttataattcttccacgagttttcttacaagccaaaatctaaagtaaataagcctactttctttgagaaaaaagtaacaaaattaaatgttttatagctgtagcctaagcagtaagctgattgaaaaatagccattagcattaatactggccaaaacccatgtggggaaaaagaaaaactgatgaagcaactgattatgtttaattatcttgaaacctcaaatgtgtacttacacaaaactatatggtcatagttagaagcaccattattaggcagattaactaccttctgcattaaatagcagacattttgattaatgagctatttttgaagattatctttttatagagaatttgcctagctaactggtatttccaatcatggctctggggtttacctgttatttgataacagccaaccattgtcagttttatctgttgattgaattttattcataacattaatcatg

SEQ ID NO: 145526 - DNA, 142 bp, Homo sapiens
ttttctctaaggcagactctgactttgttatgcaggggcttgttttgaccacttgtggagtgtggggaaagactgacctgtgaaggccaagaacctcaagaaacttgggctcaggcatcattaccatcttagagtgcagtgt

SEQ ID NO: 145527 - DNA, 548 bp, Homo sapiens
tctagtgtataccattttaattcccttgctgtttatttgactgtattttttatttgttttcttggttgtcctggggattacaatttagtatattaatttttgataatgtagtttgtattaatactatattacaatactatatgaaatatttatttgggcatagcttaatttcttttgcccttcttgtactgttattgtcatacaaattacattacactgtgtgcccatctacgcagatttatagttgctgctttacgcaattgtctttcaaatcatataggagaaaaaacaaattataaattaacaaatacatttatactgtcttatgtagctgcttttatactttacctgtgtagctgcttttactggcgctcttgattgcattcccctcccctcccctcttgacagggtctcgctctgtcacccaggtgggagtacagtggcacaatcatagcactgcagccttgacctcctgggctaaagagatcctcctgcctcagcctcccgagtagttgggactatgggtgcgtgccactattccctgctga

SEQ ID NO: 145528 - DNA, 151 bp, Homo sapiens
aaatatttgataacattcctgcactgagttatcatggtctgaatatttatgtgacgctctacgagtggtaccaaaatgttagtgatggagtttttactaatggcaccttttcctgtttttaaattctagaatcttaataaatccaaagtgt

SEQ ID NO: 145529 - DNA, 808 bp, Homo sapiens
tagaaagacatagtgcttttagtgagcactgcaaatctaatgctcattttgaataccatttgtgctatgtaagttttatgtgattttgatgggcaaaaacatctttcacattttattatattaaagaaatatttcattttctttgtttctgcttaaatgtggcattgcttctgcttaaatgtggcattgcaaacaccttaccttatgatttccttatgagagtacaaacagatgaaattcagagcttttgctaactgctttattaccatgtaaagcaagttgaaagcaataccttccatgagatttggaattagctgtgtgtttcatttaattgctctctcaacccaatgaactagaagacgtgtgttagcttgagttgctctacatgaattaacagggaaacatacttaaaggaatactgatttcatgatgaatataagcagaaagagaattctaatttttccttttaaatactacagataatgatttaaaaatgtcatacacatgacaattttttcctagttaactaataaaatgaaattatatttaattttatttacatatatttgtcttcaaagaagcacgtgtattttaaggacatatgtttttgagctaaacattttaaattatctttgtatatattcttacaaattatgaaaaatttgttcttacgttgccagtgttcctttaattatagttacaaagtgtgagttaatactttgtgcaaagcactgccttcgtggtgccctcaattttataatattgcatgttaatgttttaagacaagtcatactatatttcaagatgg

SEQ ID NO: 145530 - DNA, 405 bp, Homo sapiens
cgtagagtctggcacatagtagtgctcactaaatggtagtcattaaagatacaacctgggacagtggcagctagtttaacaaaccaccacactccgtagcacctctcacctgggtgcaagtgccccaggccacactgcagtagctgcacgctgagggtgtccccagatatataagaagcctctccaagggccacagaggttttttgatggcaaatggtttaaaacatcgtttttatattaagttgtataaaatatactatgttataaaatgcaaagtttgcatcattttagagctaaaacttaaggccacaaaagaatctattttcttattaataaaaaatcctatttttatataatgcaaataacgaagatgaagtaacctattatttaattaaacatgtcttt

SEQ ID NO: 145531 - DNA, 603 bp, Homo sapiens
tatgctttgagctacaatgtaaatgaacaagtgtcatgaagatatgagggaatagcaccccaggcagaggaaacaacaagtgtaaaagccttgaagtgggaattagactggtattccaggttcatatggctagaggttattaagcaaggacagaggccagggaggcaggctggggttagatcacaagagcccatgataaggatcacagctctaagtaggagagtaaactactcagctgttttaaataagaaaaatgacacagatttatgtttgaaaaaagtcaagattatgaaatggtccagtgagtaaaaaggtttttcttttctttcttatataagcttattcaagtcatccctttttagactagactgaagacatccattttcccagctccccaaaatggcaatgattttattctaaccgcatctaaccttccagaagcactacttgtaacatgttgccccactactttctaacctacaatggctgtcagttcttacttagttctcagaacttagcctcagtttggctctcctaagaaccagttgggaggtctgtgcagtaccttcacacagtaccaagtttgacactttttcttccaag

SEQ ID NO: 145532 - DNA, 480 bp, Homo sapiens
atcactggattggtgtaaggcttacataaacttaaaccacttttacacttaagcactttatatgtggttgagctttacaccaacattagcttcctgttgtttatcttgcctacaaagtatctgtaatataatagttcatcacaatagtctatatgacaaaaacaggaggttagaacatcccctcacctaaaagaggttacaatcttggtcaaaaagtattaactttgacatgttacatgtttaaccttttttcttaaaataactttgataagaaaattatagttgtatgctataagggtacacacagttagagtggccagttttgcacattggattatacttctctacctaaaatctaatattttaaaactatgatcattaaattgctgactttgagggagacgaacagtatatacttttaagtactaatcagacaagatcataaataatgtgcctttataggggaagaaagattaataa

SEQ ID NO: 145533 - DNA, 163 bp, Homo sapiens
agagcagttttctgttctcacaagtagttgttatctagcttactaagggaacataagtctgttttaatcacagtttgggtttgttttgtttttgaggcagggttttgctctgtcacccaggctggagtgtagtggtgtgatcatggctcactgcaacctcgac

SEQ ID NO: 145534 - DNA, 325 bp, Homo sapiens
ctaacttgaggaccccaaagccgacatacacgcataatgggagggtgcctgcctcataatcagtgcagtcaaagggctaaaccacagatcagaggacagcttggtaaacctggaatcagaaataggagttgggtttcatgatgagatagtttcatcaaactaggctaaccaaatgaattgctatttcttcaggggagatacgcagtcatgcatcacttaaagatgaggacatgttttgagaaatgcatcattaagtgattttgtcattgttcaaatatcatagagtatacctacacaaacctagatggcttagcctactacacac

SEQ ID NO: 145535 - DNA, 210 bp, Homo sapiens
gcggccgcctactactactactgctcgaattcaagcttctaacgatgtacggggacatgtagcagaaatccacttttgctgaaaaaaaaaagtgtgtgtgtgtgtttagacacaggaaatgtccaagatattgacagtgattatatttaggaattaaattagagggagaacaggtaggtttcactctttattgtttttaaagggaaaaaa

SEQ ID NO: 145536 - DNA, 313 bp, Homo sapiens
gaaaccaatgcttgttctttgtttcattctttttaatattcttattatagactgctctgttgacgctgagtgtaaagccataacttgcccctatgagcgtctctttggatgcttgcatcccgcttgatgtttcatcagctttcttttcttggttcaggtactgctaaagtagctgagggctcagaacagtggggaataggagcatgaatgcaagagactttggtagaaagaattatggtagtattatggcagacacattttggttgtgtcaaaattaaaaaccatagtgttactctggtaaagaggatggcac

SEQ ID NO: 145537 - DNA, 319 bp, Homo sapiens
ctcacatgtactgcaatgggaatttttaccatgatcctaatatctgtttctgacccttgttactcctgagagttgccctctgttgtctgtagcctggtcttcctttgctttttcatcatttcctgtcaggtattttctgcattaatgtgggggctgctaagaattcagttctgtgctacaactgctacccaaatcctgatttaccttgagtggttactttgctgttgaatggtttctaagcaaattggtcactcatacttcatgttgctgctggcacgtttagatggaagaggtcatactttttgaaaatttatccttc

SEQ ID NO: 145538 - DNA, 814 bp, Homo sapiens
cataggaaaagctctcatcatgaatgaattgaactggagatgacctcacaacacaggtgttcagggggattacagtacaggagctcatccctcattcacatgaatccatgatttggataaggtttctaacttgtacataaaatattttgtgttcgtttaatgagttcccattgttgaagatcccaatacccctcactccctgctcccataaatatctgtagaatgaggtatttaaaaatattttttgtttttatgttgatttttattcattatccgatttctgactcatttagtgttataactggcattaagttagaaatggtctggataaagttgctgcttttttgacatctgtgtctagtggagcctggacacactcacatgtacatacatacaacatgcaaaataatgtaagagtattttctctttcagtatatagaccataggaattcagaccttaaagtcagatacatgcatctaaaagtattaaaaggggctgggtgcggtggctcacacccataatcctagtactttgggaaactgaggcgggcacattacctgaggtcaggagttccagactaggctggccaacatggtgaaaccccgtctctactaaaaatacaaaaattagggtggggaaccctataatcccagctactccagaggctgagaggagaactgcttgaaccctggaggcagaggttgcagtgagccgagattgcaacactgcactccagcccaggcgacagagtgagactctgtctcaaaaaaataaaataggccgggcgtggtggctcatgcctgtaatcctagc

SEQ ID NO: 145539 - DNA, 394 bp, Homo sapiens
atgtgactcaggcttagcaattaaactgcccatttccctgaccatggtggttgactcaggaatgtgatcaattcagtatcttctctgggatttttccgttagtccaatttgaaaaggttttctccataggctattgtttctaattaaaatatgaattgcacagttgttagtcttcttgtctgacatgtggaaagaaatgctttaagagatgaaatgagactgtctaaaagtgataattagagtcctttcttacctttgcatttttattgataagtttaacttatggttctaagttatgaagttgttgattggctgatttttagaacttaagaaacttttgattggttgtttgatttttagaaccatttctaagcaaatatttatctgtacataa

SEQ ID NO: 145540 - DNA, 878 bp, Homo sapiens
ccacccatgccccagctggggttggcatttcagagtttgcagaatctttgtgtggcttgataggttggtccctcgtcctctaatgagtcacctgcctttcactcaacacacagaaaacaaggcaaatgctgtaaatcccatccctcctcctcgcctcctgtgcagctcggggggcacgcaagaggaagtgttaaaaagatttcattcaatgactgaattccatgctgagcaaaagcctaggatgcaagttgaaatgtggcttcaaaagccaccatcaacgaagaattacaggaaaagggcagtcaagtggtaaaagattccactcactcaacatctatcacttatacaacagctgggccacatccaatttagagtggcggaagaaagtaaaatcaatcagaaatccaatctagcactgtcatatactttctaatagtctagcccattaaatttgccaatggttaaggtagtcatgaaaatccattacaaataccggtaaaaagccctaccaaatatcaataaacgaatgtactctgaaggcagtctccatagaaattttacttaataataataatacaaaactctatttgtgatgccaatgacatctgtccaaaaaggtgtcatgaaatcagctcttttacaaatcatctcaactttgaactagatgttagcaggttgtgcaatcccgagatggtctccacagtatgaccactattcctgaaattaagccaggaataattcagatgaccaaattcactgataatccttaattattatattagttattagtactaaacctattttaagtcaaattattaaatagaactggtaaaaaaagtagtaggaatgtctattttgaaaataatcttcatatccta

SEQ ID NO: 145541 - DNA, 521 bp, Homo sapiens
aatgtaacacctgttttctgaggctttgctgaatgtctcaggatgggttatttcagaggtcagcaaactaggctcaggccatggcagcctcccatctttggggcctggggcacggcatggtttgaggtcacagatgcaaatggatcccttagaagttgccctggaatcccaaaggatgctttactttgccacatgaaaaccaccccagatgatcctgcccaactgcctggcgccactgaggaaatcgttcttgccgagggtgttggactggccaaatctcccctactggggaaacaaagggttgtctgctcccggctcgccctccagcctgtcgggactgcctcctggaacagctgcagcgtgcaggcgcagccctgcttctaatagaggaaatgaatttataatgctgcagtctcttcattttcacccagcacaaatttccccttaaatacttaaaaacaacacccagagctggatataccttaaatttccaataaatgaaaccttaatccagtctgttg

SEQ ID NO: 145542 - DNA, 513 bp, Homo sapiens
gactagatcgagttactgtatccaaaatatttggctattcctaatcggactgtggttaagaaaaggcctcctgcagctttgctcagttggcaggcagacaatttcccatgattccagcttagcaccagttagaaaattatagggggaaaaaaaagtccctaacaataagattgccaagtaaatctggagtttccttcttggtaatgattttgatttttcacaacctgagagggaatctacaagttgccctttgtcagccccttcctttctagcccccccatctccatacagttgtgtggtggttaaccagtggggctataaggtttcattcccattagtcaagctcagaccttcaggtgagcttccagatgtattaattcactcagcaaaaccgtgaatgttatagtggttaggggatactgtgaagaaggcacataaaagtgcttctattgtgaaacttccatgatagaccaggattaaccagataccagtcctactggtcattggtgtttg

SEQ ID NO: 145543 - DNA, 229 bp, Homo sapiens
ccacccaatacttgaattaacatattttaaaggtaaacccctcaaaactacaaggttattaagaacagtcctttagtgtcagtcagaagtaaattcttctgtttatagaaagtacagctagcagtatgaaaagggacccaaagatcaagtagcactcattttgcccacctctgcttctgtcatcccaccacagtcactttggataagggaatccaattcatattgggtg

SEQ ID NO: 145544 - DNA, 215 bp, Homo sapiens
tagctgctggacgtgaggctgcagccgccctcttcatgggcactggcatcgccatcatcctgttactgagggcgtttttaaagatgtgacagaagtttcccctaactctgataagacgaaaggactggctgcttctatttcaggctgaaagacttgcatactgagtacaggcccatccccgcccagtgctggagcctgctgcatgccacggggtg

SEQ ID NO: 145545 - DNA, 224 bp, Homo sapiens
ccttttggtgagaccctagcagatgttgggactccctcccatctgggtagatggccacccctgaagaactctgctgttcacaggaaccccttgtggccatatgtctgtcattgtgggtttcttgaagacattttgtatttccagaattgatttcgtagcaggcctttgcctctatatagttgcattgtttaattatgtatctgttgtcagtttcagggattccg

SEQ ID NO: 145546 - DNA, 175 bp, Homo sapiens
gggaacaggctcctgtgacttggaaatgaaaatggatcacccaacctggaggaacagtgaggctggtgtccaagacttgccccttgcctgcacttccagcaaagatttggagacactcagtggaaaccaatcgagcccccagcccacccccgcccagactcagccaccaaagttc

SEQ ID NO: 145547 - DNA, 1276 bp, Homo sapiens
ggcgtcggctcactcggttcaaggcagcgcgactgcgggtggcgcacgaccagggcgcagaccttggggcgcgcggcccatggagtcggggctgctgcggccggcgccggtgagcgaggtcatcgtcctgcattacaactacaccggcaagctccgcggtgcgcgctaccagccgggtgccggcctgcgcgccgacgccgtggtgtgcctggcggtgtgcgccttcatcgtgctagagaatctagccgtgttgttggtgctcggacgccacccgcgcttccacgctcccatgttcctgctcctgggcagcctcacgttgtcggatctgctggcaggcgccgcctacgccgccaacatcctactgtcggggccgctcacgctgaaactgtcccccgcgctctggttcgcacgggagggaggcgtcttcgtggcactcactgcgtccgtgctgagcctcctggccatcgcgctggagcgcagcctcaccatggcgcgcagggggcccgcgcccgtctccagtcgggggcgcacgctggcgatggcagccgcggcctggggcgtgtcgctgctcctcgggctcctgccagcgctgggctggaattgcctgggtcgcctggacgcttgctccactgtcttgccgctctacgccaaggcctacgtgctcttctgcgtgctcgccttcgtgggcatcctggccgcgatctgtgcactctacgcgcgcatctactgccaggtacgcgccaacgcgcggcgcctgccggcacggcccgggactgcggggaccacctcgacccgggcgcgtcgcaagccgcgctcgctggccttgctgcgcacgctcagcgtggtgctcctggcctttgtggcatgttggggccccctcttcctgctgctgttgctcgacgtggcgtgcccggcgcgcacctgtcctgtactcctgcaggccgatcccttcctgggactggccatggccaactcacttctgaaccccatcatctacacgctcaccaaccgcgacctgcgccacgcgctcctgcgcctggtctgctgcggacgccactcctgcggcagagacccgagtggctcccagcagtcggcgagcgcggctgaggcttccgggggcctgcgccgctgcctgcccccgggccttgatgggagcttcagcggctcggagcgctcatcgccccagcgcgacgggctggacaccagcggctccacaggcagccccggtgcacccacagccgcccggactctggtatcagaaccggctgcagactga

SEQ ID NO: 145548 - DNA, 1308 bp, Homo sapiens
cactgaagactcctgctaagcaacccactgaagacccctccgaatcatcgacggggcgtccttggggtgcagcccaggaagctcagttcacagccttggggcgcgcggcccatggagtcggggctgctgcggccggcgccggtgagcgaggtcatcgtcctgcattacaactacaccggcaagctccgcggtgcgcgctaccagccgggtgccggcctgcgcgccgacgccgtggtgtgcctggcggtgtgcgccttcatcgtgctagagaatctagccgtgttgttggtgctcggacgccacccgcgcttccacgctcccatgttcctgctcctgggcagcctcacgttgtcggatctgctggcaggcgccgcctacgccgccaacatcctactgtcggggccgctcacgctgaaactgtcccccgcgctctggttcgcacgggagggaggcgtcttcgtggcactcactgcgtccgtgctgagcctcctggccatcgcgctggagcgcagcctcaccatggcgcgcagggggcccgcgcccgtctccagtcgggggcgcacgctggcgatggcagccgcggcctggggcgtgtcgctgctcctcgggctcctgccagcgctgggctggaattgcctgggtcgcctggacgcttgctccactgtcttgccgctctacgccaaggcctacgtgctcttctgcgtgctcgccttcgtgggcatcctggccgcgatctgtgcactctacgcgcgcatctactgccaggtacgcgccaacgcgcggcgcctgccggcacggcccgggactgcggggaccacctcgacccgggcgcgtcgcaagccgcgctcgctggccttgctgcgcacgctcagcgtggtgctcctggcctttgtggcatgttggggccccctcttcctgctgctgttgctcgacgtggcgtgcccggcgcgcacctgtcctgtactcctgcaggccgatcccttcctgggactggccatggccaactcacttctgaaccccatcatctacacgctcaccaaccgcgacctgcgccacgcgctcctgcgcctggtctgctgcggacgccactcctgcggcagagacccgagtggctcccagcagtcggcgagcgcggctgaggcttccgggggcctgcgccgctgcctgcccccgggccttgatgggagcttcagcggctcggagcgctcatcgccccagcgcgacgggctggacaccagcggctccacaggcagccccggtgcacccacagccgcccggactctggtatcagaaccggctgcagactga

SEQ ID NO: 145549 - DNA, 1181 bp, Homo sapiens
ggcgtcggctcactcggttcaaggcagcgcgactgcgggtggcgcacgaccagggcgcagaccttggggcgcgcggcccatggagtcggggctgctgcggccggcgccggtgagcgaggtcatcgtcctgcattacaactacaccggcaagctccgcggtgcgcgctaccagccgggtgccggcctgcgcgccgacgccgtggtgtgcctggcggtgtgcgccttcatcgtgctagagaatctagccgtgttgttggtgctcggacgccacccgcgcttccacgctcccatgttcctgctcctgggcagcctcacgttgtcggatctgctggcaggcgccgcctacgccgccaacatcctactgtcggggccgctcacgctgaaactgtcccccgcgctctggttcgcacgggagggaggcgtcttcgtggcactcactgcgtccgtgctgagcctcctggccatcgcgctggagcgcagcctcaccatggcgcgcagggggcccgcgcccgtctccagtcgggggcgcacgctggcgatggcagccgcggcctggggcgtgtcgctgctcctcgggctcctgccagcgctgggctggaattgcctgggtcgcctggacgcttgctccactgtcttgccgctctacgccaaggcctacgtgctcttctgcgtgctcgccttcgtgggcatcctggccgcgatctgtgcactctacgcgctcgctggccttgctgcgcacgctcagcgtggtgctcctggcctttgtggcatgttggggccccctcttcctgctgctgttgctcgacgtggcgtgcccggcgcgcacctgtcctgtactcctgcaggccgatcccttcctgggactggccatggccaactcacttctgaaccccatcatctacacgctcaccaaccgcgacctgcgccacgcgctcctgcgcctggtctgctgcggacgccactcctgcggcagagacccgagtggctcccagcagtcggcgagcgcggctgaggcttccgggggcctgcgccgctgcctgcccccgggccttgatgggagcttcagcggctcggagcgctcatcgccccagcgcgacgggctggacaccagcggctccacaggcagccccggtgcacccacagccgcccggactctggtatcagaaccggctgcagactga

SEQ ID NO: 145550 - DNA, 117 bp, Homo sapiens
cgtaatggcctgagctggtttcacaggcaccagcaagcttagctgtggggacactgctctggtctgccttgggtagctcccacggctcctcacagaccccccgcaaaatattttgta

SEQ ID NO: 145551 - DNA, 711 bp, Homo sapiens
gaaccctttcataccgctttgtgcagcggcgttaacgttcaaaatggtttaattcgcctcggttcatctggtggtggtggtttaagtgggggtaagatgcatgcacaaggctttttttttttttttcttaaacctttgccgcgggagctgattacgtacctacggcggttaaaagtggttaaacatgatcaaaacatgcacatgtgggcacatgtggcgtgtttgcatttccccaaactggtgttacgtgggagtggtgatgtgccgcagacatgctgggactcctacggctccttggctcgtttccgcaacatctcgtcgcattatgcgagtcaacaacagtaccagtgctgggttgcctcgtggcgactacgctgattctccagctattgtgaagcaagtttctcggccagagtggctgacttgactgaggagcttctgggagcatggaccacaagctatagtcctagagctattcattcatggctgaccagggcccattgtacagccggcgcctcgacgatgaccccttggtggcaacaccatggtcactcgagcaggctatgctgctggccagagcttcctcggttatgtggccatgcttggtgttgcctatgaggccccttcgctggcccctggttcatggcgctactgggctcacctctgctgcgcccacgtcctggcacacgcccagtgctccgcccacccgcg

SEQ ID NO: 145552 - DNA, 274 bp, Homo sapiens
caaaaaagaaaaagaaaaatatctttctataagtataaagagaaaagagtagtttttgtttgctgaatgaaaatgttttcatttatggtaaaaattttaaaatagtatggaaaaaagttggataatcccaaatactataaactacagagttattaatcacaaagtttagccatatatgcccaaattaaaccttatcctcctacatcatagtttaggctttttgctttcataagaattgtttttatgttctggtttatggatctgcaaacatgta

SEQ ID NO: 145553 - DNA, 262 bp, Homo sapiens
tgcagatactgtgcaggctggggtcgttatggcctgtctcttctggattttttctagttgttgtgtcctcaaaagaaagaccatgatgctttcattgattgcttatgacaataaaactaactctctggaaagcttgaaagttttgttagaggcgtttgaaccagagcaactccatcttgaataggagctgggtaaaatgaggctgaaacctactgggctgccttcctagacagttaaggcattctaagtcacaggatgagaa

SEQ ID NO: 145554 - DNA, 333 bp, Homo sapiens
aaacagagtccaaaatcatggtgagcgcaaggagcaggtttgtctctccctcccagagcagctgggaggaggtagtcgtggatgggcatggtggcttggctccatgagttgtccagggatccaggatccttctagcttggtgctccactctgccacggtatcacccttgtctgcactgtccgagatggcttcctaccatcgtgtctaggttccaaacagcatgatgaaggagcggcagaccccctcctaagaaatgacctagaagtttctcctgtcatttctgcttcttattgtccaaaacttggtcacatagccagccctacctgcaaggga

SEQ ID NO: 145555 - DNA, 387 bp, Homo sapiens
tgtgctgggtcgctctgaggatccccacttccagagtcgatgtgacctatttgaaaaagatggtaggaaaaagaagcctattatcggtaaatatcaaattttcccaagcagaaaaagaaaaagctagggaaattttgcagtgctgctgacctaattctatgctctttctctaaagaagcctttctgcttgtttaacaaatatttgagcatctattacacgttgagtatgcaaagatcactaagtcttactcctgaaaagaccaaggctggaagcaaaagcttgtttagaattctcttcaaagccatttgtatagtaaagaaattaaactctcatttatccaaactttcaaagtgtaaataccattaaaactttttgggaagccagtg

SEQ ID NO: 145556 - DNA, 406 bp, Homo sapiens
taagatcgcgcgaggagtatattacttggctaaagcctccataacaaatcaccacagactgggtgacttaaacaatatatgcttatttcccacagtcctggaggctagaaatctgagatcaaggtgtgggcagggctggttcctcctgaggcgtctctcctggggttgtagacactgtcttctccctgtgttctcacagggtcgtccctctgtgtgcgtctgaatcttcatctcctctgcttatgggatgtcttagtccatttcaggctgctagcacagaataccatagacttagtggcttataaacaacagacattgattctcccaagtcttggaggctggaagtcccagatccaggtgagggcagggctggttcctcctgaggcctctctcctgggcttggaga

SEQ ID NO: 145557 - DNA, 561 bp, Homo sapiens
aggccagcgcaaaccagacagcataaagctgagggtcagcaaaacaaaaattaggaacaatttttttttaaagggcaagttagctgaaaaacacacgcacacacaataaaaacaatacatttgggaagattcatcaaatgaaaattcaaaactaagcaaaacatggaaaaatggactctacaaagaagaaaatgcaaacacttctaaacaatgtggtttcacagaggtaatatcgctgtcaggcctatatcagtatctgctcggtctcaccaggacttctaactaagggactgcagacactgctaaaccgctacttgctactcctaaaatatcttcttcacctacgtgcccggacttctatatttaaaactcaggcataagtaaagcagggtaagttattatgaaaccgaaagttactgggactaaggagtcgcaggcatggctatgctagtactggttgcgaccaaatatggacttgcaagagctaagaaatcacattcacaggggcacttaaaatcgaagcatgcacttgttactctaagaaatccctaacccaggact

SEQ ID NO: 145558 - DNA, 445 bp, Homo sapiens
tagagacgggttaacgggcgtcttgtgacccggggacaaggtattactcagggagcagggcatgaacagcgagagaccgtatctcatatgaatatagatgcaaaaatcctccacaaaatactagcaaacctaacccagcaacatattaacagaattatacaccatgaccaagtaggaattattccagaaatgcaagattgtttaacatacaaaaatcaatcagtgtggccgggcacggtggctcaccctgtaatcccagcactttgggaggctgaagcaggtggatcacttgaggtcaggagtttgagaccagcctagacaacatggtgaaatccgtctctactaaaaatacaaaaaatattagctggctgtggtggtgcacacctgtaatcccagctagtcaggaagctgaggcaggagaatcacttgaacctgggaggtagag

SEQ ID NO: 145559 - DNA, 162 bp, Homo sapiens
tggtgggattacaggcgtgagccaccgcgcccggccatgtagtagttacttattgagtacttactcggtgccagtcagtaggtcaggcttggagaatacgactacaatgaagacagacgtgttcctgctctcaagaagtttattttctaagagggagttaag

SEQ ID NO: 145560 - DNA, 168 bp, Homo sapiens
cactctggatgacacagcaagactctgtcacaaaaataaataaataagaaatatattttatgaaacagtattcattttgtgtccattgagattatatcatgcttgatggtagggattcttttatactttattccaataatgcctgtactcccaaaaaagattggcaca

SEQ ID NO: 145561 - DNA, 369 bp, Homo sapiens
tgagggttgggggtatgtctcagcaatgtgggccaggaaccagaagctctgtatgagactcagataactaacggagaggctttctgcaaagggctgggtgtttgagagtgcagaatctctgcattccagaccctgacttcgggctgggcctctgaaacccacaccggggcagaagtctgaaccccaatccacagcagatcaggagaagcctgcgccccccactggctgaagacccttggtcccaacatcctgccttctgatcactgagctccaaatgaactcccaaatactatccttggggtaaggagggcttcatgattgcctgtcccagcttctcagggccctgtctgtcctctgggtccagacagt

SEQ ID NO: 145562 - DNA, 714 bp, Homo sapiens
ttcccagcttttaatttttaaggcacagatggagctgtgaaagaggaagcatctcccagctagaggtgacccacccggggaccccatcaccctagatgctgaggaggtcagtatctcacacaatgtaacctcttgttagaatctcgcttttggggctctgattccagtcgaaggtggaagactgttcagaggcaatggaagcccagagaggtgatgtgtgttgtccagtgtcacacaggagtgtgacaatcatctaggccactcttcatttaaagaaggagggaccaggccaggcacgtgaaagcccgctaagggacccagcagtgaggagggcgagttcttttgaccagatagcctgtccctgggaggcgggttgtgaagccacaaggccctgccctagcacccaccagcctgggtcctggtttcctgttctgatccgagctgggctgattttccgctggttcctaacagacagacacgtgcccccaagacctaaaagcaccaaaggagaagaaactctgctcaacagagtcacatcttcatggtgaagttcagaagtcagcacaataggcaaaaaaataaaaaataaaaaattctgtgaagttcagaagtcagcacatttgggaggctgaggcagatggataacgaggtcaggaatttgagaacagcctgaccaacatggtgaagccttgtctctacactaaaaatacaaaa

SEQ ID NO: 145563 - DNA, 928 bp, Homo sapiens
accagagagttcatacttaataaaagcaagataagggcaattactgtcaaaaggtctttcagaaaaatataaccctttaaagtgaagaagagaatttatattgaagatggacattacaaacataaagagggttgtagtacctttacttgaatcaaattttattgtacacattttgtactagaggaaaactctgaagcagttgctcaagctttgttcaacattagggcacttatattggaaaagtgtcttgcagatataataaatgtggaaaaacactttttcaaaaactacatcagaaaacaccagagtttatactgaagaatatttttgaagatgcactaaaaatgaaaaaatatttaatccaaattagggctatgtaaatatcagaatttataatagaaatatataaggaactgacactgcagatatactaagtcaagagttctgagtatagaaaataatctaaaactaaagttgatagaaaaagtatttgtatataaatttaagaggagtaaaagattttttgcagagtaataactacattctaagtatactttatttcttgaaaaaattacagactttgaaagcaaatgatgtaattcaacactcattttctggtgtttcttcattcttattcacttgtgaaagcatgtgataattgttgcatcaaaggtatgagagattcttttccattaggtgggcatttatgatcttttctatggacaagtaaggacattagaatgtaagatgcatgatgaaaaagtggagaggttctttgtggttaacttatactcttgagtgatatatgaggtaggtgttaagagtattgttcttttgcattatgagaaaactagtagtatattattagtatattattgtactaattgtacttttatataataaaatgcagcacatttttaaaatttta

SEQ ID NO: 145564 - DNA, 357 bp, Homo sapiens
tttcttgaaaacctagtcctgttgatgatttgccgttcttagtttcctaatacccccatggaggaggatgggcagatgttagaattcttcatgaaacatgtggggcaaccccagaagcacagaacagtggagacttacccaaattcttcacagtaaactctgtagcctcctccattaatttttgttactgaaggaagaatcccaatgacagtatatcattttttaaatgttgcttattatacagataatgcaatactggcaataaggaaaaacatttttaaatcaccctgatcctactacccatcaaatcaactattttgagctttttctatgttgcttgcagtgctgatctgtttg

SEQ ID NO: 145565 - DNA, 248 bp, Homo sapiens
gccctgccttcactggcagaattgtgatccatcatgttctctgttcaatgtcatcatccctttcagagcatgggtctcttcctttctaggcagtcttaccaggatgcatgggtgtgcctgcgtaggcacacgcacagctcccaaggactctaaaaaaagatatttttctgcttatatactaataatatgttagagatttatgtttcaaattagtacagaatcacatggttctctccaaattatatttg

SEQ ID NO: 145566 - DNA, 396 bp, Homo sapiens
gactggcttgggacttgagatagcttaaataaggtaaaacatgtaatagcatgtaaaagtacttagtgagtgcttggctataataatgaaaataatcactgacaaccctatagttatagaggccactatttattgggtctaggaaactgaggcacagaaaaacagaatgatatgtataagatgaacgagtcgcagagccagcctggggtggaccatgggtcttctgcctcaaggccttccccgaatcccaagctgcaagtcggcatctcatgagtggccaccagaccacacagcccgaaggccttctccaacggtgcagccagaatgacagtaatgtcactaaagtactaagcgcagccctggtatacatagtcattactcaggtaatggaaactc

SEQ ID NO: 145567 - DNA, 466 bp, Homo sapiens
tccacctcccggactcaagcgatcccacctcagcatcccagaatgctgggattacaggcataagccaacttgcctggccctgtttcaaggttttgagttttcttttctgttagagcacctcaaagacctcgtcacgtgcattttgcacagagcaagttagcaaagttaacaaatacttgctgaatgagcagccctcaagtaaatgccatcagaaatacccactgatgacaactaacgcttatagcagatgctctcatagccatgatctcccttaatcctcccagcagcggaggggagcgctcttctgattggaggggcagggcaaaaagagtggccctctcaggacccctctgctccttccccagacctggccccaaacttccctgcaccactcaccaggactcacctgggcctggcacatgggaccaggttcccaacagtgctggcacccagtgaacatcttgcc

SEQ ID NO: 145568 - DNA, 229 bp, Homo sapiens
ctacaggactatgagaaaataaatatctcttggttaagccatcagtctgtggtactttgttatggcagcctgagcagactaatacagaaggtacacattttaaaagtgtcagagaatgattcaaggagacacaaagaggaaagagaagagcataagagaagtgttttgagcaatttgggaggaaggctctggtaaaatatagagtattgttacaatcctagcaatattg

SEQ ID NO: 145569 - DNA, 347 bp, Homo sapiens
tatgtgtcactagactgtgcccatcctgagatcaggaaccttgtctatatcatccaaatgtccccactgcctaacacagtatctggcacttagaaggtgctcagtagagcttccggactgaatcaagttcccagagcttctcatcaaacactttgcttatgttattttcaattgtcttagtggttttgatgaaatagggcttctgatcactgtcagacatacagaggcactagttctctcagatttctatatttgaatagagaattaagaagtaacagtaaaagcttccagaatttttcagaaaagcatctacaaacagactcaagttgtcaggagggaaagaaaaa

SEQ ID NO: 145570 - DNA, 320 bp, Homo sapiens
cacagaaaaatagtacttgaactgttttagaaggacttgataggatcaaaggagacagtttactttccatgtggctgaggtatgggaaagagagggaggcagacattgtaccgtaaagacagcatgttacaaaatcagaggagcattgtcacttgtccatgtcccttagttgcagaaaacttgcttagaagagcccctgaagtcgtctttgcaatgaaaaggaataattaagcttttaagacaagtataaataatgttctggtataaattctgacctctctaaatctgttcaaacttgtgggacaagtgtttccaactct

SEQ ID NO: 145571 - DNA, 334 bp, Homo sapiens
caaaaagcagagagacatgcttcaacattttatggaagattatccattcttaaaggacaatcatctagtaacttttaaaaacaacttttggattggcttttataaccagtgcctgaatgaagttgactgagtcaaattcaagacaaaagaaaagccaatggcttatttgtacttttgccaagaagtaaccaagggcctctgttcaaacactaggtatattaggttgctatcagtctgtcagtcatcaggggatcaagagagagataagctaggtggtttaagccatggctataggctctcttcaggtaattgtgcagcagtcttcatttcagag

SEQ ID NO: 145572 - DNA, 538 bp, Homo sapiens
ttactgtgctatgtcaccctacctcttgttaaggaggtttgaagttataaggtacaaattttttacatatggctgataggtaagtttttgtccaggaaaatagtattattagcacaaattttgacttaggctataagcttcacctgtgaaccttttcttttcccctcgttttactcttaccccagtatcctattatctcatacctaaggcagtgatggtttctcagacctcttagattgagaagatgtggcatgggtgtaaggtccctcaggtaattctgagggttgggtaggtctggtatctactcttttacttaattgacttcctccaggctttttttttttttttaatggagtccaggctggagtgcagtggcgcgatctcaacctctgcctcctgggcgcaagaaattctcctgcctcagctactcaagaggctgaggcgggaggatccctgaggcccaggagttggaggctgcagtgagctatggtcccaccactgcactctagcctggatgacagagtgagaccctgtctct

SEQ ID NO: 145573 - DNA, 562 bp, Homo sapiens
cgactctatcagtatcccgcacgacatcgagagctttgacgctgagagtcatgcgggtatcttctataatcgatctgatatgctttcaacctgttgtaaggtgcgtcattttactacgttcttaattgaaaaaacccctggtgcagtgggccaagcacgcccccgacaccgagggatggacccctccaactcagctggtttgtgacccaggcatcttggtgttttaaagactccatagattccatggagacaacaaaatcacacaatgacaggaccctgaggggctgctctgaggagcacatggtatcacaagacactcagcttcctgcccggaacgtggcgaaacagctcaatgcattatgggagaagattccaggacaggctggagctgaagctacatcaggacaggggctcgtcggaccttttgcactggacagagcagattgacagcgagaagaaaatcggcagcgggatggagaatctcctgggaggatgaagctgttgcacagcctcctcttcagagcccagtgtcatcagaatgactctggtgggctggttggtc

SEQ ID NO: 145574 - DNA, 251 bp, Homo sapiens
gacgctgctgttgctttcaggtgaaaagaaaattgctttgtgtttacctcatttccacagcagaaacccagttgcatgttagagaactttaaagtagtcaaaattagaactctgtccattctttgtgcactagtttgttgtttcttttcttttttttttttttttttggaaaagggggtttaatttttcaccaggtttgggggcaaggggtttttttttgtttaattgaaccttttccttccaggttaaag

SEQ ID NO: 145575 - DNA, 1091 bp, Homo sapiens
gtggcatattagcctagaaggatgggtaggactggcagaggcagagaggaaggaaaggacattccaggtagcgggggtggcaggagcaaggatggaggcggaggcaagaacatgtaaggtgcgcacacggaatggtgagggggtctccacctgctgacatgcatagagggggcgcttatgttgtctgggagagaacaggaacaagagggttcccttcagctactccctcagtctcagtttccctgtctcatttaatcctcacaaaatctctctggggaatgtactctggttttccccatcttccaccaaagaaatgaaggcacagaagggtagtcacttgcccaagatcacacaagtagtgagtaatgacacaggactggccttggccccaggtctatacaactctaaagtcagatcctaaccaccaaaccagggccaggtgcagtagctcatgcctgtaatcccagcactttgagagacctaggcaggaggatcacttgaggccaggagttcaagactaggttgggcaacatagagagaccctgtctctaccgaaaaaacaaaataaaataaaacccccaaaactaatcaccaagccacgctgtctcactggaagctaacagaaggctcaaagtagagggaactgacaattcttggctccccaaagcccttaccaaaataagtgagtaagagatggcgagtctttaaaggagtggctcatctttcctctccctggggcattttggtgtgggagactacaggggatgaggttaaaaagcttggtcggcaggtagaggatggggagagaggttagggccctgggaaaggtgggagatcagccagagacaggtttcccagaacagaatgtctggcctttgtggtgaggagggactgtggtatgagccgcagaagcgggccaggggtaaaccctcctgtgcgtccttccttcagcctggtcctgagggtgaccctttgatcctgggttctccaggtagggctgtgagctgtgagttggatccttttggtgaaatggtctctctcatctggcctgtcactcaatgtggaatagagtgagtgagttctatgggttc

SEQ ID NO: 145576 - DNA, 196 bp, Homo sapiens
gtttctgtggaatggtttccttcatttttgcattcattcatttattcatctattcatccattccttcagcagccatctgttgtgtacttgtgctgagagatgagggatgtggtggtgcactggaacgacctgacccctgccctccctgggcttccctcctcccatgaggacagggaccatgtctcggagatgcctg

SEQ ID NO: 145577 - DNA, 166 bp, Homo sapiens
gttgggacagtaatgtctgtatttagagccgactgtcattggcatcctcccttgaccttgattcaggtcaagagccaatagcgccactcacgtgaaacactaacggtggtgttgccacagacaaaatagaagtgttaactactagaatgcaaagacagtttttaaa

SEQ ID NO: 145578 - DNA, 383 bp, Homo sapiens
agttctggctccttgcttgacttccttttgctctgtagctcttttcctaaacaaatctgttctcggtgaactcagttttcaaactcaagcatgtttaccacacacttatccattgccccatctcagttattgattacactaccagtcagggccctgatgttgggatcctgagtcgtgcccggtgttctcagatctggatgaattagggtctgactgctttactcattttgattctctgctcatcagcaaaggattaagcagaaagttctttctttccatttttgttaccagacacttttctgagatgttagaatttatcttcccaccttgaaacgtccagcccagggatcagatgggaatctttgccagaaccacaaatatcg

SEQ ID NO: 145579 - DNA, 497 bp, Homo sapiens
gcaattctcatgcctcagcctcccaagtagctgtgattacccgtgtgcatcaccacacctggctaatttttgtgcttttagcagaggtggtgttttgccatgtcagcgaggctgatcttgaactcctgacctcaggtgatccgatccacccgcctcggcctcccaaaatgctgatattactggtgtgagccaccacgcctggccaatttcttaaacttttgattatactaaatatggtccttctgcgtgataacactgtttttccttttataaaattaatctcttaaaatactttaaaattcaaagtacactttttagattctttaaaatactctttgccatgttcatggcctttagatgtgtgatcatagcctatttgcttttcattgacttagtttcatatttctttgcctttttccccctacttttccttatagaactatttactagtaatgaaatcattttaaagaatacactttttattccacctgctaact

SEQ ID NO: 145580 - DNA, 384 bp, Homo sapiens
gggcgcaggcggcgcggggatccccccgccgcgcctttgacccgggaatacccgggccctccccgaccagggcgccccagcctctgggttctgccggccaggctcgtggccccgtcctcggcaccccaggttcctgggactccagctgctccctgaggatccagggcttctgaattttcctattctggtcgccgtggggaccatggcacccggggatgcagctcccaccccgttcgggaagcctgtccgtgtctacacctctgctggccccaggtggtagccctcaccccgtcagcacctaggaatcctgttccccagcgtttgctctgcttagaaccccgctgtgccctgcagacacacagacttagcctcctggcacccagc

SEQ ID NO: 145581 - DNA, 154 bp, Homo sapiens
  misc_feature (11)..(11): n is a, c, g, or t
aggatcacgantgtccgtgttctgtcgggctagtcgggggaggatcacgatgtccgtccttatcataatggccttcctcaagtcaaacttttcccaaatgtcttcacttctccaaacaagaattactcctttctattttgaaaccctgtttgtt

SEQ ID NO: 145582 - DNA, 161 bp, Homo sapiens
gctggtcatttgtaacctttataataaaatatcattgtaactatagtaactacagcgctttcctaagtcttgaatcaattctaacaaatttttgaacctgatgggaacttccatatttatagtcaaattgagcagaagagcaggtagcatggggacctagg

SEQ ID NO: 145583 - DNA, 193 bp, Homo sapiens
taaatatgagttgtgtctaagtggtaagattctgggtgatttttactttatgccatatttttaaaatattttgtaatgaatctgaattacttttgtaatcagaaaaacagagaaacatcttttcaatctcagcaccccagaaccctcctagctgacttgcctagacatggcctataaacactcgggctcagca

SEQ ID NO: 145584 - DNA, 354 bp, Homo sapiens
ctggctggctctagaggatccactaaagccaagcccccgacttcaggtgatgggtgatgctatggttagtggttatgattagggtcaaatgtcacagtcaaattcaggagttataggtcacattcagggccagagtcatgagggtcacaattgctatcagggtatgggcagggactatcatcaagggtgatggttagggtcaaatgttactgtcaagttgggtctcaggagtcacattcagggtcaagagttgtggtccaggtcagggtcaggagtcacaggctctggggactgagggactgaggtccaggtcaggaggttacggccaggtcatagttgtgatctgggtcaagg

SEQ ID NO: 145585 - DNA, 269 bp, Homo sapiens
cttgcgaatttagtgactcagactgtcccatcgacttctatttaattttaaggatgtattacacacacaccgctcaaaaaaaagctcctcaaaataattgcatctacatcaattaacatttttattctataattccataagggcatttcatatatacctctattttcttctgcaacaacacccttagaataaatacaacacgagaaagtatacacacttaagacgcactgcacaattacttccacctaatccaaagacaattttcattt

SEQ ID NO: 145586 - DNA, 316 bp, Homo sapiens
catggtgccactgactgttgatgctcggaaaaatagggtttgtcaaataacagatctttgctctcttcagattggagacatgcagatagtttttctccgacaaatctcacattcttattggttgtaaaactgtctgaagcacctacagagcaaatttctttcttaatcataagactcatgcttggttagattttaccaagaggtagcataatgaggtcattttgttaagggattcatactgaatgtatttatttgcccacattagaaaaccagtatttctctaaggtaagttggctagtgtttgaaaattgtattc

SEQ ID NO: 145587 - DNA, 275 bp, Homo sapiens
tgcgcctggcctgcctcacacttctaatctttctcctttttcatctctctcatctctatagctcatctacttctctacctacttctttttcccttttaaggactcaaaagattagatgggctcatccagaaaattcaggagaactttcccatttcagggtcagctcagcagcaacttgatgtcatctgcaaccttaatacccctttggcaggtaaggtaacaggttccagggatttagatgtgtatgtttttggcgggggttgggggggcattct

SEQ ID NO: 145588 - DNA, 131 bp, Homo sapiens
tcatagcttaagaaaatgcctgacctagagactggtgcaggcttgtactctcagactgtagtctaggagagaaatagactgcatagaagaatgaacaaaataacaatgtttagcatctgcctgagaaaaat

SEQ ID NO: 145589 - DNA, 443 bp, Homo sapiens
ggacccactttcctcatctgtaaaatgacaaccacagcaggcttgctgagataattcagagaacaatgacaagggctcatacagtccagccctgcaccagcacttggtggtggggcctggcctgagcctaaagcttgactctagctctgtgtccactttagtgaacatttaaagttgaggagtctgagtttgctcctccatggagggaggacatgccattcatctttctaaatggttgtgagaatcaaatgagtctatgcatggggagtacctaacatgtagttggtggttaacagaagatggctgtcatcattgtcattgtcaccatcaccataatcatcatatcaccatcacaacaccctcaccaccatcatcattaccatcatgatcatcactgtcacatcatcaccatcattaccatcatcattaccatcaccataaca

SEQ ID NO: 145590 - DNA, 262 bp, Homo sapiens
tcccttctctttggggcaggacaatattcgctgtatcacagctttttaaatgagttgtgttctgttctcccggatggagacaccctgatgaattgtgggaagtgccctgttctcatcaataatatgttaaaaatattctagcatgcccctttcctgcttcccatttacactctgtgtatctggcatttgtacatgctgcaaacattaacaatggtgattgttaccccagtggctcagggttggtctccctctattgcctacg

SEQ ID NO: 145591 - DNA, 734 bp, Homo sapiens
tgctgatgtcattctaataatgagatggagatgtttagcctttaacctgtgaagatggcaattgtgagtggattgggacgtagggttggaacatggttcatatacaactgaaccaagggcagctacaatccatcagtgcaaaggtaatttagggaaaggaaaaagtacctaagattaattgcagtcagacggagactgcttttaaagtactttgaagtacaaagacctcgtgtagtccatgatccaaccaaatgttactcattgaaggccaaggagcaatgtgttgggtagggactgaaaacaagcttggtgctttgaacactgttcctgagagcatcaacggaagctatcgagggggacaggagatgacccatgtgaccaagatgcagtgttgagacccgtgggtagtttgattgaaaagccttttaatctcagtgtgaaggagttgcttataagtgacagaaatataacctctgacagggatgcgctgatgaaaaattgataccagtgtcactttcttggcatgggggggaccaaaccaagacagtcggaggctccatctatgtgagtcagcggccactgaggaggaacaggaatcaggaggctcgtctggttggtgatagaatccaccgactgtgctgcctgaatgaaggggagagatttgtgtgaattatgaatagccatgcaggtgagggaggagtgaggttctgtgagaaagggaggcaggccaggtc

SEQ ID NO: 145592 - DNA, 495 bp, Homo sapiens
ggaccctccgacaccacatcagaaaacgctcacgctgcatttagggtatggccatgcagagagaagtgcaaagacacagcacagtttttgaacagggcaattaaattatgtgtgaccatcaggacacatgtactcagagatacacagggagagaactaaacctttttctacggttccgtctcccctctttccacatctacccagctcctaaccagttgttcatttgtgcatgtgtggcctgcattcactcaccatgtgctgactgagggcctcccatagctcactgttacaaagtacaggcagtcacaaccaagactgtgtgtgacaggaagaagtgtatgaaaggattcgagagagagagagaaagctcagtaaagatatatactggtttgatcatcaccacgggaaaaaagaaatcctattgccaggcaccttaagaaaaaaaaaataatttaaaacactgtaggcagttgggtttaagggaactcaacaaat

SEQ ID NO: 145593 - DNA, 550 bp, Homo sapiens
tgggttaaagcagggtatgtcaattctggaaagcagatgaaggaagtcatccactcatgagagacatgcagggagacaaggggaatgacaggcaagggtagacctctacggctgtaggtcaggttaaagaaagctcttatgggattgcccacaatttctagtctatatgcccacagctgatgggagagaggtattttaggaatccctcaaattgtccacctttaatcctaaagagtctcaggattaaaggtggcatcgataaacaccggtgtttatcgatgccacccaagtgtggagtttggtatcctcttaccgggtaaactgaagggatggttgggccatttcatttatcttatcactaattcacaagatagttagaaattcggcctcaagcaaagtaccacatttggaaggttttcttagatttggatggcaagtagatatcagcattttttaaatgaaaagctatattatcttctcccttcaaggcagcctaaggatgttctttcccagaatcactccaagccttcttggcagaattcataaaagt

SEQ ID NO: 145594 - DNA, 147 bp, Homo sapiens
taataagccattccaaactcagtagcttaaaacaacaattactctcattcacacatctgcagattaggtggaggttggctgatccaggttggtcttcactaagcaatgctccgtttttgtgttaaaactgggtccactttatatatt

SEQ ID NO: 145595 - DNA, 185 bp, Homo sapiens
cacctttccaacctgatctcataccatgttcccactactctcgatgccctagccgctctagacactcaccatgctctccctgtcacaggacccttgcacatgctatccctgcatcatctctgtaactcttacttaaccttcaaattccatcttaagcatcatttcctcagcaaagccttacttac

SEQ ID NO: 145596 - DNA, 222 bp, Homo sapiens
taggcagcgggcatccaacggggcaagggtgtcatcacctggacgggggcttgcagtctgggctaaggtcacacagtccggacaggaactccagagctgggagggaccacagaacccagatagaggacaccgaatcccagtccccgcctgagttctcatctccccagggtccccaaccccttcctgggtccccacctccccagggtccccatcccaacaggg

SEQ ID NO: 145597 - DNA, 447 bp, Homo sapiens
aaagtacaagtaacaaaagaaaaaaatcgatacactggactacatcaaactaaaaactttggtgctgaaaactattccatcaagaaagagaaaagataacccacagaatggaagagaatacttgcaaatcatatgtcccatagagaactggtatccagaacaaacggagaacttctacagctcaacaataaactacccaattaaaatatgggcagctgggtgtggtggttcacacctgtaatctcagcactttgggaggccgaggtgggtggatcaccagaggtccgaagttcaagaccagcctggccaacgtggcaaaaccccatctctactaaaaatacaaaaattagccgggcatggcggtgcgtgcctgtaatcctggctacttggaggctgaggcaggagaatcacttgaactcgggaggtggaggttgcagtgagccgaga

SEQ ID NO: 145598 - DNA, 227 bp, Homo sapiens
cacctaacaggccctttctaggtaaatctgcagaaacagtaattgtctcaatctcagtttccctgtggtagaccaaaataaagctttgcatacctaacctagggaagctgcatacagttggagagctggattcaactaaacctggcctgacagctcttcaacatgtttttcttttccaagttccacattgctcactgtgtccttttaacactcctgttttttatttt

SEQ ID NO: 145599 - DNA, 748 bp, Homo sapiens
caccccaactcagtgtccccaagtggtgctatttgtatcatttgtctattttaaagactattatttagttacataatagaattaggtaattctatacatgtcattcttaattaaattatagtttttaattttatgttgcagcttttaattagatgtatgagatattaattattgattttgtttattcaacatgcatcaagaagcaaactaccatatgtcaggtgaagatgcttgtgttcatggtacataaaataaggagtagcccttacagttagagaactcagtgaagtggatagaaagacagtgaacacacttgttatgagtattagtctgttctcacactgctaataaagacatacctgagactgggtaatttataaaggaaagaggtttactggactcacagttccacatggctgaggaggcctcacaatcatagtggaaggcaaaggagaagcaaaggcatgtctttacatgatggcagaaaaaagggcatgtgcaggggaactctccttcataaaactatcagatcttatgagacttattcactatcataagaacagcatgggaaaaatctgcccctatgattcagttacctaccactgggtccctcctacgaccatgtggggatttttacagttcaaggtgatatttgggtgggaacacagagccaaaccatatcattatgtttgagggctggagaaaaaacaataatgggcatgtagcaccacttaataattgatattat

SEQ ID NO: 145600 - DNA, 181 bp, Homo sapiens
tggatttgctggtgcagtacaactaggcttaataggctcgaattcgagcctcgaattcaagcttctaacgttagaagcttaattcgcggctcgaattcgagataaactcttagcatttggaaagtatttgtttgtcttcttccttttaatgatagataaaactcagataagaacacctaat

SEQ ID NO: 145601 - DNA, 442 bp, Homo sapiens
actagaacgctttccagttgaaagagatcatgaaagcattaggccattatgctgaaaccacacctgatctgattacttcatgcatgccttttcctgactgctaaagaaaaagaattttgtgtcggtctttactttagaatcaccacattcaagttttagagaagacagttacaaaagttgcaaatatttgttttctaatcttggcacaatcctcttgcactacaacaggttgcctctgagcatctatgtgttaggcataatttctaggggctgagagtgtcttttttagaaagttgttttaaaacaagtatagtttgcaaatctttttctctagggcctcagattatggtaaagaagatactaaatatgcaaggtctccagggtgtggaagaagagtgtgtgtatcttggaataaaccatctttgtataaagacagcagccc

SEQ ID NO: 145602 - DNA, 551 bp, Homo sapiens
  misc_feature (528)..(528): n is a, c, g, or t
caaaaggctgagggatgcctggcctgatttcctctactttctaaattagtcaaaagttcaaataaatgtctttcatttcccatgaatttgtatcctaatcttagaaagcatgtatcacaaaatatcacaaatgcctttgtactctagtttttacctgattgtgcctgaggagtccttgtcaagaagggcagattggtgagagtaagtaaaacgaatatagctagtatttggtgaaagcagaactccatattctaatatcaacccaaaccaaacacacaactctaagacactggagtagttacaagaactatacttaaattttaagaactattgatccctacccaaaataaatccgatcaaaccaatgcagcacccaatctgactgaacctccaccaatagcttccaaaacttcttccttagcaagaaatcagtaataatcataatgataaaaattagtacaaggatgatcagaacaaagtccaggagaacctctactaggcagaaactatgtattttcccctgtgganaagtagggatcctgtagagtcac

SEQ ID NO: 145603 - DNA, 330 bp, Homo sapiens
ctattgatccctacccaaaataaatccgatcaaaccaatgcagcacccaatctgactgaacctccaccaatagcttccaaaacttcttccttagcaagaaatcagtaataatcataatgataaaaattagtacaaggatgatcagaacaaagtccaggagaacctctactaggcagaaactatgtattttccattttcttattccagagacaaccccaaaatgaatgtattttagaatgtttgttcactaaaatcatgaattatttataaaaattatttttttcagtaactgccaagacatgttaacgcctatgtgggtgaagagtggcc

SEQ ID NO: 145604 - DNA, 154 bp, Homo sapiens
actagttttagactggaatccaccacttattcccctgatcttttccaaacttacccaatcattgagcatgcttgaccctgggcttctgagacagggcctgtcacccaggctggagtacagtggtatgatgatgcctcactatagccttgacctc

SEQ ID NO: 145605 - DNA, 163 bp, Homo sapiens
atgacttaactctgatttcaacacactgtcgggggagtgctgacttctctgatttcaaaatactgtggggccagttctgacttaagcctctgatttcaacacgctgtgaggccagtgctgacttaacgctctgatttcaacacctgcaggacaagggctgact

SEQ ID NO: 145606 - DNA, 657 bp, Homo sapiens
tagcagactaagtttccttaagaaagtaaaaattgacaataaacttgaaagacaaaaagaattaaccaggataagagggtgaaggaatcctgctatgggtggaacagaatgcataggcaaaagagaacttatggcacatgagaaggacttttaaaagtataactagagagggaaaaacaatgggagtgtggtataacatgaggctcaagaggtagagaagagcctcatgcgtggagtcatgcagtcctgaagacagcatttgaagctactgctatttggtaaagtatatgtctaaaaggactattaggagagacagaatcaagcttttttaggttttcagtaatagtgtgttgagaagacaaagcaattgttctcacaaatatgcttccttaagatcattacagaaatttgtttcctttctttcaaagagtatgttttgagagctaaaaaccatcctatcatatttggacaaatagaagtagttactgcttaaggatcaagtgattgtttcttttaaaagttgtgtatgctatgtttgataatcacagcttctaattctcaaaacaagctctcactctggcatatcttgaatttgaatcgacactatggatacgaatctgtatattcaaatatttttgtgtaagtgtgtttgtaaga

SEQ ID NO: 145607 - DNA, 260 bp, Homo sapiens
agtggaaagatcatagctcaccgcaacatcgaactcctgggctcaagctatcctcccgcatcttcctcccacgtggctgggaccacaggcatgcaccaccacacctggctaatttttaaaatttgtgtagagccaggcatggtgactcacacctgcaatcccagcctcccaaagtgcccagccacagttgttagtgtgtataatcataactgccatttattagacagaactggacaaataaagagacctggaaggtatag

SEQ ID NO: 145608 - DNA, 172 bp, Homo sapiens
atgttttgggtggagatagagggagggtggtttgattcatttcttcacaagagagggaatggagacaaagagagggtagaatcctctgtgacccatgatctgaagtcctgtgtgctgtcctaagagttttcataggtgcctgcctgcagttttaagcgactgtcttctgggg

SEQ ID NO: 145609 - DNA, 673 bp, Homo sapiens
aaaaagagcagattaactcgaaatgcatttaggtcatctggaaattgaattcctgtcagttcttatctttgcataatttatcttctcccctttagttaatgcttatggtattttgaagctgatgacatactttattttccaggagagcattaatacagtgtagttgtttgttagtgttggttaaaagaacttatcaacctttcattcccacctccatcttctagttaatgctccacagaagaggctctcagtaatccattttaaaatattcagcttcagaaacctaacatgtacatttcctatcctcagtagagtataggtgtaaatatgaaactaagtgctatgtaagtgtggttattgcattattaggtatggatttcattcatccagcaaacatttttttgagtatttctgtgccaggtactcagatagggactgtgacacagagatgatatatccttgctgcaaggacccttaacctttgttttaacattgccttgctatgatgggtcttgggtgtgagaggctagagttgggtcaagaggataaactattggccgggtgcagtggctcatgcctgtaatcccagcacgttgggaggctgaggcgggcagaacacgaggtcaggagattgagaccatcttggctaacacagtggaaccccatctctact

SEQ ID NO: 145610 - DNA, 401 bp, Homo sapiens
acaacaatttggtagtcaaaggaagttagcctgggctaacttgggtaaaacatggaggagggaatacatcatgtacagtgagcttggagtaacttggatttctcagaggactgccactcaaccagcttgtcacaggtttacagtattacaagcacggcagatgcagtacaatttctacagtccctaaacttgcctcatgcacatgttagcaagaaaactactgatagaagtacaagcctagctcacatgggtttccctaaagaaggcacacagtattatatattttttttctgcacagaagtctgacagctggtgaatcatttgtaaataaaattgatagtttgtttcactgggttttctgtcattgttgactcatgacctagtaaggatttactggacta

SEQ ID NO: 145611 - DNA, 479 bp, Homo sapiens
tctttgtgtacatgtgaaacagaagattgctttatggacgattgacaggtggtactgaaacgtcctcttcaaacaagtgggatcctaaaatgttaatgaaagaaaggacctcattttatgaagaaactcaggtccagagaggttgtgtcatcccaggattacactgtaaattaataacaaattagtagcaggatgaacttgggcaaacatagacagtcatgatgttaaatgctcaaaccctcaaagaacagttttaatgaggattacattgccttctcttgcagaataggttcgattctgaattctcacaaccctgaaagataggtgatgtgtgtccacattttattgataaggagactagtgttagagagcttttgacacaaacagggatggcagagttatgactcaaacctgggtctcctacagtgctgtactgtttctcctacccatttcttaaaactcacagtgtgtcaagggta

SEQ ID NO: 145612 - DNA, 438 bp, Homo sapiens
acatgcataaatgaatatcccatatctttggcttttttttaagtaataggtactaactgaagactctccatttgttactgggatatgaaaaaaaaatagtaacttgtagaactactagacttctagaactactactgtgatcttgcaaaacagcagagaaaaaaataaagagatagataaaatagtaacatgtctagccaaataaaatactcactaatacagtggagtagcatggaatttggcatgagacctcagtttgaatcctgactctaccatttagcttaaatggttgcttctaggcaagttgctaacctctcttagttgcctcagctatagaatgggtataataaaagcttgttttttcagcctcacgttcatgttgtgaggaccagaaatttaattatatcaaagtattctgaaaattagaactcacatttc

SEQ ID NO: 145613 - DNA, 442 bp, Homo sapiens
ttaggtaaattgtggttttagtgtttgagaaagagcctgtcactagtgggagtcttcattattcactggcaagatataacaagcagggctttgcagtaatgcacagctcctctgctcttggcaatcttgtggccgaaagatatttttaaagcccctgttttcagatgaccgtgtttctgattagcatgtgtcttttccattttcagttccacgaagagaaaggcaagtgaaatttgcccagcctcaccatctccaaatgggtgatattactgaacaattatttaatggccccacagcatctgttttttatattttggggtcatactggaagttcaagcttatgaataatccagatatttaaaagccaatgctcaactggatattctccttaggattattttagccttgtctagaatcagagtgtctgtcaattgccacaaca

SEQ ID NO: 145614 - DNA, 835 bp, Homo sapiens
ctgttctccaacttctggtatcactcttataccaagggcaagcggctgccccgtgcacttcagcaaaatggagctccaggtattgccaaggtcaaggccaactgagaagcatggcctagataggcgcccacctaagtgcctcaggactgcaccttagggcagtgtccgtcagtgccctctccacctacacctgtgaccaaggcttatgtggtcaggactgagcaggggactggccctcccctccccacagctgctctacagggaccacggctttggttcctcacccacttcccccgggcagctccagggatgtggcctcattgctgtctgccactccagagctgggggctaaaagggctgtacagttatttccccctccctgccttaaaacttgggagaggagcactcagggctggccccacaaagggtctcgtggcctttttcctcacacagaagaggtcagcaataatgtcactgtggacccagtctcactcctccaccccacacactgaagcagtagcttctgggccaaaggtcagcgtgggcgggggcctgggaatacagcctgtggaggctgcttactcaacttgtgtctttaattaaaagttgacagaggaaaccacggaagaaaaagaacaaaagggaaaaaacaaaaaaagggggggggcgggaaaaaaaagttcccccccgggggggcccaaagttaacgggtccccaggtttccttgtccaggggggcccaaaagggggggcggaattaaaaacgaaaggcaggggcgggggtttaaaaccggccgggcggggaaactggccgctgggacccttggggagggact

SEQ ID NO: 145615 - DNA, 127 bp, Homo sapiens
ccagcaaggtatgagagagccatttctccatatcctcatcacagagtataatttcacagttttacattttccccactgataggtcagaaatggtgtcctagtgttgttacaactagcatgtttataa

SEQ ID NO: 145616 - DNA, 226 bp, Homo sapiens
taagtaattgcctgactgtgaatgaacagaggtattaaagtaaagttggcacaagggacagcatccacatggcacgttctttgtttcgagagctttattctatcaatactcctggaaaaaagagaagttgctaaataaataatggaagcacacaagacagtgtgaacgccttttcaagtcctcgaattgtcaagcatcttatataaagttctttcccgactctgag

SEQ ID NO: 145617 - DNA, 771 bp, Homo sapiens
aaataattggacaaaacacacaaataaagcaaggcagcgaaagcagagatttattttaaatgaaagtacactactccactgcgtggaagcaggctgtggcaagctgctcaaaagcacaggttgcagaattttctggggtttaaataccttctagaggtttcccattggtcttccacaagtctgattggttgaggaaggggaccaatctgaggcactttcatttttcaactgccacacagaaaaagaagggcttgcaactgccaggcagcaactgccatgcagaaaaaggaggggttgaaggggagtagtctttcaactgatatcccatcagcacaaatcagtcctagcttccctgcttccagaccctattctcctgccgcacaaatacttgtatttaatcgacagatatatcaatttttggaaataatttaaattgtaaacaagagtgtgtccagaagattcctgaatctaggggcaaggtattttcacatggctttttttgtgtgtgaatctatgcaatgaaggtcacctttgaatatatactgtggaggcagcacattcatgcatcacttaaggacggggatactttctgagaaatatttcaatgggggttttgttgtttgttttttgtcatgtgaatatcatagagcacacttacacaagcctgcatggtatagcttactacccacctaagctgtatggtatagcccattgctcctaggccacaaacctgtacagcatgttactctactgaatactgtaggcaattgt

SEQ ID NO: 145618 - DNA, 167 bp, Homo sapiens
gctttcctctgtctctgagtcagcaagtagttagttactgaaatcacatccgctaacaagtccaggcaactgctgactgcattgttcctgttgccttgttttgtatggctggccaaaacacaaacagcagggtgtataaattgattatataaagacatgggaaatga

SEQ ID NO: 145619 - DNA, 802 bp, Homo sapiens
caccactcccagctaatttttgtattctttgtagagatgaggtttctccatgttgccccggctggtctcaaactcctgtgctcaagcagtcctcccacctccacctcccaaagtgctgggattatagatgtgagccactgcatgcagcttgaatgtctttgaacatgtcttttgttgcatatatgtatgcatttctgctgggtatgtacctaggagtggaaagcagaatcatagtgtatacatatgtttagatttggaagatactgctagttttcctgtgggtcaggcatttaagagcagtttagctgggtgattctggcctagagtctctcatgtggttgtactcaggatgtcagggaccacagtcatcttcaggctttactgggattggaagactcacagtgctgttggcaggaagcctcagctcctcaccacggagctgcctcctgacatagcagctattacagcttcccccaggtgagtggtccaagaatgttgcagtccttttaattttagtcattctagcagatgtgtggtgatatatttttgtgatttcagttcacatttccttgatgacaaatgagattgagtaggttttcatttattggtttgttgttttggttttcttaaaaatatttataacctattttaaatttttattagctctttattttttgaatattcatttttcctgacatcctgttttcattttgtggatgcgatattttttatccctctcatattgaggatagtttcttcactacctgcctcttctacccaccccccaggttttatttctcta

SEQ ID NO: 145620 - DNA, 745 bp, Homo sapiens
gtcatttttctcttctcatttatacttcattgctttacatagtatttacgtactttcagtaataagcacaactggcataaataggtttgtgaataaacacactgtcaccattgataagcacacttcacagagggggaaccagaagtgttgttcccatcacattggagaatagcctaatggtgtgatgtcagttaaattggataagagagttctgtgggatagtttgctaagagtataaggcaacagttcacagaagaaagtaatggattaaaattgaaaaggaatccaggaccatatttgtcaaataccttgaaggtcaaggtgacaagtttgtacttagattggtaggaagtggaattttttattctaaatggcatgattgatgtaaaaaagttcaaatggcttaggagtgtatgaagtaaaaagttacatttccctagctccattccatgtcagtagccacttcattttctaatggcccctagaacatgaggttgttgtgaaggcatggtaaacaccacttggggcactggtattaatctgttaaaattttcaattcagctttcctttggattataatctcaattttgaattgagaaaaataaagtttccatactaaatgtgaataaaatgaaatgactgttttgaaagtagataccatactcataagagtctttgattcctaagtctttctctacctcttttgtccaacttggaagtcttggtagagaaggacttaggaatc

SEQ ID NO: 145621 - DNA, 636 bp, Homo sapiens
agggtcacagagatcaggtgtgctcattcagttccagtgaaaggaattagccttaccagaaaagagaacacgctgtaagccactgtaattcagtcagcatggcacttgttcaaatctagacaaatagaccattgaaacagaatagtaaatccaatttacagtatttgggaatataatttatgtaaagatgacattatagatcagtggggaaaggatatataattcattaaatggccctaatatgactggccattggaataccaagaaaaaaaaaggatgagggatataaagtcaattcatcaatttgtctaggagacttacatgtaaatctaaggacagagaaaaacctctgagtttctaagacaagaaagctaaagaagagatagacatattaaagtatactggatttttaaatttttgttgtaagtataccataaacaaagtcaggaaacataattttgatttggaaacaatattagctaatgtttattgtatacaaaagccttctttaaattgacaagaaattggtaaataccccagtgccaaaatggtgaaaagatatggataggtaattcatagaagagcacgtccaaatggccaacaaacacatcaaacaatgtttgaatacatccattg

SEQ ID NO: 145622 - DNA, 202 bp, Homo sapiens
ctgtgcaaaggccaccttgtgtggagcactggatacagatcgagggtcatcctcgttgtctttcctgtgtcttatttcataaatttacctctgccgtgactgacatttgcaatttcctttccgcccaatgccacagccctaaatcagacttttattacctttcacttacacacggtccctgattttccatgtgttattccct

SEQ ID NO: 145623 - DNA, 291 bp, Homo sapiens
agggaagtgcaaccttagggaggagaacgtgaaaagtttggctgatagcatggaggactgtgacgtttatattaaagttatttgtgtattaacatgatgtgagttttcttacagataagcagaatttataaaagtcctattggattattcttctgtcagtaaaagaggtttttttaggggttgggggactagtcaagtgaaacagtgggagtgggagggaacaaaaaaatctatacttgtgatcagttagctgtaaattactgctgtacttgaccagtgatttattatagt

SEQ ID NO: 145624 - DNA, 159 bp, Homo sapiens
agctccaactgggaacttgcgttacatgcaagattgattggatagggaacactccctgacaaagagctacataattagaaatggatcaagttacagggaggataaggggaaggcttcacattcataatagagctcaagacattacaaattcatgctgac

SEQ ID NO: 145625 - DNA, 420 bp, Homo sapiens
gagacagagtcttgctctgttgcccaggctggagtgcagtggcatgatcttggctcactgcaacctccacctcccaggttcaagcaattctcctgcctcagcctcccaaagtgctgggattacaggcatgagccaccgcgcccagctgaggccctgagttttttaaagggggattctgagagcactggttggagggactcaaggagaagacctaaagtaagaagactagtcgggagacaatggtaaagactgaggttagggatcttgagggctgggcagtgccagaagacctagggtggggtcaagtattagaaacgaggggcagcatggataggacctataacgaattgaatatggaaacaaagaagaaggtgaaagaatggctctgctttcatctgggataccagatggagtaaagag

SEQ ID NO: 145626 - DNA, 404 bp, Homo sapiens
gtaactgtacatcacagaaaacagaaacagttttggtggtataatggtacatcagaaaatgatggctgaaggtggttatttggccctgatgggcaggtttcacagttttaaaaggaaaacatcaatatgctggaaaaagaaagttattgaggtcatcaggaaagtaaattatcctaaaacacaatctaatttatttttaaagtcaattttgggccgagcacggtggctcacacctgtaattccagcactttgggaggccgaggggggcagatcacttgaggtcgggagttcgagaccagccaacatggtgaaaccccatctctactaaaaattcaaaaattagccaggtgtggtggcgcatgcctgtaatcccaactactcgggaggctgaggcaggagaatca

SEQ ID NO: 145627 - DNA, 367 bp, Homo sapiens
aggaccaaggaccttacttcactactcaatcacacttgccatccaaaaaaggatagcatatttggatagagttcatctttactggttgaacaatcactgctcttccaccagttcgcactgtcttttaaaaaaattatacaagcaagtaagaatgacagtattatgtacatacattttacatttttcacccactctaaaaactttgcaatagctttctatttcctctcttggcaaatgaaagttctgataatagatttattgttgagtctctaacaatatacctctaactcttattccaaccaggctgtacttagcatcccaatgaactgatcttcccaattctctctctcagtcacataaaggctgg

SEQ ID NO: 145628 - DNA, 469 bp, Homo sapiens
agcctgtaggggcaagggcttcctgggctcctgagagtgcagggatgcccaggtccagagcagctgcagctgtgcctgggagcatggggctcccaccctgccaacttggtagggggtggggctcccaccagcctcgcaaagcacgcaacccagaccctgcctccctgttgcagccggcatcttcacagtggctcctccagatgggccaccactgctatcaccactttaggaggcgagtcatgaggatcacttgagcccaggagttcaagaccagcctgggcaacatggcaaaagcctgtttctacaaaacaaatgcaaattgtagctggttgcactgttgcatgcttgtggtcccaactacttgagagactgaggcgggaagattgctgagtccaagaggtcagggctgcagtgaaccatgattgcactactgcactccagcctgggtaacagatcgagaccctgtctg

SEQ ID NO: 145629 - DNA, 500 bp, Homo sapiens
cacccatattgttgctgcctaccaggagaggaacggtgggtcacaggtagagcccattcagccgctgctcaggactttcaaggttagtgggggcaacagagacaagcagaactggaacccttgtgatgaaaatgtcaaaacccgtgaatgctcaacgatgggagcaaatgtgctgcccaggatttgtctttttcgtcctgatcttcagacccgggaccacccgcacccctccagcatcccgtggtccagcaggctagtgatggttaaatgccatcattatcccaccactggcttggtgggtttctcttttaaaaaatataagcctaattgagttgttccccatagcacacctataacagatgccaaagacaaattgctgttcatgcttttcagagaaaaacagagaacgtgggtgactctccccacattagcagtccagcaggagaacaggagtgcccctgtttcctgccagaaggcacagtgtgctcattccttacaga

SEQ ID NO: 145630 - DNA, 451 bp, Homo sapiens
cacagcaatgggaaaatgctgccaagtattcaacataattgaagctaattgcaaatagcagccttcagttgaaatgcactatccaaagaaaggcagcttggttgagtagggtgtagaatgggttgttattacataaaataattattaggcaaagtacaagaaggccagcaggatagttttacatcacacaagggcaatgatcatactttgatgcaatgatcatactttgatggggttatatggatagtctttctttggttagtagaaaactaagctggtgaaaagggactctagattagtaatgaccacatataaactagtagccacctgagatgcaatctaagagcagcttccagctctctgttgttcaatattaaattaaattattcttcagaaaaggtcagcctaatattctctactgaaaggaagacacataattcaaagttatgga

SEQ ID NO: 145631 - DNA, 668 bp, Homo sapiens
agtcatagcaggccccagccatttccaagcacactcccgcaatcttcctagtcagacagcgggaactcacacacaaagacaagaggactgcaggaaaaaagttgatgaccagatgccaattccctacaagaattgtagtccactgcgggtatacgagaccttaaagtactactatcaaggactgagttctaaagttagactttaaaccatgttaagtggtaaaagaataattagcacccttaataggggacctgaattttggtgcttaatggaaagggagcgtggtgctaagaaataaagagaatggtctcgtatttagtacaattatcataattttagaaacagccttgggcagaaacaggcaaaacaataagctggaggttttgtggcaaatattctccaaacatattgcaaccaactcaaaaccatcaagtctcaagaaaatcaggcaatgtgaagcataaaactgcattagttcctttactgccaccactaaagagggagggacttagagaagtgaagtgtgctcctggtcttcgcagataattgaaagcccccgaaaagcaccccttttttgagctatgttgcataactggggataaccgtatatcgatgaatctccatatgagaagagaaatcaatggcagttcgccatcttggagaattta

SEQ ID NO: 145632 - DNA, 617 bp, Homo sapiens
atatactttttaatctctagtgcctaccacagtgtctggctaacagaagatactaaaaaactgctgaattgggctactgacttagaaacagccatacaaatacatgtgacatggattcatccaagtataattcagttagatctagccccaaaggccaactccattgtccatcattctcccattattgatacttttctgagtttttaaaggttttgatttccttggcatcctctaataaaatgcaaataccccaagccagtattaaatcctagagttgaaagattctatagctatcggttgatgccttagtttgaaagcaaggattttcagaagttgacaaaagagggctgggcatggtggctcacacctataattccaacactttgggaggccaaggcaggaggatcacttgaagccaggagttgagagaccaccgtgggcaacatagcgagaccttgtctttacaaaaaaaaatattttttaaatcagccgcgtgtggtggcagatgcctacagtcctagctacttcaaaggctgaggcaggagaattgcttgagctcgggacttcgaggttgcagtgaattatgatcactgcactcaccttgggtaatagaaaga

SEQ ID NO: 145633 - DNA, 564 bp, Homo sapiens
ggtgcgcgcctgtagtcccagctactccggaggctgaggcaggagaatcccttgaaccaaggaggtggaggttgcagtgagctgagatcgcgccactgcactccagcttggcgacagagcgagactcagtctaaaacaaaaacaaagacaaaaaaaccagaaattattgtcagtttgaaatgaatagccaaatagtttctcatgatttgacttctattttaagtggttaaatctcttgataactttgctttttgccttcccaatattgagtcctaatgtaaaataaaataagataaaattccccaggttttgcctggaacgtcatttttgagaatggcattcatttgggatagctttgatgtctaaacactctttgaatttcccagagggtccctgaaagcacttgttgtcttgttgtctattctttgaaaatgaggttaataagggccgggcgcagtgactcacgcctgtaatcccagcactttgggaggccgaggtgggcggatcacaaggtcaggagttcgaggccagcctggcaaatatggtgaaatccggtctccacta

SEQ ID NO: 145634 - DNA, 915 bp, Homo sapiens
atgcttgtcacatttcatgtgaacagaatcaactaaaaagttctgccacaaatgtcataggaagaatgacaaaaaagaggttcagtgatccgcgtgcctataatcccgaggcatctacgtcactgagataagaaagggcagccggcatatcttccctcccacccctcatgtatctcttcccatcttgatttaaaacaaagccagtgttagaggagactggagttttcagattgttggctttctttttgctgccatttctattcctcaccaagaaagaataataaagctaatactgaaacttccaatttacaagcttccaggtttgaaaatacatagatatgaacgaagttacctttcagagatgagtcaaccactggccctgcaagatcacaagacagtagcttatcactttcaatttataagtggaatggagaacagcctttccaaacataacctgtgagaggagtttctgtaatcagaaaactgacttgttggcttgtatccgagaagcctttcctatcaccttagtatgatagttctctggagagctgtgaggaaatctttcttttaaagtggcggtcatctttgaaaccaagcatgcataaggaagtagagcacagtacaggaaaagaaaggccctctgctctgatcacacaccaccacaacatcctgacagatgacctggccatgcacagctgcctctccaggaaaatcttccactctcatcagggaacactggactggataactcaggtattcctaggtgaagtaagtcagacaatatggaaatgaagaaataaaaagagggctttcagggcacacagctcagtttgccaaattcaacatggctacaactgatccccaaatcctgagtaaacacccttgctatttaataagcacaagcaaaaaaaaaaa

SEQ ID NO: 145635 - DNA, 283 bp, Homo sapiens
catacaagcaaatgagatacgattctgttttttcatgtatgccccagagccaactagagactaaaatatattaagtgctcaataaaatgacctcactgaatgaacaaaccctgaattatttgaaccaatgaagatagaataatggtttccccaaggatatccacttcttaatccctaaaacctgtaaatatgatatgttacatgaccagggaaaattcaggatgcagagggaattaaggttgctaatcagctgacattaaactagggagattatccaggagtg

SEQ ID NO: 145636 - DNA, 363 bp, Homo sapiens
aagatatgtgttcttttagcaaggttggttatgtaggttcccctggtgctgtctctattaagagtctagagtggtttctcttgttaagaatagtccttccctttctggtaaagcaggggaaggcggagtttttcttatgtctgcttcttctcgattgccttcagctcaaaataatccttatggcagagtgacatatttttgggtggcataccgtgaactctttcaaaggtaaattttaagatgtaagaaaaaaatagtttaaaagttgaagttgattgcttgagaaaaatatttttattttttgatagaaatctcatttgaaaaatggatgtacaaaagatagttgcaattatttatggaact

SEQ ID NO: 145637 - DNA, 394 bp, Homo sapiens
ggctatcatcatttcttatcttggccacaatagccttcttactttttatttaccagtctcgatatccttttcactgtagtaacagtgacctttctcaattaaaaatctagagtcattcagaagttaaaacccttcagtggttcctccgtacctgaggatagtctctaaattcctgacatggtaatgacctatctatctgttcagagtaattgcccacccaagtccactgatgctccatcaatatctgatttcccacaaatcctgaatatacaatgttggatcagagatttatgaagttaaccaactattgtctctgactgaaatccccttctttgctttgtcacacttcaaacacctgacctatccaccagaattagttcttcaattcattgat

SEQ ID NO: 145638 - DNA, 406 bp, Homo sapiens
tagttgcttctcctcctcctagctttttctagcttctatggacaagaagaacggaggtttcaggctccagttgctacgtgagacctaaaccgtctgtccttgcccctcagtcccacccaagctcaactccactcattgtggctaaaaatacaaagactgcagcaggctaggccttggtgggcacaaagaggagacagatggtcactgttccttctaggacaggagctttagactcgggcctctgccgggaccaggcagttcacatatataagtggaatgggccaatctgtgggctagacctgacctacgggctgccagttggcaccatttagagacccctagagtttgggaagataaagtttggacacaaacagaagggcaacaaagaatatactcagcctcatga

SEQ ID NO: 145639 - DNA, 421 bp, Homo sapiens
tcctctagatcaaggagtcagcaaacagtttctgtaaagggccaggtagtaaatagtttaggttttgtgagccgtgtttctgtcacaactactcagctctaccatcgtaatgtgaaagtagctatagataataccaacacacactagtgtggttgtagtccagtaaaactgtataaaagcaggtggttggtcacatttggtccaggggccatagtttgttaactcctgccctaggtaaaatagaagattatttctttaatctttaaagtgtgtgtgtgcacttgtgtattagattacaaagtgcctcatgttcaatggtaatatgcaagaagtatcacagttttatttaacgttgctcttaaagagctagtcagtgtaattagataagagagtgaagggagatatgacatcagaaagagag

SEQ ID NO: 145640 - DNA, 473 bp, Homo sapiens
taatattttctaagaagccatgtgaggcagtggttgagactgtggacactctgaagccagactgcccaggcttaactccaccttcaagctgtgtcactcacataacctctctgggcccatgtcctcatctgtaaagtgggaagagtaaccacaccgacttcaggaggttgtagtgagagttgaggtctgtgtggcctggccgttctgagcacaggtcttgcagtcagggacacaggccccatggcttcctcactgtgggctctcggctgagggatctaacctctctaagatcaagcccttcatctatgtgagaatctagtgagatattccagaaaagcatttagtaccaagcctggcacatagtaaacatctggaaatgcgaaacagtgaccaaagtcccatccctttcacggccattgggctagtccctgcctgccaccctggccacctctcatttcacatgccctcaatca

SEQ ID NO: 145641 - DNA, 323 bp, Homo sapiens
gacaagtagggtgatattttccttggtctcgtgccgaccctagtaacaaaagtctctcagttacccagggcacctgggagagagtgagggaacagttctgttcagtgttaagcaagctcctctcctgtgaataaccttttctttaaaaaaaaaaaaaaaaaaaaaaaaactaaatggggaaatgaggaacaaaaaaattcaaaaaaattcaaaggttggttggtggacagaggaaattgattgatatcttgccccagaggccaatcttttagtggctcaggccattttggcttagagctgtgtggtgggaacccttctataga

SEQ ID NO: 145642 - DNA, 429 bp, Homo sapiens
ctccaagctcctgagaaacattatatattcactttggagttttaattgctataaattatcatgcatggggaaaaaaattggagagacgtgggatctaccaccacatcactggagacggccctaaaatccatcagattgtttccggtataaaatcatgttttccaacctcacatgggccttctgtgcaactctgcaattcccccatgcacctcttactgactcagtgtattactcaaagaaccattacctgcctctttatgtaatcccatgtccaattccatcatggttactctctgcaaaaactctacttcttaattacctgggacaaatgaggcgacctgatatgacctccttgaagtcttttcttctctgtccaaaatttctcagcactcatcccttatgcctttgtttctgtcttcatggctgtac

SEQ ID NO: 145643 - DNA, 380 bp, Homo sapiens
aaggaatggagttggggtaagctccatctttgatgttttttaacctcgctcctcattcagaatctctacatggggtggctgtagtaaccacctaccatcatcgtccatctggcttagccactagcagaaaagaacatctctctcaggacctccagcaaatattctggggttgaccttaacctacataggtttccacgaccctccctgaaccaatcactttctctggctctgtgcatccagaatgatttgccaaagcaaaatcaaagtggcattaccaaaaaagggaggaatgcatgcagagccagcagagtccatagctgtccactacattctctatagggttgcaaccaagtgctttgaactcaggcaaactgaggttc

SEQ ID NO: 145644 - DNA, 718 bp, Homo sapiens
atgaagccatggtccttgagggagttggaccccctggaagtttcaccacatgagtggtgacgcaggaggattctgtcatcatcagtgacaaagtcatgactgttgactgaagcagggtgaattacatggtgtgcgttgctatatgtgcaaagacatatcttttgtttcctgaatataattttggcctagattgctttaaatggaacttggaaaaatcctgcagaagaatcgagtcttgtttatttctccaaaaatgacttcagttcctttctttgctctccctcatttcatccttcccgtctctgcctttcagtgatgctcagaggtcagggaattgccctaacaatctgtatatttctgagtggtggtcattaattttccttggcttggctgaggaaacattcctctcacctcttttgagcatcgagcaccaccttggtgtgaatgagttttgacaacggaaccttgttcttcagccagggttgaagaagttggtgaaattccacttcctattaattttcttgtacaatttggacacctaggaaaacatctgaagaaagttttcattttgtgagctcataataaatgccataacatggtgtgccatgctgttggcttcgggtgtgacttttgtacagaaggtgtgcaaagaatgattactataaagattaattaggaacatgtaatgattctgtcttttaaacttttgaaatatgga

SEQ ID NO: 145645 - DNA, 534 bp, Homo sapiens
agctgggcatggtggcacacacccacaactgtgggaggcgaggcgggtggactgcttgagccaggagttcaagaccagcctaggcaacatggcgaaacctcatctctacaaaaagtacaaaaatgagccgggcgtggtggcgtgtgcctgtggtctccactactcaagaggctgaggtgggagggacacttgagcctgggtggtcaaggctgcagtgagctatgaccttgctgagtgaaagaagcaaagacccaaagagctatgtaactgcatgattccatttgtgagacattcttgaaaggcaaaattataggaatgaacagatcagcgtggccaggggatgccaagaggggaagggggagggatgacctccaaggggccaatgcatggatggaatcgtttgggggatggaacagtctttaccttgatggtggcggtgaaaacacattctgtgcatttgtcaacatctactacttaccaaaaacactgtattttgctgtatgtatgttaaaaataaatttagggaaagattca

SEQ ID NO: 145646 - DNA, 411 bp, Homo sapiens
ggaccctgtctcaaaaaaaaaaacgtactgtggtagccaactgaaaagatttgtcacagaaagatggttgaaatctggaaatggtttacttttggggcaataaggattgtcagtgccatattttggatgtcccctccaaaatgcatgttgaaatttaattgccattgtgatgttattgagaggtggaacctttgggaggtgattgggccatgggggctgtgccctcaggaatggattaatgttactatctgaggagtgggtttgttataaaatggagttcagccaaatttttcttttgctctcctcagcgcaccctctttgtcctctcaccttccaccatgggatcacacagcatcaaagacccttgccatatacaggtgccatgcttttggatttcccagctcctaatca

SEQ ID NO: 145647 - DNA, 695 bp, Homo sapiens
ttaagctgaaggctgcataccaagaaaggaggagacattcaagaggcattcatagaagagttggattgggggcacgttttcaaagaaaaaaagttatgaaatggcagaaaggaagcaaatagcattctcagatgggatatacatatagacatagtggtactaaactgtgcactagggataaggaatcaatttccctagagaaacctatgttggagacagaagttgggcagagaacattaaaacatactcagaacataaaaaggtgcaagtctttaaaagggaagccaagttacagaggaaataaaaagcatttgacctttttcagaatgttttttaagggtggactgaggcatcatcataaccaacaggggaggcagacaagctgaggcagtctgggcttagagtaataagcacctggacagctttgtattttgtgcataccatggagactgtaaactcctccaggacatggactgagcaatgttctgtgtcttcaactaagtccactactgttacttgaatacatgaacgcttcttgtgctacttctggtggaaaagagtgcactgtgttattcaagttaatagcggtgtggaaatgttacctgtgtttcatgcctaactatactgattctcccaaatgtccacacagttatcctgccttcctccctaggccaatgtcaaaaatccattgtttc

SEQ ID NO: 145648 - DNA, 348 bp, Homo sapiens
gaatttaaaccctggcctggagcaaaattaaaagttatcatgaaagattttcctaagcctcaggggtggttgagcagaaattagttaacaattcaggattttattaggtacttattgttctggattaaacatctgtaccaaatgattcagttaattgttagtccatccaatagagaaaaaaaattataagcagcagggtaagaaaaaaattaaataactcagttgtgcaaaatgaaaaacaaacgccttaagtggacaagaaaaaccttgaaaatccagtacaaaaagcaatttcaaaaaaatctttcttttaaaagtatgttagacaaagattaaaaattgtaaact

SEQ ID NO: 145649 - DNA, 625 bp, Homo sapiens
gaataggaccgcggttctattttgttgtttttcggaatgggccggaatgcccatctgtgctgtgccatctccagcacagtcctcttcacaccattatcagcagaatggcttccccatgcaaaacagtgtcttatttctgtcaagaaagatccttcctcacaccctcacctcatcataaggggaacccaggctcaacccacctccccagctccatccactgccaggtgcatctctttgaatggatgtacctccatcatcctgtttgctgataggcccaaacttttgtggattatgactcctgatcctggaagctgagaacttgtgcaatggatcatctctgaaatgaggcttttggctcgctggggtgcaggcttagcctccctgcaggtcctcagcagcaccagcaggattaatgatgagcagtgtggcagagaggtaagcttggagacattatgtgaaaaggttctgtctttcctggacagttgcagcgaccctaggatttctcagttctagtctttcttcccacacacctctagtaatccttccaaaagaaatgcaacttacaactcatttgctaagaaacctccagagttcccagctgctcaacggtaacggctgattatat

SEQ ID NO: 145650 - DNA, 278 bp, Homo sapiens
tcctgcagacagacggaagagcagggactgaaatccctgcaagcacaggctctcaaatcagtccattcagatgggccggaatgcccatctgtgctgtgccatctccagcacagtcctcttcacaccattatcagcagaatggcttccccatgcaaaacagtgtcttatttctgtcaagaaagatccttcctcacaccctcacctcatcataaggggaacccaggctcaacccacctccccagctccatccactgccaggtgcatctctttgaatggat

SEQ ID NO: 145651 - DNA, 1121 bp, Homo sapiens
gaataggaccgcggttctattttgttgtttttcggaatgggccggaatgcccatctgtgctgtgccatctccagcacagtcctcttcacaccattatcagcagaatggcttccccatgcaaaacagtgtcttatttctgtcaagaaagatccttcctcacaccctcacctcatcataaggggaacccaggctcaacccacctccccagctccatccactgccaggtgcatctctttgaatggatgtacctccatcatcctgtttgctgataggcccaaacttttgtggattatgactcctgatcctggaagctgagaacttgtgcaatggatcatctctgaaatgaggcttttggctcgctggggtgcaggcttagcctccctgcaggtcctcagcagcaccagcaggattaatgatgagcagtgtggcagagaggtaagcttggagacattatgtgaaaaggttctgtctttcctggacagttgcagcgaccctaggatttctcagttctagtctttcttcccacacacctctagtaatccttccaaaagaaatgcaacttacaactcatttgctaagaaacctccagagttcccagcccttttaaaacatgaccgtcaattcttctggtctaggccgtcacacctttcgaagaattagattccagtagaccttagtaagcatgcagtttagtggtttttcagactttggatttttctggactagaaaaagttccaattgcacttcttagcaggacctgtgaggccagcgccttggggactgttttctgccagctgcaccagcccccacctgccctggctctccttgtgctcagccataccccttgtcattccttgctccatacagagcacaaagcccactccgtgatggcccaagtgctgagtcgctacccacatgcccttcctcgcctcatccactcactaaccctactcatctgtccaagcacaagtccaccgcggcctcctctctctcggtttccataaactcctttccattttcttgcctggaataaatggtatttcatttctctctcttcttatggtagttggtaagtaattctatcacttgatagatacctacctatctatcgtacaactcac

SEQ ID NO: 145652 - DNA, 324 bp, Homo sapiens
ctcggcctcccaaagtgctgggattacaggcatgagccaccacggccggccttgtaatcgatttatattgataaaagaattagtcacacatcccgaaggcaccccaaactcagtatgaccaaattgaaagcattaccattctcttcaaatcaacacatccttcagtatactatactccatctttctgttactgtcaggcacccagtcactcaagtggaaaacctaaagttaacctagacctctcttcaacctccatgttgaaacggtcattcaattcggtcaattctagatctctgatctttctctaggtccagcatttctcta

SEQ ID NO: 145653 - DNA, 300 bp, Homo sapiens
gagatattgtgattccagttgcaaaaatacatcacatgagaaggaacttaataaggaacttttgcattcacccatcttctcccaagcaacgcatttttgttcttttacatccttttttcttaggatattcaggtggtttttaaaaataagctccactaaggagtttatttgaaaagggagaagatattttttggacccaacataatgctaatgttgcctttctttggtgagaagaatgccatcttgtcattcacacagtgtggcccacaggactgccttcttaccaggatcaaagacaaa

SEQ ID NO: 145654 - DNA, 810 bp, Homo sapiens
cactggtgttagaggggtccaggcagattggttctttttttattcagacaagatctcactctgactcaagctggggtatagtggtgcaatcatggctcactgcagcctcaacctcccaggctcaaatagtcctctcacctcagcctcctgaatagccatcactacaggcgtgagccatcacacccagctaattaaaaattatttttgtacagatggggtcttgccatgttgcctatgctggtcttgaactcccgggctcaagtgctcctctcacctctatcagggaacctgccccgatattcacgtaggttcttttctattttccttaagtatcagccagcttgagaaataaagggacaaagtacaaaagagagaaattttaaagctgggcatccgggggagacatcacatgtcggtaggttccatgatgccccacaagccacaaaacccagcaagtttttattagggagtttcaaaaggggagggagtgtgcgaacaggtgtgggtcacagacatcaagtactttacaaggtaatagaatatcacaaggcaagtggaggcagggcaagatcacaggaccacaggaccgaggtgaaattaaaattgctaatgaagtttcaggcaccactgtcattgataacatcttatcaggagacagggttttgagatcagctggtctgaccagaaattattaggtgggaatttcctcttccttataagcctgggagcactatgggagactggagtctatttcacctctgcagtctcaaccataagagatgaccacgcccggggggccaggtcagagac

SEQ ID NO: 145655 - DNA, 181 bp, Homo sapiens
ggttgagtgcccagggctggtggggggaggtggggactgtcctgctgccaactcccctcttgagggccagaacacctagagtggccaagcacctgccctggctcctgagcccacagaggctggcctgtgtcctctctggggcaacaggctggcagagtgagtggaaggagcgaggaggtct

SEQ ID NO: 145656 - DNA, 426 bp, Homo sapiens
gaaagaataataagaaagctacttaatttgcaacaagcaagcgcaattatataaactcttctttcttacctatggactgtattgaaattttggtttcatttaaaatatctgtattagttcaggctgctccaaccaaatgctgacctctgggctataatcttatcaagaacagaaatttctcacagtttcggaggctgggaagtccaagatcaaggcactgacagatttggtggctagtgagggcttgcttcctggttcataaacagccatcttcttgttgtagtctcacatggcagaagaggcaagagagctgtctggggtctttcttacaagggcactaattagattaatgaggttccaccctcgtgaccccatcacttcccaaagatccaccaccaaataccatcacattagggacctgtatgc

SEQ ID NO: 145657 - DNA, 179 bp, Homo sapiens
ttctattgataagtaagctaggcccagagatgtactagctcaaaggcaccctagtacttagtagttgactggatggtccccttgactcccagttcagccttgaacttctggggcctcatcttgctgtggttcaagtctttggaggtatgagaatagagggagccatgatgtcactccaa

SEQ ID NO: 145658 - DNA, 644 bp, Homo sapiens
agaatgaaagaggagtgatttgcatgtgtaaatgactttcgtctacagaacagctatataacatgtcgtcaaaaatgttaaagattcatagggaagataacaaatatctacgtacctcgttgatagactgccaggtgccaaggcattattactagagaaagattttcattttcattagattaagcatgcatagcaagtagacttaaacaattgattgaaatcagaaaatgtcaaagctgtatttagaaaattgagttcttttaaagcagtattaagtcaaggaaaaatcacagacaaaatggagtggtagtatatctctacatttaattggaaattttacatatggtaacagctactgttaaattatccatggctaattcatcttaaactgaagtagacaattaagcatgttctggactattaactggttcatattttaggtgcttgcctaattagacatttcctaaactaatcatttgcactggctaattttttagaacattttattgagaatttgtagctttttttgcatttactgtttttgaagttatttttttaagaacattgacttgaagatacataatctactgtaaacgttgcagtgaacttttattctaaccctataaataaatagatcataccat

SEQ ID NO: 145659 - DNA, 419 bp, Homo sapiens
gttggtgctgagggtcccggcgcctccgcggcgtgcactgtcccgcacgccctggcgggtgagcggctgggggtgcgtccttgcatctcttcccaccgggaatgagactccggtgctgctgcccggtggccgggactgagtctggcttggcgtggaccgggcctccacggcagcctggacgtcgccgcgccctccggtgcctcggaccaggagaggggttgggtgcacgcggttgagtgggtttatgcatctttgttggtcttatctgcccggggagagtgtgcacagtgtataatgccctgccagtatttgctattttcacagaacctggatctttctcacttctctcttgaccaggaacttgtgtacccagtacctgtgctgcgtgcatttcgccagcctttctggctaagacgttt

SEQ ID NO: 145660 - DNA, 491 bp, Homo sapiens
ggcgatccgtagttagctctcctccattaccaacccctaagtgtttagagttcctcagaacttgcttctaggcattttcctcactctttactcatccacacaatgatctcatacacttgtttttttctttagagagagtctcactccgtcatcaggcagtgcagtggcatgatcatatctcaccgtagcctctaactcctgggttcaagtgaaccttcccacctcagcctcccaagcagctgggattacaggcaccctccatcatgcctagctaatttttatatttttagtagagacaaagggaaacaccggtgtttccctttgtctcctgtggcccaatctcagatgttcatcttctcacatgtcatatcagtgcttctcaaatgtcaacctgcatcataattaccaaggggcctgccagttcctgagcatcaaccacaaagtggtgactcagttgattctgatgaagacggttcacagatatactgctc

SEQ ID NO: 145661 - DNA, 448 bp, Homo sapiens
tgtacctgcttactgggcgtatggggctacgggctcgcacacaacacagctaattttgtatttttagtagagacggggtttcaccatagtggctaggctggtctcgaactcctgacctcaagtgatcctcctgccttgacctcctaaagtgctggaattacaggcatgagccaccgtgcctggcagctgcatttttctttttcttttcttttttaagatggagtctttctctgtcacccaggctggagtgcagtggctcgatctcgtctcactgcaacttccacctcccgggttcaagcgattctcctgagtagctgggctgcagcaggcatgtagccatttggagactcagtttccttatctttaaaatggggggagcctacagctccctaaaatttaggaggagagggctaggcccaatcatttcacacacttgctttgtatctct

SEQ ID NO: 145662 - DNA, 543 bp, Homo sapiens
tttattctgcccagtctctgaggaaatgctgataaatggtgtgggataaacacatgataaatgctgataaatagatatgtaagtctttgctgacttgtattattcagaattgtgtggtgtggatgtggcctcatcagtgacacaagtgctgttccagtggcgccctctgtgctgatggacacattttatagctgttctatccagtgtagtagcctgtggccacctacgtctattgagcatgtgacatgtgactgaggaatcggatttttaattatctaattttattgtattggacagggcagaacagagtaagttccctttgtggtggtgttttctttctccttctagaagtgttttatgcatttattgttttctattttttttaagttgttgtggtacattggagatgtatatatttttagggtacatgagatgttttggtacaggcatgcaatatgaaataagcacatcatggggaatggagtatccatcccttcaagtatgtatcttttgagtttacaaacaatccagttacactcttta

SEQ ID NO: 145663 - DNA, 428 bp, Homo sapiens
acaaggacctgctgagccaggccctccagtgctggcctcctgacctgctagccagactctgtccatactctggacctaccgagccaggggtgttctgactagaaatatgtgttacctccgatagttgcttcagggtcagttgtttcaaactggggctgtatgttttaaatggtttttggctcttccattgaccctgcagacattgggagcagcatgtgattctgtagcactaagaattgtaatacagaaatgaaatgcaattcatatttttgtttctggagaagatgtctcatatatcatcttggaatattttctgtaacctatcccacatacctccaacccacctccagcgcatatacacatgcacatacagcatgtactctccacacccagccccctgcctttccccgtagtcagccgggtaccga

SEQ ID NO: 145664 - DNA, 481 bp, Homo sapiens
acaaggacctgctgagccaggccctccagtgctggcctcctgacctgctagccagactctgtccatactctggacctaccgagccaggggtgttctgactagaaatatgtgttacctccgatagttgcttcagggtcagttgtttcaaactggggctgtatgttttaaatggtttttggctcttccattgaccctgcagacattgggagcagcatgtgattctgtagcactaagaattgtaatacagaaatgaaatgcaattcatatttttgtttctggagaagatgtctcatatatcatcttggaatattttctgtaacctatcccacatacctccaacccacctccagcgcatatacacatgcacatacagcatgtactctccacacccagccccctgcctacagtgcatcccacctccttacactcccttaacctcacaacaccaccacacaccccaggccctaccccacacacttcc

SEQ ID NO: 145665 - DNA, 313 bp, Homo sapiens
ctctagcggatccctggcactgttcggatgctccacctcctgggtttaaatgattctcctgcctcaccctcccaagtagctggcactacatgcgggcaccaccatgcccggctaatttttgtatttttagtagagatggggtttcaccatgtcggccaagctggtctcgaactcctgacctcaggtgatccgcacacctcggcctcccagagtgctgggattacaggtgtgagccactgcgcctggcctgtcctcaacttttaactattacatttattacttattttgccttgtatccctcactaatacaccc

SEQ ID NO: 145666 - DNA, 441 bp, Homo sapiens
gaaaatgtttaattttagaaactgcagaagtatctgaccacttaactttttaactttttaattttgtttttactttttaattttttgagatggagtctcactttgtcacccaggctgcaaggctagagtgcagtgatgcgatttcggctcactgcaacctccacctcctgggtttaaatgattctcctgcctcaccctcccaagtagctggcactacatgcgggcaccaccatgcccggctaatttttgtatttttagtagagatggggtttcaccatgtcggccaagctggtctcgaactcctgacctcaggtgatccgcacacctcggcctcccagagtgctgggattacaggtgtgagccactgcgcctggcctgtcctcaacttttaactattacatttattacttattttgccttgtatccctcactaatacaccc

SEQ ID NO: 145667 - DNA, 561 bp, Homo sapiens
cggccaaccctgtctcacaaaaaaataaaataaaataaaaataaagtaaaaagggaaggtacagagagggagaagatatttgcagcatgtacaaaggatcatgtttagaatatataaagagcctctacaaatcaataagagaaaggcagacaacccagtttttaaaatgagcaaaatacttgaataggcagattacaaaagatagtatccaaatagccagtaatcatatgggaaggtgctcaggctcaatagatataaagaaaatgctagttaaaatctcattgcattaccactaccaaaatggctaaaataaagaaacccacaagaaaacctgactatactgttttctaagtgttaggaagaatgtagagcaattagaactctcatacactgctggtggaagtctaaattggaaactactctacaaaactgtttgagagtgtctattaaaggtgaacctgttcatactgtgtaactcagtagttcagctcccaggtacacccccaacagaaatgcatacatatgttcactaaaagatacatactagaacattggttgcac

SEQ ID NO: 145668 - DNA, 293 bp, Homo sapiens
aattctcagtaaaactctataaggtagatttattatcattctcattttacagatgagaaagcagggtcttggatgagttaagagagttgcccaaggtcatacacgtaagaagaggaagagcttggattagatttacccaattctagaaactatgctgaccctaaggcctaggtagtctgcttccatggaggtgactcttgaaatttgtccattccttatctacatttggagttttggtctttgtttccaacagtcagtgagactttggtgcttttatgcctacaagcattcac

SEQ ID NO: 145669 - DNA, 378 bp, Homo sapiens
gtgcaaccatcaccagcgtcctaccctcttcatcattttgattactcctccagcgtaataatcttggcttcagaattcactggtattgactgtagcattgttagtgttagtgcaccattttggggggggtactgttttgtttctaataattttattggcctgtctgagtgtggaagcgcactgggtaaagttgagattttcactttatattgggtcttgggttgtttgataataattcagagttcttcattcaatgagtatggcttattaacattaattttaattttccctaaacttgttattttgtcctgtcaagattgttgcttatctgccacttcatgcttatcacatggggcctcatgtgctttttatatagtt

SEQ ID NO: 145670 - DNA, 135 bp, Homo sapiens
tttccttatgcacacacaagcagacacctgtatagatttgtatcctcccacttttataccaaaggtgatataatatacacacaattctttaccttcatcatttcacttagcagtatgtcttggagacccaagtag

SEQ ID NO: 145671 - DNA, 407 bp, Homo sapiens
cagccgtgtatggggtagcttgcagctcagcccactgagcatttgggagcctcttatctgcgtactgagaacaatgaaaggattcccatgtccacccccagttccacccactgtgggttcttgtgggccttttgagtatcagagatctccgtggccagggagctgccgactccagcaacctggacccattcacaccaggctggtgggagcccctcgcgcactctccaagccctgcgctccccacctggatggaactgatgggcccctgagctgggtgggcaatgatcttcatgttctgactcttagcagctccaccaagccattgccttgcgtttagagagctcgctgaatattttctcagaaattaaatacacagatttcccgggtatggtcattttgcccaggaa

SEQ ID NO: 145672 - DNA, 741 bp, Homo sapiens
attgcctctatttcattcattgcctacactaaattatccaatttgtgctccataatgaaaagaaatgtattattccaagaaaccttcataaaagttttcttgcttgattacagtggcttttgagctggagctttaaattatgatatagtatctcacagaaaatggaaaagaagcacagaaaaactttgctaaacataatcaggaggaattagcccctgtaattttgtcccctcatatgagcagggaatagtagtcttacttcccttctttttatatggaaaacatattttctagtacatagtgatatgttattagctggaaggcaagtcttgctttctcagtgaaaaaaagtgaaaaatttggggcagtctcatgatttttgcaaaactttaatggtgctggaaaaagagtttgaagtttttaattttttattgatatagaatagttgtacatattttgggggtacatgtgatattttgatacctgtatataatgtgtaatgaccaaatcagggtaattgggctacccatcacctcaaacatacatcttttctttgtgttgggaacttataaatcttctcttctattttgaaatatacaataaattattgttaactgtaattttcctactgtactgttgaattctataacttattccttctatctaactgtattttataccccttagccaacttcttttcatccccccttcctctcttctaaacctctagtaaccaccatt

SEQ ID NO: 145673 - DNA, 278 bp, Homo sapiens
ggcttcatggtctacaggggaggctgatatctcctgggaacctagctgagatcacttcctccacacagagctttgcacatgggtctgctaccttcacccaacaaaggttaatcccaacttagtaagattttctgtaccccattatcaaccccaagagctcccagcttctctatgagatttttttttttttgaggcaagggctcactctgttgcccaggctggagtgcagtggcgcaatctcgggtcactgcaatctctgcctcccaatctcttgctca

SEQ ID NO: 145674 - DNA, 386 bp, Homo sapiens
atctggcttcagagtctccgactcctgcccataattacttcctcactgaattcctgactcttctatcctcattctcttcaactgtactactcagcattctccctgtccctcaagattcttcctgcctctgcttcctgggcccatccttgactccttccagttcctgaacagttcctctcctgcctcctttctgctttcctttctaaagcagaagcaactctcagtgctgactctctctcctctctcttttcacttacacagtcagtgattgcatccactctcctttcactgctgagccacctcaaaccctaacttctctcctcactgacttggcaggtgtcgtgtgtcagacaggcaccgtactacacacgggagactcagcagga

SEQ ID NO: 145675 - DNA, 380 bp, Homo sapiens
cctctcccacagttgcagtatttttgctgggcccacagggtggacaggctttggggcccctccaccagcaggttaagccttttgctttgcacgagaaaagggcccagcagagtgcttgatgattcatggctgtcagtcagttgcttctgcctgctatgagacatctctcctgtttttcctgaccatctttcttgaagcacccatgggaggcaggtaccctgtggaagtcagaaggttgtctgggaatgtgagctccctgtgtcgggcacatctggctttgtttgagccaccccatgctcctgccagccaccatctggccctgggcagctgactgcaattcgagctgatttctccctgccatgttaggtgctagcaggtgt

SEQ ID NO: 145676 - DNA, 738 bp, Homo sapiens
cactagttcctgctgtaccatttcctaattcaaatttttgaataaattattttgaattatgagttaatacatctctgtgactgaaaataagctgttttctttctcttcaaattatatgaaggtatgaaaaggtggtttgaggcatcttttgctgtgatgatgaagtgctagaaataaagtgaatttcaggcacccctggtggtcctcaatgcttaggtttcttctgaatctgattcaggggtcctctttttattttgaataaaatagtggcttacatatattcctgaagctgcagtaatctacatgacttaggccctgtttgtttttagaaagttgtttctgtttttttgttttaaacaacaatattgtctcctataaccatgtgttcaaaactttgagatcaggagaggccactgttgactgtttgaggctctgctagcaggcttgagctaagtgcagtagaagtgtcttccagcacaccctttctgtcacacagtcagtggcttactaacaacagtaatgccttgtatttgagggagcttttggtttttagagtgcggttgaaacactgtttccttctaggtccctgaaacaccaaccctgagaggtaggaactactcatgaggaagctgacaaaggttaaagtaacctggctgaagactcagactagtgagcgtgaagacccctgctgaaaaaccaggcccttctccctccacggcagcaacactctccgtcacc

SEQ ID NO: 145677 - DNA, 746 bp, Homo sapiens
tcctttagaattaagtagcttagataaattttcatcaaaatctttatatagtagggaatagaaaaaagtcaattctgttttatttgaggatgtatgaatatgttaccatttttcagactctgatttaccttccaattattgtttattggggtcattgtaaattagttatcattttttgaatacacattcactgctgacaaagtggtgaagccagaagttatgtttgaccagggaagattatgaccctcaaaggagaaaaattcacagggggtagttgattattggtggaatggagtgagagtgaattccttaaaagtttaaacgaaagcagaactatattcatatcatggagggaacttagtttctaatatgatgaactattgccccaagtcatgacaataccttgctctctggaagagaatgagtgagtttttcatccgccaagatacacactctatatttccaaccatcacatctgccttgcaggctgactgaacccagagcaaatcaatcacaaaagttaatccaaaagacttcccttcagctgctggaaatcagtcatcacatctgtgaaaagagtgctagttataacaaatgagatcacaaatttgaccattttattagacaccctctattagtgttaacagacaaagatgaaggttaagttgaaatcaaattgaaatcttcttccctctgtacagattgcaatatctgataataccctcaactttcttggtgcaaattaa

SEQ ID NO: 145678 - DNA, 181 bp, Homo sapiens
ttccaccgcctttactaaaaatacaaaaaaattagctgggcgtggtggtgggcacctgtagtcccagctactcgggaggctgagactacagacgcactcgaccacacccgacacccggctccaaccccatttaaaacagagaaactgaggatcacaaaggttaagcccctcgcttaaatca

SEQ ID NO: 145679 - DNA, 828 bp, Homo sapiens
gcatggtggcacacttgtagtctcagctactcaggaggctgatgagggaggatcgcttgagaccggaagtttaaggttgcaatgagctgtgatcacaccactgtactctagcctggatgacagggtaagaccttgtgtcaaaaacaaaacaaaacaaaaacacacacacaaaggggtgtgtgttggggggagattatttcacaggtaaaactaatcaatggtgaggaaaaaagaaattacagtagtggtttggggaaggggcatgaaggaactttgtagagtgacagttaatggtctatatcttttctttatttaagagacaagatcttgttctgttgcccaggttgggttgtagtggcgcggtcagcagctcactgcagcctccaactcctgggcttaatcagtcctcttgccttagcctcctgagtagctaggactacaggcacgtaccaccacacctggcttaattttttgtagagatggggtctctccatcttgcccaggctggtttcatactcctgggctcaaatgatcctcctgccttggcctcccaaggtgctgatctatatcctgatagggctctgggtcacatgagtttgtcaaaactcacattaagatttgcgtgttttaccttaaaaaacaaaactgtaaacaaatattgatctctacttaattgtgtgtgtgctgagatgtttaggtatctgcagctgactttgaaatttattaaaacagtaagacggactgatgaatgaacagaaggatgagcagatagataaagatgggcagatgtgatctcacaaaatattaattgtgggtttgggcatacag

SEQ ID NO: 145680 - DNA, 759 bp, Homo sapiens
cgtgatgctccagaattcctctctggccccacagctgaaagacatctcttctgtgattttctgactgctaatctgacactgcaaaccccaggggcaagagttctgcctcttctctactgcagcctatctgaaggaagtgatcagctcaattgggaactgttgatttgctacagtgattctcactgtgcattggtgattgggggctactgtcagaatatcatgggggaagggcatgtgcggcaattctaaacagtgtgaaaaaagcctcctaggaggctctggtaggtctgaaccttgaaaatctctgccctgggggtatttggatgggtttttgggagtccacatcccatgaaacagaatgtatatttttgggatcacaaatcctttgaaaatttaataaaagctatggatcttcttctaagaaacagacaggttcccatgaactttgtatataatcttcagggctttgtggaccctctgcagcccatccacgtacccttactttctgttctcctatattagagatacagattgatcattgccactccctatgaattgcccattgtccatcaatgctggggatgttactgctcatggctgatatgagctccttggagactggaaagcacaggtacatgcaacccacagggacaaagagaagaggttaaaccccagtgctcaggctgccctgagcagagctaggtcaccaatttaaaagttctggaatccacatttcaggaagatatctccccccatccc

SEQ ID NO: 145681 - DNA, 467 bp, Homo sapiens
gttgcccacaacacagtggatgcaaagtgctgtattgaattagatatggagtacaagcaaaagagctaggaaacaaaagcgggacagagaaaacattacaaaacaaagtagtagtcatggaagggaaaacattacaaaacaaagtagtagtcatagaaggcagaaaaggttccagcatagggacacatggagagcctcaagaaaactaaacaaaataaaacactggaaaataatcaatatttaattcatgcaaactcctgttagcagcagcgaatcgtaatggctctgtgacaacctcaattcttgcagaaggaagtagagtagaaggaagaatttgaccaaggggcataaggcagactgagagactgaggcaagtttcagagcaggagtgaaagtttattaaaaatcttaaaaaggccaggcggggtggctcatgcctgtaatcccagaactttgggaggccaagg

SEQ ID NO: 145682 - DNA, 132 bp, Homo sapiens
gacccggcaatcccattactgtgtaaatactcaaaggaaaagaaatcattctaccaaaagacgcatgcatgcgcttgttcctcgttgtgctgttcacaacagccaagacatgcagtcaacccaggtgcctgc

SEQ ID NO: 145683 - DNA, 208 bp, Homo sapiens
caactcccaattatcctgtttggaaaggagttctaggaggacttctcttcctcctaagggcagctgcataggttcattaatttttttgctgagcttctattatgtgccagacactcttcttatttttctgcttccccttttaaaacaacctcttacttattcttgataggaaaacactgtccttttacaaagattcacattaccaatt

SEQ ID NO: 145684 - DNA, 251 bp, Homo sapiens
caggcgcccgccaccacgcccggctaatttttgtatttgtatttttagtagaaactgggttttaccgtgttagccaggatggtctcgatctcctgacctcgtgatccgcccgcctcggcctcccaaagtgctgggattacaggtgtgagccactgcgttcagccgcccagccgctgattcttttaacactgctttttatggaattaatgacattcaggtttaataaaatatctaaatttcagaaatcagtc

SEQ ID NO: 145685 - DNA, 288 bp, Homo sapiens
gtcagctggcagagaagcaaatatgaatagggcagggtgctgccaacaaggaagctgaataatgaagagtgttacttgaaattggccctggaaactggcttgctgcaggtggagaaaggaatgggggtgcgggagaagggcatcctaggcaaaggaaggacacgagccaagcctgagaggcggggcctgctgtgtatggtggggtgggccttgtatttggagaacaacacgctttgtagtttgaccggagcctagggtacatgtagggtcctgggagggataaaactt

SEQ ID NO: 145686 - DNA, 654 bp, Homo sapiens
ttctttgttattctttttgcttctctgaactttaagtcagagcagcttcctacggtttgattcagtgctcatgcaactttacgtgatgtcaaagccctttggtttatcttctttaattttgttagtttgcggattgtctcgaggattttaatttgcctatttccttaccaattatgcattctttttctgcctcaacagcagaattaggggtattatagtttatgaataactggctctgacattcattcattcattaaatattggttgagggcctaagtggtacctatgatgccaggttctgggattatagaggtccctgcccttgaggaatttatgatcccctgggagcaagatttaaacaagcaatacaatcatgcatgctaagtgtgatgccagagcgattgctgggtgccactgggatgtgtgaaaaatatctaagatgtggaacccagtctcacaagactagagaagcaagatgtaaaggtttaaccaagactgaaggatgactagcagttagctcatggtagcaagagtcttttagatcctcagtatatacttatttttatcataatgatacatgaatatgtataaacataaactagatgaactccttaggcttttgacgctagcaaattaatattttaaaaaaaaaaa

SEQ ID NO: 145687 - DNA, 281 bp, Homo sapiens
gcctcccaggttcaagtgattttcctgcctcagcctccctagtagctgggattacaggcgcccgccaccacgcccagctaatttttgtatttttagtacagacagggtttcaccatgttggccaggctggtctcgaactcctgacctcaggtgatctgaccacctcggcctcccaaactgctgggattacgggcacgagccactgtgctcggctggattggttttaaagacagagttgaccagatttctgggttggatataggatgagaaagaaaggaagg

SEQ ID NO: 145688 - DNA, 371 bp, Homo sapiens
gttttaaccatcatttcaaaatgatgcagagtatcttttcatttgcttacttgccatctgtatatcttcggtggtgaggtgtctcttaaggtttttgtcctgtttaatagggttgtagtttgagaattctttgtatattttggatagcagtcctttatcagacgtcttttgcaaagattttctcccaggctgtgactttttattttcttggcagtatctttcacagagcagaaatttttaattgtaatgaaatctagcttatcacctctttttttctaaaaagtcatcaccacatccaaggtcatctagcttttctcttatgttatcttttaggagttttatagttttgccttttacatttagatctgtaa

SEQ ID NO: 145689 - DNA, 158 bp, Homo sapiens
  misc_feature (128)..(128): n is a, c, g, or t
actcagcagaaaaggatagtggctgaatagaaaccttaccctgggttcatttcgaggcctggcaaagctgagtccctaaaggctagtgcttctattcagccaacctgtgtgactagtgtgggatcctnctatgatgtctgacctgcatgtgcatgcaa

SEQ ID NO: 145690 - DNA, 370 bp, Homo sapiens
aaaataatctgagatcaaaatttgagtattctttttatgcactgcattctttccaaagagtgacatagattaagtgatctatacttaacaatactctagcaactttttaaaactaacattgcctggaaagaattttttttcaagagtcaaggacttgctctgtgacccaggctggagtgctgtggtgagatcatagctaactgcagccttgaactcttggggctcaagcaatcctgctgcctagcctcttgagtagctaggactacagctactccaccacacccagctaattttttgtagagaaggtgtctgtctcctttggttgtccaggctggtctcgaactcctgggctcaattgtcccaccctggc

SEQ ID NO: 145691 - DNA, 356 bp, Homo sapiens
aagagccgctggtttctcatctgtaataattgggtgatagcagctatcctgtggcatgtcatggcactcaaatggagtcatctgtgtgagacacctggtatggtacagtgcctggcacatggtaggtgatggagaaaagtctcctccattcttgtgtgcacatgtggacaccatatcctccctgtcagcattgttttacagagactgtgttcctacaggctcataaaaaaaggcctggatgaaactgccatatacaaattgagagcatttgctgagattattttcgttctcaaaatattaactttttttaaaggactagccacagaattggtatttttaaataaagaccctataac

SEQ ID NO: 145692 - DNA, 252 bp, Homo sapiens
cgcgctgcagctcacttgagcatctgtctcagagaagcagctcaggctgacaggaaggcctgggtttcccagttcaggccttatccgtcgccacacgtgccacacaccacaaaacgttactaatactaacatctcaacaaggactcctgattgactgagtgttcaattcatcagagaggcaaaaattttaagactcaacctctctgccaactttgttatccaaaaccatttatttgaccttccacctcttcc

SEQ ID NO: 145693 - DNA, 396 bp, Homo sapiens
ctcccaaagtgctgggattacaggtgtgagccactgtgccggccttatttaattatttttataacagttttaatataactacccttgtttaaagggtacttttttttttggagacggattctcgctctgtcgcccagattggggcgcgatctcggctcactgcaagctccacctcccaggtacgagtgattctcctgccttagcctcctgagtagctgggattacaggcacctgccaccacacctggctgatttttgtatttttagtatagatggagttttgccatgttggccaggctggtcttgacctcctgacttcaggtgatccacccgcctcggctcctcaaggtgctgggattacaggcgtaagccaccatgcctggccaaatatttttta

SEQ ID NO: 145694 - DNA, 323 bp, Homo sapiens
ggggaaaatcaatcagtctgacaaattgtgagacgagacaggcgttgaggggttaggaagggttaggagaaacccaaagaatgacttctccccacgcaccttcagagcttaattgtctgtcaataaagacagatgcgggagtgtgtttctgtatgtgttgggggaggggtggattagagctggtggaaataatgaaccttggaggatttgtttttcaagtgtatcttggaggcatctttgtgggacacctccccacccccaaccgtggcagacaacaacccaagcaaactaccaatcaggaaagacaatcacctacaagtgtt

SEQ ID NO: 145695 - DNA, 282 bp, Homo sapiens
gtgaggtagtttccatagcaaccaggattaagtcttacagcagtgtgcactgttcaccctggcgctgcccattaccagatttcaaagcattaacctttaatttcaaattaccaaaccatttacactccctctcctgcatccaggtcctgccattttctactattagtctgaccaaatggactcccccacagggctggagttctggtgagtagcacagtagcttgtcaacattactactaagtggctgctgggaaatgcccacaggttgacaagatagtgttg

SEQ ID NO: 145696 - DNA, 381 bp, Homo sapiens
acacgaagtgtgacgaaacgacccgaagacggtgtgtgacacagacaaattatatcatgagtaggggtaatcaaaagacagaaaggaaaaacaaatgtggaaggaggaggtggcttcacagacaggctaagcagggtgggtgagaggacacacacaaccgagaggcagtgaggagcccaagcttgggccgcagggagacaagctgcccactaaagggaggactggaggcgaggccaggcaggctggggtggcctgggcagcaaaggcagcgtctgacggagtgagtgttactgcactttctttttttctgagcaaaaatacattcaggtttcatgaggccgtttccagataacctcattatttctagtcttcgggtcgttg

SEQ ID NO: 145697 - DNA, 591 bp, Homo sapiens
tgatagagacatagcatctcccatataagagaatataacctaaaagggggaattttattttattttattttattttattttattttattttatagacagagtctcactgtgtcacccaggctggagtgcaatggcacagtcttggctcactgcaacctccatgtcccaggttcaagcaattctcttgcctcagcctcccaagtagctgagattacaggtgcccgtcaccatgcccagctaatttttatatttttagttgagacagggtttcgccatgttggctgggctggtatcaaactcctgacctgaggtgatccacccacctcagcctcccaaagtgctgggattacaggtgtgagtcaccgcaccctgcctggaatttcattttaaataggaagtaacctatttcttctaatgatttatctcagattaatcgcttcagtgtataatctctcaaagtatttttgctacatggctacaacgaaagtattaactaaaattagtattttacccaataatttagcaccttataaatgctagttactggaaatgaaatgcaaaagtcaaaagatgctgcccttaaggcaccag

SEQ ID NO: 145698 - DNA, 221 bp, Homo sapiens
gccatttgtacattctaaactcttagttgacttagatgagaatggattctaaaatctggtttttcagattgaatcctaatgtaagttaaattggtattctgttgtttttgttttgttttttgagacaggatctcactcttgtcacccaggctgaagtgcagtggcgtgatcttggctcactgcaacctctgcctcctgggctcaggcgagatcctcctgct

SEQ ID NO: 145699 - DNA, 159 bp, Homo sapiens
agttagacagtgaatccttggctgtaacagttaccaaaactcatggcaggtcttgcttttcctataacccaccctcttgtttcacccaaccctgtactggatttttttgaagcaaatcccagacatcatactatttcatttataaacacttcattatgt

SEQ ID NO: 145700 - DNA, 459 bp, Homo sapiens
ttaaggaacactttgagacagaaatggtaaaaaattaaaaaatcaaaattaaaccaaatataaaacacaatgaagatgcatatgtcaatgagcttgtctactttgttgaccagcttcgcttcacatgtaccctagccagagacctctgccaagttcttggcactcactccatctaagaataggctgtcacatacgctgcaccagatattccaaactacagcaacctgatgtgctaaaatgccccaccaagtataagagttacatatgaaaatattgcagtataagaacatttgaccacagaaaactaattaacacaaacatttcccaaatgtagaaatgattagtctttttcaatagagaagttattttagaaccgaatcaactattttatgctgtttcttataaataggcagctgtgttgagtttttgatactagttcttctacaagtggttccttgt

SEQ ID NO: 145701 - DNA, 215 bp, Homo sapiens
aattttatgttccttcatgtttttatttaaagaaactgaatcaagtaccaaacatggaataaaggcaaacattcatttttggggtgattgttcccttcttggcaatccctgttttattgagggtatcactagttattcattccaaggattttttttttttccacaggaggtgggcgtttctttgtcttcttagagtcaggattccagatctgctg

SEQ ID NO: 145702 - DNA, 318 bp, Homo sapiens
gcttgggaggctgttgcagtactgcaggagtggaagagtgaggactagattagaatatagaaggagggatccatataaaacatatttcaaaggtcttgatgactcattgatacagaggatgaaggaaatgaaggaaaagatggttaaagataattccaatgtttcaagattaacataatttccactgtactaggaacctcaaaaagcaatgagaataacaaacaataaagtataaaaagggctctgatgatgttgaacagtcaataaataaaactgctaaatggcttgtttgatatcctagtagttcatttacactta

SEQ ID NO: 145703 - DNA, 171 bp, Homo sapiens
tgtgccggctcagagtagaaacgcgcctcacctctgcagccttgggcccctagggaccagaagaggtttccagagtccaggagcatgactgatggcggggaagcttctggagccagccagaggccccaagcctggaaagcaacagcctgtagccagcttgacctgctctcc

SEQ ID NO: 145704 - DNA, 223 bp, Homo sapiens
tgcaccaccatgcctggctaatttttgaattttttttagagccagcttcttactatatttgcccaggctggtcttgaactcctggcctcaaggagttcccttgaggatgttccacccatgtcagcctcccacagtgctgggattgcaggcttgagccattgtattaatagttggcctacactgtcttttgtttcttcatttacaagaggtaaaaatcagtaag

SEQ ID NO: 145705 - DNA, 242 bp, Homo sapiens
agctgcagagctcaggagtcgttctgatatcaggcccattggtgggtttagctttggtgcaagtttcttggccatggagcttaactaggaggaagtgaattgcaatcattttggcctgtgctccttagagtcccagggatcaatgggagacgagtgactgggtgggcgggtagagcaaggagaacagggtgcaggagacactgccacttatttatttgtttttcctacaaatatttattgag

SEQ ID NO: 145706 - DNA, 1091 bp, Homo sapiens
tattttgcacagggcaaaggtgatcacttgcctttaaatcaagttaatcaaagtggaatttagtttaatgtctttcgtagctcatagcttagggggaagatgctgtgtgtttgagacattcacatagctgcatatatcatctccttgcagacatagctgggaattattttgctgcacacattagtgaaatataccaacttgaaatgtttgtgctaaccgagtgacctgttttctgtgtcatcatgtgtgtaattctcttatgtctgagtaaaaggctgagatgaaggtctgtgtctctggatacccgtggggttgctaggaaatgattttcgaagtgctctgtggtgatgcagcaggttgaactttttttgtgaagtgttgtcatggaaaccaagtgcatcattgccttgtctgactaatttatcttttaatgataaaaatttgtaatccagggttaacaaatataaataatacaaatgcaataaaaaaccaataactgtaaagggaatactgctgtaagtagcgaatcctttgaattggaagatgtcacaggagtattgtgtgattcatgttggtaagggcttggcagtgtggggagctaatcagtttgttttccttcttgtcattggagtagggaaaccatgatttcactctgtggcttagtgctgtgggcttttattactgacctcggctcctgagcttataagtaaagaggaaggcgctgcacaccctgtgaggctcagcaagcttgccagggttttgttttctgggtggttgcttagttgtacttctcctttatgacctctcactctgctctctccacctaagagaaggctgggtgacacaatgcaagccctaccattgatgaaggccagtcatatggaaatggtgccacaggcttgctttctgggctaagcagtcctacatcccccttccccaggagcaggtcctggagcacagaatctgccttgacttccttttcgtggttaaagggccctcaaggagagaaaacctgctcttttgtttattgaggacaaagtcttatagcattgtaagatatcaatggatgctgcttatatctggatgagtag

SEQ ID NO: 145707 - DNA, 385 bp, Homo sapiens
aactgggttggggggaggggatgtgtagtgttatttttataaaattcctaaatgttgtactaaacaaaattgagaaagaagtatttttttgaatagaatagaagttgtaaatgaaataactaatcacaaccagaatctttggttttaatgttgaaaggagagggggttggttgcacactgaggatggttctccaatacgatgcctagggaaaggcactggcttcagctggacgctcactccagcaggattctttgcacaatgctagcaaagatcagtgagaggaaggctggagccaggcactgcttcatgacagcttgaatttggcaagacgggggataagagttaatgatctccagccacagagtggcttaccatttcctttat

SEQ ID NO: 145708 - DNA, 224 bp, Homo sapiens
ttctcaggaattgtcagtggatgtgtggatggacaggtgagaagatggatggatggaagaatgagtgaatggaattgtcagtggatgtgtggatggacaggtgagaagatggatggatggaggaatgagtggatggaattctcaggaattttcggtggatgtgtagatggacaggtgagaagatggatggatggaagaatgagcagatggcattctcaggaatt

SEQ ID NO: 145709 - DNA, 669 bp, Homo sapiens
ttgaggaccccctgcgcctggtttctctgttccttaatcgtctctgcaacccacactttatatttcaaactagctgttttcttgagaacagatttatataagacagcccctgatgctgctaccactgtatttgagcaactgcgtcaaacaacctatcttaccagaaatacagtagaaaaagaaaagcacttacacccattcccccacccgagcaatgactaaaaaaggaagtgtctaaattaccgacgtttaaatcaagggacatgcccattatcatgtttggagaactttggggaggggtgttgtgtccacaaaatgaatgtagacatgaactgcttttacttttgtacacctgatgcagaatttctgagtgagttaatttaatccaacaggtaagtactgactacctgctaaatgtgagggaagagatgaagacagaagataaagaaaaccagccaggtgcagtggctcatgcctgtaactctagcactttgggaggcagaagcaggcggatcacttggggtcagaagttcgagaccagtgtgaccaacatggtgaaaccccgtcactactaaaaatacaaaaaattacccaggcatggtgacacatgcctgtaatcccagctgctccagaggctgaggcaggagaatcacttgaacctgggaggtg

SEQ ID NO: 145710 - DNA, 173 bp, Homo sapiens
ttattcctaagaagttctcatgatactgtggactccaaacatttatcccatgacttggtcatcacacctcttactttctgtctatactcacgtcctcccacaaaccaaccctttttttgttaagagagagggtctttggccagtcgcggtggctcacgcctgtaatcccagca

SEQ ID NO: 145711 - DNA, 164 bp, Homo sapiens
tcatgatagaagcactggttgccctcagagagcagagaagagcaaggcaagacagctgcccacccaagtttggcacagagccaggggaggctacttaccatggggaaagggtgagtgactaagagcccctgaagacccacacttctgccatggacctttgcaat

SEQ ID NO: 145712 - DNA, 556 bp, Homo sapiens
aggtgagaagcctgaggctgggaaaggggttccgatatgaactcatctgagacaggttccttgtgtcttcccgcaccaccctccttagcatggagctctcatcctcacttccccaagttgcagcagaaagacgggcagaggcatgctccagaagagtcttgtcttgtcttgtctttttttttcttttcttttctctcttcttttcttttcttttctctctctgtctctctctcgtctctttctttcttttgagatggagtctcactcagtggcacaatctcagctcactgcaacctccgcttcccagggttcaagtgaaaccccatctctactaaaaacacaaaaaatcagccaggcatgctagcaggtgcctatagtcccagctactcaggaggctgaggcaggagaatcgcttgaacccaggaggcagaggttgcagtgagccgaaatcatgccacttgctctccagcctggacaacaagagcaaaactccatctcaaaaaatagtaataataacaaaataggaattttgttaataaggcaggggggagaatga

SEQ ID NO: 145713 - DNA, 164 bp, Homo sapiens
tctcctgagtagctgggaccacaggtgtgcaccactgtaacccaactaattaaaaaaaaattttttttatagagacagggtctccctatgtaaagaagaaggcttttcttttaaacaatgggaactagataggctaatgagaatatttaatagagaaggtgaga

SEQ ID NO: 145714 - DNA, 203 bp, Homo sapiens
agccgaaagccagccatgtcggaaaatgcttcctgctggttggaggggagggtgcgcatctgaaatcaacatcttttttggggtccagcttctaacctctgaggtccagtagtctgacagcttgagatattcacatgacagctatttcgttcccaagttcaaatgcaacagtagacagtaaattgtgctacagtcccctacca

SEQ ID NO: 145715 - DNA, 120 bp, Homo sapiens
aaagaggagtatccactagtgcagtttaactgaagcaatgtattcacataaatagaatgaaatgctatagagtctctagtgccaggctaatgtaatttagactttattccatagacagtg

SEQ ID NO: 145716 - DNA, 402 bp, Homo sapiens
agactgtccattggctcattatgccctatatatagttttaaaaacaattgttcttttttgttgttgtagttttttgttgttgttgttgttgttgttgttgtttggtttttttgacacagagtcctgctttgttgcctaggctggagtgcagtggcacgatctcggctcactgcaagctctgcctctctgggttcacgccattctcctccctcagcctccttagtagctgggactacaggtgcctccaccatcccagtaatgtgactctttagtagagacggggtttcacagtgttagccaggatggtctcaatctcctgaccttgtgacccgcccacgtcagcctcccaaagtgctgggattacgcgtgagccaccgatccagccctcgttgcccttttatc

SEQ ID NO: 145717 - DNA, 351 bp, Homo sapiens
tgattgtacttctaggtgaacagtattcccacagctcatagacaaggtacctaaatgaagttcttggttggagagagaacagcaaactagaaatatgaataaataaagatgtgtgtgaggtgagaatggcatggtttggatagtaataacttctcttagtcctcagctcctaaaacatgaagattttatttcttgaatataaacttgtcaagagctaacttaaagtacaggttgaatgagttaaacattgccacttctcatcataacttcttttgatgaataatttattctttattttttctgtagagtttaagaaatagatgtatgtaatgattacagtcatttatagta

SEQ ID NO: 145718 - DNA, 409 bp, Homo sapiens
  misc_feature (11)..(11): n is a, c, g, or t
  misc_feature (13)..(13): n is a, c, g, or t
  misc_feature (23)..(23): n is a, c, g, or t
  misc_feature (28)..(28): n is a, c, g, or t
  misc_feature (30)..(30): n is a, c, g, or t
  misc_feature (35)..(35): n is a, c, g, or t
  misc_feature (39)..(39): n is a, c, g, or t
  misc_feature (42)..(43): n is a, c, g, or t
  misc_feature (45)..(45): n is a, c, g, or t
gagagggagantntatgtcagangatangntaaantaantanntnaataaaatcacagaatgctgcaatgaagggaagtaagaaacttcaggtgaggtttccaatattgatatggcattcccagattaaaagaagaaatctatgggtttaatgcatcctgcaaacatttttttttcctgaatttcctctcattcaaaaactgtggatcccaaatgatgccggccaagggcgtggtgaaggcaaattggtttttctttaacccttgaaagcctgctggaggcacctgagctatgagtggtcacccgatatggaagaggaccaagaggatgggtttactgtggtgctggggaggggatagtagcagagaacgtaggagttgctggtcattctagtggtgatggaagggatg

SEQ ID NO: 145719 - DNA, 118 bp, Homo sapiens
tttctccttctgaccttatttcttctgaaaaagagcaaaaagaacttctagaactggaaaataaaactgtccaaattaagaactcaggtttaatagcagctcagacagaagtgaagac

SEQ ID NO: 145720 - DNA, 454 bp, Homo sapiens
ttgatttagtctagaatctgaccccatcttgacataaacaccactggctcagataaatattaagtgcaacagtttacctaatttagttatttatttgtattcttttatttttattttatttattgagaggggttttgtcatgttgcccatgctggtcttgaactcctggactcaagcgatcctctcactttggcctcccaaagtggtaggattacagacatgagccaccacacacggcccagtttaaatgaattttaaaggtggtctagatcaattttattattttgcatgttaagatgcaaggactgttcaacacacaaatcaataaatgtgctacctcacatcaatagaatcaaggtcaaaaactatatgatcttttcaatagatgctaaaaagcatttaataaattcagcatcccttcatgataaaaaccttcaacaaattgggtatataa

SEQ ID NO: 145721 - DNA, 436 bp, Homo sapiens
ctgtgcacccgcggctgggagaggggtgtgagttcttcctgtttcccctgtggggctggaggggcaagaggctgaaggcttagggtcccacttgaggaggcatttctcacagccaggaaaaatgcctgacagagacttctatgttagcccacgtaacagggtacagcagaggcccagagggatcagtgatgtccccaaggccacgtggctcagtggcagcgccggcaccccacagcccatactctggcacttccagttctcgactccatgtgccagtgcctcgattagtcctttcaacgcctctgggaggcaagtgagccagagaggctcggtgaccagcctgatgccatgtggcttcatcattcagcagcctggcatttcaagctccgcagagccaccaagggtgcccactagccctctgcacgtggcccggggc

SEQ ID NO: 145722 - DNA, 675 bp, Homo sapiens
attgcagtgagccaaaatcatgccactgcactccagcctgggtgacagaatgagactgtctcaaaaaaataaaataaatacaataaaataaataaatacataagtactgcatctttacatttgtttacatttctctcaactgtgaacacagtctgtgtgtgtgtgtaagttttgatacattttaactttttatagtagatttgtatgtattttatggtggtaaatgataaaacagatgagtatctacatatattttatgcatttgtcgcatatctaactttttcttaatttttaaaaatatttctgggctacgtggtttgcagttttttcaaattgtcacaaatctccaaaaaattttccaatatgtttattggaaaaaatctgcatgtaagtggactcatataattcaaacctgtgtttttcaagagtcaactgtaatgtctttcaaagtaaaatctaaatgagtttatacttgatatatataagtttaatagaaggagtgcgttggctcatgcctgtaatcccatttctctgcgaggctgagatgggcggatcacttgagctcaggagttcaagaccagcctgggcaacatagagagaacccctttttattaaaaattaaaaaaaaaatcaatcaggcgtggtggtgcacgtctgtggtcccagctacttggg

SEQ ID NO: 145723 - DNA, 213 bp, Homo sapiens
ccccattatccatgagggatacattctaagacctccagtgcctgaaattgtgggcagtactgaattctgtatgtactacacaataagagattaacagtaataactaataatagaacaattataataatatgctataaaatttatgtgaatgtggcctctcaaaatatctttaaaaaaaattttttttagagatagggcctcgttctattgccc

SEQ ID NO: 145724 - DNA, 373 bp, Homo sapiens
ctgctacactcctcaccctcatgctgtctctcctcagtctctcccttcctgcgagtgtctctgcttccctgtctctacctccagatggcttaaaatatttttggtctgtgcgtcccaactcatataaagctatacctgaggcagctggaggtaactagcacacagttttaagtttttaccagtgatccatgaatgaagtctgcataaatcttcaatatatttggatttttaaataaatgtagattattgcatatcaaagtagaaaatctacatcttcatttaaaactgcaatacaatacttataaaatctccagccactaaaaatacaattattatcttaatgtggtgggggaagggttgtccataaaacact

SEQ ID NO: 145725 - DNA, 155 bp, Homo sapiens
gaagcttagcaccagctgcctggggcctggcccttgcagacttgtgatgtgtgacctgtagacctcaatttaccaaaatccaggaatattattatggcacactgaacaacagactcctatccccacagaggcttcctggatgcacattgggcccc

SEQ ID NO: 145726 - DNA, 293 bp, Homo sapiens
aggtagccagggactagattacaatgacagtattgcatatagtggcaatttatttaaaagtaattatctaccttgcaaataccaccttccagtatgtaatacagtgctgagaaaagagcaggtgctcaatgtattattttcaaatacatgagtgaataaattagtgaattaataacttcccaaatttgagtccgattatatctgaccatttcccaaactccaattcatccttgaaggacaaaccaaacagcaatttgaaggactaataatatataggataaatttaaaggcct

SEQ ID NO: 145727 - DNA, 170 bp, Homo sapiens
cacagaatccatgatatggtctgaggagaaagctggtgtgaacgtacggagagtctctatatatacagcagatcctctaataatattgtctcattcactattgtttagtttttttttttttttttccctgagatggagtctctctcagtctcccaggctggagtgcagtg

SEQ ID NO: 145728 - DNA, 299 bp, Homo sapiens
tttctgcttcgggtcctttctgcacagtgggcagtttataacctcagccagctctgcagagggcagaatgccatggtccaaatgtttgtgtccctcacaaaattcctatgttgaaattctcgcctccaagctaatggttctaggaggtggagcctctgggaggtgatcagtcatgaaggtggagcctcgtggatggggtcagtgcccttagaaaagaggcccaagggagcccctttgtccctcccaccgtgtaacacacagcaaggtgcctgcgtctatgtgggaaggacccttggcag

SEQ ID NO: 145729 - DNA, 300 bp, Homo sapiens
ggagacagagcaagacctcgtctcaaaaaaagataatagtaacataattcacagcaatgtccgtggaatattcttgaaagaaaaatgatggagtacattattgtatgctctacatacaacatcttcacttgctaatatatattttttctttaccttccctcattcctgacattactgctgaggctgacatacaggatatgatgaaaagtaagcgcgatcgcatgcgcatacacacacatattgtgcactttaaacttaggctcatctgtcatttgtcattataccctctcgcaaattctc

SEQ ID NO: 145730 - DNA, 782 bp, Homo sapiens
gtcaagagcattgaactgctttgcacatgaagaatagaatgaagttgttcctctgcatgtgaggaaagatagataaaagactttggaaggcctaaaacagtttatgtcaaaatgctaatcaagtcacttaccacttaccatctctctggaatgctgtgtggttccattttatctgaatttaaaacaatatctatcttgtatggtaccgtctttcataatatgaagcttatgttttcaaatgtctaaaaatcttgtattttcatccaggaccttttttgtatgctatttctgttccctctgcccctccctcaaagtgtttgtgtctggcttctggcctgaggctgtgcttcccagcctgtcagaatggccaccctacaggctgcaacccttcatgagaaacaaaggaaatgcaaatataacagggcagtattcctgactttacaaatcatttcatcaacttgttttacttgattttcaggcaaactgcttttttcataagttggcaagagtttttggatttttctcccctctcctgttgatgatcgtacaccaaaaaactaagcaatgaaataaaatgattgtttgagcttagatgaaactttttccttaagggggtatttcctgaatcttataccctcttactcttatttttttaattaatcgttgttcactcatttcacaatcacttttgagtttctactttgtgcttagaacatagaagacctgaaagtattccatgaaaataatttatttctgtgtattgaattgatgggcaaatcttc

SEQ ID NO: 145731 - DNA, 493 bp, Homo sapiens
cttagccgcagggatgcctaggtgcttggagctgcggctgaggccccatattacttggccttggcaaaagtaaggcagatatcccataatgtagtctgcttggggcataggctggggcctggcccatgggtcttgcagagccgccgtcaatatggtgctgggatgttggaccagcgggggggcaggagcatgggctttgcctgccgctggggtgtactatgggagggacgatgcagacctgttgcggtggatcccttgatgttactagcccagcaaaagcgacctggtgaattaggagcttggagtttttccggggagggggacttaggctgggcctgaggggaagggttgggtgtattaggagggggactaggggtattaggtggaggatggtctaggggatcccatgtgctgttctctttgccaggatccccccttctctcactggttctacagtaggggcaggtgcataagggaaaagggaggacaggtc

SEQ ID NO: 145732 - DNA, 251 bp, Homo sapiens
aattgttttttatatggagacttaagtatcaaatatagtctaaggaacattacagggacccctctctgtggccattatttttagttagtaaaggggaaaaagaggccttctctgatagtcagtattaacttagtttagtagtgtctgttgtaagataatttaacttgatcaaattcaaatattaggcttagaatgagctcaggagttcaaggtcagccagagtaacatagcaagaccctgtctgtatcaag

SEQ ID NO: 145733 - DNA, 327 bp, Homo sapiens
cccagtgctttgtcatcacatcccccaagtcagttccgccacagagaagacacacacagcagaagcccattcccagagcagacgccagtgtggcgctcatgcactgactctgtcagggacggatgctggccatctgggcacccatcgtggtgaaagcacctcctgggggctgtcctttcggatgttttgaaaccatctttattgacacgtcagtcttcctaatgagaagccttcgctgcggtggccgcgtggcagggagggcctctggggaaggatccctcccaccacccctgcctctcctggcctttgtcagttcctctgccgaca

SEQ ID NO: 145734 - DNA, 316 bp, Homo sapiens
agggtcccgcaccggtggctgtgcacacgtgtgcaggaacgtgccaggggtgggtgactgcatgtgcgccttcgcttagatgtgttacgagccaagtagaaattcagcgtggcgaccgttttgtcccataatgcttttgttactttattttatattttattttaatttttttgagatggagtttcactcttgttgcccaggctagagtgcagcctggctgcctcccagaatcacttgaattcaggaggcggaggttgcagtgagccaagatcataccactgcactgcagcctgagtgacacagtaagactgtctcc

SEQ ID NO: 145735 - DNA, 135 bp, Homo sapiens
tgttaagtgacgataataagctgcacatatttagagggaatgacttaaatagttttcacataggtatgtacccattaagactgtggctactattaagacagtaaatatatccaccaccctcatcgcacttagaca

SEQ ID NO: 145736 - DNA, 1747 bp, Homo sapiens
tgtgcaaataaggtttctgtggtgagacaccagataaactcaacttcctctttcaacaacaaatgtgtcagttatcagcaggatccatgccgccagagtaaagctttctaccctttactccctgcaaagaaacaagagtgcttatcccagctaagctccagggttaaaactctatgctggtcattcccttcaggatttggcactcaccaacatacccttctttcaagtgaaaaggcatctcttttaatggtcctgacctttggaataggaagcatgtaccctggacagagcacttcaaactagaggaaccataaatccatggctaaccttgacaaatacactgaaacattcaagatgggtagcaacagtaccagcactgctgagatttactgtaatgtcactaatgtgaaatttcaatactccctctatgcaaccacctatatcctcatattcattcctggtcttctggctaacagtgcagccttgtgggttctgtgccgcttcatcagcaagaaaaataaagccatcattttcatgatcaacctctctgtggctgaccttgctcatgtattatctttacccctccggatttactattacatcagccaccactggcctttccagagagccctttgcctgctctgcttctacctgaagtatctcaacatgtatgccagcatttgtttcctgacgtgcatcagtcttcaaaggtgcttttttctcctcaagcccttcagggccagagactggaagcgtaggtacgatgtgggcatcagtgctgccatctggatcgttgtggggactgcctgtttgccatttcccatcctgagaagcacagacttaaacaacaacaagtcctgctttgctgatcttggatacaagcaaatgaatgcagttgcgttggtcgggatgattacagttgctgagcttgcaggatttgtgatcccagtgatcatcatcgcatggtgtacctggaaaactactatatccttgagacagccaccaatggctttccaagggatcagtgagaggcagaaagcactgcggatggtgttcatgtgtgctgcagtcttcttcatctgcttcactccctatcatattaactttattttttacaccatggtaaaggaaaccatcattagcagttgtcccgttgtccgaatcgcactgtatttccaccctttttgcctgtgccttgcaagtctctgctgccttttggatccaattctttattactttatggcttcagagtttcgtgaccaactatcccgccatggcagttctgtgacccgctcccgcctcatgagcaaggagagtggttcatcaatgattggctaaaattaagatatctctttaattacgcctttgtttacctacgttccttgtctttttccaaaggccagaattgtcaaccaatttctttaattgaacattgtaaaaaacaggaataagtacttttgtgtaatattcacagtcaacaggggtgtgatggtgaaggcagagtgtgaaaaacgtgagagaggaagagaaaatagatttacctgattcctctttaaaattcaagccactttcttatttaagaaacctagatcaagtttttacagatgtaaataaaagttgaatagtttaccttaaatttttttcaataagtaagttattgttaataatgcacagtaaatatgtgaatttttcctagatgtaaaaaaaaaaaatctttcatataaagaccttaaattctgagtgagag

SEQ ID NO: 145737 - DNA, 1604 bp, Homo sapiens
tgtgcaaataaggtttctgtggtgagacaccagataaactcaacttcctctttcaacaacaaatgtgtcagttatcagcaggatccatgccgccagagtaaagctttctaccctttactccctgcaaagaaacaagagtgcttatcccagctaagctccagggaaccataaatccatggctaaccttgacaaatacactgaaacattcaagatgggtagcaacagtaccagcactgctgagatttactgtaatgtcactaatgtgaaatttcaatactccctctatgcaaccacctatatcctcatattcattcctggtcttctggctaacagtgcagccttgtgggttctgtgccgcttcatcagcaagaaaaataaagccatcattttcatgatcaacctctctgtggctgaccttgctcatgtattatctttacccctccggatttactattacatcagccaccactggcctttccagagagccctttgcctgctctgcttctacctgaagtatctcaacatgtatgccagcatttgtttcctgacgtgcatcagtcttcaaaggtgcttttttctcctcaagcccttcagggccagagactggaagcgtaggtacgatgtgggcatcagtgctgccatctggatcgttgtggggactgcctgtttgccatttcccatcctgagaagcacagacttaaacaacaacaagtcctgctttgctgatcttggatacaagcaaatgaatgcagttgcgttggtcgggatgattacagttgctgagcttgcaggatttgtgatcccagtgatcatcatcgcatggtgtacctggaaaactactatatccttgagacagccaccaatggctttccaagggatcagtgagaggcagaaagcactgcggatggtgttcatgtgtgctgcagtcttcttcatctgcttcactccctatcatattaactttattttttacaccatggtaaaggaaaccatcattagcagttgtcccgttgtccgaatcgcactgtatttccaccctttttgcctgtgccttgcaagtctctgctgccttttggatccaattctttattactttatggcttcagagtttcgtgaccaactatcccgccatggcagttctgtgacccgctcccgcctcatgagcaaggagagtggttcatcaatgattggctaaaattaagatatctctttaattacgcctttgtttacctacgttccttgtctttttccaaaggccagaattgtcaaccaatttctttaattgaacattgtaaaaaacaggaataagtacttttgtgtaatattcacagtcaacaggggtgtgatggtgaaggcagagtgtgaaaaacgtgagagaggaagagaaaatagatttacctgattcctctttaaaattcaagccactttcttatttaagaaacctagatcaagtttttacagatgtaaataaaagttgaatagtttaccttaaatttttttcaataagtaagttattgttaataatgcacagtaaatatgtgaatttttcctagatgtaaaaaaaaaaaatctttcatataaagaccttaaattctgagtgagag

SEQ ID NO: 145738 - DNA, 1796 bp, Homo sapiens
tgtgcaaataaggtttctgtggtgagacaccagataaactcaacttcctctttcaacaacaaatgtgtcagttatcagcaggatccatgccgccagagtaaagctttctaccctttactccctgcaaagaaacaagagtgcttatcccagctaagctccagggtaatgttatcatgacagcttcaacttttagaccacaggcaaatgctttgttaaaactctatgctggtcattcccttcaggatttggcactcaccaacatacccttctttcaagtgaaaaggcatctcttttaatggtcctgacctttggaataggaagcatgtaccctggacagagcacttcaaactagaggaaccataaatccatggctaaccttgacaaatacactgaaacattcaagatgggtagcaacagtaccagcactgctgagatttactgtaatgtcactaatgtgaaatttcaatactccctctatgcaaccacctatatcctcatattcattcctggtcttctggctaacagtgcagccttgtgggttctgtgccgcttcatcagcaagaaaaataaagccatcattttcatgatcaacctctctgtggctgaccttgctcatgtattatctttacccctccggatttactattacatcagccaccactggcctttccagagagccctttgcctgctctgcttctacctgaagtatctcaacatgtatgccagcatttgtttcctgacgtgcatcagtcttcaaaggtgcttttttctcctcaagcccttcagggccagagactggaagcgtaggtacgatgtgggcatcagtgctgccatctggatcgttgtggggactgcctgtttgccatttcccatcctgagaagcacagacttaaacaacaacaagtcctgctttgctgatcttggatacaagcaaatgaatgcagttgcgttggtcgggatgattacagttgctgagcttgcaggatttgtgatcccagtgatcatcatcgcatggtgtacctggaaaactactatatccttgagacagccaccaatggctttccaagggatcagtgagaggcagaaagcactgcggatggtgttcatgtgtgctgcagtcttcttcatctgcttcactccctatcatattaactttattttttacaccatggtaaaggaaaccatcattagcagttgtcccgttgtccgaatcgcactgtatttccaccctttttgcctgtgccttgcaagtctctgctgccttttggatccaattctttattactttatggcttcagagtttcgtgaccaactatcccgccatggcagttctgtgacccgctcccgcctcatgagcaaggagagtggttcatcaatgattggctaaaattaagatatctctttaattacgcctttgtttacctacgttccttgtctttttccaaaggccagaattgtcaaccaatttctttaattgaacattgtaaaaaacaggaataagtacttttgtgtaatattcacagtcaacaggggtgtgatggtgaaggcagagtgtgaaaaacgtgagagaggaagagaaaatagatttacctgattcctctttaaaattcaagccactttcttatttaagaaacctagatcaagtttttacagatgtaaataaaagttgaatagtttaccttaaatttttttcaataagtaagttattgttaataatgcacagtaaatatgtgaatttttcctagatgtaaaaaaaaaaaatctttcatataaagaccttaaattctgagtgagag

SEQ ID NO: 145739 - DNA, 740 bp, Homo sapiens
cgaggcacaaagtctcccttgaggtggcagtgaagttcatgtataatgaatgttgtgttccttggcactcttttggctgcaaatgaccaaagacctaagtaatgctgttaaccagctcagcctcatcgacttttgtagagcactacatccagggagaatacacattcttttcaagtacatgtggaatatacaccaagttataccatatgctggaccgtaaaacaaatttataatcattgatccaaagaggaattctgggaaatggagagtggcagcaggataattcttcactctctctgaattcccacatgaaatagaacaactagataacataacaaaaaattcatgaacagcttgtataacaaagctagttattcatttcctaagggaatagcaaatcaccaccaaccaggtcgcttaaaacaacagaaatgtatcctctcatagttctggagactggaagtccaaaactaaggtgttggcaagtccatctccctctgaaggctttagggagggatccttccttacctcttcctagcttccggtggttgtcggcaatcctagcattctttggctgtagcagcatcactccaatctctgcctctatctttatgtgtctgttgtcttcatgtgtctccaaatctctctctcctcataaggagacctgtcattggatttagagcccactctaattcagtatgaccccatcttgactatatccgtaaagatcctatttccaa

SEQ ID NO: 145740 - DNA, 1068 bp, Homo sapiens
tagattgtcggggttgggttgaggagttttcagattaaacaaggccctgaatatcatgctgggggcttgacttcaattctgaaggcaatggggagccactgaaggtttctgagtagtcaagtgacattttgggggtgtaattttagacaaggtttgaaaatagagtattgaaaattttatatagacaatgggctctcagacaaatcttcttttcctgaaaatgtccatgtcgtatctcttgattgatttgagtgtgtctcatttatgagtggagggtgctcccaaaatttgtcccaaattcaaagcagaacttcttaatgtgtggccccattgaggtgatgttccaaagggcagccagacgttggcctgcagccctaacactccctgtgccctactctgtctgcattgaaactccctttggagcacccccctcacaccatatcctcaccccacagcatccccagctggtttctgctctccctcaccagggacacctggtctcctctctaacaatcgagctggctacttttcccatggttgtgggacttgcgtcacatgtccctctctccaagcttacttcctgccccaccctcagctcctccagcagtcctcagaccacgctactcctgccaacctgctcaggtcggtggtgatgcctcatcctccacacttggcttctcatcttattcctggcttggctcctcctctggcttttgtccaggagagccctgggaatgtccttgggaatgcctgttcctgacctccatccgtgagtgcctacagcaccccatctagttgcatggtgaatgagtcccttctcgtctctgccttaaaaccccttccttagggaagtcttccttccctcattatctcatttaagcagatgcccactcgcttggttgctgtaattattctttgtttcttccacgctctgcctcaccattttctttatctgtttatgtcctcgtttaatgtctgcctttcagccttaactgtccatcccatgaggagagagacttatcttttttattcaccactttttcctagagttgaccacagaagcttctg

SEQ ID NO: 145741 - DNA, 327 bp, Homo sapiens
cagcggcagacgatgacactgggtacctggcaccatcactgtgttctctggcagcagctccagttcattccattctttaagtattgcctcttacgcaagtcctttacctgttggaagaagaatgtgagattacaggggctgcatcgactccagaaattcctagagaatatctgctcttggctgtgccccactttggagctgggctactccatattagcaggcttctgcaggagctacactctgtgtcctggctaccccaggaactggatcggtgctatgagctgctggacctgcagacggctctagccgaggagaagcataaggctc

SEQ ID NO: 145742 - DNA, 169 bp, Homo sapiens
tggatggatggatgaaatggggtaagaaagaaaatccttaggatcattcctcaaaaaaacaaacagcagcctaaagcagaaaatggatgaaattacacacctcctgtgctgtaagtaagttttctccttccttcatgctcttttaatgcttcctcaaattttacctttt

SEQ ID NO: 145743 - DNA, 385 bp, Homo sapiens
cagaaatattagcaattgtttcattacagatctgtcacatgtttcaatctccggctcaaaagagactattaaattattgagggaggaactaatcaatatttaaaaagctttctatatcatcagtgcttagtgtagtgctagatacataataggtgcacgagtgtttgttcatgaatgcattattgttctgaagttttagaacagttaattttctctaacaaattaatttaactcttatattctattcaggaaactaagctttagtactttagacaaattattcgtatggagaatttcagtgaagtttcaacataatggtggctaatatttccaggaaatattataggattttgtagacattattacaccggcagcatgactcact

SEQ ID NO: 145744 - DNA, 473 bp, Homo sapiens
cttaaccatgacgatatgtgaagtcctggacagaccttcttcttctccttcttccttcttcttccttcttcttccttcttccttcttcttcttcctcttcctcttcctctcctccttctccttcttcttattcctctgctattctccatttctttgtactgttagtttctgaaaggttccctcagaattttcttgcaccctactaatgaaggaaggtaggtgttctaccctggcttccagactctccccagcaggtcgggttcaagttgcccctggtggtaactggcttgaagatgcgcccattcctggtgacttcctttccccgtctcactttcccgcatccctgtgggagttctcttcaccttttgaataagctagttgtacttgaagcctcaccttgatgaggccccaaaccaagatactgtgtactaagtcactttcactgagccttttctttcccgttttcaaaattg

SEQ ID NO: 145745 - DNA, 512 bp, Homo sapiens
agtgtgagccaccacgcctggccattttacaatgaagttactcaagttttaaatctgtcatcaaaacatttaaaataaaagttcttgggacctacttccactctcccacccaaatcggctttgtcccctcccagctgaaaccctgggtgacacatcccgggccttctgtggctcctctccctgtgcactgttttctcaccgccgagctcacggagagactggttcaggggtgccacctccttggtctcacttaacattgtcccctgagccctccccagcagcagcatgggttgagcatcaatactggagtctgctgaactgagtatgaattctctgagcaagtctatgcctcctgtggctttcatcttttgtaaaattaagacagcaaggcctacctctgatgaccacggggaactcatctgaaaggcttagcagtgagtgatctttccttcctctgcccccctccaccagctcctggcctcactccccaccccaaatccaacccaacattt

SEQ ID NO: 145746 - DNA, 340 bp, Homo sapiens
catggttaccgatcacgagtcctggaaggggacaagcagggctgtttcaggacctgtgcactcattcaccatccacccatttgtccacccgtctatgaatccattgaatgtagtccgagacctggctctgtgccagttcacacctagaatgagatccagcccctgcctccgggagctcagggcctggttggggactcaggcaaggaagcctctgtcacacatgggtctgggcagggcttatggctgacccattcattcatttactcactcactcaatcaaagaaggtaattcttcagtcccgtttatatcctgggcaccgtgtggtgccggcggtatgat

SEQ ID NO: 145747 - DNA, 687 bp, Homo sapiens
ctcttttaaaattagggtctgtgaggacactcgggaccctcacagggcaaccagagcaaggaaggggcggccagtgtggagctgtgcaaggtgggggctgccctgggtggaagttgagagagtttaggtcaggcctggctgggttgaagcggggacccttgagggactttgctgtgtcagcttcagcttcccggtctttaacagagggaggcctcctccctggcaggataggtgaggacttggtcattcacaaccaagtcactgctcctacaggcagacaattccagggacacgtggggtcccctgtgttagtgtaggtgaccttactgtgggcacctgtggagtcccacctactcattgtaacacaggccaggacataggagcctgtaccagccccgaaaccccaagagttcaggcgactttgctcacccccagggacgtggcctggaccgtgcctcactccctgcctggagtggcctcccacagccatcccaagagtcctgggttagtcctcgcctctggctggctggattgtcacttacaattgtacctgggtgtggccgggtgcagtcactcatgcctgcaatcccagtactttgggaggccaaggcaggcagatcacaaggtcaggagattgagaccatcctggccaacatggcgaaaccccgtctctactaaaaatacaaa

SEQ ID NO: 145748 - DNA, 626 bp, Homo sapiens
ttgcatcatcagcggcttttactgaacttacaaccaacttgccgctcaatatgcagctcagatgtgagaggcgcgtctctgtacaggagcccgtactgtcttcaatcctttgcatgcaggtgtttaccacaggcaaacagtttactccacattttctagtaatgtaatcttcctattagcaaaaagcagtaaccagtccctgtagactgaagggactcaagtcacaggatgcggatttcctcttcatggtttttattttgatatttgaactgctgatgcaacatataagcagggtgttcaggacctgctgtgcctaagggactgataaagggaaaagttctatttattctttgtgatttgatgcacagatgaaaaacttaacacacaataatagaagttggtcgttagtaaatcacaccctagtctttcagagcttccgtaagcagacgacattgtcagttttctagctcttgttttaacactgcaacaacaatgatgcatatgtccggaatcagctaaaaaggccgtcagattctttttctcttagattatctatttttcactgttcccaagtatatctgaataattaccttccggcattctctgctattgctcgttgggatgct

SEQ ID NO: 145749 - DNA, 497 bp, Homo sapiens
atctgcagaatggcactgacaaggcctgcctcgtacggttacgtgagggaggggtgagttagtgcccagcacgggcaccctccagtgcttgcctgtcaccacccacaagcactggagcactgccatggtgcagagctggggtctaggtctcaggtggatctgggcgaaagcctcacctacaccccggattgacaagccacgctgtgccgactcacggccacttctgagcctcagtctcctcatgtgtaccacggcaccagcttcaggtttgaataagagaggacacaccctgcgacacactccatgtttcctggagtcaaagccaaattccataccatggcctgacctgactggccctgtctgagcttctgccactggctgtgcccccataggcctccttgccatctctggctcacgctcctgcctggggcattggcactgactagtccctctgcccggaattcttctcccagacatctgcttggctcgctccctca

SEQ ID NO: 145750 - DNA, 213 bp, Homo sapiens
aggctggccacaaagtacagttcaacattattttacccatgacagttctccatattacccgaggtaatagccaagaaagaaaaagatgaatgatctaaaaggaaagatgtaggacttctctagatttctttctagaaacatgcttcatgtctgtttcaaacagaactcaactccaacaatataaaggatatagtgaaaggtttttcacaaatc

SEQ ID NO: 145751 - DNA, 321 bp, Homo sapiens
gccatctcttgataatggaaacagctgtttaactgaactgatctagtcttaggactaggaaaactgactaaaaagataaggatgagtatatttaaatttcctctttcctgtctaccccaatctgtctgtctaacaacctctgacccaaatctctctctgctagtaaccccatgtctgattggttcttggagctatttacctgggtccctcagagcttaggatcaattctacaaaagcttctgaagccaggactttcactctttatcctaggactcatttgttaaaactatagatgagaatactaatgcctttgtcatgcag

SEQ ID NO: 145752 - DNA, 473 bp, Homo sapiens
  misc_feature (235)..(235): n is a, c, g, or t
tcaatttaggtcagttgctgcggagtttgaaacgagttaaaatttcagcagttcacaaaatggatgattcatagtttagtcgagccatcatctgttgatggacagtcatgtggtttcttgttttttctttctctgtgtttcactaatgaaacaggattacagtaaattgactcgtgtatgtgtatacatccatctttgctggtactatagaaaagtgtattgctggctgggcatnggtggctcatgcctgtaatcccggcaatttgggaggctgaagtgggtggatcacctgaggtgaggagtttgagaccagcctgaccaacatggcaaaaccctgtctctactaaaaatacaaaaattagctgggcgtggtggcagtggaggctgaggcaggagaattgcttgaacccaggaggcggaggttgcagtgagcctacatcgtgccactgcactccagcctgaatgacagagca

SEQ ID NO: 145753 - DNA, 564 bp, Homo sapiens
gctccggccctgcacaccgtctccacacctgctgtgccctgtcgtcccccattgtcacctccaagccgcccttcataccagcgtggtcaggaaagctcttagcaggctcagattgtccgaccgctaatcacgcaggacgggtcacctggtgcctctcgcacctttgccttccaaaccctcgcgcccaggccttgtgaccgttccgcaaccgtccctgccctcccagtctctcctcctttgtcctccatccttagagaacgcgaggtctctcccccccatgctactgcaggctctcgcagagactggggtcacaagttgaatatacccccgtggacgtgttcgccctggcctaagaggtattggtggccagtggggacgggctccctctctgatacccctagaggcagctggagggttggagtggcctccctgtgcactcaggcactcccaacttgcagccctgggctcaggctcacacactttcccagctcctttgtgcattccgcacttctaggtccctggactcatcccaaagtccctgacattcacgttaaatgttcctgg

SEQ ID NO: 145754 - DNA, 445 bp, Homo sapiens
acatccagaagggccacctgatataaaacaaatagcaaaggggcagccatcagcaggcctgccactgcctctccagacgacctggaccggcaactatccaaagtcttccacttcccccagatattctgccaatactctgcccaaatgcagggccactcacacaaacaggaggaaagaacagggtgtcttatagtccaggagatctcttgacgaagctgccagagaaacgtgtccatcttgggcaggcagaaggcccaggcatggcaaacacaggctccagaatccagccagagtgcctgcctaccgctcaggaggcggaaaaaaaaaacaactaaagaacagggaattgatttgatgtgggcagtgagaattcaccaggttttcagaccagcaatcatataaactagtggggatcagatatgtcagaacagaggggagaactcct

SEQ ID NO: 145755 - DNA, 371 bp, Homo sapiens
attcacagttctgcatggctgaggaggcctcagaaaacttacaatcatggtggaaggcatctcttcacagggtggcaggagagagaatgagagctgagcaaaggggaaaaagccccttattaaaccatcatcccccatgattcaattacctcccactgcatccctcccacaacatgtggggattatgggaactacaattcaagatgagatttgggtggggacacagccaaatgatatcagttactttgttgattttctgtttagataatttgtctaatgctatgagtggggtgttgaagcccctcactattattgtattgcagtctacctctgtctttagacatagaaattttttttaatgaatctggttg

SEQ ID NO: 145756 - DNA, 724 bp, Homo sapiens
agtggggagaagaaaaaagttgggggtaaaaacagcaagcaagcaaggttccagtctctaagcccaccttcaattttagcagccatgctttttttcccccgtaagttttaggtttagggtctgaacaagattgttcttgaagaaaaagcacgacaacttgaaaaagactgataactaagagtaatgaactaaaaactaagtacaaaatttcttggttcttttctgtttccatgtgactctgtaagacagtcacatgtggaaatctcccaaccctcgaaaggttcacaagctaaaactcacctaccagctaaaactcaagtaatcaaattataaagaccaactgaattacaggctgtcaatacagccatgtccagtccccagtgctaacatgcagtaacaactagccaggtgaggtaaggttaaggcaaatgggagagcagctctgtctatgaggagcccagggatcctgaatgcctacacaagacttcctctttccattctctcaatagggatgttcaaaactctatcaagagtctcatcaaggacatgcttatttaaaaatataacaagactacttatgcatgcatttttcctaatgttttatcttttgctggaacacactactatcagttcattctaaactttattctgctttctttttactatagttattggtagatttactatctaccccccaagcttgcaggtactcagctcgagtcgt

SEQ ID NO: 145757 - DNA, 197 bp, Homo sapiens
catggatttgctggtgcagtacaactaggcttaatagggctcgaattcgagcattgtttaaggtagaaaaaggttataggttgagtgtagtggctacgcctgtaatcccagcactttgggagactgaggtgggaggatcacttgagcctaggagtttgagatcagcctggacaatgtagtgagaccctatctctaca

SEQ ID NO: 145758 - DNA, 468 bp, Homo sapiens
ggccttccaaagtgctgggattacaggtgtgagccaccatgcccagctccggtgggggatatttctatatccacatgtgtatagtttactttataaaaatggtatgttactctgtgcttggctctccagcttgctgttgcctttcaccagtgtatcccagacatcctttcttccttgtcagtaacgcaggtctactttattctttgagcagtggcataattttccctgatgtgtatatatcataagttagagaatgctaaaattcattttggggccttgtttaggttcttgagggattaaattcctaaatttaacaagtgtatcctggaaacaatttttgttcctgattcagcccttaaaagaggactatcatgttaccttgaatggagataaacaggctcacgtaagagaaaagggtaagagggatgaactcccacttatcttaaacttctactggcccgtttttgg

SEQ ID NO: 145759 - DNA, 328 bp, Homo sapiens
cccaacttgatgccagaaccatcagagatgcttgtgctgaataaaattccccaagacaattgccaagggattgcaacacaccaaacatgattcctgtaatacaaaactgcatgagttagaccatactaaatgaagatttttttccctgggggaaaaaataacttgctttgggtgcatttgtatttcattaaaactgatgaaaaccctctaaacgcgacatcacgtcgtaagactgcattccccatcatcctttgcctggttcagaatggcatttttgccaaaggtccttcccacttgcacatgcagctaacactgtctaggaggtctc

SEQ ID NO: 145760 - DNA, 159 bp, Homo sapiens
atgaatagccaacagagtacttttcaaataaactgaccttttcctcaccaatgtccttctttgtgttttggtgaaacaaggcttttgtggttctccttcagggccataatgagggaatgtgtgaataactttataatttccactttcgcagtacttagg

SEQ ID NO: 145761 - DNA, 220 bp, Homo sapiens
aaaatatgctttgaactattcagtctaaatgctgctttctaaaaagctactagtttaaagaatgggaaatggtgttaatggagttaatcttgtgtaatttcagtgtgggttgtcaagaatacctctaagtaaagaaaatgactctaatcttcttaagcaattcattttctcagcaactttgaggcaggagttaatttactctgcctgtgtacataggcca

SEQ ID NO: 145762 - DNA, 834 bp, Homo sapiens
catccttccatgcccttcttgacactgatagaaacataggtttacatttatgaggttttttccctaatttgatatatgtgaatgtctattattcttaatctgttgctagatattcagattttttctggttctcctccaccgcaaaccatgtagtaactctctttgtacatgtatctttaataccagaatgggcctttaatagatatttgctgaatagagcaaactgaggcacagaatggcatgaatgcccagtcacattgttagtttacccaacttttttttcttttttaaccactgtttttttgcagtagtctaaaggcttctctagcttttacttgaaaatcatatgaaaaattagaaagcgcccagactttgaaacctgatgtgggttttaattaggtttctggcacatactagctgcactttatgtagaggacataaaaaactttggtaaatacggttgatttttgtattgtgatgataatactggctaatagttggtggacccttaaagtgtgctgagcactgaattaaattatcttctacattatctcattaattcctccaaacagctctgtgagtgtgaggaatgtagagtttaaatggctgtattgctagtaaatgtaggagccagcattcaaactctggcagtttggagcccgagctcttaaccactacacgattactactgtacgctagagcagagtttctcaaccttggcactgttgatattttgggccaggtattactttgttgtcaggggttgtcctgtgcaacgtaggatatctatcagcatccctggcctctaccaaatagttgctagtagcctctccc

SEQ ID NO: 145763 - DNA, 779 bp, Homo sapiens
gcggccgcgaggggagggggagtcccgtctgactgagacggcaggcctgggcgggcgggcgggggtgccgcgaagggcggagcgccgggctggggatgagctaagcgggctcagagcgccgcggcattcagcccctcgtgttccgctaccgcgcgtgcgggattccggcgccgctctccgagctcgatccgctgctcgcacgggagccagctgggtgttatttctcaaactctgaggctgcggagttcacacattgaaatctgtcatctttttcagagagaaactttcggtaatgtatgtaaccttctgtaatggaagatgattgaagacaaggggcctcgtgttgctgactactttgttgtagcaggattaactgatgtttcaaagcctctagaagaagaaattcacttcaatgatgcttgtcataaagtagctaaaccaaaagaacctattacagatgtttcagttattatcaaatctcttggggaggaagtcccacaggattatatctgtattgatgttaccccaactggattgtcagctgatcttaataatggaagtcttgtggggccacagatttacctttgctatagaagaggaagagataagcctccacttacagatctgggggttttatatgactggaaagaaagattgaaacagggttgtgaaattattcagagtactccctatgggcgccccgcaaatattagtgggagtacctcatcacaaagaatttatatcacttaccgaagagcctctgaaaacatgactcagaa

SEQ ID NO: 145764 - DNA, 336 bp, Homo sapiens
gatttccagtaactttttctaacagctgtgtaatataggttgcctgtcttgaaccctgtttcttagaaaattgtgaaaggtttcacagtacaatagtctagaggcataaagcctctagatgcattagtttatgcattctttctttcattcaaagaatatttgttggattcttctgtgtcatatacttagccaaatgctgagtacagtggtgacatagttcttggctttgtggtgcttaataatcctagagatggacaataaataattgtaacaattgcaataaatgctataatagttaaggtaaacaattgagataagtgctgtaagagtgcacca

SEQ ID NO: 145765 - DNA, 367 bp, Homo sapiens
accaaatagaacttttgatagtgaaaaaaatatatagtcattaaaattaaaaactcagtgaatcaaggcgggcagatcacctgaggtcggaagttcgagaccagcctgaccaacatggagaaactccgtctctactaaaaatacaaaattagctggacgtggtggcacatgcctgtaatcccagctactccggaggctgaggcaggagaattgcttgaacccaggaggcggaggttgcagtgagccaagatcatgccattgcactccagcctgggcaacgagcgaaactccatctcaaaaaataaataaataaataactcagtgaataaattgtctgtggactggacaaaactaaagagaaaacaaa

SEQ ID NO: 145766 - DNA, 187 bp, Homo sapiens
cgtaggaaacattcgtccaataacgtttccccgccaccttctaccttcctccagctgccgtaagaaacactcacccaatcacgtttccccatcgagctgcctgccgtaagaaacactcgggttctgtggtgccttcaggtgttcacttcttcatggagcttccgtgtgacgtaacacatgctaaata

SEQ ID NO: 145767 - DNA, 375 bp, Homo sapiens
gtggcttccacacggcacccctgcttcctatgctctttccacctgttaaatgcctttagtcttaacctttggtctgaaagaatccttcctgctagttcaaaggtatctgaggttaaagcaaaggaaagaaacacacatacacacagaccctttcatattcaaccctggtcagaccaaccctccagacaaaggttcccattgttgtctaaaaacatacttttacacagggagcctagggggcctttaaacagccacaagcgccaaagtctccagactcctctagttctcattcccattctgcccctaaccttggcacattctcttctccttctcagggcctcacgcatcctcatctataaatgagggtttcagact

SEQ ID NO: 145768 - DNA, 713 bp, Homo sapiens
tcactcctccccagccaaatttaaacaaagaaaaactttatgaaaaaaaacaataagaaacttgttttctccatgtgggtttcataattctattcctgatatcattttccttttattcttcaatgacttgaaactttgatgtttgactcaaccccctcttcatctgccagcatcttccaaactatcttttgcctcttgctaccttccctgttgccagaataatattccctaaactctgcttttatcaagctctactcaaaaatgcctaatgatttcctagtactttcaggaagaaatccagatttctttacctggcatatttcgtatacaatttaggttctttaattttagtctatgtactccaaaaagaaaaaaaattgttaacagagaaggatagattgttacttagggagtgtggcattttgttagtattttcccatcgtacaaaatagcaagcactatgtctgaatagctactaaagaacagaagtctagaaaataaaaatgaagagatctatagaaagttgataattgctttttttctcatttttgctgtcagtctactttttgtgatttacctttactggtgtaaattacttttataaatttataacttacttttataatttacttctgttaatctttctcactcttaatcactatcttttttatcaattttcttcttttttccttttctgcattccctcttactca

SEQ ID NO: 145769 - DNA, 568 bp, Homo sapiens
gagctatccttcatgccccagggacagagacaaagcctactagaagtgcctcctgacctcagggctcgcactttcgcacattaatctggaacaaacgatagggctcaagcggataggataggataggataggaaaggggaaggaagatgtttggggaaatgggcttagttatgagtttgttaggagccactgtgcttaagcacttgccgtgtgtcaggtgctgtgctacgggactgcgcacagggctaaatgcgtcctcgtcacagtccttactgcacggggttgttactgccttcagctcaaagatcaggaaactgtacaggagtcaaatgtcctgccctagttccacatgagaacaggatgagtgcctgggtctgaagccaaagcccacagacctcaagagctgagcacatcagcccagtcgtgcgtgggtgttcaagtctaaacagagggcataggtgacactgacaatgacaagccacgatgcacaatgctttttttttgttttgttttttgagacagagtctcactttgtcgcccaggctggagtgcagtggtgtgatctcgg

SEQ ID NO: 145770 - DNA, 254 bp, Homo sapiens
agcaataataataatgtctcattaggtgtaaaatatatgtgaaattaaaatgagtaataataatatacatgcaagagtagaatggaggtaaatagagattgagtattgtgagatcatagcattgtctgggaaacaataaaaagtaaaatttgtattagattataataatgtacagaagttgtaatctgtggaggaaaccactgaagaaattataaaagaatgtgtaagtagaaccaatggtagggggggaaacg

SEQ ID NO: 145771 - DNA, 346 bp, Homo sapiens
tctgtaaactccacatggctctatgacaacaacacagtgttcaatggtatcacggtggtgaaaagagcacagattcttaaatcagatataacagaattagaatctgcacttcccccttacaacctcatcatctagggcaagttgagttaattaacctctcaaatttctaattcatcatctggaaagtgtacagaataatctgcacattgcaggatgcggtgaatattgctaggcgctcaccaacatctgctctcccttgctcccagggcacaggcctgaactacgtttcccaggtcctcccccaacccctggaatcaggcacagctacgtgactaagttcgctcca

SEQ ID NO: 145772 - DNA, 142 bp, Homo sapiens
cagctcttatacctagaggggttcggacttggtggaagggtaagaaagagttggggttagtctaaaagaacacagcataaaatggaatattaactatccccgctctggggacttcctggtctctctgttcagcagccttgga

SEQ ID NO: 145773 - DNA, 199 bp, Homo sapiens
ggattgcttgatgccaggagctagagatcagcttgggcaacatagcaagaccttgtctctacgtgcacctgtagtcctggctacttgggaggttgagatgggaggattgcttgaacccatgggtttgaggctgctatgaggtatgatcacaccactgcattttagcctgagagacaggagacagtatctcttagcaaaa

SEQ ID NO: 145774 - DNA, 587 bp, Homo sapiens
ttggaattactgttctcattgcacagaagagaagcatgcacagacagtttagcaatttgtctgaggacacggtgagtgagtggggagctgggaccctggagctcatgctgactgtccataccacaaagtcattcaatgaggataaggaaaggctaactaaagacatgtttatatgaatactaagactgcattttttgagtgcttcagatacggaacagaaagtgctatctgtgaaaaatagtgacactaactcattacatctttaattattacctaattgccccgtaagtccatggcctagtgttacaatgcagttttccagatacatgtaacttttgcaatcaatgattataaccagaacattttttcactccactgtggaagttcaagctgaaagtgaactaaaatttagatggacagttaatgactttttcctgcagtcatttagtcaaatatttactgagcacccataatgtgttctagacatgggagatagagggtctgtacctgcagggagcttacgttctagtgaagcaagacaaacattaagaacttcaggaacagataggctccttgaaggacaaaaa

SEQ ID NO: 145775 - DNA, 213 bp, Homo sapiens
ctccagtctcagcttcccaaagtgctgagattacaggaatgagccaccgtgcctagtccaattgcctatttgatatattaatgtggacctgtaatggttgaacttaacatgttcaaaatggagcttagattcatgcctttccagtctttcccatctcagtaaatgacaccaacatccatctagttgctcaggtcgaaatttagaagtctccat

SEQ ID NO: 145776 - DNA, 462 bp, Homo sapiens
gaaaccctgtataatcctcgaaccctctctctcccacacgtcacgtgtccaattcatcagcaaacatggccggaacctgacacctcctcaccacaagcccctattaccaccattcctccccgggtccctgcagcagcctcccgacaggcttcgctgcttggccttgcacccttcactccattctcggcaccacagccagggattctgcacagcctcctctgctcagggccctccactggcttcctcttttgctcaggataaatacccagctccgggaagtcatcagcagggccctctcccctctctgccctcacctcccactcctcttgctcactccacctgctccacatggtcccccttcactgttctcagtcgtgctgggagccccaggcaggcctctgcccctgcatctccctttaggtttttaaatcaaatgtcacgacctcagtggggactggccca

SEQ ID NO: 145777 - DNA, 456 bp, Homo sapiens
caaaataagtaaaattcaaatctaaataatagtattacagcaacaaaatagaatttaaatgtttcatgtccttaaaagaaatataaggtagtatgtaataatctgtctgtaacaacaaactgtaaacaacataacgatccatgattaagcctgcttcaatatatcacaacagacctacatgtgcttacataactacctttcccaggtaagtttttaagtaaaataaaaaggtataggcaaatataatatgatgctatttaagtataaatacatagaatttttctaaattttaaaccataaactattattagtggctattatgagtggtttctatgagaaggctttttaaccatgttcaaattttatattctttaaaccttaaagacaaaaattaatgtaaaataaatgaacatgttatttactctcacagtaataaaggaaaaaaatggcaaaaat

SEQ ID NO: 145778 - DNA, 278 bp, Homo sapiens
ccaaggagagtccggtcttcctccacgcaggggagggggagcaggggaaggaaggagagacattaacaagatggaatctgtaggctttggtgcaggacgcttacggggaacacggctcagggagttggattccagattgcttttgaagccttccccaggtcacatcacaccgctgttcccagccgttccaggtcttcctgttgactgtaggatcaagtccattcccccaatctgacctcagtctacgtttttgggctctttgcccactagtctcctaa

SEQ ID NO: 145779 - DNA, 573 bp, Homo sapiens
ttcagctcggtaccgcacgagttcggagttgtattatctgacattccccaacatggccctgaggaaaacagagcctatcaaagtataaactgagttagctcagaacctgtttggatgaagccaacagaaacacaaacaagcatttcttctacagtaaactgctgttgctaataaaccatgctagcgagtattcaactgtctaaaataaatctaactcaaaagaactaatcttggctgggtatggtggctcacacctgtaatcccagaaatctgaaaggctgaggcgggtggatagcttaagctcaggagttcaagatcagcctgggcaacatggcgaaaccccgtctctacaaaaaatacaaaaattagccaggcatgttggtgcacatctatggtcccagctacctgggaggctgaaatgggaggattgctggagcccaggaagtcgaggctgcagtgaattgtgatcacaccactgcactccagtctgggtgacagaaggagaccttgtctcgaaaaaaagaattaatatttgcaaacagaatttaaacgaaaaaacaaacttaactgtgg

SEQ ID NO: 145780 - DNA, 513 bp, Homo sapiens
acaaaaaaacaacttgctaaacaacatatgtttattatttggtaaattataaacaataaattcaaaactttaaaaagaaaacattttattgatagctcactgaatacaaatttataaaatattatttatgcattaagtttcagttacacattttcacccatcattacagatgtcatatggagttgctagagtatgagaagagcttcttcatcccaacagctttcaaagtgaagaggcgactcatgcctgtaatcccagcactttgggaggctgaggcgggtggttcacttgaggtcaggagtttgagaccagcctggccaacatggtgaaacctcgtctctactaaaaatacaaaaattagctgggcgtggtggcgcacacctgtaatcccagctactcaggaggctgaggcaggagaatcacttgagcccgtgaggtggaggttgaagtgagccaagatcatgccactgcactccagcctgggtaacaaagcaagattctgtctcaaaaaaa

SEQ ID NO: 145781 - DNA, 396 bp, Homo sapiens
acaaaaagaagcagttaaaagatttggcaattaggtcactagcgacctcagaagagatttgttatagtgttgacagtgcagatcagacagtggatttctttctaaaagtatagggaaaagaagaaatcgttagaaaaagatgcagagattctggaggataaagcatttttatctcgatggaggataaagcactgcagactaatgaaaaagccagaagagggaagtcggtgaagagaaacatagaaattcttctagtcattaccagataagcacacactaagtttaccataccaggtggtggcagcaaattcattatgtttggtccatataaacagacagtttaagaattgcagctgctattaactgagcacctactattggccagctgcataccct

SEQ ID NO: 145782 - DNA, 281 bp, Homo sapiens
tgctgctgcaacctgatatagtggggccatttcgggtgaggtcccttttgggctggatgtcctgcccagtgccacaattcttaggccttttctcaaacaggaaattcaccactttcttggcctcctgcttcttcacaacagcaggggttggagccaccttcttcccctaggccttctttccttttggcatcttgggtcgggggaggagagcttctttgtcagtttcttaactggattactagtttcagcgtggagcccagggccaggaaagcatgtcgttt

SEQ ID NO: 145783 - DNA, 221 bp, Homo sapiens
ctgatgaacaggtttacacccaaataatttgcggtgtgtttttacggtggtggtggtgttaatctttcaatggacattctacagagtgcttctgtgtagctctgttttccagtgtggaatatccaacaatgaaacagcgaaatgaactctagcggaaatgattctagggctgcccaggacctgtgtggccttcatggaatgttagaatgttgttgttatct

SEQ ID NO: 145784 - DNA, 564 bp, Homo sapiens
ccctctgaaagttttttgatcagttgtttaatgggagatctgaaatgttaaactcagaccagaaagaagagaacctgttttctagaaattaggtttttaatccaagtaagatgcaagcttttgcttttttaataacttgtatagctaaaaacttgacggtgaaaagctctcagatcaaagctgatccttctgtcagtaatgattctaaaaataagcaagattttaatggggaatatattttatttcattcttatctcaaacctaggtactgtggtcgttttgagttcatttcgaggcattttcaatgtgcctcaggccacatccaacctcttcccagggccagatttaatgttcagcctcataaaggttatcatagttttaacatttaagtactattttgcagtgggtatataccaaaatttgctaatagtaagataaccttagttatatatcattcacgttaattctatcttggaggcaataaacatttcttgttcaagaaattcatgttctatcttggaggcaataaacaaacattttttgttcaaaattagggctacccta

SEQ ID NO: 145785 - DNA, 317 bp, Homo sapiens
caggctctcaccccgattgtccttcaggtcctctacccaccacactccctatttcttccaatgaaattgtccctgcttctttttctccatatcctcgctctccttgcttcccctatgacatttctcctctctccacctcccaaaagtcccctcggtcttttctctgtttcttcctgttgccttcattcccctccttttaataaagtgagtctggaaccttggtttcccttttctctctccatgtgactggtgctgcatgcagtttgccctctccccatcgcgctaagtggtttcactttctccctctgaccctcggg

SEQ ID NO: 145786 - DNA, 350 bp, Homo sapiens
tgatgaaatcggggttgggggagaactccactgagctatcatgagtgacagcacacaccacctgacaggcaccagagggtgacgtgttgcctctgtcacagggaacccgggcactcgcggccttctgccttccaacccaggccaagcatggctttgcagagcagtgtgcagcagatgtattttcttccttcccatctgccctgacaaaatcctccatcctacctacctcttgcctatattccagttcaccttcttctctgcagcatccttggagcctcggtactctgagatttcagatatagtgaaatctgcaacccaaggaacacggcaaagccaaaaactaaaaagcc

SEQ ID NO: 145787 - DNA, 378 bp, Homo sapiens
tcctgcctcggcctcccgagtagctgggactacaggcgcccgccaccaagcccggctaatttttttgtatttttagtagagacagggtttcatcgtgttagccagggtggtctcaatctcttgacctcgtgatctgcctgccttggcctcccaaagtgctgggattacagatttggacaagattcttaattggtctaactctgcctagatcctcatttgtcagtgctttacatgtgatttcagcagttctccagtatgctttatgtgacttcatgaagtttttttttttgagacggggtctcactctgtcgcccaggctggagtgcagtggcacgatcttggctcactgcaacctccgcctgccgggttcaaacaatt

SEQ ID NO: 145788 - DNA, 453 bp, Homo sapiens
actcagtgctcaagtgtcttattgggggctggtcatgtaggaacttctgcctgccatgtacccagattctggactcccagtagaaagcaggtgttcagcataagccactttatttgtacaggctcagtaccagagctgcttatatcaccagaagaaaagttttacatcagcctagagaactgtttactgttcgggttcctagacgccattcggtagggtcaaccttgcaagcaggcctttctaaggatatagaagtctcaggtcagctgtgttaactgttctgcacaatacttagtaaatagttgtgactgagtgaatctaaatgaatcagcccagtgtgactgcagggcctggagaattggacctcaagactctcaaaagctttagggtaaccccctccccccaaccgccttgtcatcagtctcaccctcagatagacaaaagtgagagtgg

SEQ ID NO: 145789 - DNA, 502 bp, Homo sapiens
tcgagtctttaccaccaacaatttgcaggacacttcaacgaaaaaaaaataaataaaagattttagatttctaaatctagattaaagcttttagaaaagatgaattctggacatgactgaaatctagtaaatgaaaaggagtttaaattagaaacagtaaagagaaaggattcctccacctttcagaccctggactttaaaatgcatttgatccaattattttcagaatggaaaaaggccacctaattatagttcagatgaataaaaatctactggggagaagagccttgaagtatacatggaagataaatttagagctcacaaaacagaaccccttcatgtttctcatactgtaatatcaggtcagtttctactatttatactgcactgctgttagagctagaccttgcatatactacatactactcctctttaatcacttaaaattataaatggcataatggcatttagttctgccacctcctgcaaaaactgcttcact

SEQ ID NO: 145790 - DNA, 496 bp, Homo sapiens
aagcgattcttctgctttagcctcctgagtagctggggttacaggcacgtgccaccacgcccggctaattttttgtacttttagtagaaacggggtttcaccatgttagcaggctggtcttgaactcctgatgtcagatgatcctcccaccttggcctcccagagtgctgggattataggcatgagccacctggcctgtgtactcttttattttagtttacattatctgaacattagtggaaagtggtgggaatagttaagtgttttgcccttcacttgttgcctattaaggggagcacagttagtatatataaagtcttaggagaaaagagatagctgttgagttaagctttgaaggataaatatgggattgtaaaaggcctcttagacagggaaaagcataaataaaggtacaggaatcagaaacctggagacctttacaagtgtgactagaatgtattgtccttggaagggaatctgggaggcagagctagaa

SEQ ID NO: 145791 - DNA, 234 bp, Homo sapiens
catcttcttgggtaggcacctatctggtattctcagaatggaggaaagagagggagagaataagtatgtaaatacatgcattttctcctattgaaaaatgcttaatgtcaaatactgttgacatggcaggagagcttggctatcacaagctactcagagttctgttctgctatcagtcaaaaattatgctgtacccaaagagcttgagtttatcacccttaggggtggtcttca

SEQ ID NO: 145792 - DNA, 357 bp, Homo sapiens
ttagcatgaaagagctggatggtcaataaaactaaatgatactagaggtaaagaaaggaagattggactgctgggtgtgaaactaggaagcctgttaatctgatggagaggcctcaacagggtgccagaggaagaagtcacgccaaggttgattaagaaacaactcaactagctaacaactcactgcacgtacccctaccttgattaagaaacaactcaagctagcagctcacgccagcagctcacgccaaaaatctaaatatcatcgattcctctcttccacttactgccacctcaactcatccaatccatcagttggtcctgttgtttttgtctccaaaatataacatttctatc

SEQ ID NO: 145793 - DNA, 460 bp, Homo sapiens
tccacacagctctcagggctcttggagctggctgctctatccttcctggactccacaaccagaaacacttttgagcctgtttcatctttaaagtgctgccagggtaaacctcacaagagttcctctcagcacacccactctctgctaacacagattccttccagaggtatttttctcatctttgattccttttaaggcaattctttcctctcacaccctgtggcattacatggtttacttcgtggccatctgagtttccaaaccagtgtttttgtctgaaagactcccatgcacctacatgtgcagcttatgtggagctttaatgggacacaagtccccaactctgcctctgctccaccagccttggtcaggcccctgcctttgggcacaggtgccagcaatgcacttggcacttagagatgctgccatctggcagcctcccacatccaccacacaagcc

SEQ ID NO: 145794 - DNA, 318 bp, Homo sapiens
tgtaggggacaaagtctggggatgaaatgtcagtaacatcatcttccattagctgattaaagatgagagtaaaaaagctagctcctgggattgaaagccaattaattttattcttttctagagttaagactagcacctcagatgatttgtaatttgtaaatgaatttgcgtcctatttgtaagcaaatgcttctggtgataaggacctacaaatgacagaacacactagaccaggggtccccaacccccaggccacgaacagttaacagtcctgtggccggttaggaacccagccacatagcaggaggtgagtggcgg

SEQ ID NO: 145795 - DNA, 415 bp, Homo sapiens
tagctcccatcttactgccaatcacccaccttaagtccaaggaggctttacaactattagatctctaggcatctccttagctagtaacatatttatattgatccacctaagttggaaatatgagttgttaagacagccccatgtttcttctgggttttttcttttttctttttttcttttttttggagatgagtttcactcttgttgcccagtctgcattgcaacggcatgatctcggctcactgcaacccctgcctcccgggttcaagtgattctcagggctcagactctcaagtagctgagattacaggtgcatgccaccacgcctggctaatttttgtgtttttagtagagacagggtttagtcatattggtcagtctggtctcgaactcctgaccccaggtgacgtgcctg

SEQ ID NO: 145796 - DNA, 393 bp, Homo sapiens
cctcatttcttgttctgctttcagcaggggctcagtgtggggcaagcccctccatggccctgtaacacctaaagccctttgtctcctgaacttgcataaagatgatgggtaggcagtaaaaagctggccttggccagccctgtcttatccgctgaatcaaggtcaaactctgaaaggctacaaatgctcgggaaccccgtagcagagggtcagttttttagtttctgttgagtttttcaggatgggaaacttcttcctgctgagagctggatgggagtcctggcaggtttaaagaaggaaggtagaaacatatgttccaaacagtgggagctaaaagcacaaaagccaaagtgtgcagaataggtgtgggggcctggagcaatggaatgaggg

SEQ ID NO: 145797 - DNA, 196 bp, Homo sapiens
tggcatcacaggggcacatcctcggtgtgactcctgccccatctagacgggccgtgcccctctggggctcagaaggcacctcacagaggcttcctcaactagcttctggttccattattgacgcctgagtttcttccagacataaccacatactacaatgtttctttagcctaccataattatttcacgtaaccca

SEQ ID NO: 145798 - DNA, 391 bp, Homo sapiens
aaaacagccagaatgaatgtgtcaggaaacctacaaccagaatgttgtgaggaaaagtaacctacagtcctggtgtttgctaccttagcatttgctagaatgagcctgctgctacgaccaaattgcatacagtccaatctcaaatgaaccagataattcagaacagcttggaatttttctctctggtttaagagtatgctgttatgtttatattatggttatgcctaatattctggaatttggaaatcaaggggaaagttttattttgtttgaagacataatttggaagtggtttaggaaatcaactatcccctcttctctatgctgaaatctcccctactgctacccccagggttcaccaacttctcatacaaaacatcacccccaaaat

SEQ ID NO: 145799 - DNA, 416 bp, Homo sapiens
tgatgttctcctcctcaggttgagaagcacaatgttagataatggaaacagattcctttgggagaataaagaacaagttacctaacaacatatcaggaccttagcttcctcatctggaaagtgaaggggattggattaggttaggtacttccatgttttgtgattttgtgtggtctcttccagtcagaaagttctctgatggtttcctataaacactttagtgtttatctagtgtttatagcattagaaacagaatttagtactcggttttgttccctgaccttttaatgattttattcagtaaatgctggccttctcagagagccgaatctgggcctattgtaacttaacatgagatttaggttccctttgtatcttcagagatagtcttggccactcaaatctctggacatttt

SEQ ID NO: 145800 - DNA, 726 bp, Homo sapiens
tcccatgctcatgggtcagaagaattaacatcattaaaatgaccatgttgctcaaagtaatctacagattgaatgcaatccctattaaaataccagtcatttttcacagaaataaaacaatcctaaaatttccacagaaccaacaaggagcccaaatacccaaagtaatcctgagcaaaccgaacaaagctagaagcatcacactacctgtcttcgaaataaggctatagtaaccacatacaaggttatagtaaccacaaataaggctatagtaaccacaataatatggtattggtatagaaagacacatagaccaatggaacaaaaataggtaatgcagaaataaatccacatatttacagccaactgatttttttacaaaagcaccaagaacgtgcattgggaaaaggacactttcttcaataaacgatgctgggaaaattggatatccacatgcagaagaatgaaatctgacccttgtctcaccatatgcaaattcaacttgagatggattaaagacttaagacctgaaattataaaagtactagaagaaaatgtaggggaaacacttcaggacatcgatctacacacaaggataccactggcctcacgaccctcaaagcacagcgcctccacaaacccagattagcacatatgggccctactattacacccaaaacgccgtctgcacagctacggacacaaccgaatgaatagacaacctat

SEQ ID NO: 145801 - DNA, 221 bp, Homo sapiens
gaaaccttgagaaccagaagggagtagaatggaacattcagagtgctgaaagaaaaaaaatgcccaccaagaatgtgatatctggcagaacttcttctgaaatatggagatactttcccaaacaaaaactgaaaacttatcaccacaagaactgccttagcgtaaatgctaaagagagttattcaagttcaaacaaaaatacaaagcagcaacgtaattgc

SEQ ID NO: 145802 - DNA, 482 bp, Homo sapiens
aaaattaaaacaaacaaaaattaaggtagtaacacaggaaatgagaaaagacatatctacaagaaacacataaaatagtaacaatgaggtgatttctgcagatcagcagacttagtctttccccctgctggctgaggaatctgggcagtccagatgtatggaatttctcccagtgaagcacacccccttcaccaagaagcagccagagtgccttgttaaatggttcctgaatcctgtgcatcctgactgagtgaggaccaccccaccaacaggcattgtaagacaacttataaagaagtattcccactgtcatcagctcagtgcccatctgggataaagcttacagatgaaggagcaggcagttctctctgctgttctacacactccactggtgacacctccaggtgtgggagaaacccaggcaaataggatctgaagtggatcccaagcaaatcacagcggccctacagaagacgggcctg

SEQ ID NO: 145803 - DNA, 277 bp, Homo sapiens
tttacaaggtggagtggtgccctctgcacggaagggagaggtgggcaggtacggcagggccctgctccctcgggagtctcctctgaacctgtggttagggcacagctggacaatgctgaaatggtctccagctgggagatgaggtaaacctcagctgcatgccgaagaaataacctagaaatcagagaaccgttttattttgtttttctcagaggatctcatttctccctctcctcctgagcacagagaccctcaaaactggtattcacagaaggaa

SEQ ID NO: 145804 - DNA, 331 bp, Homo sapiens
tgttgggattacaggcatgagccaccatgcctggcccgggagtctgttttgtgtgtatgtgcttatatgtgctttctgaagagagggcccggagccttcattacattcttaaaggggtttgcaacctcccccaccaccaaaaaaaaacaacttgagaatccctggctgatagatggtgtgtcccgaattctcatatccctttcattctaatttgtggtaaatcttttctcctttggtgggaatcattcagattttgttggatttttattgcttgttaatattagatttgaggagactgaattctttgaaacatctctttcctaaatcctag

SEQ ID NO: 145805 - DNA, 439 bp, Homo sapiens
taaattaagagtacagaagtaatatcactgtaggtgagctaacaaaaatttacatcacgctttagaggactaccaaataacagtatcataagtcactcatctgaatcactaaataaatatttattacacacctagaataaaggcttatgctgggccctgtggacaatgtgagataatgagacccaaccctcccctccccggtttgttgtaggagtgcagagataatacatataaacaaataactgtccagtcaggtagaaagaggcaagtgccgtaagacaagcagagaagttctccttaattgaatagtgtctcctgagcacacctaaaatgttctgtgttggggtgagagggaagattaacgagccacattcccacaggtggctcataagccagtggggaattcacagaaggagaaattaaaattccaaggagggag

SEQ ID NO: 145806 - DNA, 358 bp, Homo sapiens
tgaacttatgagaaaatcaattgcatttgaataactaagggaagcaaccaatggctcttggtattaagactaattttagtttttatgctaaaaaattaaacaagcttttgaccatattcctttacaaatcatcttttattatataagttttaaataattcaaaagctactacttttcagaaagaaacagctatggttatatcttcatttaacagattaaggagaacctagtttgttaaaactaagaaatttgaaaactgattcaggaactgagtcatatttcctgctttgagacccaaccacagcgtgcacaaactggtgtaatagcattttctttcttccgtcgaaatggctctcct

SEQ ID NO: 145807 - DNA, 521 bp, Homo sapiens
acaccaccaggtccgtctaattttttaatttttgcagaaatgggggtctcactatgttgaccaggctgtctcaaactcctggcctcaaacaatccccccacctctgccttccaaagtgctgggattactggggtgagttacctctcttggctccaatttgctttttttttttttttgagatggagtctctctctatcgcccaggctggagtgcagtggcacgatctcggttcactgcaacctccgcttcctggttcaagcggttctcccacctcagcctcccagatagctgggactacaggcgcccgccaccatgtctggttaatttttgtgtttttacaaaaagacagggtttcaccatgttggccagggtggtctcgaactcctaacctcaggtgatcttcccgccttggcctcccaaattacaggcgtgagccactgcacctggctccactttgctttttttgttttttttttttttttgagacagagtctggctctgttgcccaggctggagtgcag

SEQ ID NO: 145808 - DNA, 318 bp, Homo sapiens
ttctcacctcagccttctgtgtattataaaagggtatagggcaggctgctgccacaagtactctgcagtccactggcttcagtgccagaggttagttctcatgccgcagctgcagtgggcactgccacctggaagaacagctctgtgccactcaggggttcaggctccttccagattgttgctctgccatccctcagttgccgtcctggcctcaccagaccaagtgacttgtctccaagttaaacacacctggaacttgcgtacctcaggtacactcacattccgttcacacctgggaggggggatcctcgagagtct

SEQ ID NO: 145809 - DNA, 553 bp, Homo sapiens
ggtagggttgggtgatcatgtgttcagaggtcagtggtttctcttcaagatcttaccatttccaggctgcttgggatgctcagacctcaactctctccaagactttattttctcccatgcttcttaaaggcacaccacataccatgatctcccttggaaccaccatgtataatctcttcaatggtttttcaagtcttcttggctggaacattggtctgccacaagctataacattttagcaggaaacagaaatatctgtattacctttgaaaatgattcctctggggcctactgacctagtcatgacttgcaattttgagctcataattcagtaacagttactaaatctatgttgtgtgttttttgtttttggttttttactgattctctcaaatgatttatattaaacatcttaaactagcattgattaaaatcattttgggctaagttcttccccaaagagtaattcattgaaaataaatggattcagaccctactttataatgtgaaagactttgtgcagatttgaatataagatgacctgttttctgag

SEQ ID NO: 145810 - DNA, 493 bp, Homo sapiens
ggtggacataggccacatacacttattccaaaatagacacatagttggaggtaagcactcgtcagcaatgtaaaagaatggaaatcacaacaaacaagcctgacccaggccatgaaattgtactctcattggtttatgaacaccagaaagagggcttggtacagcagcagccagagccaacagactcaatggggcagataaaaattcaaaattcagccaaaatgctgaaaagagaagaaacataggttcctcttcgtttaatgcacgagccactctggctactaggccacaactgagcagacaaaaagatttggggacttttccagtgaaccgagaaatgtgagcaggaggggcaggcatgaagagctccacccacacccctgaagggaggcgctgtcaggagtcggcagaaaggcagacactgacacaccgcatcgcccagggctggaagggtttctcccaaacgactgtaaaaaaagaaatgaaaagggaa

SEQ ID NO: 145811 - DNA, 144 bp, Homo sapiens
tcggcgggtgggggtatcaggcagcagaatatattgcagtaatgacactttaaagggagttcaaggttaaattgcagatttgctattcaaattaacataatctacattcatttactggaaggcaagtgtagcaatatgctagac

SEQ ID NO: 145812 - DNA, 453 bp, Homo sapiens
tgaaaagtgtcatccatgaactagagtgtgggagagggagaaggtaaggagtacagcctgactcacacctggaaaggctgttctgcgtttccagagtttgaaaggcagaggacatgtgagtttcccatctgccaggtgagggcctcacagaaaacagatgagttgaattgtcctgagaggggctctgtccatgcaactacctggagggtggctgatcccagcatgaggataagctgtcaggaacctggggccaatgagagtggccaggtagaggagttattatccctagaatcatccgtgagaggtgagagaccttaggattaggaggattctcaaaacacactaggctttggacctgccacacccagatgacactgataccagaatcactcatacaaaaatatatttacggagttccgtcactgttctagaccctgggaatagagtaatgaa

SEQ ID NO: 145813 - DNA, 371 bp, Homo sapiens
gatggagccccaacactgagttttgagcactccaacacatagaggcaagacagagaagaaataagcaaagaaaattgaaaaggaggggccgtgcgcggtggctcacgtctgtaatcctggcactttgggaggccgaggcggggggatcacttgagctcaggagttcgagaccagcctgagcaatatagtgaaaccccatctctactaaaaatacaagaattagaattagctgggcgtgatggcacgtgcctgtagtcccagttactcgggaggctgaggctggagaattgcttcagtcaggaagatggaggttgcagtgagccgagattgtgccactgcactccagcctgggcgactgaacaagacttcgt

SEQ ID NO: 145814 - DNA, 274 bp, Homo sapiens
ctgagatgagatgagctctctcccttatgtggagaagtccttttaggaatctgccatgtttaaatgtgtggcatgggggaaaggaatatggctaataatcactatgcaaaataagaaatgcatttaaaagttgatacagtatggaggaaaggtgtgaccctttctgcagatgtgaggactttggacttgggccggaactacacatcagctctcctgggcctctagcttgccaactacggacactgtgacttttcagccatcacaattgtgtaag

SEQ ID NO: 145815 - DNA, 273 bp, Homo sapiens
gcatcaacatcaacacacaccttaagtctgataagaaacatttacaatctgttctctgaaatttacctcttggaggcttcatctccacgatcaaatttggtatccacaacctcttattgcaacccagacattcgtttctattgattttaggtctttagataataaccagttgccaatcagaaaatctttaaatctacctatgacctggaagccacccctcacccgcttctcgttgtctgcctttccagatccaaccaatcttacatgtattga

SEQ ID NO: 145816 - DNA, 650 bp, Homo sapiens
gccaccacgcctgactaagttttgtagttttagtagagacgggttttcaccatgtttcccaggctggtctcgaactcctggcctcaagtgatctgcccgcctccgttggaattacaggcgtgagccactgtgcctggccgtttttagtttaggtaacctctgaatcctgtccaactctaaacttctgccattttaaggagggacagtggttcctacgcatccctgagtcctgtgtagctaggtattttatgtcgtgtgatgtcctataaagagcattatacatgaagactcacccaacaggagggacatctagaaacaagcaactcacattgtgctgtgagaataaatgacttacccaagtgaatgaacttagccctgaaaagacaaacgtgacttgcagcccacgtcatggagactttgtgtgggtttttagtcctgtgttgtttagatgatgttctttttaagtaacagcatgtgcctagtggctcccctgagatccttgagaaaattaaataatcatcttgtgacacggtcctcatgctcacgtttctagaatgcaggagaactcggatgctctgaaatgggcattaaaacaatttgttaagagagctttagaagcaccaatgaaggggaaatatcctacatttacc

SEQ ID NO: 145817 - DNA, 288 bp, Homo sapiens
agcactggcatcatccagaccctggaaggggagagggctcagggcccgcgatgcggcagctgctgaggacccttctcttgtgtctcctttgcaggcttcctccctctccctccagttttagaggctcccaccagggacccctttggcagcagggacttctccccatcccagtgatgtcatcaagtcctcttattttccaagaagcatgcaggccccagtaagttggaacccactgcaaaacagctgcgttactctcagaaagaaacagatggacttgagggaaacggg

SEQ ID NO: 145818 - DNA, 307 bp, Homo sapiens
tgaactccagcctgggcagaaagagcaaaactccatctcagaaaaaaacaaacaaacaaaaagtagtgttacgtacattcacattgccacgcaaaatcatcatcaccattcatcttagaactcttcatcttgcaaaactgaaactctataccccttaaacaactctgtacccattccctgctacacctaaccccaggcaaccaccattctataatactttctgtctctgtgtgtttgactgctctaggtgtaaggagtagctttaaaaccactggtttgtatcagaatcccttggggatcttttgta

SEQ ID NO: 145819 - DNA, 498 bp, Homo sapiens
  misc_feature (23)..(23): n is a, c, g, or t
taccatcgagctcggcacccgcncacggagatttcccacggagatttctttgcagttcgggtaagtgaggaggcaccgcaccaaccactgtgtgatttccgcccgacaagagcggcccaggagagcttcctacctccagccacactggttactcctctaaacctggaaggtacttttactgataaggaaggtggtgatcttttctctatcacatgtgggactggaatgttattataactgcactgaaaaaggcaaaggagctcagctctctgagagagagaattcaggcatgggaggtcagatggattgctgaaaatgctggttaagagcctcttacaaatctacctctttgcaagtctcttatctacctactaatcatcgaaaatccagaaagctcagggtttaggaccataatttgcaaaatctccgcaatcctgttggttgaaaagcacaggtgaaatatgaaatctcactcaagctcactgttaagtgaaccaa

SEQ ID NO: 145820 - DNA, 240 bp, Homo sapiens
tggtggtagtggcagcataatttgaggttttcccaagtccccacataaaaacagagcaactagttggtcaaaaccctaaggacaacacatacatcaaacccggagatgatgtatctcacaaactccaaattataagcaagtgaggacaagctaccaagaagagcaggaatcagtgtttgtgcaagagaaagcagagagaagcaagcaggcatctgatggatgcgggaacaggagaacctc

SEQ ID NO: 145821 - DNA, 198 bp, Homo sapiens
gtcaccttttgattaactatgacaattaaaaaccccaggctatccttaccgatcgttatcacacatattgctaaacctagagtatgtgtattggggggcaaactaattaaaatttatcttcaacaaaatccaattttagaggcaggtgtctgtgcacacacatgcacgtgggtgtgtgtttgtgtgtctgtgtgcatt

SEQ ID NO: 145822 - DNA, 799 bp, Homo sapiens
gtcacacctgtaatcccagcactttgggaagctgaggtgggtggatcacctaaggtcaggagttcgagaccagcctgaccaagatggtgaaactccgtctctactaaaaatataaaattagccaagcatggtggcccatgcctgtgatcccagctacttgggaggctgaggcaggagaatctcttgaacccgggaggcggaggttgcagtgagctgagatgacgccattgcactccagcctgggcaacaagtgcaaaactctgtctcaaataaataagaacctgcctaatatgttcttttagctttagttgctataaagacagatatattgcctaatttttgtaatttgctcatccaaattacccatgagtagctttgcttctgatttcctttaggcaacctctccgtatgctgttctctttgaatcttaatgccctgaactagtctacacagcatttaagaagccagctccacttctctgaaggctttgccccggaggaaacagcccatgggactgaggccctcaccagttagaccactggtctctgtccactgcactgtttgcttcaggtgccacagaaagtggacatgcccaatgcgtgttgatcatgtaaatcactgggttgttttttctaatacctgggtgattttgattttatgactatttcctaattcctggtgcttgcacttaatcaattgtgttaagggtggcatctgcctctcatatacagactgggagttatgtagatggacattggttgtcttatttcataaacagtgtccccaggtctggtttgac

SEQ ID NO: 145823 - DNA, 860 bp, Homo sapiens
gggagactccatctcaaaaaaaaaagaaaacaaaaggtatgttgactcttgtggtctgtctctgtctctatctctgaggcttgccaatgaccttgacttagttttagaagtggctgccctccttttacacaacagtaaattatttcattatatttttgaattgacaaattttacagtaatatataggaacaaaatatatgcgttcctttcagttacctgaagaatatatatcaaaattgaatagagacaattttattgttagcttctagtaaagggtaatgttttcagtgaaataaatatttatatgaaagtttcctgggaagaaaaaaattcctatgtattattacaggcaaacataataatagagttagaatgctcagtctccttgaagctttgctcctgtctgttcgtaaaatcagataggctgacaacaagctgcaacacatccaccaaagttataattaacattaacttgagaaagagtcctacctccgcttcatgttaaattccgtttgatcttaattgaaaggaggcacagagttacaggaaacagacccctgcattgaaaatgctatggtaatatgtttagaatttcccaaggaacagaagatctttagagcacagacatttggaagcagagaaattaagcccttaacacctcacagcagcaaaactcttctatcatgctttgaaggccttcgttttgggatttattttcgccttatctaggacaggtctagaaactgaatttcgcttttgaagcttgtaattctttatagcactttgtcaatttgttttcaattaccttccttctaatgcttacttacctcgcataggctacccatctctttggctttttc

SEQ ID NO: 145824 - DNA, 336 bp, Homo sapiens
aatccttaacctcctgcattttagaaatactccagagcttgtcttattcttaccaaaattcctgtaggcctttgactcctgactcaccctgtctgcagtgtcccccagcctgcaggggtgggtgagtcacagcaaccctcagccaccagctgttttccatctgccggccttcctgggggagagtcccttccagctgtagcccctgtctatgggaaaagtctcatgtccttttcatctctccccactgcacactgtctctcaccctagactataattcaagtgaatttgacctccatttattggacaagccaggcactgtgctaggaataatgaaaa

SEQ ID NO: 145825 - DNA, 406 bp, Homo sapiens
tgatgaaaacattagttaagttaatatataattgatatttagcactctcacttttaataacttgagtgaaggatagaaatgtgaagtgtcatttgtgacttttgaggtgggggattctgtatgaagtttgatagtagagatgggatttgacgggattgagacatccaatgagaagagtcaagaggatcactacaaatgtgtggcctcgaacctttcagtaccttcttcatatattttacacagtagaaagccaagtgctttctattcacagcttcattttacacaattatgtgtatgacaatgtacaaatacattttcatcaatatttggtttgtatttctttgttggcattgcaattaagttttgacttccttcccctctccactcctttgatttgatatatcaa

SEQ ID NO: 145826 - DNA, 312 bp, Homo sapiens
ttaagggaatctaggtttaattgtatatctcctagaacattttgcaccaccaagtaggttgtagagaatctttgttagcattctgctagccttattgatacgtgatcacctcactgaaattgtgcagtatcatgtattctttgattgtattttttagaaatgggagtcttgctatgttgcctaggctggtcttgaattcctggcgtcaagcgatcctccggtcttggtctcccaaagtgctgggattactggcgtgagctacctcatttggccaaattttaaataagaaatgctaacgtttactgttactgc

SEQ ID NO: 145827 - DNA, 283 bp, Homo sapiens
aggtctttcctttcggagaccaaatgtgatcaccttattggagaaagggaaagcaccctggatggtagagccagtaagaagacgccgggctcctgactcggggtctaaatgtgagaccaagaagttacctccaaatcaatgcaacaaatctgggcaaagcatctgccagaaactagtttctgcacaacaaaaagctcctacacgaaagagtggctgcaacaaaaattcagtcctagtaaaacctaagaaagggcattcagggaagaaacctttaaaatgtaat

SEQ ID NO: 145828 - DNA, 592 bp, Homo sapiens
caagattagatggacagattagctacagggaaaaagagaaggaagaggaatccttgcttcagcaccttgaaggaagaacaaagacacagatgtaaaccttcagtagactttgggggtgctttcagagagttagagagtagtgtaccctccagtttggggtaagcagggcgttcctattgactgacttgctttctctttgaagagggcacagggcaggagttatctgctgagggtaaagggaaggaaggagcattcattagggggataaggagaggattttgagcgtaaaagagagaaaagtgaaggtctacctagaatagtcagacaagagaaagaaagaaaggtcatccaaactggaaaataagtcaaattatccttgtttgcagatgatatgatcttttatttggaaaaacctaatggctccaccaaaaaactattagaactgataaacaaattcagtaaagttgcaagatacaaaatcaacatacagaaaatcagtagcatttctgtatgtcagcagcagacaatgtgaagaagaaatcaagaaagtaatcccatttacgatagtttaaaataaaatacctaggaatta

SEQ ID NO: 145829 - DNA, 120 bp, Homo sapiens
ctagaccagccttcgtccactgcgataagtgatcccccaaacagcaggtgaaggggaaggtgcctgtgaaatgcagagccaggcggaagcccgcagagaggccaggaggaggcacccaag

SEQ ID NO: 145830 - DNA, 417 bp, Homo sapiens
cagctctgcctcctgggttcatgccattctcctgcctcagcctcccgaatagctgggactacaggcgcccaccaccacgcctggctaattttttatatttttagtagagatggggttttgccatgttggctaggctggtctcaaactcctaacctcaggtgatccgcctgcatggcctcccaaagtgttgggattacaggtgcatgccacaacgcccagctaatttttgaatttttagtagagacagggttttgccatgttggccaggctagtcttgaactcctggcctcaagtgatccacccgcctcggcctcccaaagtgctgggattacagacgtgagccaccacgcctggccatagcatatgattttcattctcagggtcaactcatagtacataatagcttttggaaatgca

SEQ ID NO: 145831 - DNA, 411 bp, Homo sapiens
aggaggagggctttcatctgagactgaaggatgagagttactcactcagggagcagagcccatgagcattccaggcagtggccctgggatggtaaagagtttgggacataaagaaagtaaaagaaggccagtgtggctggagcatggatggaaagagatagagaatggcacagggtggaattggagagatgagcaggggtcaaatcatgcagagccttgtaggctgatgtaaggaatttagtttttttcctaactccaacaacaggccagtggaatgtcattccattcaaatgatggaatgacattatctgatttaggacttaaagatgactctagggaactcccaacaaaggatggaagattagattctttcttcaaccttgggacatcactaagaataatcaaacaaaa

SEQ ID NO: 145832 - DNA, 166 bp, Homo sapiens
cccgcagacaaatgcaaataagaacggaagtgaggagagcccagaaccctgttgaaagttaataaagacttttcccgctgcacctcacaccccagaatctcaagtagtttatcgtagcccactacaggtcttggattacctccatttcaaaacccgcagcccctcc

SEQ ID NO: 145833 - DNA, 358 bp, Homo sapiens
aactattggcatagatattagttgtcctgacagccagggcctcggagcagctgattctttccaacacgtattcagcacctcctccctggacagcgctgtggctgcagctatggataaaacagtgaagaaggctgcaagaggctggagatacttgtctctaatgctggatctggctgagggcaggactgccctcactcgttctgttgtgcgctcacctgctccccagccctcactcctggatccagcatccacggtttagggtaacagatccatctacttcatggcatcaaacacttctgacacagcccctttctagccaaagcattctgattgcctctctattttccgagggcctctg

SEQ ID NO: 145834 - DNA, 388 bp, Homo sapiens
cctgcttctaaggaagaaactcacttccaaatgaaggaaatgagacaaaaggttgatgcctaaagggatttactgtccttatccatgccttatggaccataactatgctaaacctaaaaaataaataaataaataaagtgagcaagctatttactgaaaagtgttatggcataagctggggaacaccactttctgagtctacaatgctttcttatgggatttgggatatgctctgaaccatagatggtacttgcctataccgagtaccagatagaatgcatgcatttgggaacaaacaagctttttaagaagtttttgctttcaacctttgtgactatgagtgttgttagatggaagatcttagaaataagaaagggacaattctacc

SEQ ID NO: 145835 - DNA, 677 bp, Homo sapiens
cagtactgggccccactcccagctaatttttgtatttaggtgaatggaaatcactatgttgaccagactggtctcgaactcttgacttcaagttatccacccgcctcggctcccaaattgtgggattactggcataagccaccatgcccggccattgtaatggctttatctggttttggttaggtaatgctgacctcatataatgaattaggaagaatttcctgtgcctctatattctgtaagagattgatgacatatctgcagtgtttggtcttgtgagcgctgtctcttctctcataggcaggcatgtttctctattctcacctgaagaaattatctatagttgtgttcctctttagaatttaagagaaaagtgcaggtacaattcacagaatttcacgtgggtattccgtgacaaatgagccagacgttggtagccttttggaataaaataggcaattttggaaaacctgactctgattaggtccttgtgcctttataaaaattactttttaggtaggaagctgagaagtttctggccagtatcttttgccatttggcccaattctgtctagaaataagaggtatctggagtggtaactaggaggaccatactatataactttaatatgtccctaataaagatacgagaatactttatatcaacctttcctaca

SEQ ID NO: 145836 - DNA, 441 bp, Homo sapiens
gactccaacattgcaggaataacaatgacttcagaattcacactgggccattacaaaatatcccaatatgacttctaaaccacagttcagtgatataatcttctgaacaaaattttcttataaagaaaacgctgttcctaagacaaagagagttaacaaacttataatggtaaatagttaaatttttagaataatagcaatagaagctgttcattttgtttttaccgtaaattgctaggctcttaatcacttatcatatagattagtaacatgtactaccatgtaatgctattttatcaacactctggttttaacataagcactttctcaagttcctaaaataagaaaatagcaccatccagtgctcatattgaggataacataatatttaatatctgaactaagacacagtgatttaatgtggtataccttatgtgacaa

SEQ ID NO: 145837 - DNA, 294 bp, Homo sapiens
cacaatttgcatttacttcaatttttgcctaaggaccagtaactcttgcaagaaaaaaaataagagaggtatgcatcacaaagactgatcttatttagtttctatcaagaaaatccatgaccagttccataacttgccacaaaactgaaaaactgtgtggttttgagtatgtacattttggggatttttctttctgagaagggggtcaagagcattggtcagatgctcagagaggacccttgagccaggactgcagtctcctgtgcaccgtggagcctgggagcattgggaaga

SEQ ID NO: 145838 - DNA, 491 bp, Homo sapiens
ggaggccgaggagggaggatggcttgagcccaggagttgtagaccagcctagttctagaccaacatagtgaaaccttctttctataaaaaatagaaaaaattaactgggtgtggtgggtgcctgtagtcccagctacttgggaggttgaggtgggagaatcacttaagtccagaagatacaggctgcagtgaactgtgatcgagacactgcactccaggctgggtgacagagcgagatcctgtctcaaaaataaaccaaaataaaataaatttgaaagcatctcaaaaaaaaaatgcatagggagaatgccctcaggttgggaggacagactgtaccaattcattcattcactcactcattaaaatatatatcggccattcctaggctacggtatgaaaacagagataaaggacagcttctgtctttaaggacctgctaatcttaaaaacagatgagtaaattaatgaagtatcgtatgttgcctgctatg

SEQ ID NO: 145839 - DNA, 395 bp, Homo sapiens
cacagctataaattcacttagtctgcctccccgccaccatgaaaccaggcccttgtctgcttggctcactattctgccattagtgcctagaatagtgcctgacatgcaatgggtcttcataagtgttgcatggatgaatgaattctaccctatatgtatttctatcgtggcatacctttatcttccttccctacaactgtattgcaatttgttatattaatgtttattcacctgttagagcagtggttctcaactcaaagtgcagaagaaaagaatcacctgcaggtgatttattaagagtaccgcttcctgggtcaagagatgctgcctgactcagtagtctgggtgggacccaggaatccaatttttacacacacccattaggtggttctgca

SEQ ID NO: 145840 - DNA, 107 bp, Homo sapiens
tacatgctagacattgtttcaggtcctgggacacacagtgaacagaaaaaacaaagacttctacctgcctcaaggagcaaactttctggaatggagaggttaagggg

SEQ ID NO: 145841 - DNA, 295 bp, Homo sapiens
ggacaataagtgtcatccaggactatctcaggcaaatgagggtgtttggctattctaattatagctagaacaaacaagtttatgagcttgggtccaagacttctgggatgttttggttgaacccaaacactcacctttaatttttgttacatgagtattgattttgccatagtaaattaattgactttatatctgaatgattgaacagtatggtctaatggttattaactttacagtatggtctaatggttattaagtagtagccgtagtacatatgttcattttatattttact

SEQ ID NO: 145842 - DNA, 251 bp, Homo sapiens
cttgtagcatatctttatgcagatgtggcctctaggtacaagaagtaagactgtacttctgaatgacttaaagaagaacaaatagaattaacttgtctgcatccaacgctctgcagaggatttttccccatatatttgtgaaagatgttaaacctggtatctctttggtgaaagtcattgggtatcggctcatcagaaataacctggctgtagacaagtttcttatatgacctgaaatgctttctgcttat

SEQ ID NO: 145843 - DNA, 181 bp, Homo sapiens
ttaggtatggcattcattagtcaagagcataaatctcaagtatatagctgatgaatttttacatatgtataaactgatataaaaccacccagatcataatatagatcatttgttgtaccctttgggctcctcttatgccccctcctacttatgtccccaaaagttaactactgtgaatttt

SEQ ID NO: 145844 - DNA, 448 bp, Homo sapiens
tgcggagctcccagacatccagacaggctgtcccaggggcctggagtggcaggcctggctcagggcagcttccgtagctgtaggctctcctctggttactgcccacagccttcactaattggtgttcaattcctattttgaaaaatgaagtttttcaaatagcaactagtaaataaaaagatacactaataaatcatagcaagagttctagaaacctttgtccaaaagagtaggattagtttaggggcagccctgagtggaaaccaaagaacatacaaaataatattcaaaccctatcatttcaattccccgcaatcattatcaacctttctctcctgagataaaacctgagtagggccaaagaggtagccacagaaaatggaggtaaaacacacacagctgaaaagactgagctcacaactcagacaatcatcacagcctccactga

SEQ ID NO: 145845 - DNA, 324 bp, Homo sapiens
tgttctcctccaatccacctcaagaacccaatttctgatggccttgcacagccttcaacacagctgctgttcagttttgtttccttcttttcattggcctccaaaactgacggcatctgagtctattcttgcctctctctgatctatcagactctagtccttagactgagcaggcgccacactcacagatgacttgcagaaatcatgctctaggccacaaaacttcatcagagcaaattcagaatgcagacatccagaggctgttctcctccaatccacctcaagaacccaatttctgatgaagttttgtggcatcgataaaca

SEQ ID NO: 145846 - DNA, 365 bp, Homo sapiens
ccgactacagcgagaagttgcccaaagaacaagtgagggggccatgcatgagaagctgatacatgaactggaagaggagagacacttacgtcttcaaagcgagaagcggttgcaggaggtgaccctagagtctgaacgcaacagaattcagatgcgtagcttgcagcagcagttctccaggatggaagaaacagtcacgaaatctattgcagcagtcaaggatctccagcagcagaaaaacagcacagcaaactgttaatatcactggtctcatccaggcaacacagctgtcagaggaagcagagcacccatcaggaagctttggaagatcttcacctggtggttgatgtagatatagaagcatg

SEQ ID NO: 145847 - DNA, 474 bp, Homo sapiens
aaccctctggagcagcatcctgagctgtacctgggccacttggagccatggctagagctgcaacagatgagatgcatgtagtagtgtcccattcttccttcgttgtcctctgagcctgtgatgggaggagctgccacaaaggtctctgaaatgccctggagggtatccctcattttcttggctatcagcatgtgccttccttttagttaagcaagtttctgcagcttgcttgaatttctctcctgaaaatgggctttttgttctaccacatggccaggctgcaaatttttcaagtttctacactctgcttcccttctaaatataagtttcagtttgaggtcatttctttgctcacacacatcaaaatagtttgtcagaagtagtgagcttacctcctgaatgctttgctgcttagaaattttttccaccagatacccaccagaacttgagatactctcaagttcaaaattccac

SEQ ID NO: 145848 - DNA, 326 bp, Homo sapiens
atcctagacagtcccgacgtggactgagaactccaactggactgaatataggaggtgtttacatcggagagcctctacagcacgactgcgctggagattgtctagcggcgagacgccggcatacaagccagacactgaccgacgatactcactgtgcggactggcaaaccagattctaatctgtcatctggccaccagaatttcattaaagtatcagcaagtttctccttcctccaatctatggcaattccctgttattgcactactgtcaggggtgaaagcagtcagctggcaaatgccttaaatagtgttttctatcacttcat

SEQ ID NO: 145849 - DNA, 124 bp, Homo sapiens
ctatcgcaagctgaagcctagacactgggatttgtgcacgttcacagagcagcccagctcattgcccagactcactgtcagtgttgacagggtcattcaccccaagtgagcattcaccaacttt

SEQ ID NO: 145850 - DNA, 628 bp, Homo sapiens
tccttttcacagggcaaaatgctgtaattgcttcttagctcatcttcttgcccctggcttttccccttctagtctcatattgacctctactgccagatcaattttcctcaaatccagccgcagcctgttacttcaaagctagtaatgcctgcttcatcacatccctctgtaaattccagactgccatatctgaccttaatccccaacgccaagcctattttcagctgctctattacatttgctctgttcctgaaagactagtactcctccaccttcaccatacagctgacaatcccatctctgtcttaccaaattctcggcctaaaataccctccttcttctactctgccaacctcaaactggttttctcagtcagatttaaatcattcaaagtacatcttaggaccaaatattccagcctttttccaaattctaacgattctacatctgccccttcattcaatatttattaagctcctactctatgtcaggcactgcctgagaaagagaaacaaagctttctcacctgcagcttatattccaaaactaagttaataaatacataatacgtcatggggtgataagcacaatggagagaaagaagggataaggattacggatagaggtt

SEQ ID NO: 145851 - DNA, 581 bp, Homo sapiens
tccttttcacagggcaaaatgctgtaattgcttcttagctcatcttcttgcccctggcttttccccttctagtctcatattgacctctactgccagatcaattttcctcaaatccagccgcagcctgttacttcaaagctagtaatgcctgcttcatcacatccctctgtaaattccagactgccatatctgaccttaatccccaacgccaagcctattttcagctgctctattacatttgctctgttcctgaaagactagtactcctccaccttcaccatacagctgacaatcccatctctgtcttaccaaattctcggcctaaaataccctccttcttctactctgccaacctcaaactggttttctcagtcagatttaaatcattcaaagtacatcttaggaccaaatattccagcctttttccaaattctaacgattctacatctgccccttcattcaatatttattaagttagttttggaatataagctgaaggatgagaaagctatgtatctctttctcaggcagagcctgaacatagagtaggagcttaaataaatatggaatgaaggggcaga

SEQ ID NO: 145852 - DNA, 203 bp, Homo sapiens
aaatcatggaggattaggaagtgggacctatggtgtttccttggctcttcattcagattgaagacaggaaacaaccacatagacatattctgtatctggctgcctttcccatgatcttacgcttccgtggctcaatggctgcctttcccacgatcttatgcttttgatcatccatggagaaaaacgcaaacggacgcaggaat

SEQ ID NO: 145853 - DNA, 558 bp, Homo sapiens
cttacccctttatgggttgcatgtacagagaaaaggcagtattagcatgatccaagggtggagtttttgagcctctggcctcaaaaggtgaagcagaggacatgaaaagcctcactgcgcatcctctgtagactggccagaaccactccgtggttggtgtgtctcctattaggaaggaatgctggttggtggttgtgaggaaaccacaagagggaggggcaatgtcaggaggttggtttatattagcagtggagcaagtaaaaaggctggtttctgtttaacccttaggaaagaagcctaatgctgggcagcaagggatgggtataatgaggtgtgtctgacctttcacttggtcatggctgggaactcagatttcagggcttctctggggtctccttggccaagagatggtcacttcagtcagttggggggcttagaattttatttctcaggaggaacaacattcctttttatgaagaatagcatataataagctgacatgaaaatggagggtaaaggctacctgatgtgtttagaaatcttaaaataatccaggat

SEQ ID NO: 145854 - DNA, 335 bp, Homo sapiens
tcctatgggtgagagattcagcttttggtagggggagcgggatttatcccattacatttggactggcctccttttaggaattgctgctgaacatttgggaggctcttttggaataaattcaaggtgaggttcttgtactagacaagtgcacatgcctgggggaagcatttctagctttgttgatgaaacgtacttagctttgggctaatccataaggatactagaataatgcattctgtttctcaggttgatatatgagggcccgctagtttttttcctttgaggctactcttcactattctataagtgtgcttttttgtttgtttgtttgtttg

SEQ ID NO: 145855 - DNA, 990 bp, Homo sapiens
gtgaggcggcccgaaatcgtaggacttccgaaagcagcggcggtgtttgcttcactgcttggaagtgtgagtgcgcgaagatgcgaaaggtggttttgatcaccggggctagcaggtcaacttgacacagttttctgaaccagagagaaatgcctgtacctgatgccatcccagataacccacatcttgtgtctgaattgtcctcccagtggcattggcctggccctctgcaagcggctgctggcggaagatgatgagcttcatctgtgtttggcgtgcaggaacatgagcaaggcagaagctgtctgtgctgctctgctggcctctcaccccactgctgaggtcaccattgtccaggtggatgtcagcaacctgcagtcggtcttccgggcctccaaggaacttaagcaaaggatgatcaagaaatggttgtatgtgatctgtgttgaagaccatgtttcagagattagactgtatatatctaaatgctgggatcatgcctaatccacaactaaatatcaaagcacttttctttggcctcttttcaagaaaagtgattcatatgttctccacagctgaaggcctgctgacccagggtgataagatcactgctgatggacttcaggaggtgtcgagaccaatgtctttggccatttaatcctgattcggggaactggagcctctcctctgtcacagtgacatccatctcagtcatctggactcatcttcgcagtggcaggaatctatttcagcctcgaggattccagcaaagaaaggcacgaacctaagtctccaaatatgccaatggaccttgcaggcgcggtgacaacggaaattaaccaggagggcttaatcacaagggcgagtacagtacggatgtacattgcaattggaaaggcacgaatatagtaccgataaccggcaatgatactcgcatgcgaaccatctgtaccaatcgatcagacccgtcgtgtcacaacacaagctatc

SEQ ID NO: 145856 - DNA, 285 bp, Homo sapiens
ttctagggttcagttctttgaactgtgagatgcttgtgtaactttttggtggtgaacattgtgctttgatgcactttgtctatagcaatgtttgcctctcctccaaatccccactcacatggagaggagcttcacggcttctccaaatatttggtcacaactgagaaggctgattgataatcaggaaaatatctaaagcaatcaagtaaaagcaagttttataccagtctgctcaagtggtaagcggtggtctttctttttgtgacttaaacactgcttaggcca

SEQ ID NO: 145857 - DNA, 184 bp, Homo sapiens
cttgaggacttgatgaaaactgtggccctgttccctagaaaaatgaacaaaattctgcattgctttgagaggaataaggcctttcccactttgggttgtaggttggagaaccctttctctggaagtgcgtgggcagtaagtgttacagagtcccactcttggcagatgtctttcctaaggttgc

SEQ ID NO: 145858 - DNA, 248 bp, Homo sapiens
agtacaggcacctgaagaagtgaaaagccatagtatggccctgagagggactgtcacagaaagtaggagcctctgaattgtgagccaaaagacagaagattgagcttctctcccatcagtaccatcagcacttacattactcttgtggcagatagaactgagaatatgactgagacccctgctctgtcctctgccttcaagagagcctggctgtatcctaaacactgagaagtaggctgttaggtaga

SEQ ID NO: 145859 - DNA, 570 bp, Homo sapiens
gttccattactagaccacctcaattacacacgatagatacattttaaaatatccacatcataagttcgtggatagtacagttatattgcattgtatttgtctgttttgagtattaatttgttaaatgtaaatgtttaagttataccagaatttccccattttgagtttctctgttttttatgtagagtaagaacccatccaaataaaactaccctggcattcgttaacctccgagaaaccctgaactctccagtccactctgtgtgaagtttaaaaatgtatgattttggctcagcgcagtggctcacgcctgtaatcccagcactttgggaggctgagatgggtggatcacgaggtcaggagatcaagaccatcctggctaacacggtgaaaccccgtctctattaaaaatataaaaaaatgagccgggcgtagtggcaggtgcctgtagtcccagctactctggaggctgaggcaggagaatggcgtgaacctgggaggcagagcttgcagtgagctgagattgcaccactgcactccagcctgggcgacagagcgagactccatctc

SEQ ID NO: 145860 - DNA, 413 bp, Homo sapiens
gcagaagttcaaggcagagggagcaacctgagcaaaggtcctgaggcagaaacagaaagaacccagtgtggctggggtataaggaggagaaaggaaagagctggtgatatgtgatgatcatagcaggggagggtgtattgagaggaatattggtggaaagtgggtggtttagatggtttgattttggcgagggtgatggattcaccgctccgcacgttggtctcacagtgtacatttactggatgaatacctctttttaacatggggctaacttctcatttctctggctctaattaagatgttaatgtcatacttttttttttttttttctaggatagactccccttagcttcttccagaaaacatcctggcagtgaaagaaaggtctttaaggccctggacgtgtcaccttg

SEQ ID NO: 145861 - DNA, 450 bp, Homo sapiens
tgctcttctttttctagttactctttaaaattgttatgtaggttttattttataataatgaacttaactctgcaatccagctagacatggaagggaataaggaaaatatggaacccaaagagcttcagtgagtgcacaaagattataggatattgagagcaaatggaattgaggggtgctctcttgagctacagaggaaatagtctggtggttaagataaaacaggtcaaatttattagagttgtccatatttggcaatggtgatcttcttgctggtcttgccattcctggacccaaagtgctccatggcttctgtggcattcatggcctctttgaccttgccaaagaccacatacctgccattcaaccactcagtcttggcagtggagatgaaaaactgggaaccatttgtattcggtctaccatttgctgtgggcaagatgccaggac

SEQ ID NO: 145862 - DNA, 540 bp, Homo sapiens
aatgtgccctgagggtgaagagcctgtgacacagtaggtgtgtgctacctgtgccatctgagtcttgcctcaaaactggatcatgaagacacactgccttcttcactggcttcatctctcttgcccaaattctagatcgtgaggagaggccacacatagattcttctgcaaggtgccttccggagatatttgcaactgcatcttacattctattattgttttacatggcttaataatttacatttgcaatctgcatcttatattctgtgatcatattatatggctcaagaattttcagggctttcctatgaacattccccggatatttacatccgtctttagataaaggtctaaatacatgacacaggatcctgcaacagtggcaggatacctatctcttacatctaaaaagcctttcttctttttgactcaatcagaagcagatattatatagatcagggaaaattttcttacaggtaggaaactcttcataatactcattgtgggatttaatccacttgtttgatccaagcacaaaag

SEQ ID NO: 145863 - DNA, 181 bp, Homo sapiens
ctgtcatcacctcccaaagtgctggggttataggtgtgagccaccatgcctggcaggccaggactttctgtgaatgtttttggccttcgatgtctttgcgtgtttccttttgcctttgcagatacatcaaatcaattcatgggaatgttaccactatagagtatttgctcaagaatattgt

SEQ ID NO: 145864 - DNA, 191 bp, Homo sapiens
aataactattaggagtaaactgttttcctttactcacattctgcttttaataccgctgtggtttttttccttcacaacctggttttgaccactccttggtttctttagcatgatctttttcctgtacacctgactgagacttatccacagttgtcattctgtactgtctcacagactgaccttattcatcc

SEQ ID NO: 145865 - DNA, 421 bp, Homo sapiens
tttgtcatttctttgcccaaagagattttgaagtcaagctacaaagcagttcatgggctctcttggtgttttctggcccttctgaaactcaaggccctggggagggtgaggaagttggcagtcttcacgaactgtctttcttaactaatcaactcagcaaacaatatgggtggattcactggaccttcaagaaagttccctagtttagaggttagggaaatgtatcagagcaatcagaatcaaggaaacagtacaaatgtcagagaacaaaaccacagtaggaactcctcgagggcccctgtactttgcagtggagcctgaaacccaggaggcatcagtgatgtttgatattcaaggaatgaaaaagggatcactaagaaggtgaaccccactgtctccctctcaaacaagccaaagccgc

SEQ ID NO: 145866 - DNA, 170 bp, Homo sapiens
gaagattctgtaaggagagagaaggggtggaggctggaagatgggcagagggccagggtttaagacctggcgtgggcctgaactcacctgaattattttacttgtagaaagaggctacaggttgggtgcagtggttcatgcctggaatctcaacactttgggaggccaag

SEQ ID NO: 145867 - DNA, 439 bp, Homo sapiens
aatatatttcacaatgtagaatcctctttaaaatcatgtaataaaatataattggttatcatgtattattctaatttagtgtttcaatgcaagtaattttatctatagtttgtgtatttactttcataaattaaacgggtctgtggttcttacctttgggttatctttgtcagatttctctatgacactagtgctagctgcacaaaatgatgacgcttactttcctattctctgcaagagtttagatattagaaaaatcattcattctttgaagagttgaaacattgcacctatgagactgtctggctgttttttttcctaagagttagttatatgatgggtttttatttttattttttttgtgtgctaaacaccttatatgctttatttcacctaattttgtcagtcttttttttttttatatactttaagttttagg

SEQ ID NO: 145868 - DNA, 356 bp, Homo sapiens
gccaaggaggaaggatcacgaggtcaagagattgagtccgtcctggccaacgtggtgaaaccccgtctctactaaaaatacaaaaattagttgggcatggtggcgtgtgccacaggggaattgagagggctgttggcggagatgttaaaaaagctgacatgctttcagttccaatctttgctaccatatccatatgggcacaactgaccttggctctagaggggaaaaaaactctggaatgagacacaagagatctggattcgggtgtgaacctgaacctgaacaggtgacttcacctcttgggcctcagttttttctttcctcttctaaataattctctgtgtgctgaatctatt

SEQ ID NO: 145869 - DNA, 356 bp, Homo sapiens
gtgctattctaagagcatctggatcctgtaccagccaaagcaaatcaaacaggagtgcttatggagcgcttgtttctaaaacaagtacgggctgtgttattgacacgtgccacaggggaattgagagggctgttggcggagatgttaaaaaagctgacatgctttcagttccaatctttgctaccatatccatatgggcacaactgaccttggctctagaggggaaaaaaactctggaatgagacacaagagatctggattcgggtgtgaacctgaacctgaacaggtgacttcacctcttgggcctcagttttttctttcctcttctaaataattctctgtgtgctgaatctatt

SEQ ID NO: 145870 - DNA, 221 bp, Homo sapiens
aggatggggaagaagaaaaacccaccacgctgcaggagagtgaactctcagagaggcagatagatgagcaatgagtctgctgacccactggtaaccaacagtaggaactttctgaggaagacacagttaatggcgccacccttgactcatatatcagagaagaggagatggagggagttgaagggaagaaacagtggaataggaaggcttggtagcacctt

SEQ ID NO: 145871 - DNA, 101 bp, Homo sapiens
ataaacacactagtaattcattttaccatgaggtcttcataaactccaagaggataaaattccccaggaggggctaggcacagtggctctcgcctgtaatc

SEQ ID NO: 145872 - DNA, 536 bp, Homo sapiens
catgtgtgagtgagtctgttacagctgcccaggagaggatgcaaaaggctgagggaatccaagcactgttagcacttggcattcctttctctgtgcatatgtaattagacatcccaccttcacaccaaaaattagagcattccaccatgctggttaaaaactccttgtgtggctcaaatgcatattattccattctgcggctgtactggatgtagctcatctcctaatcttgacattggcaggtatttccagcatattgcttaaaagcagtaggcagtgaggatgatggggaggcagcaaggggactgggctctggagacgctgtaagccttcacagcgcagcccccgcaacttattagctgtgtgactgttaagttacttaaccagtctgtgcctgggtttcatcatccgtaaaaaagggaaatgacagcagctggctgccagggaggctgtggggtgaaatctatgtgtgtggggttgttacaaaggcgtaagggccacagccagccctgcgagagtgctcacaaacactcccc

SEQ ID NO: 145873 - DNA, 295 bp, Homo sapiens
actcaactttcttccagtgcaccaaaaccgctaccttactgtcttacctgtaacatgtgtgtcagaggggtcctctttatgtcccaagtattggcctgtcctgttattggaatgcaagggttatctgggcttacctacagagcccaccctgaatacatgtgttttcttttttttctttttttagacggagtcttgctctgttgcccaggatggagtgcagtggtgcgatcttggctcaccacaacctcagcctcccgggttcaagcgaatctcctgcctcagcctcccgagtagc

SEQ ID NO: 145874 - DNA, 1064 bp, Homo sapiens
gagaccctgtctcaaacaaaacaaaacaaaaacaaacaaacaaaaacaaaaaaaactcagtttcctcatccataaaataggaattagatttcaatgttctcttaggtcccttctagctttaattcatatgtgattatgcagtaaccacaaggtattttttaaacctcctaatgtatggatattaagcagaagagtatttatatgaatacatgtttcacattcctttggtatgaaaatggtgtgttaagtttttcctttaaccactgagttgtgaatgtgaagaaggtggtggagaggaacaaaaaacagaaaggtattttgatcttgccacaaagcatacacacaaattggcacatgcagctgtttgccaaagccttctttttttttttactttttaagaaattatgttagggaaaataaattctgcttccagggacaacttcatggagcctatttacaaattaagagtcagcttaatttgtaacatttctaccagagccaagaatcccaaattcctggtagattagtgttttatttctaaggggcttatgcattcggctccaactcaactcgtctatgtgctgccagtaattaaaatgttccacctcagactgcacaaatggcttatccttctttgtggcatggcgtctgtctcaggaaaaaaggttttatgaaattccatggcaacagtcccaacatgtttgagacttcagctaaaggaatggatgtattttggtgtgtagtcttcagtatatcactgtatttccgtaatactagactccaagctatgccagattgcttattccctttgtgaaagaggagttgctcattacgttcttgaaatatcgcacatcctgttggttcttcaagggacaagagaaagagaatttggaagcagggattagtagaagagaaaacgagggaaaggaagcctttccaccagattagtgttcaagtctttgcagaggagaccaactttttttgttttcttttgttttgagacagtctctcgatcgcgccattgcaatccagcctggacaacagagtgagactccatctcaaaa

SEQ ID NO: 145875 - DNA, 1217 bp, Homo sapiens
gagaccctgtctcaaacaaaacaaaacaaaaacaaacaaacaaaaacaaaaaaaactcagtttcctcatccataaaataggaattagatttcaatgttctcttaggtcccttctagctttaattcatatgtgattatgcagtaaccacaaggtattttttaaacctcctaatgtatggatattaagcagaagagtatttatatgaatacatgtttcacattcctttggtatgaaaatggtgtgttaagtttttcctttaaccactgagttgtgaatgtgaagaaggtggtggagaggaacaaaaaacagaaaggtattttgatcttgccacaaagcatacacacaaattggcacatgcagctgtttgccaaagccttctttttttttttactttttaagaaattatgttagggaaaataaattctgcttccagggacaacttcatggagcctatttacaaattaagagtcagcttaatttgtaacatttctaccagagccaagaatcccaaattcctggtagattagtgttttatttctaaggggcttatgcattcggctccaactcaactcgtctatgtgctgccagtaattaaaatgttccacctcagactgcacaaatggcttatccttctttgtggcatggcgtctgtctcaggaaaaaaggttttatgaaattccatggcaacagtcccaacatgtttgagacttcagctaaaggaatggatgtattttggtgtgtagtcttcagtatatcactgtatttccgtaatactagactccaagctatgccagattgcttattccctttgtgaaagaggagttgctcattacgttcttgaaatatcgcacatcctgttggttcttcaagggacaagagaaagagaatttggaagcagggattagtagaagagaaaacgagggaaaggaagcctttccaccagattagtgttcaagtctttgcagaggagaccaactttttttgttttcttttgttttgagacagtctctcgtccagcctgggtgacagagtgagactccatctcgaaaaaaaaaatacaaaaattagctgggtgtggtggtgcacacctgtaatcccagctactcgggaggctgacgcaggagaattgcttgaacctgggaggtggaggttgcagtgagccgagatcgcgccattgcaatccagcctggacaacagagtgagactccatctcaaaa

SEQ ID NO: 145876 - DNA, 1020 bp, Homo sapiens
gagaccctgtctcaaacaaaacaaaacaaaaacaaacaaacaaaaacaaaaaaaactcagtttcctcatccataaaataggaattagatttcaatgttctcttaggtcccttctagctttaattcatatgtgattatgcagtaaccacaaggtattttttaaacctcctaatgtatggatattaagcagaagagtatttatatgaatacatgtttcacattcctttggtatgaaaatggtgtgttaagtttttcctttaaccactgagttgtgaatgtgaagaaggtggtggagaggaacaaaaaacagaaaggtattttgatcttgccacaaagcatacacacaaattggcacatgcagctgtttgccaaagccttctttttttttttactttttaagaaattatgttagggaaaataaattctgcttccagggacaacttcatggagcctatttacaaattaagagtcagcttaatttgtaacatttctaccagagccaagaatcccaaattcctggtagattagtgttttatttctaaggggcttatgcattcggctccaactcaactcgtctatgtgctgccagtaattaaaatgttccacctcagactgcacaaatggcttatccttctttgtggcatggcgtctgtctcaggaaaaaaggttttatgaaattccatggcaacagtcccaacatgtttgagacttcagctaaaggaatggatgtattttggtgtgtagtcttcagtatatcactgtatttccgtaatactagactccaagctatgccagattgcttattccctttgtgaaagaggattctacctggagcccagccatgtgtggaactgtgaagtttactcctctgtaaagatggtttaaagaaagtcagcttctgaaatgtaacaatgctaacccttgctggaaccctgtaagaaatagccctgctgatagttttctaggtttatcatgtttgatttttacactgaaaaataaaaaaatcctggtatgtttgaaa

SEQ ID NO: 145877 - DNA, 2285 bp, Homo sapiens
gaaagagcctggctatctgaggactcaaagagtcagcatcgggacttgtgagctcaagaagagaaaagggagtggtgaaactttgtcctaaaagttagcaccaggaacagaagaaaaaaacccgatatatagtgatacctcatcttttagagaatgggaagctatttttgtgttcacacagaaagtatagttcaaaaaacctctatatccagagttcagacaaggagaatgatttgagatataagtgccgatgaaggaggtcaattttgatctgaaaccagcagctggacctgggccacctcaggaaaaggactctgttctccaaggcagcacgactgaatggttctgagaataagccagggttcaggactcctgaccctttaggaccatggactcagaagagcctgaaggacaattgtgggctttaaacttctgagagcttgtaaagtaacacaagactgtgcctctcccttgccccagctgtagatagtctttgccccaccattgttatgaagatacacagggttttgcagtttgaataaattggatacaagtttcctctttttttttttccttttggagacaaagtctcgctctgtttccccaggctgagtgcaggggcacaatcaaggcttacttgccgcctcaacctcctgggctcaagcaacgagccatcctcccgtcttagcctcccaactagctgagactacaggcgtgggtcaccacacccagctaatttttgtactttttgtagagacagggtctcaccatgttgcccaggctggtcctgaactcctgggctcaagtaatctgcccacctcagcctcccaaagtgttggggttacaggcgtgaggcaccgcggctggcctgagtttcttcttaatactgtatcacaattgtgggctgtcttatgtgttgatatcgattgagctatttgaaataggaatgttaatgggtgtattaaatttttgtaaggatataacaatatctaccttccaaggatgttgtgaggttttccatgattttgtatatgagctaatgttacctttgaggggtggtgtgcattatgttggatgattgtaaattttcagtggaaaatgtaccgtgtcctaaatttaaagacatgaaaaatatcccaagatcatactagatcataatagcaattcctttacaaatgaattatggaggtaactgatctctaacagtttccttcatgttgttttaatgcacaagggcagaggatctgctgacccttggaaccagcgtgagctaaccacgtgctatagacacttcatggtgtcgcacccagggaagtcaaagcgctttgctccctcactgtctgtgagtcctcagccattagtaccccaccccccgctgctccaaaacttgagttatttcaaatgtttctcactgttcatctctccactgaccccactccagaaagcctggagagagtcccaagatgccacccaccttccccaatccctcgccacagatctgtgtctatctcacactctgtaagtgccgctttgcttcttcctctcttgaaaagactgagaacacacattttaacatgttaggaaaatggggcagcctaaaaaatgactgatcccaccgccagtgactcatgtatactccaggctagcagacaaggccctttttggtgggcctgcttctgtgggttcacagaaaccaaattactgtgggttgcaaagaattagcaggtcatttacaaagcagacatcccttcacccagactgtggttttgcatgctcaggttctcagtctatgagctttggtgcaggatcattttggctactggaaaaaccatagcttattttaaatttctggttgccaaagccaccacacgtgtggtctgtggatgaccattgtctgcagaatgacgaggaaggaacagaatgtggtttggggctcagggtggccttcccactgggagggaaggcgggagggagcccttgccctgggttttgacacagcctgtgctcacagcctctcctctcatctgcatttctcagaaatgccctccctgcccagtggtgactttccctcgtcactcctatggagttctacctggagcccagccatgtgtggaactgtgaagtttactcctctgtaaagatggtttaaagaaagtcagcttctgaaatgtaacaatgctaacccttgctggaaccctgtaagaaatagccctgctgatagttttctaggtttatcatgtttgatttttacactgaaaaataaaaaaatcctggtatgtttgaaa

SEQ ID NO: 145878 - DNA, 1979 bp, Homo sapiens
cactgcgcccagccacaacctcagatttctttggcaaacagaaatgtttaaaaacacaaaattttgctcaggtgaaacactgtgttactatcaaatctcacatccacataaagtttttcttttcggctttgtttcgtgaggaacagacagaacaaagtttttccaggtagcatctgtatcactattattctcctatttcctgtaccacccccacctccccaagccctactgaatgtgaggtttagaatgttttaaggagggtcaggtgcggtggctcacgcctgtaatcccagcactttgggaggccaaggcgggcggatcacctgagtttgggagttcgagaccagcctgaccaacatggagaaaccctgtctctactaaaaatacaaaattagccaggcgtggtggcacatgcctgtaatcccactaatttttgtactttttgtagagacagggtctcaccatgttgcccaggctggtcctgaactcctgggctcaagtaatctgcccacctcagcctcccaaagtgttggggttacaggcgtgaggcaccgcggctggcctgagtttcttcttaatactgtatcacaattgtgggctgtcttatgtgttgatatcgattgagctatttgaaataggaatgttaatgggtgtattaaatttttgtaaggatataacaatatctaccttccaaggatgttgtgaggttttccatgattttgtatatgagctaatgttacctttgaggggtggtgtgcattatgttggatgattgtaaattttcagtggaaaatgtaccgtgtcctaaatttaaagacatgaaaaatatcccaagatcatactagatcataatagcaattcctttacaaatgaattatggaggtaactgatctctaacagtttccttcatgttgttttaatgcacaagggcagaggatctgctgacccttggaaccagcgtgagctaaccacgtgctatagacacttcatggtgtcgcacccagggaagtcaaagcgctttgctccctcactgtctgtgagtcctcagccattagtaccccaccccccgctgctccaaaacttgagttatttcaaatgtttctcactgttcatctctccactgaccccactccagaaagcctggagagagtcccaagatgccacccaccttccccaatccctcgccacagatctgtgtctatctcacactctgtaagtgccgctttgcttcttcctctcttgaaaagactgagaacacacattttaacatgttaggaaaatggggcagcctaaaaaatgactgatcccaccgccagtgactcatgtatactccaggctagcagacaaggccctttttggtgggcctgcttctgtgggttcacagaaaccaaattactgtgggttgcaaagaattagcaggtcatttacaaagcagacatcccttcacccagactgtggttttgcatgctcaggttctcagtctatgagctttggtgcaggatcattttggctactggaaaaaccatagcttattttaaatttctggttgccaaagccaccacacgtgtggtctgtggatgaccattgtctgcagaatgacgaggaaggaacagaatgtggtttggggctcagggtggccttcccactgggagggaaggcgggagggagcccttgccctgggttttgacacagcctgtgctcacagcctctcctctcatctgcatttctcagaaatgccctccctgcccagtggtgactttccctcgtcactcctatggagttctacctggagcccagccatgtgtggaactgtgaagtttactcctctgtaaagatggtttaaagaaagtcagcttctgaaatgtaacaatgctaacccttgctggaaccctgtaagaaatagccctgctgatagttttctaggtttatcatgtttgatttttacactgaaaaataaaaaaatcctggtatgtttgaaa

SEQ ID NO: 145879 - DNA, 1510 bp, Homo sapiens
gagaccctgtctcaaacaaaacaaaacaaaaacaaacaaacaaaaacaaaaaaaactcagtttcctcatccataaaataggaattagatttcaatgttctcttaggtcccttctagctttaattcatatgtgattatgcagtaaccacaaggtattttttaaacctcctaatgtatggatattaagcagaagagtatttatatgaatacatgtttcacattcctttggtatgaaaatggtgtgttaagtttttcctttaaccactgagttgtgaatgtgaagaaggtggtggagaggaacaaaaaacagaaaggtattttgatcttgccacaaagcatacacacaaattggcacatgcagctgtttgccaaagccttctttttttttttactttttaagaaattatgttagggaaaataaattctgcttccagggacaacttcatggagcctatttacaaattaagagtcagcttaatttgtaacatttctaccagagccaagaatcccaaattcctggtagattagtgttttatttctaaggggcttatgcattcggctccaactcaactcgtctatgtgctgccagtaattaaaatgttccacctcagactgcacaaatggcttatccttctttgtggcatggcgtctgtctcaggaaaaaaggttttatgaaattccatggcaacagtcccaacatgtttgagacttcagctaaaggaatggatgtattttggtgtgtagtcttcagtatatcactgtatttccgtaatactagactccaagctatgccagattgcttattccctttgtgaaagaggagttgctcattacgttcttgaaatatcgcacatcctgttggttcttcaagggaagcctttccaccagattagtgttcaagtctttgcagaggagaccaactttttttgttttcttttgttttgagacagtctctcgcttgaacccgggaggcggaggttgcggtgagccgagatggcaccactgcactccagcctcggcaacaagagcgaaactctgtctaaaacaaaaacaaacaaacaaacaaaaaaacccaggcaaagtttccttgcagccaaggtgacagaactgggctgagggtggaaaagaaacagaaccagtgctccaggtgttttttaattttttaatttatttttattttttttgtatatgtatatatatgtatgtatattttagaggaccagggtctcactatgttgcctaggccagactcaaactcctgtgctcaagcaatcctgcctcagcctcccaagtagctgggattacaggcatgcacaaacaatgcccagctctccaaatgttttctgtcactacctgaagtgttgcatcggtacttcctacggagagaaaactaaatagaagtgtctctcccgtgagcccccaccactaccaccagaaaaaaaaaagagagaaaatgaactcatcagtctttagtttcctcaagttattctcccaaaaagacattcgccttg

SEQ ID NO: 145880 - DNA, 1666 bp, Homo sapiens
gaaagagcctggctatctgaggactcaaagagtcagcatcgggacttgtgagctcaagaagagaaaagggagtggtgaaactttgtcctaaaagttagcaccaggaacagaagaaaaaaacccgatatatagtgatacctcatcttttagagaatgggaagctatttttgtgttcacacagaaagtatagttcaaaaaacctctatatccagagttcagacaaggagaatgatttgagatataagtgccgatgaaggaggtcaattttgatctgaaaccagcagctggacctgggccacctcaggaaaaggactctgttctccaaggcagcacgactgaatggttctgagaataagccagggttcaggactcctgaccctttaggaccatggactcagaagagcctgaaggacaattgtgggctttaaacttctgagagcttgtaaagtaacacaagactgtgcctctcccttgccccagctgtagatagtctttgccccaccattgttatgaagatacacagggttttgcagtttgaataaattggatacaagtttcctctttttttttttccttttggagacaaagtctcgctctgtttccccaggctgagtgcaggggcacaatcaaggcttacttgccgcctcaacctcctgggctcaagcaacgagccatcctcccgtcttagcctcccaactagctgagactacaggcgtgggtcaccacacccagctaatttttgtactttttgtagagacagggtctcaccatgttgcccaggctggtcctgaactcctgggctcaagtaatctgcccacctcagcctcccaaagtgttggggttacaggcgtgaggcaccgcggctggcctgagtttcttcttaatactgtatcacaattgtgggctgtcttatgtgttgatatcgattgagctatttgaaataggaatgttaatgggtgtattaaatttttgtaaggatataacaatatctaccttccaaggatgttgtgaggttttccatgattttgtatatgagctaatgttacctttgaggggtggtgtgcattatgttggatgattgtaaattttcagtggaaaatgtaccgtgtcctaaatttaaagacatgaaaaatatcccaagatcatactagatcataatagcaattcctttacaaatgaattatggaggtaactgatctctaacagtttccttcatgttgttttaatgcacaagggcagaggatctgctgacccttggaaccagcgtgagctaaccacgtgctatagacacttcatggtgtcgcacccagggaagtcaaagcgctttgctccctcactgtctgtgagtcctcagccatttaggtatacctaaatggctgttacctaaatggctgtacctcaaagctggccgccaccgctgccacctgatcagagtgaaataatgaaggtggtcaacctgaagcaagccattttgcaagcctggaaggagcgctggagtgactaccaatgggcaatcaacatgaagaaattctttcctaaaggagccacctgggatattctcaacctggcagatgcgttactagagcaggccatgattggaccatcccccatgcctctcatcttgtcctacctgaagtatgtcattagttcccagatacgtcctagt

SEQ ID NO: 145881 - DNA, 633 bp, Homo sapiens
tcaaggtgcatgtgtgagacccggtctctgatccttagagatggtcgggggaatcgagtgacccagttgtctcgtatagcaggcttttctttaaatcaaaagaatactgggctccaggatcatgtatcagactcctctgatccttctcgtgtagttctagacctcacgcagcatagataaggcaatgcttcccatttcttttgatttctcaggagaatgggagattttggaatgggaaggcgacttaaaggaagtgtaaacagagcaacaattattaaatagaagagtagaatgacaggatggacggggaaacagtgtgggagagtagaaatgggttttgacacagcctgtgctcacagcctctcctctcatctgcatttctcagaaatgccctccctgcccagtggtgactttccctcgtcactcctatggagttctacctggagcccagccatgtgtggaactgtgaagtttactcctctgtaaagatggtttaaagaaagtcagcttctgaaatgtaacaatgctaacccttgctggaaccctgtaagaaatagccctgctgatagttttctaggtttatcatgtttgatttttacactgaaaaataaaaaaatcctggtatgtttgaaa

SEQ ID NO: 145882 - DNA, 384 bp, Homo sapiens
gttactatcaaatctcacatccacataaagtttttcttttcggctttgtttcgtgaggaacagacagaacaaagtttttccaggtagcatctgtatcactattattctcctatttcctgtaccacccccacctccccaagccctactgaatgtgaggtttagaatgttttaaggagggtcaggtgcggtggctcacgcctgtaatcccagcactttgggaggccaaggcgggcggatcacctgagtttgggagttcgagaccagcctgaccaacatggagaaaccctgtctctactaaaaatacaaaattagccaggcgtggtggcacatgcctgtaatcccagctacttaggaggctgaggcaggagaatcgcttgaacccag

SEQ ID NO: 145883 - DNA, 2814 bp, Homo sapiens
  misc_feature (252)..(252): n is a, c, g, or t
  misc_feature (941)..(941): n is a, c, g, or t
  misc_feature (1161)..(1161): n is a, c, g, or t
acaaggcaggatgtgtgcgtgggaggaagattgacagtgactgagcctggacgggggagaccaggtatgaggtctgaagcacctggaacagaaaggacaggacagatgtgggcacactgcacgtgtagaatcaaaggactgacagcaggtcgaatgtgaggaatgagggagggaaagaatcaggactcaagtgccatcctggctgcctcaaaaaatgatactgtcttccagagggaaaggaaagataacaanagttactgctttgtggcgtacatgtgatgaatttcattttggacattccagtaggatatccaagtggaaatgcccagtaagccttagacataaggatctggatctcaagagaaaaattgaggttgaaccataatatgtctttcccctcgaatcatgtaggtttctcttttgccttctttcattggcctaagtggtcctaaatgctactgctgatgctgtcttagtttgcgactgttgtttgcaccccaccttttcccaaaggtaatctgtagacttgcatggattgggttaaggtggttaacctgcagctttgctgttcaaagcttggcttcccactaccagtttgccaacttaatgagtacttcaacttgagtcaaattagtattgttccaaatatcctaatagtatcctctatgtgtgactctaggtcttacaaaatcaaggtgtcctttctcattgagacttccttattaataaaatatttcttctattaaattcaacctggcaccaagcatagtaggtaataggcacacacaatgactgtttattgaatgaatgaataaaatgattatgttagggcattctgagcaattcatcctaagcagctaattttctcctacttcttttattatagtgtgtgtttgtgtgtgtgtgtgtgtgtgtctgaaatgtcccatcctacaggttcnttaatatttaatagaaatgaaagaagaaaaatacctattaagtgttttgatttcatccttttcattgaattgaaaaagtatatcatttattcctgaagagaaatctagattttgctctatattaaacatttgacatttattggtccttaatgctaatatagataccagcctgctggttgtcacattctatctgtttatacgaaggttgtagacacacagngtatgtacatatgcctagttgctctcattccttttgtttcacatctcaagcctaacccagactgaaaaggttttgaaggctgagattattcatcaccccatcattatagaaagcagggctggcccaaggttctcacagtgggagcaaggtggattttaactctgatcagtgttgtagctcaaatataaaaagaactgcagcacaaaagtcacaaggataaatgatcccctcgttcttctcccataaaaataagcagccaattgaaggtggaagtcagtacagtgcggcattcccagaggcgacagaacctaagattccatttctaaagacactgctcaacaagaagaccacctgggatgtcttacataaaaccattggcctggcagcttttggctgagttctctattctggttcaagccagcatcacagcctatctgtggttttaacaactgatggaatttgtattttgagaaccctcatccgttagcatgaagcaaactcaaagcattgttgctcatcagttgtcatctgtttgagaaagattttgatttgtttacttgtagtgaagcttgaccatacttctccaggggctttttaaaaagatgaatgtgtcagcttgtagatttgtccccatgaatgaaaccacaagcaaattctcttctctcttccagcctcccttcctccctcttgtttcttcagtggccatctgtgcattatgttcccattgccaggccctcttcaagcagcttatctatgagtgaattcagaaacttcaaattataaaggacacccagataattggcctgttctccaaagtatctgtcccctgtgctgctgccagattccttcttaatgaatacatccagtgacagtgggattcttgagcttgtccgtatctgtgagaaaatgagctctcctgctttgtaacagcttgtggctcagggaaaaaaatgacagccattgcacaagtttcctttgaatgtagttttctttcccataaatgatactttgagaatacagttaaggggttattagttttctatttcatgcttggcctgtgtgtgagaataacacaagctgtcactgcaaatcagtagctaaaaatgctttgtctggttaatgtgaacatttaatatttggctcaattaaaaattaaccgatgaaagtacatgtcattggaatttgaaaataccttttgtacggaatacttaaagggcatcacccatgactaaaccagtgcttttaaaatatggagaatatggggaaatttaatatgagttgggatacttgactctttttttaaaacctctctacctgtttggcacaacagggtattgataaagagtgggctcattgttatggcaaaggattcacttgcatctctgtgtttttaagtgggtaattgtttttttgcactcagtcacatgattaaagcagacagaacaagagatcagttattcatttataccatacttttaaaaaaatattgagccaggccctggggaagtgggaagtgagagccagagcggcgtggctgatagtctagggcagtgctatccaatcttttggcttccctgggccacattggaagaagaagaattgtcttgggccacacgtaaaatacgctaacacgaatgatagctgatgagctaa

SEQ ID NO: 145884 - DNA, 935 bp, Homo sapiens
tttaagttagccagacgtatctccagttagtcctatcttgaaacagtcatctctaccaactaagtaaaagagaaccatgttctacttaagaagtaaacttttacaaccattaaaacttttaaacattaaacttatacaggtggtggctcacacctgtaatcccagctacccgggaggctaaggcaggagaatcacttgaagccaggaggcggaggtttcagtgagctgagatcgtgccactgcagtccagcctggcgacagagtgagactttgtctcaaaaaaaacctgagtagaaccattgaccattgttaagtcaggaccatctgtagttaggagaaaggatagaggtagcattgtattcagtagtctgcctccttgaagtaggttactgtaagcaaactttgcctttctgattggcaagttatggtagccacccttccataccagaaagaatatacaatttgaactagaggttgctttcttcttttaggtgtcatgtagggtaagactccagtcctgagactttttacctgatccccaactgacccagtgcgtagtataggtggcccttggaggaggggaggaagaagagtggtgtccttttcattagagtcctgatggaaccaaatccttcggaatactagcttttttctttttcttttttttgaggtggagttttgcgccattgcactccaacctgggtgacagagagagactccgtttaattaaaaaaaaaaaaaaaaaaaaaaaaaaaagttattttatgcaaaaattagccgggcatgctggtgcacatgtgtagacccagcaacttggggtgctgaggtgggaagattgcttgagtccagtagattgaggttgcagtgagccatgattgcaccactgcactccatactccagcctgggcgttggagtgagaccctgcctcaaaaaa

SEQ ID NO: 145885 - DNA, 198 bp, Homo sapiens
tttgtaccacaggatctctaaacacagccaactactacatctggagctcagctgaagaaacaaatgtgttttccaacttggggataaaactgagctgtactggccctgggagcaaatggcatattggttctccagtgtggtatcaataagggatttttcaagagtattttttactacacccaacgtttctttatgtag

SEQ ID NO: 145886 - DNA, 518 bp, Homo sapiens
ttaggaagtttgacttattggaggcagggcatgtgtgtcagggagacagagcatgtgagtgtgtgtattaggagaagagacgaattcagaggtatacagaaaagaagaatgatgaattcaggcaatcttcagagttgaattacagaatcttttttctgagagtatggttactgcggcaaggtagtaataggacatgagcctgctaagtcacttcattatgaagctattagaatttaggtgatggagtttgatgacaggggtcttttccctgcccttctactgtattagctgctcagggaaaaaaaaacagaaaactaagaaatagccttatatagaaaattatacccatcaaatggttccaaggtttctgttgctgggtttctgaaatgagctgcccaagatagcagtttggtcatgttgctgacttcttgctgacttcctttctcctcctcctcctccatcgggtcctcaggctgggtcctgacccctctggattctttcttttcctgcaaatgtgg

SEQ ID NO: 145887 - DNA, 333 bp, Homo sapiens
ggaaagtttgcctctactgatattagcatgatatttaccgggagaaaatttgttgcagacactgaaagggctcctctaaactctaacattggtgccgatggattgttaaaactatgtgcaaccaaggataacttctctttattttctttatataagttatctcatttttttctctcaacagtctcataatagagaaacggaggcttagcaagcttaaggtcacataattagtaagtgcagggctgagactcaagaccatctctgcttgtctcctaatcctgtgctgctttggctcttcaacagtttaaaagttgggattctttaaggataagg

SEQ ID NO: 145888 - DNA, 588 bp, Homo sapiens
cagtaaacagtggctgctactctttaaacaaaacgtataaaatggacaaagcctcgcagtgcagtcgccagctgcacccacggtatcggcagggctgtgcacggccggcgtggaggggcaggctcggcgaacaggatcccagtgtggcgcccggagcagctcttccagggccggaacaggacttgggagaaaacgcggtttttctgccattgttccctcgcaatgcttcaattcaaacaatactaaggttgtctcgttcgcctcctcgccccgcccctttacccagagactcccatttaaaaacacaaaaaaccctcagtccgtgacagagactccccaccagctcccgagttccaggaaaacttttttcgccctaagcctggcgtctcactgcctagtgactgacacactttcctggcctctacggctgcagctttgcccaaagcaacgaaaacggtgcctcaggctacattttaagttcccagttcccgtgaaaggccgacgcttgcaaaacacaggattgacgctgggaacccaaggggaaggaaaggtggaaagcatgatgagggaagagcaagctttctcaga

SEQ ID NO: 145889 - DNA, 231 bp, Homo sapiens
ggggggcctccactgctgccagcccttaggtcaacctgaacctccaccagcagaatctccctcagcccattccatttcttctctcaaaatcctatgctgctcacgttccacctcttccaggaagccttcctagagttgcaggagtcactttccccggcctcctgctgggtatggttctttcacgattgcattataggaattctctgggaggctatatcttgtctcctcact

SEQ ID NO: 145890 - DNA, 1073 bp, Homo sapiens
atagccaaggctagagactgaggcttccctgagaatatcacagcaaaccccttccagggcccccttctttgtatttcctccaaatgactgatctgcaaacaaagtagttgcctgccttccaatctgatagattgcaaaaagcatgtattgaaaggtgctgcctctgttcttctcccatctgaacaaaggtttctaaacctctttaatgtaaagtttgaaaagctggttaaaccaaaaccaaaaccaagcaccaccgtggcttccagagaactgtggcagggaggtctggatagcagccccaggaacagctcttgggatgtggttgccggcttgtctctgcgtatggagaattctggcatcagggtcatcagccaggtcatttagtgccaatcccatgctaggctggagaagatgccgagctagcaaatgccttctcagcacccttggctctgagtgccctgagagagtcctcttgccccactgagcttggaagccacatgcaattcccttcacttcagccattgcctcctcaccacctccagcaggtgctcccatgttctcaggatactgcacaccccaggcctctggtctgaacatacactccccaccaaactcactcctccatcttccaccccagtgaatgacacaggctggccatccagagccaggctccgccctccttctccccagatcctctccttccacccctgaacactacttcatcctctcctctccatcacctttgccacagctgtggtgcaggcagcataatcattcacctggactgtttcacaggctcctaactggtactccctgtagtccccatgtggccttgccgggtccactgtaagccgggtccactgtaagcatgcacttactgtaagcatgcactagtggccgcctcacccccgctcccagcctctcctaaagactccatcttcctccttggcccctttgtgacctgcctgtccaatcccagagcaggcctcctggtaaattctcccaactcccctaggaagagtgagttgcttctgtcctcgtgctaccccaggactatgcacacgccgcttgtc

SEQ ID NO: 145891 - DNA, 591 bp, Homo sapiens
aacatgtttaagaaagatagatgaagtcatttgcattaaagtacagcattgaaatactacattgtgtttatttttacatttttgcattaaaaaaaaacatgcagtaaaagccaagttaaatttcatattaaagcaagttctagtatatgtattgagttcctggtagtcacataccttgttcacatctacaccatacttcatagtatgatttgtaaggggagggactgtggggtgacagttttacatttactttttcttcttaatgcagctggatctaagtaaaatgttttgaagtttatcaaaaattcaatatacttttaaaacatatagggtcagggttgggggagaaaatacaggtatagtaagtaagaagtgacctatgaagaaagcgttgtgaggttatatgttggttgactgtgattaaaatgtggggctggtttaagttgtaaatggtggctgattgctgtgtaactatgtacatgattgttaggatggctgtcctatattttgtatattggaataaaaatttctataaattattgtaactaaaaaagtaaatattctaaattaaatcccacttcttaaatcaca

SEQ ID NO: 145892 - DNA, 286 bp, Homo sapiens
aatttttatgtctttagtagagatgaggtttcaccatgttggccaggctggtcttgaactcctgagctcaggtgatccacctgcctcggcctcccaaagtgctgggattacaggtgtgagccaccgtgcccagccccacacctgttcttcaaagactctgcttagaggtcacctcctctgtgaagccctccctgataagggacttttccaatgcgttagtttattgattcacctggctcctccagcacttaatatattcctagagcacagctgcccctccacatca

SEQ ID NO: 145893 - DNA, 525 bp, Homo sapiens
actcatgttctagggaagcagtgtgatatggaagactccaggcttgggagcctggcagatgtgtgttaagatggggatcaactatgcaagatagttagctttctgaatctcagtttcttctcctgtaaggtatgaaaaatagtacctcaaagaggtacagctatgtttgataacttgcctgaggctcctagtgtctcggcacatagcaggttctcactataggcattattaaggggaataggattggcatgtagacacaaaggtccctgaagatctaaaactgcataagactgggttcttgctcctttccttcatagcctctgatgagggagactgtcttttcacacgtattgagccaggagtgctgagatgatcgcagagacagttgagagaagacaaggagaaaggtgtgaagagcctgagtgatacacagagggacccttggaaatgtaagaactatagtgtgataaatcatgtctctggtcaacagtaagggcacaagtttattcgtgcatagtgcagtct

SEQ ID NO: 145894 - DNA, 804 bp, Homo sapiens
cggcctcctagagtgctaggattacaggattgagccaccatgcctggccggatatgtaaattttaatagattctgtgaaaatgaattgtaaaagtttgtaacaactcccatgtttactcagaaccatgtgtgaatgttccctattcctacaactttggcaatgtttagtgtatgctatgaattttttatacagttactagtttaatgggtgaaaaatagtatttgttttaattttcatgtcattaatagtgaagttaatattctcttattgccttttttttttttaagagatgggtctctggacaggcacggtggctcacgcctgtaatcccagcgctctgggagaccgaggtgggcggatcacctgaggccgggagtttgagaccagctgggccaacatggagaaaccccatctctactaaaaatacagaaaaattggctgggcttggtggcacgtgcctgtagtcccagttaccaggtggctgaggcaggagaatcacttgaacccgggaggcgggggttgcagtgagcccatattgtgccattgcactccagcctgggcaacaagagcgaaactctgtctcaaaaaataaataaataaataaataaataaatagatgggtctccacgctttgttgccttaggctggtttccaactcgtgagctcaagtgatcctcccacttcagccttccaaataggtgggactattttattgctctttgaccattttaattgtttttgtaaactgtctgttcatatcctttgcccattaaaaaaaggtagatcatttgtatatttcttat

SEQ ID NO: 145895 - DNA, 385 bp, Homo sapiens
gaaaaaaagaaagaaagaaagaaatgaggaaaaaggctaggggaaaaaagaggaagaattatccaagagctcgagaagagcagaaggagaagctggaggagatgctgaggctgctgctgctgttccccctcccccctgctgaaccccagaaggaggcaaggtggttgcaaagttaaggctgggacattgtctttgtcactcagagccaggccagtgagatgcaagaggaggaggtggcggcggcagaggaggaggaggtggtggtggaggagggggaggaagaggaggagaaggaggcaaaggagaaggaggcaaaggagaaggagaaggggaagagggagatgagatgatgaataaagacctgcggagaaggcggtgcgaggag

SEQ ID NO: 145896 - DNA, 451 bp, Homo sapiens
aatggtgcaagctcggctcactgcaacctctgcctcctgggttcaagtgattctcctgcctcagcctcccaagtagctgggattacaggtacctgccacaatgcccagctaattttttgtatttttagtagagacggggtttcaccatgttggccaggctggtctcgaactcctgacctcaggtgatatacccgccttggcctctccaagtgctgggattacaggcgtgagccactgcgcccgtcctaaaatcattttccacagtctttcaaattcccttatcttttgggaataggggattaaaaatagtataataggatatatttaataatttgattgctataaacaaagaaaactgaattggggatttaaaactaaatatgtgatgaatctattttaaactgcttttctttaaataaagtctgggccaactacaatagtgcacctattt

SEQ ID NO: 145897 - DNA, 374 bp, Homo sapiens
accagggaggcagaggctgcagtgagtcgaggttgcgccactgcactccagcctgggcaacagagcaagaatttgtctcaaaaaaataaaatatcaggccaggtgtggtggctcatgcctgtaatcccaggactttgggaggccaaggcgtgagccactgcgcccgtcctaaaatcattttccacagtctttcaaattcccttatcttttgggaataggggattaaaaatagtataataggatatatttaataatttgattgctataaacaaagaaaactgaattggggatttaaaactaaatatgtgatgaatctattttaaactgcttttctttaaataaagtctgggccaactacaatagtgcacctattt

SEQ ID NO: 145898 - DNA, 266 bp, Homo sapiens
tgataaattaattataacccagatataaccacagattaagtcctaacttttagaatgttttagagaaaaaaatgtatgggatcctcgaatacaatgaatagaaaccaactcacttccattcaaaagctgaaatccagacttggcatttttatgtggaaagaaatataaaatcctagataagtagacaattgataccaggcctttgctttctggaattttgaaaaatagaccttgttttacagctttatctgcagttctatgtgaaa

SEQ ID NO: 145899 - DNA, 761 bp, Homo sapiens
gagaactcacccagctctccccttgaaacttggacacactgaaatggatcaaagtgggccatttccacatttgctccagcaaactgtggtctcaggaactaccatgccatttcctctcctggagaagttctaggtattacctccacaacatttccaactgggggactgagcccacttatcagagaagagccgccatccacactggagcaggaacagggagaaatccagacaggaacctcatgtcacttcctagggaatatgggaagaaacatcagcagactttatgatgtcagttgggcctttggaggcattctggaaggtggcctcagcatcactgatgattgacagatgctacagcaaaaggtccctctagcgttgcttgactgctggggaagggacagtgaccggcactttgacccacacaaggataggagctgcctactttgtgtggtaggtgagagcagagcctgggagcccatcctccctctacttggagcaaagttgtgctggtgatgccccattattgggccagttgattagaaaataggcatttcactttcttggaaagccatcggactaagcccagatgtgcatttagagcactcagcattcttctctttgaagcatgggatgtctgtcctccaggaagagatttgatcttaggttgttacctccctttcacttcttttccacctcaattcaatacttaggggttggcttgcctctgcaggtttgatgtgaatgccactgggtactcagaa

SEQ ID NO: 145900 - DNA, 399 bp, Homo sapiens
cattgccaatcttgaaggaaaagaggaacagcacctgccggtgttgtgcaccccagagaggtggggctaaaggatgactcactcttggcccctggtactgaggactgcaggtgtctgcaatcctggaggaggccagtaggggcgtcccacctcacactcccattttatcctcatctgctcctacttaacaggtcctctgcctgctcctgctcaccctactgacctgtctccctcacacagggagtccccagaagcagagagaggagcgtcctctcagaggacttgccaggaagctttcttctgcctggagtccaccgttttccctcaatctggctgcccaccacctttctttctctgcttctctcactctcatattcccgcagatgggagatgacagtg

SEQ ID NO: 145901 - DNA, 559 bp, Homo sapiens
ccgatgcatacttgcagattacattttaagcccttataatgggtaggaaaacatctgtctctattatttccatggtatttggtatgaagacagaatcctccaccctgcccttaaaatttcacatagaataggtatgctttctgccttcgtgcccaggtcaaactcacttgacactgcgtagttttaaactgtgtaataaattgcccgaggtgcaccaactaatgtgtgaccccggatcacactgcttgccccacaaatccatactgtgtgaaattgaccttgctggttgtttttcaagtgggtctttatagcatcatagaatggaaggagtcttaaaaacaaaaagactgagacagagcttgctgaaagaaatgactcattactggctgaaccgggaatggaatatatttccaatcttgagaatattgtccagcaggctccctcatttccctccggctgcctttatctgaggtggccaacttgaaaccaaaactaaagcttctgactctcgtggttcctggatagtcttgtgtttctgtgtgtttgcatcatactgcga

SEQ ID NO: 145902 - DNA, 361 bp, Homo sapiens
atgagatttgggtggggacacagccaaaccttgttgctgggcatcctgtattttctctggcaatcctcacttggacttgaattttcagcgcccaaaaccagaatgtcctctcctacaagcaagaatctcagagctgccagcgcccccatgaattcccccaggtcttcccccaccccagaccgtgtggcgggtgagcctctgtctaactataaagagccaagcgagagagggatgcactgaggtggctctgcaatgcatgtttgttgagggccttctgtgtgtcaggcactgagccgggtgctgtgtaggtgggatatgaaaccatgaagcctctctgtgaccaatacacagaaatctcaac

SEQ ID NO: 145903 - DNA, 277 bp, Homo sapiens
ggtctcgatctcctgacctcgtgatccgcccgcctcggccctccaaagtgctgggattacaggcgtgagccaccgcgcgtggctgattcatcagtcttttatggttatagtctgaaagccttttccactcttaagtttcaccgatattttcaaattcttataaagttacagttttttgttgtttgattgttttagagttggatcttgatctgtcacccaggctggggtgcagtggcgtgatcacagctgactgcagccttcatatcctcgctaattt

SEQ ID NO: 145904 - DNA, 515 bp, Homo sapiens
aaataaaaacctggtcatttatgctatatttaaagcatttaaatcactttcagaattaccactgggaatgttgtattaaaaattaaggccaagcgtggtggatcacgcctgtaattccagcattttgggaggctgtggtgggcagatcacttgagctcatgagttcgagacctgcctgggcaatatggcaaaaccccatctcgacgaaaatacaaaaaggccaggtgcggtggctcacacctgtaatcccagcattttggaaggccaagacaggtaaatcaccagagctcatgagttcaagacccgcctgggcatcaatggtgaagcctggtctctacaaaatatgcaaaaattagccggatatggtggtgcgcacctatagtctcagctgttcaggaggctgaggtaggaggatggctttagcgtaggaagtaggggttgcagtgagccaagatcatgccactgcacttcagcctgtatgatagagccagaccttgtccaaaaaaaaaaaaaaa

SEQ ID NO: 145905 - DNA, 206 bp, Homo sapiens
ctgccatgctcttcgcttcattgcagcattcgttattggccacccagctattcaagccacgctttgttcatcctgatgggttttctcctaccttctctacctcattgcttcgttaactggaatttcattaagtcataattactactgctagattcttgtgacttcgtctatttaatctctgacggtaagggagatgacggagagac

SEQ ID NO: 145906 - DNA, 277 bp, Homo sapiens
cgttgtctccttagacaagaaactatgttgcctcttgtcttcacctgtaaaatggtaatatttacagctcacataagattttgtgaatcttaaaccagtgccactcatcaaacattattcaagtgggaattcctattattaacttttagtagcaaaaactagaagcaataaattatcaactcatcactatttttacattcaaatgactggtactgtaagctcctggaaggcagagaccataccacacatttacatagcagctagacaaagggaaaca

SEQ ID NO: 145907 - DNA, 499 bp, Homo sapiens
ttctacagatgaggatcctgaggctcagaggagtaaacgaatttgcccatgcacacagctagaaagagtcggagccaggaggcaagctgtctggccccagcgctaggttgtgtggcatgtgtgggggctgtacgtgtggagtgcgtgtctatgtggtacgtatgatgtgtgaggtgtgtagagggtatatgtggggtgtgtgtgtggtgtgtatatgtggagtgcatgtgtggtatgtatgtgtgtgtatgtatggagcatgtgcgtatggtatatattagggatccctaaccctcaggccaccagctggtacctgttgggaaccaggccacacaacaggaggtgagcagtgggcaagtgagcgaagcttcatctgtatttacagcctctccccatcactcgcattactgcctgagctccgcctcctgtcagatcagtgacggcattagattctcataggagcacgaaccctattgtgaactgtgcattcgaggaaacc

SEQ ID NO: 145908 - DNA, 514 bp, Homo sapiens
caacctctctgcccagattcaagcaattctctcgtctcagcctcctgagtagctgggattactggtacccgtcatcatgcctggctaatttttgtatttttgtagagatggggtttcaccatgttgttcaggctggtcttgaactcctgaccttgtgatctgcccacctcggcctcgcaaagtgctgggattacaggcgtgagtcaccgtacctggcctactctgtcagttttaccatcttctccttaggtttctggcgcaggggctttgggcttggcaggccaggagtgcccttgggcggggtcaccacaagggctgcagccctgattcagtattcttaaccagctggtgggatgcttcctcctctgtcccccatggttgctgtttcccaggaggccctgtggtccttcatgcaagttgcctttggccccgctctccaagtcagtccaggctaatacagcctcatgctgaaactcttgtgtttacctaaactctgagtgctgtttggatgcta

SEQ ID NO: 145909 - DNA, 228 bp, Homo sapiens
ccctccttctgccttatgcccctcagtcaaattctttcttctgaggaggaaagaattgaggttgctgcagatttaccaccagtaacttggataccgtccaccagtaacaacttccgttaagatggcaatacacctcaaatttatttttattttgagacagggtctcactctgttccccaggctggagtacagtggcacaatctcagctcactgaaacctccacctccc

SEQ ID NO: 145910 - DNA, 357 bp, Homo sapiens
cctctgcctcccaggttcaagcaattttcctacgttagcctcctgagcagctgggattacaggcaggcgccgacagtattaaatgtatcttttatcagtaatgagtggtaaaatgtctttcctaggaattttacatttatgagatagaaacagaaagcagacatcttgaagcttttttggttgtatgtattaggccattctcatattactataaagaaatacctgagactgtataatttataagtaaaagaggtttaattggctcatggttctgcaggctatacaggaagcatgatgctggcatctgctctgcttctggggagacctcagaaagcttatacaatcatggtagaaggt

SEQ ID NO: 145911 - DNA, 1311 bp, Homo sapiens
agagtaagaaattttagccgaaataatatgtagtgacataggcttcaaatacaggtataactataaagaacaaatttaaattagaactttatacaaactatttcagtaaaaatcatttcaggtgaaccatattatgttgctgccttaaatcaatctgttgactttatatatgtatacatttgttgtataaatttatccaggaatttatacacatttatgttaaacacgtgtttaatgtaacaaacacatttacgtgtttaacaacataaacacatttatgtgtttaacatagacacatttatgtgtttaacatagacacatttatgtgtttacaatacatatgcagactctatataaacacataaatgtgtgtaatattcatactgtcaccttttcttactcttgcaaaggtgatgtaattcaagtttgacttccttgaaacaattctcgggatatgtctagttatattagaagtttagttgtgtcaaatattgttctaaaagagactaaaagcataggtgagaaatattcctggatgtagtgggaagtttttttaatttttattttttaatgagaattactaaagcagcaaaacacagccacaatatagtagaaagcactgtagatttccaatttgcatatattactgcagagtggattttgctacagacccactgtgtgatcttaattaattcatttcccatctctgatccttagttttcacatctgtaaaacaagaataaatgtctcccctacctcaaggcaggttgaaatagtatatgctaaagcccattaaaactttagaacactatatagatttaaggtggttgctgttattttatacagctgcaaatcactgtaagggtcatatttattcaagctaataataagaactccagactttgtacataaaatgctgtgtgtttgagtttactggactgaaactcatttgtttaaaatttagtttgaaaaataataaagaccagaataacaaaaatcttgtgggccctacattctttttcttactttccaatatggctttatccatttgtttcctcccagccaactaattgccattttataaaagtaatcttccctcacatttatgtaatccaattatagaacccattagaaattataaagtggaggccaggcctgataacaataactgtaatcccaatactttaggaggccaaggtggaaagaccacttgaggccaggagttcaagaccaacaggatgtctacaaaaataaaaaataaatgtggtaaaacatacccagagtcagtttgtttttccttccagtacttta

SEQ ID NO: 145912 - DNA, 216 bp, Homo sapiens
aaaatacccatccaagatgggtacttcaagccatgtttgaattcttgaggtggcagttttttatgccagaaagagctgagctttggagctagatggaccagggttcaaatctcccctctgctactttaccttctctgtgactttgagcaagttaatttaactgtagaaactcaatttcctcatctgaaaatagagataattgtatctccttgggtg

SEQ ID NO: 145913 - DNA, 689 bp, Homo sapiens
tcatcttctctctggctttctcgtccccatctccctgagtccatctcattgtctcagaattgtttttctcatagattatctcataaataaatatagcaaattcaattcctatcagccatttaatgcaattaataatagctattatggatacaaataattaacacaaaattggcaacacaaaaatcacacgtagtaaaatttgtgactaaaaaattgacagaggaatcaaatctcaacaaatttccttctgcaaaattgataggaaaacatttatagtgggagaggctattcttaataacatttgatatatgaacatgtcgtatctttagaataaattgtcaatagaaaacaattctaataaatagttttgctaaaatgcataatatgtaaaattgggaagtttagctgtgatgtatcagttaatcaggtaattaaattgaccaaatggaatcactccaggtaagtcttttcttgatgaaattgatcaatattgcaataattctgattaagctgttaatatttaaagttatcttggggtgcgagtatcagggaccagatattcttgaggttcataacaacatttaaaatattctgtaaaccttatcaggctacaaaagtaagaatctagcttttaatttatgttggctactaattatatgtggggcgctttactcttcatgggcctacag

SEQ ID NO: 145914 - DNA, 722 bp, Homo sapiens
cacaaaaatagtatttgttattatgaagggccactaacattaatactctgagctccatggctctaagcccctaattgctcagtttcagtaaatttgatgttctatagacccatgcttctcaaactgaaatgtgtaaacatatcacctggggtatgtggttaaaatgcaggctcttatccaataggtcccgagtggggcctaagctgcatgtctaacaggctttcacgtggtgctgatactgcttgtcttcatatcatagtttgagtagcaagactgtggagtagcaagacttaaatactcttgaaattcccggggtacttccagcagtctaagaatttgtagacacggacaaggatggctagctgtgctagaactctgaggcttctggtcacagctgttttacaggggttctcctctacaccagaactctgcttgtggtaccacttctatctcctgtatatgagtggatttgctatgccaaatccacatagcagagtggaaatctgctatgccaggtattactggatctgcatgctattgcagtcccttgatgttaattataagaggatgatgagcaatggcagcctagaagagggtgaatcagagaggcaagtacgataggtatctggtgcttgatagggaggagagagagggagcctggaccatgaagagttttagaaagtttaaacttccctatatacctctgtaagccagatgttgag

SEQ ID NO: 145915 - DNA, 164 bp, Homo sapiens
gggttggggagaggagagggaagagcttgccaagctggaatcctgtctggccccgtcgtccctctttctaccagcttggtgtacatgtttatgttgtggattttctcctttataattgacccatgctgggtacccctttcagatccatcatgttcttagcccac

SEQ ID NO: 145916 - DNA, 278 bp, Homo sapiens
ccagcagtacagtgtgacaaatgctaggaagaggcatcagcaaagtaccatgggagaaaaggagatttggggtgtctggggatatgtttaatttgaggtgtgttgggacattcagttggaactgaactgatctcagacttcatttggcagttggatttataggctatagcttggagcagatagtatgaatggtgatatatgataagagtatctataggttgtagttgaagttaaggagtttggagagagtcatgagggtacaattaaaatgactgaag

SEQ ID NO: 145917 - DNA, 229 bp, Homo sapiens
caggatgctggagtttgagagactcagcaaggcccagaaccctcagcaggtgtgtggctaccattcctccatggcccatggctgcctccctaaggaggcacatgggaaccctaggtggtgtcaacttccctccacaaatctcaaaagcctttttggactcaccctggggcaaaaggcatgaaaaacagtatttgactgggcgtggtggctcacacctgtgatcccagca

SEQ ID NO: 145918 - DNA, 145 bp, Homo sapiens
gatccctgccctgtcagcagctcgcctcctctcactcccacagaatccccgtgtcagagctggagaggcccatgggaaacttttaggacaacctctaaccccctactcaagcaacaccacctccatcattttttttttttttgag

SEQ ID NO: 145919 - DNA, 267 bp, Homo sapiens
ccacctcagccccccaacatgctaggattgcaggtgtgagccactgcgcccagcctggtcttgtctttgggcacaaatatccgctagtgtctcattgcgtgtccacatttcctcatcagctctactggattagagcccagcgtaatggcctcattttaacttaatcacttctttaaagtcccagtctccaaatacagtcccattctgaggtagtgaaggttaaggctccaatgtgaattctgggggaacatggttcaacccaatgag

SEQ ID NO: 145920 - DNA, 384 bp, Homo sapiens
cctcacttcaacaccagtggttttcccgtcagatagtgccgaattttttatgaactatatggcagtagaaatgtccccatcacttcagacttaacaagtgctatactagatttgagggcttagggaaataccagaaaaaaatgcatattttataatttgtaaatgtctgtgcaatagatcatgttgccttcaacctatcaatgtataataagagcataaatgctaccatacttcattataccattcacttaaaaatatatactaaatgactttaataaactaatgccatatttatttgaggttctttgattattcgaattacaattttaacacattccctatttagttttaatttttactctttatgggttcattctggttgct

SEQ ID NO: 145921 - DNA, 276 bp, Homo sapiens
gctccgcctaatgactcgatctagctcactgacaggattttccacctcagttatggcctgccactccatcccaggtcacagccaaagtcactgtgggaaggttaaaggctggaatgcctgctgtcccagatcccaccacaccaaaatcagttcatagaactgtctgttttccctggatgaagaccaaggagaaggagaccagagaagaagaccagaaaaccagaacaaagaggaaggtgatgatcagcatttcccatattttctcaaataggctcc

SEQ ID NO: 145922 - DNA, 246 bp, Homo sapiens
agtattttagtattactgtaggactcaagagggaattaaaactacaaaaatgacgcgtcttgtatgacacagaaagaaatgtttcttcacagagggaggagaaaaatatcttcaagagagaactaatagaatcaaatcaatgaaccatgtctcatctttttggataagtaactgttagtaatccagacacttcatgagctttcattatgtaaagtctttagcagaagctaaaggaggggcaccaac

SEQ ID NO: 145923 - DNA, 302 bp, Homo sapiens
agtgcatacttctcctttttccgctgccaactccattggtttgtaacatcttgttggcttgcccatgagcaatgccaagttggttctgaaaaggccttgccataggagccatgacgaagtcacatgcaggacaaagtacagaggaagatggctggcactgcctttaaacagagatgccttccctgaactttcctttgaaatataaagatataaacagaacctgatgtggatactaaaagacacatcctcagtgatctggagataggctctgtcttcagggaagcaggtgaggcgaagagatt

SEQ ID NO: 145924 - DNA, 111 bp, Homo sapiens
aatcacaggcaaaaggatgagagaggggtaaaaggcctcaggatgggtacataaagtgcaaaagtctcttacacgtctgcctttgctagctggagtacaggatggagagcg

SEQ ID NO: 145925 - DNA, 405 bp, Homo sapiens
ccagcctgggcaacaagagccaaactccgtcgaaaacgaagcaaggaagggaaggaaggaaagagaaattatttcaacagcactggcctctccatgtcgtcactcagtctcctctataaattcaagtcccaagacaccctgccctacccttgcctctgggctgcttatcattcttgttctgtcttctttatccagttggaaaccatattacaaactaacttagatttccaagccagagagcaagtaaacacctcctaaatccttcatcaaggaaaacctcttggaaggttttgaagctcaacattcagaatcaaatgtagtcttacccagtaattccactcctagaacacaaaaacttgtgttatgaacacgaatgttcatagcagcattatttctaacagccaa

SEQ ID NO: 145926 - DNA, 313 bp, Homo sapiens
tgacatctatcagtatcttgaggacccagcattctttaggacacatgctggaacgcactgccttaatccactcgctgccctaatcaggagctgacctaggtaacgatctctgcctccctctagaaatccacagaagcaacatctctaacaaatctcccaccttctggagaccttaagccactaatacactctacatgtagccaaaggttatagctcaactctgccaaaacgtgggcctgctaggagtgtgagggccacagcacctttggcctgaggctgtcctcaaaaaactgaactcaggctgccccacaat

SEQ ID NO: 145927 - DNA, 416 bp, Homo sapiens
ccccactttagtggccacctcctgctgctgaaatgcctcatctcactgtcttctgttgcattcaggctcccagacagtacacaaggaacactcagccaaatgtatgcttttattcttagagaatgtcagcccaaatccctgcctcctttcctacctggtctgctggtatagacaatctagactgagacagggacatttttaacctctctactttgaacccaaatcagcctcctgcttcattctctcctgggacccacatggcccctcgtgccacaaactaggcctccctaaagaatctccatagaaatgctcaccttctacaggcctccaacactttctcttctctctcagaggccctcattgtgtcctgtgcagagagcatggccacctgtgccctgccccacaaagggaatcat

SEQ ID NO: 145928 - DNA, 1357 bp, Homo sapiens
gtcaaagactaaaggtcataactcaaggtcaagggtgtgtccccggttggtgcttaatgcattgagatgtgttcaggattccatgggggaggtcaggggtgaaaaggcccaaggtcacaaggttagaatttaaagtcacttgggggctgggcacggtggctcacgcctataatcccagcactttgggaggccaaggcaggaggatcacttggggtcaggagttcgagaccagcctgtgcaacatggtgaaaccccgtctctactcaaaacacaaaaaattagttgggtgtggtggtgcgagcctgtaatcttagctacccggggcgctgaggaggaagaatcgcctgaacccaggaggccgaggttacagtgagctaagatcacaccactgcactccagcctgggcaacagagcaagattccgtctcaaaaaaataaataaaaccaaataaataaaatcacctgggccgggcatggtggctctggtctataatcccagtactttgggaggccaaggtagctggaccccttgagcctaggagctcgagaccagcgtgggcaacatgggctacccagcaacattttgcgtctacaaaaatactgaatttacctggatgtggtggcaaatgcctgtaggctgaggtgggcggattgcttaagcccaggtggttggggctgtgccactacactccagcctgggcatcagggtgagaccctatctcaaaaaaaaaaaaaaagaggaaaagtcattaggtcaatgaaaattgattatctggtcaggcatggtggctcacacctgtaatcccagcactttgggaggctgagacgggcagatcacctgacgtcaggagttccagaccaccctggctaacaaggtgaaaccccttctctactaaaaacaaaaataagccaggcatgggtgacatgctcctgtaatcccagctattcaggaggctgaagcaggagaatcgcttggacccaggaggcagaagttgcaatgagctgagaccacgccactgcactccagcctaggcaacagagcaagactccgtctcaaaaaagaaaaaggccgggtgcggttgctcacgcctgtaatcccagcactttgggaggccaaggcaggtggatcacctgaggtcaggagttccaagaccagcctggccaacatggtgaaaccctgtctctactaaaaattacaaaaattagctgggcgtggtggcgggcgcctgtaatcccagctacttgggaggctgaggcaggagaatcgcttggacccgggaggcagaggttgcagtgagcccagattgcaccattgcacaacagcctgggagacaagagcaaaactccgtctcaacaac

SEQ ID NO: 145929 - DNA, 1261 bp, Homo sapiens
tcaaccaaagggctttaagcaacatctttacaaagcttccaccttgggggctgggcacggtggctcacgcctataatcccagcactttgggaggccaaggcaggaggatcacttggggtcaggagttcgagaccagcctgtgcaacatggtgaaaccccgtctctactcaaaacacaaaaaattagttgggtgtggtggtgcgagcctgtaatcttagctacccggggcgctgaggaggaagaatcgcctgaacccaggaggccgaggttacagtgagctaagatcacaccactgcactccagcctgggcaacagagcaagattccgtctcaaaaaaataaataaaaccaaataaataaaatcacctgggccgggcatggtggctctggtctataatcccagtactttgggaggccaaggtagctggaccccttgagcctaggagctcgagaccagcgtgggcaacatgggctacccagcaacattttgcgtctacaaaaatactgaatttacctggatgtggtggcaaatgcctgtaggctgaggtgggcggattgcttaagcccaggtggttggggctgtgccactacactccagcctgggcatcagggtgagaccctatctcaaaaaaaaaaaaaaagaggaaaagtcattaggtcaatgaaaattgattatctggtcaggcatggtggctcacacctgtaatcccagcactttgggaggctgagacgggcagatcacctgacgtcaggagttccagaccaccctggctaacaaggtgaaaccccttctctactaaaaacaaaaataagccaggcatgggtgacatgctcctgtaatcccagctattcaggaggctgaagcaggagaatcgcttggacccaggaggcagaagttgcaatgagctgagaccacgccactgcactccagcctaggcaacagagcaagactccgtctcaaaaaagaaaaaggccgggtgcggttgctcacgcctgtaatcccagcactttgggaggccaaggcaggtggatcacctgaggtcaggagttccaagaccagcctggccaacatggtgaaaccctgtctctactaaaaattacaaaaattagctgggcgtggtggcgggcgcctgtaatcccagctacttgggaggctgaggcaggagaatcgcttggacccgggaggcagaggttgcagtgagcccagattgcaccattgcacaacagcctgggagacaagagcaaaactccgtctcaacaac

SEQ ID NO: 145930 - DNA, 745 bp, Homo sapiens
accagtgattttccttatcatcctgcaatgcacaggatggaccccacaggatggcaaagaattaactatcccaaaatgtcaatactgctgagattaagaaaccctactctaggagcatgagctgttttagttttcttcaccatacttttatcagcatttttcaaatgtttgtttttaacaataagcatatagtacccttattattagaaaaatacatgagtaatatgtgattaagaagtctgtctaactaataagtttaaaagagctcatttagtaagggcaaagtaaaaattctaagagataaatcactgtgttttgattcaactggcagagttttgttttgttttctgcctttgtggtatataaatgtcttccaattgacggcatcttagatgaatgaaatacagcattttccagctggggagaggttttctctggagagctattcctacattcctagcactccttccttcaggttctgagtttctgtggtgttttttccttttctaattggttttcttcttacctctctaatgctattttccagactttcctctctggttttcagcaggtgaagtagcagagttcccagggttttgtgctcagatctgtaggtatctgtttctgtggaggctcctttgggactgttacccctctctgggctcattccttcataaagctgcagagctgacatgcaacttcaagtctgtgaattattccttctgaatattttttgaatgtgttc

SEQ ID NO: 145931 - DNA, 651 bp, Homo sapiens
aaaaaaatacaaaaattagctgggcatggtggcacatgcttacagttccagccacttgggtgattgaggcatgagaattgctggaacccaggaggcatggtgtgatctcggctcactgcaacctctgcctcccaggctcaagcgattcttgtacctcagcttcccaaccaagtagctgggattacaggcacatgccaccacgcccggctacttttttatttttagtagaaatagggtttcaccatgttggccaggctggtctcgaactgctaatctcaagtgatccgcctgcctcagtctcccaaagtggtgggataacagacgtgagccactgcgcctggctgagaatttacatgttaatctcatctcaaagcactctgacagaaacacccagaacaatgttttacgtaatatctcggcacctgtggcccagtcatattgaatataaaattaaccatcacttccatataaccagcaccacatcaagaaacaacagcacaaagctggctggattttgaatgttgattttaaagttgatccaaatattgttcagtatgtaaaatgtgcgtgctacccattgacccagtagttcttcttttacgaaggtagcctatggaaatattcacagagatggataaagaaaaataaaaa

SEQ ID NO: 145932 - DNA, 181 bp, Homo sapiens
cccctcttcagacaagacagtgggtattactataaactaggacaccagactttctcatttatctgggggatcctaagtgttgctaaccactgctgttagtgaggtttagcctctgcttaaggttaccaaaatctaaaaaccaaatccaaacacaattttccttccttctttctctttcttt

SEQ ID NO: 145933 - DNA, 342 bp, Homo sapiens
ccacagtgaagagaacatccagggtgaatggtgaaaaggaatcacagttgagcaccacaggaaggctttttttcctcctcggtaatcctggtttcctgtgtgagtgataagaaaaatagtattagaccattttcattcacttacgttgaaaatgaagtttaactgaacattttggctacatgcataatctatgctgtggtttcatttcctgtatttcattaatagtattttaaatgcttggttatctgaatccgctcctaaaaccatgtatttacaagattcagaaatcaccctcttaccaccaccttttactattattaactgctggttttcttacagttc

SEQ ID NO: 145934 - DNA, 198 bp, Homo sapiens
aaatctggtgggagagacagcctcattcacacatatccagcatataaaataatacgtaataggaaagccctgagcgagctctatgcaggttgctacagcagcactgaaggggtcattggtcctgactggggggatgcagcaagcatcacctgcctatgcagacaagcatgtttcagtgccacctccaacaaggaaaac

SEQ ID NO: 145935 - DNA, 387 bp, Homo sapiens
tttggtattgtatgcggtttcaggcatctattaagggtcttggaccgtatttcctgtgggtaaagggaaactactgtactgaccactgaaagcaattgttcttttatctatttttatttgtaaaaataattcagtccattcccctaatgatcaattgtttctacttatgtttcttttgcattcttgattttgtcattttacatatataatgtttatggaatttgtcatttagtcagctgatattttagtgctttctatatgacaggcactggggatacagcagtgaacaaaacaaacatccactccctcttgtagcttctaatgggagcagccaagtatagtatgtcacatgataagtgacaaagtagggagggaggacagagtgtg

SEQ ID NO: 145936 - DNA, 178 bp, Homo sapiens
aatctctttatcttgagacccttaaccacacccgcaaagtccctgttactgtgtaaggtaacatatttgcaggtcgtaggggttaggacatggacatccttcagggccagtcattcagtttaccacagtgttcgttttaattttttctcagcgcccgtcatttggtttacttcatttc

SEQ ID NO: 145937 - DNA, 255 bp, Homo sapiens
cagaaattagaccctgaggagtcaggttgagcttctcataagtttgcccccagtgtgaagtatctgacttagaatatctgaaataaacttttggggtaaggagattacttttcttttgtttgttttatgaaagagcttgacttgctgaaatattctgtgttatatattctagttgggaccactgccttcagaataagattaatatttaagctgttaaagtcagcagttggcaacccatgcttgataattttatga

SEQ ID NO: 145938 - DNA, 390 bp, Homo sapiens
gagcggctggggaagagggcagcattggtgctgcatccctgggctagcccacgagtcatccccaggcaggactagacccctgactgtaggaccacagaggcaggtgacctcaaagccctggctccaggaagatgagagtgggtgaggcagcccaaggggcctggaacttggcagaggcctgagcagcctaaggccagccctgaccccttccctactccacagagagcctctgtgtcccgggaccagtagacacaggtgggacagggtagatgagacagggccagcatttctagccatgcttaagggcctgtgagctcagggtttactcctggcctggccaaacctgaaccgccagcactgtccctgttcatgcagccataatctgagtac

SEQ ID NO: 145939 - DNA, 280 bp, Homo sapiens
tggtatctgaactgacttggaggttggagactggaccaggtggtcccaagcaagccctgctggctcagaaagagggcaggaatgtggttggcagaaaatgacatcactcacagccaattacagcagctgtcccaacagcctcccagcttctctcccaagctttgggaattgggtatgagcatatgaaagtcatgatgcagtcccttctgctgcacttagcataatcccagggcaaagggtaggcaggcactgtgcagaccccaccaagtcctgggcgctg

SEQ ID NO: 145940 - DNA, 387 bp, Homo sapiens
accaagtagaacctgctcaccagcacctacatccagtcttccctccttatcatccaatattagctcacctcacctgaagtctcccacattcctgtcttttttgccatggccctgagcttttacttctcacaatccctctgcctgacagagttctaatggaaaataaaagcaggcaaacaaaacaaaagaattcaaaaataaacaccaagagggtcactttacctaaatcaacagaagtaacagggtaaactctgcaaaggagaccaagaagcatacaacaaacatgctaggcttaagtacagctctgtccctaacacaggaagtcaggcagaggcttgaaaagcagggagcagagcacaggaagtcttttagcactgcagagatttc

SEQ ID NO: 145941 - DNA, 384 bp, Homo sapiens
gcggcgagtgcacactggatagcacgtgatggccagctctagagtatccccgcgacaggcacgcgctatcaaagactgcacaatataatgagaaacatcgtctcagacacttggcatcaccatttctaagtaatttcataactgtatccagttattcttgaatctgtagtaatatttcttaaactcctttttgccctagctctgtcactgttcaataaaactagattccccagggaccttccctttggcaaaattcacactgagtacagtttttgtttcattgatatttgtagtaaaatcatcctttataatcattgaaactgttagcacagactgcaggatctgatagtttgctctgtagttagatatttccagaatatccta

SEQ ID NO: 145942 - DNA, 571 bp, Homo sapiens
tatctggccggtggtataagttagaacaactactttggaaaacattttggctgtatcttcagaacacatgcagaccttgtgatccagcaattctaccctagagaaacctgtatgtgttataccaggatgtatgtacaagaatgtgcatagcagcattgtttgtagtagtcaaaaattggaaacatccagatgtctgtcaactgtagaatggataaattgtgttatgttcatatactataatatcatacagcaaagaaaatgattgaaccacagttacattcagtatcagagatggatctggcataatctggaatgattcaaaaaaagcactaaagaatataaacagtataattccatttatgtaaagttcaaaaacaggcaaaatgatattgaataagaatatagctcactattcttaaaatgcaagaaaatgattttcacaaagtcaagataatagatactttaaaagggagggatggagttgtgattggagaagggcacatgagtaggcttttaggactctggcaatgttatttcttgatctggggaaaaagataaagtaaaaagaaaa

SEQ ID NO: 145943 - DNA, 322 bp, Homo sapiens
gctgccaagactgactttggctgcctccaaaatcctaaaacactgactttcctaagtgccagtagtaggctatattgtgggggagaaaagttcaggaagagatctgatcctagcccttgggtgggcttccaccctttatggagaggtgaggcatcgttctggtacagtcagacaaagtttgagaaaggatatgattatgtgtcctggaacagacactaagaactttagtggctcagaggaggaagagtcagtgtgggctgtgtttagggaaggcttttacacaggaagtgagaccgtattgtgactttaatgatagatgtca

SEQ ID NO: 145944 - DNA, 784 bp, Homo sapiens
ttcttttgttttgagacaagagtctcactctgtcacccaggttggagtgcagtggtgcaatcttggctcactgcaacctccgcctcccaggttcaagcaattctcctgcctcagcctcctgagtagctgggattacaggtgccccctaccatgcccggctaatttttgtatttttagtagcaacagggtttcaccatgttggccaggctggtcttgaactcccaacctcaagtgatccacccgcctttgactcccaaaatgctgggactacagacatgagccaccacgcccgacccagcctgcccttattgatggcctgccgtatggatctcaaatttgccaagccagcccctaccagcctatacaccaattccttgcaacacatctcttaatatgtatctcctaccagttctgcttctgtggtggaaccctggctgatacaagtggcttttgtagtacgtccatccagtgtctgcttgtatacttcctgtgatgggaagctcactacctcttgaggcagtgcaattcatctttggtcagcttcaattttaacaagttctgctttacagtgaactaaatcaagtctttctatgagctttacccactgctgctggttcaaccccttggacacactcagagcaagattggttctttcacctcacaatagcccagcagatatttgaagttgggactcatgctgtccatgcccgctctaccaagtgtctctcatttgacctgctgctcctctcctctgacagtcccccaggttgttgatgcccctttt

SEQ ID NO: 145945 - DNA, 731 bp, Homo sapiens
cttcaagcaaaagtgaactgaaattaacaaaagattctattttgctttcttttgaactgttcttttaaacattttagaaaaccattcacccctgtgattgtttgacttcaactccataccttgagatattttttagggtaaattattgttaatgaaccacatttgagtacaccttcccttggggtgggataaacgttggttaaaaggtgcttttaaccagatcacggtgcactgcagtgtggatggtgtggtgccagacacgaatggaattaatagtactacagactaccgtgtgcttttaccaccctgcctgggtggtattctactgtttactatgaaatataaaactcattcaaagcagactaagtttttgttccattgttcttatattttatggcttccaggggccctttatgaaggaaataagtatagtagtaatactgctttggggaaaactgtgttcatgacaatctgtttttaaaacatgctgtttcacaggaaacggattttaatataaagtattgtaaggaactcatgcatgctgggaatcctaactatgccattaaaatctttaaattccaaccacctctttctgttaatggagaagaaatggtttaacagctgccttggggtagcgtaaaggtgggctatatgaggcattgctataccctttccctagcaccttggaatatctgttttcttatgttgggaatttattgggagccagaagt

SEQ ID NO: 145946 - DNA, 157 bp, Homo sapiens
ctctgaatctttgacatctcagatgaaaaaaaattgtaaattctatggacttaatattttcaacatacttcaatttttttttcaactataaaaatggagataatttcctagaaaattattctctactgggtcgtaagctagtcacgctgtataactt

SEQ ID NO: 145947 - DNA, 348 bp, Homo sapiens
tgggactcagacactgatcccggagcgagaatgcggctgacagttaaattgcagtgtaggccgagggggggaaaagggaccatgtctctttaacgggccctgcagacaaagcgtctccccttggagcgagcggagccaggcgcagccgcgcgcagacctgtcagcgcgtctcacgcgcttgggagagagtttgcaaagtcataattatatctcttaacctgtcttgctctctgcagaagaaggtcccattatattgaaatgagattattagccatcaaatactttctttctcgggagttttttttttttttaattcaaataccttaacgacttggcaattgcattttg

SEQ ID NO: 145948 - DNA, 149 bp, Homo sapiens
tcagaatgaaatatctgcccagtggtattgaatttcatgtattatgatttacatattcttctgtgtatcaactggttttatattacccagagaatgcttatggtggtggttgagagttgtgtattgctattgactgtacgggccataga

SEQ ID NO: 145949 - DNA, 534 bp, Homo sapiens
aaatgaaaacacaacatatcagaatttgttggttgccattaaagcattacataaaaacttatagcattaaacacctattagaaaagagagaaggtctaaaatcaatgacatcagcttcttttttttttttaagacagggtcttactctgttgcccaggctcaagggcagtggtttgatcactacagcctcaacctcctgggctcaggctgtccccaccttatcctcccaagtagctgggactacaggtgtgccccactaattttttttagtagagatggggtctcactgtgttgcccagactggtctcaaactcctgggttcaagcaatcctcctgcctcggcctcccaaagtactgggatttcaggtgtgagccaccgtacctgaccaatttcattttaagcaactagaaaaagaagagcaaattaaaaccaaagcaagcagaagaaaaaaaaaatagagatgaaagcaggaatcactgaagcagaaaacaggaaaacagtagcgaacattaaccccaaatctggttcttttg

SEQ ID NO: 145950 - DNA, 509 bp, Homo sapiens
agaaatgcatttaactggaaatccatgtgtttagaggttcctgtgttgcatataggcagtgaaatgatgggtaacatggaggaaggacccttaatgagaaagaaatgaagaagactgacaaagaagcaagtaatgagataatttcattccttaacataaactcatgaagtctgaagaattttcaaagcattatgataggctcattattttggtatagttgacattaggtttatgcagtatttatgttatgaaacttgggagtcaaaaaatatattaataatcttatgagtgaatctagtcttgttccagttttcacattttgaaatgaattctgatgatgcaggccattcgatagtttatcaaaaataatctttcaatgtaattcatatttttactttttatagcagatctctgtcctttgaaattggaactccgcctttgttttttgttttggttggaaaattgccttctaaatgtacaacatggcaataaaactacaatttatcatg

SEQ ID NO: 145951 - DNA, 622 bp, Homo sapiens
agtgtggcagcatggaaagaggatgaggtgctggcatccatgagatttaggttcgaatcctgccccagccacttccgagctggtcaccatgggcaagcatgttatttggtatgtgtgagcctttagagataagttcccttatctctaaaaccagcatgataatccctgcctaccacgtgggactgttggagaatattaaatgtggtatgcatgtaaaccacctaacacagtgccaagtgcaggtgacgggctcaatgacaagctaccaatggttagtttgaatgcattgagcacagtgcctggcatgttcaaggccgttgttttgggatgtcattcgctttcaggcctcccctggcattgtggaacacagagctctgcacatagtgggtcttctctaccttccctagcactttcaccagatgtgtttggctttgatgtttcagaggaaacaaaagctgacccctttgtgatcccctgcagcttacagccactagatttacaaatggcttatgtctaatctcctcccctcctgcatttatttcgatacaatgaagttggcgtttctctgtccttctgctggagttaaccttcccctgggttctggatcacatcccttcctgtc

SEQ ID NO: 145952 - DNA, 400 bp, Homo sapiens
cacagacaacccaaggagacagacacacaggcctacacgctgacacatacacactcatttgcatgctcacaccaaaccagagacaaactcacaagtcccacagacctagacacccccccacaccagacacacacacacaggtatttacacactcatcacggtcagagacaaacgcacacatgcttggggacacacacacaaacccagacacacacacactcgcctccagatctgcgcgcacatagcaaacccctatgcgcacacactgtccaaacacacagacacacaagagactcatccccaggcactgacacacacatgtaatgcacaaccactctgcccctacgtggacggacacacacacacacacacacacacacacacagcgcaaacaaaccca

SEQ ID NO: 145953 - DNA, 302 bp, Homo sapiens
gcctggatgccacttattggaatccaatcaattttagaacattttcatgaccccaaaaaaccctacacccagtagcagtcactctccgttacctctaccctcaacccttagcaaacactaatttactttctgtctttatggatttgcctattttggccatttcatgtaaatggaatcatacaatttgtggctttttgtgactgatttctttcatggggcaagtgctgactgctgtagtcgttgtcttcagtggtgatggacgtatagcaaagggactgggaaaacgttgagaatctttgaaa

SEQ ID NO: 145954 - DNA, 3214 bp, Homo sapiens
  misc_feature (5)..(6): n is a, c, g, or t
gtccnngcggccgctcccgcggccccctcggctttgccagcgccgcctgcgaggcggaggcaggatgaagatgactgtggatttcgaggagtgtctgaaggactcgccccgcttcagggcagctttggaagaagtagaaggtgatgtggcagaattggaactaaaacttgataagcttgtgaaactttgtattgcaatgattgatactggaaaagccttttgtgttgcaaataaacagttcatgaatgggattcgagacctggctcagtattctagtaatgatgctgtcgttgagacaagtttgaccaagttttctgacagtcttcaagaaatgataaattttcacacaatcctgtttgaccaaactcagagatcaattaaggcacagcttcagaactttgttaaagaagatcttagaaaattcaaagatgccaagaagcaattcgaaaaagtcagtgaagaaaaagaaaatgcgttagtaaaaaatgcccaagtacaaagaaacaaacaacatgaagttgaagaagccaccaacattctgacagcaacaagaaaatgtttccgacacatagccctcgattatgtgcttcagattaatgttcttcaatcaaaaaggagatcagaaatcctaaaatcaatgttgtcatttatgtatgcccatttggccttctttcatcaaggatatgatctgtttagtgaacttggaccctacatgaaggatcttggtgcacagttggatcgactggttgtggatgcagcaaaggagaaaagagaaatggagcaaaaacattccaccattcaacaaaaggatttctccagtgatgattctaagttagaatataacgtagatgctgcaaatggcatagttatggaaggatatctgttcaaacgagccagcaatgccttcaaaacttggaacaggcgctggttttcaatacagaataatcagttggtttaccagaaaaaatttaaggataatccgactgtggtagttgaagacctcaggctttgcacagtgaaacattgtgaagacatagagcgacgattctgctttgaggtggtctcgccaacaaaaagttgcatgctccaggcagattccgaaaagctgcgccaggcatggattaaggctgttcagaccagtattgctactgcttatagagagaagggtgatgaatcagagaagctggataagaaatcatctccatccacaggaagcctagattctggaaatgagtccaaagagaaattattgaaaggagaaagtgcgcttcagcgggtccagtgtatccctggcaatgccagctgttgtgactgtggcctggcagatccacggtgggccagcatcaacctgggcatcaccttgtgtatcgagtgctccggaattcaccggagccttggggttcatttttcaaaagtacgatctttaactttagacacctgggagccagaacttttaaagcttatgtgtgagttggggaatgatgttataaatcgagtttatgaagctaatgtggaaaaaatgggaataaagaaaccccaaccaggacaaagacaggagaaggaggcatatatcagagcaaaatatgtggagaggaaatttgtggataaatattctatatcattatcacctcctgagcagcaaaaaaagtttgtctctaaaagttctgaagaaaagaggctgagcatttctaaatttgggccaggggaccaagtcagagcatctgcccaaagttcagtcagaagtaatgacagtggaattcagcagagctctgatgatggaagagaatctttaccctccacggtgtcagccaatagtttatatgagcctgaaggagaaaggcaagattcttctatgtttcttgactcgaaacatcttaatccaggacttcagctttatagggcgtcatatgaaaaaaaccttcctaaaatggctgaggctttggctcatggtgcagacgtgaactgggccaattcagaggaaaacaaagcgacaccacttattcaggctgtattagggggctctttggtgacgtgtgagttcctcctacagaatggtgctaatgtcaaccaaagagatgtccaagggcggggaccattgcaccatgccaccgtcttagggcacacagggcaggtatgtttattcctaaaacgaggtgccaatcaacatgccactgatgaagaagggaaagaccctttgagcatagctgtggaagcagccaatgctgatatagtcaccttgttacgtttagcaagaatgaatgaagagatgcgggaatcagaaggactttatggacagccaggtgatgaaacttatcaggacatatttcgtgatttttcccaaatggcatccaataatccagagaaactaaatcgtttccagcaagattcacagaaattctgaatttttttaaaaatgggaaaatatgaaatctggtgaccccctaatgtatacagctaaaaattcacaatttttttactgctttaattctacttaattttggtagatattgaatggcttggaaaagaggtacccattcatatatttataaattaaaacatagttatctagtagtaggagaggaacctagtttaggacctcttttattaaaaaagcctatttaaagggctatttctgtagacagaagttcagtctagatttaggccatctctaggttacaagatgataggaggttagacaaaagtgattcttttgccaatgggtggtggcattgatttttttcctccatgcatcttgcccaggatcactcagtcaagcatgtcttcatcaagtggaagccaactgtcctgcctgcctcaagaatatgtgttttctttagcttccctgaggatttttggtggttcagaaataggtgtgtgtgttgatgtgtttttggtaacctagctttcatacacataatatatgatttattagaactagagaatgtgttttccccgtttgttcataaatgcggtcggttatacttcttaggtgacaggttattgtccagtactttaatgtatgtatgtataatggctgtacaggtagaccataattcagtcctttagatttattttatgcagcaaaaagaagctcttttttttttttaatcacaaaaaaaaaccccagttcaaaatgtgtagttcttcattgttgggttgattccccaaaaccttgacagatgtatcgatggaataaaagtatgttttaaaggtt

SEQ ID NO: 145955 - DNA, 640 bp, Homo sapiens
tatgtatggcaccatgactgttcttggaaatttttattttctagtggagatatggatcttctcaaagagaacttgatagcagaaaaaaatatgaacttctacttcaaaatttagccaaaactttattaaatcagcttaaattgagtgattttttatttatctgtgaaatgatttggaatatggtttgaaaaactaatccatactttttttaagtctgcagttttctcttttccctttttacagttggatcgactggttgtggatgcagcaaaggagaaaagagaaatggagcaaaaacattccaccattcaacaaaaggtacctcaggggaaaaattaaaaattaattccactttatacaatggcttgggtgttggtttatgcaaggtatcattgtattggaacaaatcttttgagttgttctaataattgtgcagataaattcctcttttgtttttgaagagcaaaatgttcttcagattttaaggtatgtattttgttattttttcagatctttgaaagctatgcttcttgaaccagtttataaaaatttgaatctcttaggaacttaactaagctaaaagtggcctttagttagaattcaaaacactattcataattacatttaggataccaccaac

SEQ ID NO: 145956 - DNA, 427 bp, Homo sapiens
cgcaagtgagcagtggtctcaaatattgtgtttctgtaggcgctggttttcaatacagaataatcagttggtttaccagaaaaaatttaaggtaggtgttaataaatgaaaccccagtgagttaccagtttcagttatttatctgttttggtaaacattgaagtctatacatactcatttgtgtaaaattaatgtaattatttattagttttatgtttgagcaggtataagaggactctagggtggaaaatatcaacatttaattcttaaaagcaaagtgatttgaatcctgagttcttaattccttgctttgagatggatttttctgggtcacaggattgtttaaaatgttttgatagcttttaaatggtatatattagttgtacatacttttgtggtacatgtgctattttgatacttgtataca

SEQ ID NO: 145957 - DNA, 279 bp, Homo sapiens
aggtttaaaaaatatttttaatgtaaataatctaattgttctttcaccatcaaagcaaaccccaaaatgctgggattacaggtgtgagccaccgcgcccagcctgctaaagttttttaatgaagcaagttataaaagtttcactaagtttttcttttcttagagatcttagaaaattcaaagatgccaagaagcaattcgaaaaagtcagtgaagaaaaagaaaatgcgttagtaaaaaatgcccaagtgtctgtcttgggtccggctccgacttcgta

SEQ ID NO: 145958 - DNA, 6978 bp, Homo sapiens
  misc_feature (5)..(6): n is a, c, g, or t
  misc_feature (4835)..(4835): n is a, c, g, or t
gtccnngcggccgctcccgcggccccctcggctttgccagcgccgcctgcgaggcggaggcaggatgaagatgactgtggatttcgaggagtgtctgaaggactcgccccgcttcagggcagctttggaagaagtagaaggtgatgtggcagaattggaactaaaacttgataagcttgtgaaactttgtattgcaatgattgatactggaaaagccttttgtgttgcaaataaacagttcatgaatgggattcgagacctggctcagtattctagtaatgatgctgtcgttgagacaagtttgaccaagttttctgacagtcttcaagaaatgataaattttcacacaatcctgtttgaccaaactcagagatcaattaaggcacagcttcagaactttgttaaagaagatcttagaaaattcaaagatgccaagaagcaattcgaaaaagtcagtgaagaaaaagaaaatgcgttagtaaaaaatgcccaagtacaaagaaacaaacaacatgaagttgaagaagccaccaacattctgacagcaacaagaaaatgtttccgacacatagccctcgattatgtgcttcagattaatgttcttcaatcaaaaaggagatcagaaatcctaaaatcaatgttgtcatttatgtatgcccatttggccttctttcatcaaggatatgatctgtttagtgaacttggaccctacatgaaggatcttggtgcacagttggatcgactggttgtggatgcagcaaaggagaaaagagaaatggagcaaaaacattccaccattcaacaaaaggatttctccagtgatgattctaagttagaatataacgtagatgctgcaaatggcatagttatggaaggatatctgttcaaacgagccagcaatgccttcaaaacttggaacaggcgctggttttcaatacagaataatcagttggtttaccagaaaaaatttaaggataatccgactgtggtagttgaagacctcaggctttgcacagtgaaacattgtgaagacatagagcgacgattctgctttgaggtggtctcgccaacaaaaagttgcatgctccaggcagattccgaaaagctgcgccaggcatggattaaggctgttcagaccagtattgctactgcttatagagagaagggtgatgaatcagagaagctggataagaaatcatctccatccacaggaagcctagattctggaaatgagtccaaagagaaattattgaaaggagaaagtgcgcttcagcgggtccagtgtatccctggcaatgccagctgttgtgactgtggcctggcagatccacggtgggccagcatcaacctgggcatcaccttgtgtatcgagtgctccggaattcaccggagccttggggttcatttttcaaaagtacgatctttaactttagacacctgggagccagaacttttaaagcttatgtgtgagttggggaatgatgttataaatcgagtttatgaagctaatgtggaaaaaatgggaataaagaaaccccaaccaggacaaagacaggagaaggaggcatatatcagagcaaaatatgtggagaggaaatttgtggataaatattctatatcattatcacctcctgagcagcaaaaaaagtttgtctctaaaagttctgaagaaaagaggctgagcatttctaaatttgggccaggggaccaagtcagagcatctgcccaaagttcagtcagaagtaatgacagtggaattcagcagagctctgatgatggaagagaatctttaccctccacggtgtcagccaatagtttatatgagcctgaaggagaaaggcaagattcttctatgtttcttgactcgaaacatcttaatccaggacttcagctttatagggcgtcatatgaaaaaaaccttcctaaaatggctgaggctttggctcatggtgcagacgtgaactgggccaattcagaggaaaacaaagcgacaccacttattcaggctgtattagggggctctttggtgacgtgtgagttcctcctacagaatggtgctaatgtcaaccaaagagatgtccaagggcggggaccattgcaccatgccaccgtcttagggcacacagggcaggtatgtttattcctaaaacgaggtgccaatcaacatgccactgatgaagaagggaaagaccctttgagcatagctgtggaagcagccaatgctgatatagtcaccttgttacgtttagcaagaatgaatgaagagatgcgggaatcagaaggactttatggacagccaggtgatgaaacttatcaggacatatttcgtgatttttcccaaatggcatccaataatccagagaaactaaatcgtttccagcaagattcacagaaattctgaatttttttaaaaatgggaaaatatgaaatctggtgaccccctaatgtatacagctaaaaattcacaatttttttactgctttaattctacttaattttggtagatattgaatggcttggaaaagaggtacccattcatatatttataaattaaaacatagttatctagtagtaggagaggaacctagtttaggacctcttttattaaaaaagcctatttaaagggctatttctgtagacagaagttcagtctagatttaggccatctctaggttacaagatgataggaggttagacaaaagtgattcttttgccaatgggtggtggcattgatttttttcctccatgcatcttgcccaggatcactcagtcaagcatgtcttcatcaagtggaagccaactgtcctgcctgcctcaagaatatgtgttttctttagcttccctgaggatttttggtggttcagaaataggtgtgtgtgttgatgtgtttttggtaacctagctttcatacacataatatatgatttattagaactagagaatgtgttttccccgtttgttcataaatgcggtcggttatacttcttaggtgacaggttattgtccagtactttaatgtatgtatgtataatggctgtacaggtagaccataattcagtcctttagatttattttatgcagcaaaaagaagctcttttttttttttaatcacaaaaaaaaaccccagttcaaaatgtgtagttcttcattgttgggttgattccccaaaaccttgacagatgtatcgatggaataaaagtatgttttaaaggttacttgaatgtcacaaaattatgccttcatcaaaactttaaaggaaaaatcaatttataaaatcatgtaggccatttttatatttgaaatttgtccttttaaagatagttttgctgttgctcctagtgaaagaaaaatctctgtacaaaggagaaaaagaaccccacttattcttagttaatactaaaatatatagcaataaattgctgtttattttttctacatctattttgtgtacttgtacacagtgtacattcttttaaattatatcgtgtatatagctttagtattcggttacatgattcacagacccctgaattccaaaatattatggataaacattaccatttatatgctacaaattagtctgattccatctttgaaaatgtcttaaagtataaaataattaatttgcttttttttttttttcccgagatggcgtcttgctgtgtcacccaggctggagtgcagtggcacgatctcagctcactgcagcctcctcctcttgggttcaagcaattctcctgcctcagcctcccgagtagctgggactacaggcacccgccaccattccgagctaatttctatatttttagtaaagacgggtttcaccattttggccaggttggtctcgaactcctgacctcaggtgatcagcctgctttagcctcccagagtgctgggattacaggcgtgagccaccgcacccagcctaatttgccttttgattccttcccattgttgtcaacaattaagtctattcttcttttagaaattatatgtaaatgatattattgatactctttctaaataagaggttttaaaatatataaaaactttatgatccaattatagataaattttctaacatttcccagtcactagggttttataagttgattaaacatcaaatcagaatctagccaagcaggaattatattgaaataagttcacattacagaaaaggttccataatttggccaaactgcatgcatgtaatgcttatttagtaatggtcactgtatgttagataaggataaaaatatatttgtgaattacttctgaggaaatgctaacttccacagcattgtatttaattataacaataacaggaacattaaatctttatctttgctgtttcacctcaaagtcatagatcatctggctttttaggcaccttcactaaaggcaaaaatctgatttgtagtttttattagcatgtaccttgaaattatttgaccaagaagctcaaagaaaagaagtacgttaaagaaaaagaaaaaacctcacttttcctttatagtgtcccttcctgttttaattcctaaagatcctgacttttatctgaggaagtctaggtagttttccttttggatctggccattggtgcgtgtttcattcagatcacctctggaatctctgtggttgtgaaggcaattccttatgagactcttgcctcctgtggcttacgtgatgaattgttaatatggcagtaattaattagtatctacttaaatttagtggtcagaaatgtatttgaagtgccttaaagatgatcatggttcagaatatcttcagagaaagcaaaatctttaatattgcagggagcctagcaatacaantacacatttctgtggcttgatttcttgaatatgctgagacccaatttggactacatttggcagaaatgatggagtaaacagcaaggctttaaattaaattaatagttacaaggtaggttggctcttaggtgaatttagccatgtcaactaatagcttttatatggtatgtaacaaatctgaattatgttatgctgtgaattattcagtgcattataagaaatcttagttaatcatgcttttgggcttcattagtcaatgtgattggccttttattttctttccataacttatctgctattattagtttcttattccttattattaatctgttagctcattatcattagcttactaacttgaaagttagattaatatcaaaataagaatagcagcactatgaagagttaataaaatgcaatttcatgttagagctagaataaaagtaattgagcagtcatttgcaaatgcttcattataacatttatgtgcttaagatttctaaggttttaaaaagttacctttaatacaatccttagaaactcagaaatttcctgatattcattagattatggtgtttgcctaatttataccggttttcactgtatattttaatgaactttgattggttacttttccagacatacagatttaatttggaatatgaactttggttcttcatgagtgcattttgaaaaagaaaaaaagtacacattcagaatctggccaatttaagtttgtattttaaaaatattttatgcatgttaagtatggtcgcagtaaatgaaattgtgtttaagactaaatttactaccgttttgaacagacattcccagatcattcttatattgtcagataacacttgtgtataatatcactttggaccatggacatgagctggaaaaatgatgtatttttgtagattgtatgtccagaatgactttagaaccgcatgatacggtggaaggagcactggactagtcgtcactaccctttttggattcagggctcctcacaattaaaatgagtgtaatgaaacaaggtgaaaatatagaagcatccctttgtatactgttttgctacttacagtgtacttggcattgctttatctcactggattctcatggtaggatttctgagatcttaatctaagctccaaagttgtctacttttttgatcctagggtgctccttttgttttacagagcagggtcacttgatttgctagctggtggcagaattggcaccattacccaggtctgactgaccaccagtcagaggcactttatttgtatcatgaaatgatttgaaatcattgtaaagcagcgaagtctgataatgaatgccagctttccttgtgctttgataacaaagactccaaatattctggagaacctggataaaagtttgaagggctagattgggatttgaagacaaaattgtaggaaatcttacatttttgcaataacaaacattaatgaaagcaaaacattataaaagtaattttaattcaccacatacttatcaatttcttgatgcttccaaatgacatctacagatatggttttgtggacatctttttctgtttacataaatttatccacttaaaatgtgataatgtggagacaaagcaagatttgattacataaacttttctctgcattggtcttttcactatcttatttgctaacttttcttatttttcttcaacctccccaccctccattttttggatattaaacagggaaagcttgctacattataaagattgttggcaccatttattttacacaaaggctaaaggttaacttttggaaatgatgagctacttttatatatgtgtttactcatgctttgtgatatttctggatcattccagtcataaagacttattacatgtactatttcttgctacctgtgaaaaggtatattttaaagaatgtataaccaacagtccatttactttttattagtatgtagaggatttgtatctaattcatgaatgtagttttacagtagtttgtcattgtaaatggagcaaagtacattatcttctaaaatgtacattatgtaagaattgtaaatatacttaagtaatttgtatgccaaaaaattacaataagtcaataaagatctcacctctggc

SEQ ID NO: 145959 - DNA, 7353 bp, Homo sapiens
  misc_feature (5)..(6): n is a, c, g, or t
  misc_feature (5210)..(5210): n is a, c, g, or t
gtccnngcggccgctcccgcggccccctcggctttgccagcgccgcctgcgaggcggaggcaggatgaagatgactgtggatttcgaggagtgtctgaaggactcgccccgcttcagatgccgtgagagcaggggcttgttttaccgcttgctgtttcctaagtctctagtacagtgcgtgacatccattctggagctgggaagtccaagataaagatgccagcagattagtgtctggtgagggccagctatctctgctttcaagatggcaccttgttgatgtgtcctcaatggcagaaggtggaagggcaaaaaaagggaccattaggaccctttcttcagcctcttttataagagcactaatccattcatgaaggcggagccctcatgtcttcatcacttccccaaaggccccacctcttcatactgtgacaatggagatcaagtttcaacatgaattttggagagacacaaacattcaaaccatagcagggcagctttggaagaagtagaaggtgatgtggcagaattggaactaaaacttgataagcttgtgaaactttgtattgcaatgattgatactggaaaagccttttgtgttgcaaataaacagttcatgaatgggattcgagacctggctcagtattctagtaatgatgctgtcgttgagacaagtttgaccaagttttctgacagtcttcaagaaatgataaattttcacacaatcctgtttgaccaaactcagagatcaattaaggcacagcttcagaactttgttaaagaagatcttagaaaattcaaagatgccaagaagcaattcgaaaaagtcagtgaagaaaaagaaaatgcgttagtaaaaaatgcccaagtacaaagaaacaaacaacatgaagttgaagaagccaccaacattctgacagcaacaagaaaatgtttccgacacatagccctcgattatgtgcttcagattaatgttcttcaatcaaaaaggagatcagaaatcctaaaatcaatgttgtcatttatgtatgcccatttggccttctttcatcaaggatatgatctgtttagtgaacttggaccctacatgaaggatcttggtgcacagttggatcgactggttgtggatgcagcaaaggagaaaagagaaatggagcaaaaacattccaccattcaacaaaaggatttctccagtgatgattctaagttagaatataacgtagatgctgcaaatggcatagttatggaaggatatctgttcaaacgagccagcaatgccttcaaaacttggaacaggcgctggttttcaatacagaataatcagttggtttaccagaaaaaatttaaggataatccgactgtggtagttgaagacctcaggctttgcacagtgaaacattgtgaagacatagagcgacgattctgctttgaggtggtctcgccaacaaaaagttgcatgctccaggcagattccgaaaagctgcgccaggcatggattaaggctgttcagaccagtattgctactgcttatagagagaagggtgatgaatcagagaagctggataagaaatcatctccatccacaggaagcctagattctggaaatgagtccaaagagaaattattgaaaggagaaagtgcgcttcagcgggtccagtgtatccctggcaatgccagctgttgtgactgtggcctggcagatccacggtgggccagcatcaacctgggcatcaccttgtgtatcgagtgctccggaattcaccggagccttggggttcatttttcaaaagtacgatctttaactttagacacctgggagccagaacttttaaagcttatgtgtgagttggggaatgatgttataaatcgagtttatgaagctaatgtggaaaaaatgggaataaagaaaccccaaccaggacaaagacaggagaaggaggcatatatcagagcaaaatatgtggagaggaaatttgtggataaatattctatatcattatcacctcctgagcagcaaaaaaagtttgtctctaaaagttctgaagaaaagaggctgagcatttctaaatttgggccaggggaccaagtcagagcatctgcccaaagttcagtcagaagtaatgacagtggaattcagcagagctctgatgatggaagagaatctttaccctccacggtgtcagccaatagtttatatgagcctgaaggagaaaggcaagattcttctatgtttcttgactcgaaacatcttaatccaggacttcagctttatagggcgtcatatgaaaaaaaccttcctaaaatggctgaggctttggctcatggtgcagacgtgaactgggccaattcagaggaaaacaaagcgacaccacttattcaggctgtattagggggctctttggtgacgtgtgagttcctcctacagaatggtgctaatgtcaaccaaagagatgtccaagggcggggaccattgcaccatgccaccgtcttagggcacacagggcaggtatgtttattcctaaaacgaggtgccaatcaacatgccactgatgaagaagggaaagaccctttgagcatagctgtggaagcagccaatgctgatatagtcaccttgttacgtttagcaagaatgaatgaagagatgcgggaatcagaaggactttatggacagccaggtgatgaaacttatcaggacatatttcgtgatttttcccaaatggcatccaataatccagagaaactaaatcgtttccagcaagattcacagaaattctgaatttttttaaaaatgggaaaatatgaaatctggtgaccccctaatgtatacagctaaaaattcacaatttttttactgctttaattctacttaattttggtagatattgaatggcttggaaaagaggtacccattcatatatttataaattaaaacatagttatctagtagtaggagaggaacctagtttaggacctcttttattaaaaaagcctatttaaagggctatttctgtagacagaagttcagtctagatttaggccatctctaggttacaagatgataggaggttagacaaaagtgattcttttgccaatgggtggtggcattgatttttttcctccatgcatcttgcccaggatcactcagtcaagcatgtcttcatcaagtggaagccaactgtcctgcctgcctcaagaatatgtgttttctttagcttccctgaggatttttggtggttcagaaataggtgtgtgtgttgatgtgtttttggtaacctagctttcatacacataatatatgatttattagaactagagaatgtgttttccccgtttgttcataaatgcggtcggttatacttcttaggtgacaggttattgtccagtactttaatgtatgtatgtataatggctgtacaggtagaccataattcagtcctttagatttattttatgcagcaaaaagaagctcttttttttttttaatcacaaaaaaaaaccccagttcaaaatgtgtagttcttcattgttgggttgattccccaaaaccttgacagatgtatcgatggaataaaagtatgttttaaaggttacttgaatgtcacaaaattatgccttcatcaaaactttaaaggaaaaatcaatttataaaatcatgtaggccatttttatatttgaaatttgtccttttaaagatagttttgctgttgctcctagtgaaagaaaaatctctgtacaaaggagaaaaagaaccccacttattcttagttaatactaaaatatatagcaataaattgctgtttattttttctacatctattttgtgtacttgtacacagtgtacattcttttaaattatatcgtgtatatagctttagtattcggttacatgattcacagacccctgaattccaaaatattatggataaacattaccatttatatgctacaaattagtctgattccatctttgaaaatgtcttaaagtataaaataattaatttgcttttttttttttttcccgagatggcgtcttgctgtgtcacccaggctggagtgcagtggcacgatctcagctcactgcagcctcctcctcttgggttcaagcaattctcctgcctcagcctcccgagtagctgggactacaggcacccgccaccattccgagctaatttctatatttttagtaaagacgggtttcaccattttggccaggttggtctcgaactcctgacctcaggtgatcagcctgctttagcctcccagagtgctgggattacaggcgtgagccaccgcacccagcctaatttgccttttgattccttcccattgttgtcaacaattaagtctattcttcttttagaaattatatgtaaatgatattattgatactctttctaaataagaggttttaaaatatataaaaactttatgatccaattatagataaattttctaacatttcccagtcactagggttttataagttgattaaacatcaaatcagaatctagccaagcaggaattatattgaaataagttcacattacagaaaaggttccataatttggccaaactgcatgcatgtaatgcttatttagtaatggtcactgtatgttagataaggataaaaatatatttgtgaattacttctgaggaaatgctaacttccacagcattgtatttaattataacaataacaggaacattaaatctttatctttgctgtttcacctcaaagtcatagatcatctggctttttaggcaccttcactaaaggcaaaaatctgatttgtagtttttattagcatgtaccttgaaattatttgaccaagaagctcaaagaaaagaagtacgttaaagaaaaagaaaaaacctcacttttcctttatagtgtcccttcctgttttaattcctaaagatcctgacttttatctgaggaagtctaggtagttttccttttggatctggccattggtgcgtgtttcattcagatcacctctggaatctctgtggttgtgaaggcaattccttatgagactcttgcctcctgtggcttacgtgatgaattgttaatatggcagtaattaattagtatctacttaaatttagtggtcagaaatgtatttgaagtgccttaaagatgatcatggttcagaatatcttcagagaaagcaaaatctttaatattgcagggagcctagcaatacaantacacatttctgtggcttgatttcttgaatatgctgagacccaatttggactacatttggcagaaatgatggagtaaacagcaaggctttaaattaaattaatagttacaaggtaggttggctcttaggtgaatttagccatgtcaactaatagcttttatatggtatgtaacaaatctgaattatgttatgctgtgaattattcagtgcattataagaaatcttagttaatcatgcttttgggcttcattagtcaatgtgattggccttttattttctttccataacttatctgctattattagtttcttattccttattattaatctgttagctcattatcattagcttactaacttgaaagttagattaatatcaaaataagaatagcagcactatgaagagttaataaaatgcaatttcatgttagagctagaataaaagtaattgagcagtcatttgcaaatgcttcattataacatttatgtgcttaagatttctaaggttttaaaaagttacctttaatacaatccttagaaactcagaaatttcctgatattcattagattatggtgtttgcctaatttataccggttttcactgtatattttaatgaactttgattggttacttttccagacatacagatttaatttggaatatgaactttggttcttcatgagtgcattttgaaaaagaaaaaaagtacacattcagaatctggccaatttaagtttgtattttaaaaatattttatgcatgttaagtatggtcgcagtaaatgaaattgtgtttaagactaaatttactaccgttttgaacagacattcccagatcattcttatattgtcagataacacttgtgtataatatcactttggaccatggacatgagctggaaaaatgatgtatttttgtagattgtatgtccagaatgactttagaaccgcatgatacggtggaaggagcactggactagtcgtcactaccctttttggattcagggctcctcacaattaaaatgagtgtaatgaaacaaggtgaaaatatagaagcatccctttgtatactgttttgctacttacagtgtacttggcattgctttatctcactggattctcatggtaggatttctgagatcttaatctaagctccaaagttgtctacttttttgatcctagggtgctccttttgttttacagagcagggtcacttgatttgctagctggtggcagaattggcaccattacccaggtctgactgaccaccagtcagaggcactttatttgtatcatgaaatgatttgaaatcattgtaaagcagcgaagtctgataatgaatgccagctttccttgtgctttgataacaaagactccaaatattctggagaacctggataaaagtttgaagggctagattgggatttgaagacaaaattgtaggaaatcttacatttttgcaataacaaacattaatgaaagcaaaacattataaaagtaattttaattcaccacatacttatcaatttcttgatgcttccaaatgacatctacagatatggttttgtggacatctttttctgtttacataaatttatccacttaaaatgtgataatgtggagacaaagcaagatttgattacataaacttttctctgcattggtcttttcactatcttatttgctaacttttcttatttttcttcaacctccccaccctccattttttggatattaaacagggaaagcttgctacattataaagattgttggcaccatttattttacacaaaggctaaaggttaacttttggaaatgatgagctacttttatatatgtgtttactcatgctttgtgatatttctggatcattccagtcataaagacttattacatgtactatttcttgctacctgtgaaaaggtatattttaaagaatgtataaccaacagtccatttactttttattagtatgtagaggatttgtatctaattcatgaatgtagttttacagtagtttgtcattgtaaatggagcaaagtacattatcttctaaaatgtacattatgtaagaattgtaaatatacttaagtaatttgtatgccaaaaaattacaataagtcaataaagatctcacctctggc

SEQ ID NO: 145960 - DNA, 7447 bp, Homo sapiens
  misc_feature (5)..(6): n is a, c, g, or t
  misc_feature (5304)..(5304): n is a, c, g, or t
gtccnngcggccgctcccgcggccccctcggctttgccagcgccgcctgcgaggcggaggcaggatgaagatgactgtggatttcgaggagtgtctgaaggactcgccccgcttcagatgccgtgagagcaggggcttgttttaccgcttgctgtttcctaagtctctagtacagtgcgtgacatccattctggagctgggaagtccaagataaagatgccagcagattagtgtctggtgagggccagctatctctgctttcaagatggcaccttgttgatgtgtcctcaatggcagaaggtggaagggcaaaaaaagggaccattaggaccctttcttcagcctcttttataagagcactaatccattcatgaaggcggagccctcatgtcttcatcacttccccaaaggccccacctcttcatactgtgacaatggagatcaagtttcaacatgaattttggagagacacaaacattcaaaccatagcagggcagctttggaagaagtagaaggtgatgtggcagaattggaactaaaacttgataagcttgtgaaactttgtattgcaatgattgatactggaaaagccttttgtgttgcaaataaacagttcatgaatgggattcgagacctggctcagtattctagtaatgatgctgtcgttgagacaagtttgaccaagttttctgacagtcttcaagaaatgataaattttcacacaattacccagtctcaggcagttctttatagcagtgtgagaatggactaatactgtggtcttggataacatctggaagaattctctggattaccagatcctgtttgaccaaactcagagatcaattaaggcacagcttcagaactttgttaaagaagatcttagaaaattcaaagatgccaagaagcaattcgaaaaagtcagtgaagaaaaagaaaatgcgttagtaaaaaatgcccaagtacaaagaaacaaacaacatgaagttgaagaagccaccaacattctgacagcaacaagaaaatgtttccgacacatagccctcgattatgtgcttcagattaatgttcttcaatcaaaaaggagatcagaaatcctaaaatcaatgttgtcatttatgtatgcccatttggccttctttcatcaaggatatgatctgtttagtgaacttggaccctacatgaaggatcttggtgcacagttggatcgactggttgtggatgcagcaaaggagaaaagagaaatggagcaaaaacattccaccattcaacaaaaggatttctccagtgatgattctaagttagaatataacgtagatgctgcaaatggcatagttatggaaggatatctgttcaaacgagccagcaatgccttcaaaacttggaacaggcgctggttttcaatacagaataatcagttggtttaccagaaaaaatttaaggataatccgactgtggtagttgaagacctcaggctttgcacagtgaaacattgtgaagacatagagcgacgattctgctttgaggtggtctcgccaacaaaaagttgcatgctccaggcagattccgaaaagctgcgccaggcatggattaaggctgttcagaccagtattgctactgcttatagagagaagggtgatgaatcagagaagctggataagaaatcatctccatccacaggaagcctagattctggaaatgagtccaaagagaaattattgaaaggagaaagtgcgcttcagcgggtccagtgtatccctggcaatgccagctgttgtgactgtggcctggcagatccacggtgggccagcatcaacctgggcatcaccttgtgtatcgagtgctccggaattcaccggagccttggggttcatttttcaaaagtacgatctttaactttagacacctgggagccagaacttttaaagcttatgtgtgagttggggaatgatgttataaatcgagtttatgaagctaatgtggaaaaaatgggaataaagaaaccccaaccaggacaaagacaggagaaggaggcatatatcagagcaaaatatgtggagaggaaatttgtggataaatattctatatcattatcacctcctgagcagcaaaaaaagtttgtctctaaaagttctgaagaaaagaggctgagcatttctaaatttgggccaggggaccaagtcagagcatctgcccaaagttcagtcagaagtaatgacagtggaattcagcagagctctgatgatggaagagaatctttaccctccacggtgtcagccaatagtttatatgagcctgaaggagaaaggcaagattcttctatgtttcttgactcgaaacatcttaatccaggacttcagctttatagggcgtcatatgaaaaaaaccttcctaaaatggctgaggctttggctcatggtgcagacgtgaactgggccaattcagaggaaaacaaagcgacaccacttattcaggctgtattagggggctctttggtgacgtgtgagttcctcctacagaatggtgctaatgtcaaccaaagagatgtccaagggcggggaccattgcaccatgccaccgtcttagggcacacagggcaggtatgtttattcctaaaacgaggtgccaatcaacatgccactgatgaagaagggaaagaccctttgagcatagctgtggaagcagccaatgctgatatagtcaccttgttacgtttagcaagaatgaatgaagagatgcgggaatcagaaggactttatggacagccaggtgatgaaacttatcaggacatatttcgtgatttttcccaaatggcatccaataatccagagaaactaaatcgtttccagcaagattcacagaaattctgaatttttttaaaaatgggaaaatatgaaatctggtgaccccctaatgtatacagctaaaaattcacaatttttttactgctttaattctacttaattttggtagatattgaatggcttggaaaagaggtacccattcatatatttataaattaaaacatagttatctagtagtaggagaggaacctagtttaggacctcttttattaaaaaagcctatttaaagggctatttctgtagacagaagttcagtctagatttaggccatctctaggttacaagatgataggaggttagacaaaagtgattcttttgccaatgggtggtggcattgatttttttcctccatgcatcttgcccaggatcactcagtcaagcatgtcttcatcaagtggaagccaactgtcctgcctgcctcaagaatatgtgttttctttagcttccctgaggatttttggtggttcagaaataggtgtgtgtgttgatgtgtttttggtaacctagctttcatacacataatatatgatttattagaactagagaatgtgttttccccgtttgttcataaatgcggtcggttatacttcttaggtgacaggttattgtccagtactttaatgtatgtatgtataatggctgtacaggtagaccataattcagtcctttagatttattttatgcagcaaaaagaagctcttttttttttttaatcacaaaaaaaaaccccagttcaaaatgtgtagttcttcattgttgggttgattccccaaaaccttgacagatgtatcgatggaataaaagtatgttttaaaggttacttgaatgtcacaaaattatgccttcatcaaaactttaaaggaaaaatcaatttataaaatcatgtaggccatttttatatttgaaatttgtccttttaaagatagttttgctgttgctcctagtgaaagaaaaatctctgtacaaaggagaaaaagaaccccacttattcttagttaatactaaaatatatagcaataaattgctgtttattttttctacatctattttgtgtacttgtacacagtgtacattcttttaaattatatcgtgtatatagctttagtattcggttacatgattcacagacccctgaattccaaaatattatggataaacattaccatttatatgctacaaattagtctgattccatctttgaaaatgtcttaaagtataaaataattaatttgcttttttttttttttcccgagatggcgtcttgctgtgtcacccaggctggagtgcagtggcacgatctcagctcactgcagcctcctcctcttgggttcaagcaattctcctgcctcagcctcccgagtagctgggactacaggcacccgccaccattccgagctaatttctatatttttagtaaagacgggtttcaccattttggccaggttggtctcgaactcctgacctcaggtgatcagcctgctttagcctcccagagtgctgggattacaggcgtgagccaccgcacccagcctaatttgccttttgattccttcccattgttgtcaacaattaagtctattcttcttttagaaattatatgtaaatgatattattgatactctttctaaataagaggttttaaaatatataaaaactttatgatccaattatagataaattttctaacatttcccagtcactagggttttataagttgattaaacatcaaatcagaatctagccaagcaggaattatattgaaataagttcacattacagaaaaggttccataatttggccaaactgcatgcatgtaatgcttatttagtaatggtcactgtatgttagataaggataaaaatatatttgtgaattacttctgaggaaatgctaacttccacagcattgtatttaattataacaataacaggaacattaaatctttatctttgctgtttcacctcaaagtcatagatcatctggctttttaggcaccttcactaaaggcaaaaatctgatttgtagtttttattagcatgtaccttgaaattatttgaccaagaagctcaaagaaaagaagtacgttaaagaaaaagaaaaaacctcacttttcctttatagtgtcccttcctgttttaattcctaaagatcctgacttttatctgaggaagtctaggtagttttccttttggatctggccattggtgcgtgtttcattcagatcacctctggaatctctgtggttgtgaaggcaattccttatgagactcttgcctcctgtggcttacgtgatgaattgttaatatggcagtaattaattagtatctacttaaatttagtggtcagaaatgtatttgaagtgccttaaagatgatcatggttcagaatatcttcagagaaagcaaaatctttaatattgcagggagcctagcaatacaantacacatttctgtggcttgatttcttgaatatgctgagacccaatttggactacatttggcagaaatgatggagtaaacagcaaggctttaaattaaattaatagttacaaggtaggttggctcttaggtgaatttagccatgtcaactaatagcttttatatggtatgtaacaaatctgaattatgttatgctgtgaattattcagtgcattataagaaatcttagttaatcatgcttttgggcttcattagtcaatgtgattggccttttattttctttccataacttatctgctattattagtttcttattccttattattaatctgttagctcattatcattagcttactaacttgaaagttagattaatatcaaaataagaatagcagcactatgaagagttaataaaatgcaatttcatgttagagctagaataaaagtaattgagcagtcatttgcaaatgcttcattataacatttatgtgcttaagatttctaaggttttaaaaagttacctttaatacaatccttagaaactcagaaatttcctgatattcattagattatggtgtttgcctaatttataccggttttcactgtatattttaatgaactttgattggttacttttccagacatacagatttaatttggaatatgaactttggttcttcatgagtgcattttgaaaaagaaaaaaagtacacattcagaatctggccaatttaagtttgtattttaaaaatattttatgcatgttaagtatggtcgcagtaaatgaaattgtgtttaagactaaatttactaccgttttgaacagacattcccagatcattcttatattgtcagataacacttgtgtataatatcactttggaccatggacatgagctggaaaaatgatgtatttttgtagattgtatgtccagaatgactttagaaccgcatgatacggtggaaggagcactggactagtcgtcactaccctttttggattcagggctcctcacaattaaaatgagtgtaatgaaacaaggtgaaaatatagaagcatccctttgtatactgttttgctacttacagtgtacttggcattgctttatctcactggattctcatggtaggatttctgagatcttaatctaagctccaaagttgtctacttttttgatcctagggtgctccttttgttttacagagcagggtcacttgatttgctagctggtggcagaattggcaccattacccaggtctgactgaccaccagtcagaggcactttatttgtatcatgaaatgatttgaaatcattgtaaagcagcgaagtctgataatgaatgccagctttccttgtgctttgataacaaagactccaaatattctggagaacctggataaaagtttgaagggctagattgggatttgaagacaaaattgtaggaaatcttacatttttgcaataacaaacattaatgaaagcaaaacattataaaagtaattttaattcaccacatacttatcaatttcttgatgcttccaaatgacatctacagatatggttttgtggacatctttttctgtttacataaatttatccacttaaaatgtgataatgtggagacaaagcaagatttgattacataaacttttctctgcattggtcttttcactatcttatttgctaacttttcttatttttcttcaacctccccaccctccattttttggatattaaacagggaaagcttgctacattataaagattgttggcaccatttattttacacaaaggctaaaggttaacttttggaaatgatgagctacttttatatatgtgtttactcatgctttgtgatatttctggatcattccagtcataaagacttattacatgtactatttcttgctacctgtgaaaaggtatattttaaagaatgtataaccaacagtccatttactttttattagtatgtagaggatttgtatctaattcatgaatgtagttttacagtagtttgtcattgtaaatggagcaaagtacattatcttctaaaatgtacattatgtaagaattgtaaatatacttaagtaatttgtatgccaaaaaattacaataagtcaataaagatctcacctctggc

SEQ ID NO: 145961 - DNA, 6920 bp, Homo sapiens
  misc_feature (5)..(6): n is a, c, g, or t
  misc_feature (4777)..(4777): n is a, c, g, or t
gtccnngcggccgctcccgcggccccctcggctttgccagcgccgcctgcgaggcggaggcaggatgaagatgactgtggatttcgaggagtgtctgaaggactcgccccgcttcagggcagctttggaagaagtagaaggtgatgtggcagaattggaactaaaacttgataagcttgtgaaactttgtattgcaatgattgatactggaaaagccttttgtgttgcaaataaacagttcatgaatgggattcgagacctggctcagtattctagtaatgatgctgtcgttgagacaagtttgaccaagttttctgacagtcttcaagaaatgataaattttcacacaatcctgtttgaccaaactcagagatcaattaaggcacagcttcagaactttgttaaagaagatcttagaaaattcaaagatgccaagaagcaattcgaaaaagtcagtgaagaaaaagaaaatgcgttagtaaaaaatgcccaagtacaaagaaacaaacaacatgaagttgaagaagccaccaacattctgacagcaacaagaaaatgtttccgacacatagccctcgattatgtgcttcagattaatgttcttcaatcaaaaaggagatcagaaatcctaaaatcaatgttgtcatttatgtatgcccatttggccttctttcatcaaggatatgatctgtttagtgaacttggaccctacatgaaggatcttggtgcacagttggatcgactggttgtggatgcagcaaaggagaaaagagaaatggagcaaaaacattccaccattcaacaaaaggatttctccagtgatgattctaagttagaatataacgtagatgctgcaaatggcatagttatggaaggatatctgttcaaacgagccagcaatgccttcaaaacttggaacaggcgctggttttcaatacagaataatcagttggtttaccagaaaaaatttaaggataatccgactgtggtagttgaagacctcaggctttgcacagtgaaacattgtgaagacatagagcgacgattctgctttgaggtggtctcgccaacaaaaagttgcatgctccaggcagattccgaaaagctgcgccaggcatggattaaggctgttcagaccagtattgctactgcttatagagagaagggtgatgaatcagagaagctggataagaaatcatctccatccacaggaagcctagattctggaaatgagtccaaagagaaattattgaaaggagaaagtgcgcttcagcgggtccagtgtatccctggcaatgccagctgttgtgactgtggcctggcagatccacggtgggccagcatcaacctgggcatcaccttgtgtatcgagtgctccggaattcaccggagccttggggttcatttttcaaaagtacgatctttaactttagacacctgggagccagaacttttaaagcttatgtgtgagttggggaatgatgttataaatcgagtttatgaagctaatgtggaaaaaatgggaataaagaaaccccaaccaggacaaagacaggagaaggaggcatatatcagagcaaaatatgtggagaggaaatttgtggataaatattctatatcattatcacctcctgagcagcaaaaaaagtttgtctctaaaagttctgaagaaaagaggctgagcatttctaaatttgggccaggggaccaagtcagagcatctgcccaaagttcagtcagaagtaatgacagtggaattcagcagagctctgatgatggaagagaatctttaccctccacggtgtcagccaatagtttatatgagcctgaaggagaaaggcaagattcttctatgtttcttgactcgaaacatcttaatccaggacttcagctttatagggcgtcatatgaaaaaaaccttcctaaaatggctgaggctttggctcatggtgcagacgtgaactgggccaattcagaggaaaacaaagcgacaccacttattcaggctgtattagggggctctttggtgacgtgtgagttcctcctacagaatggtgctaatgtcaaccaaagagatgtccaagggcggggaccattgcaccatgccaccgtcttagggcacacagggcaggtatgtttattcctaaaacgaggtgccaatcaacatgccactgatgaagaagggaaagaccctttgagcatagctgtggaagcagccaatgctgatatagtcaccttgttacgtttagcaagaatgaatgaagagatgcgggaatcagaaggactttatggacagccaggtgatgaaacttatcaggacatatttcgtgatttttcccaaatggcatccaataatccagagaaactaaatcgtttccagcaagattcacagaaattctgaatttttttaaaaatgggaaaatatgaaatctggtgaccccctaatgtatacagctaaaaattcacaatttttttactgctttaattctacttaattttggtagatattgaatggcttggaaaagaggtacccattcatatatttataaattaaaacatagttatctagtagtaggagaggaacctagtttaggacctcttttattaaaaaagcctatttaaagggctatttctgtagacagaagttcagtctagatttaggccatctctaggttacaagatgataggaggttagacaaaagtgattcttttgccaatgggtggtggcattgatttttttcctccatgcatcttgcccaggatcactcagtcaagcatgtcttcatcaagtggaagccaactgtcctgcctgcctcaagaatatgtgttttctttagcttccctgaggatttttggtggttcagaaataggtgtgtgtgttgatgtgtttttggtaacctagctttcatacacataatatatgatttattagaactagagaatgtgttttccccgtttgttcataaatgcggtcggttatacttcttaggtgacaggttattgtccagtactttaatgtatgtatgtataatggctgtacaggtagaccataattcagtcctttagatttattttatgcagcaaaaagaagctcttttttttttttaatcacacttgacagatgtatcgatggaataaaagtatgttttaaaggttacttgaatgtcacaaaattatgccttcatcaaaactttaaaggaaaaatcaatttataaaatcatgtaggccatttttatatttgaaatttgtccttttaaagatagttttgctgttgctcctagtgaaagaaaaatctctgtacaaaggagaaaaagaaccccacttattcttagttaatactaaaatatatagcaataaattgctgtttattttttctacatctattttgtgtacttgtacacagtgtacattcttttaaattatatcgtgtatatagctttagtattcggttacatgattcacagacccctgaattccaaaatattatggataaacattaccatttatatgctacaaattagtctgattccatctttgaaaatgtcttaaagtataaaataattaatttgcttttttttttttttcccgagatggcgtcttgctgtgtcacccaggctggagtgcagtggcacgatctcagctcactgcagcctcctcctcttgggttcaagcaattctcctgcctcagcctcccgagtagctgggactacaggcacccgccaccattccgagctaatttctatatttttagtaaagacgggtttcaccattttggccaggttggtctcgaactcctgacctcaggtgatcagcctgctttagcctcccagagtgctgggattacaggcgtgagccaccgcacccagcctaatttgccttttgattccttcccattgttgtcaacaattaagtctattcttcttttagaaattatatgtaaatgatattattgatactctttctaaataagaggttttaaaatatataaaaactttatgatccaattatagataaattttctaacatttcccagtcactagggttttataagttgattaaacatcaaatcagaatctagccaagcaggaattatattgaaataagttcacattacagaaaaggttccataatttggccaaactgcatgcatgtaatgcttatttagtaatggtcactgtatgttagataaggataaaaatatatttgtgaattacttctgaggaaatgctaacttccacagcattgtatttaattataacaataacaggaacattaaatctttatctttgctgtttcacctcaaagtcatagatcatctggctttttaggcaccttcactaaaggcaaaaatctgatttgtagtttttattagcatgtaccttgaaattatttgaccaagaagctcaaagaaaagaagtacgttaaagaaaaagaaaaaacctcacttttcctttatagtgtcccttcctgttttaattcctaaagatcctgacttttatctgaggaagtctaggtagttttccttttggatctggccattggtgcgtgtttcattcagatcacctctggaatctctgtggttgtgaaggcaattccttatgagactcttgcctcctgtggcttacgtgatgaattgttaatatggcagtaattaattagtatctacttaaatttagtggtcagaaatgtatttgaagtgccttaaagatgatcatggttcagaatatcttcagagaaagcaaaatctttaatattgcagggagcctagcaatacaantacacatttctgtggcttgatttcttgaatatgctgagacccaatttggactacatttggcagaaatgatggagtaaacagcaaggctttaaattaaattaatagttacaaggtaggttggctcttaggtgaatttagccatgtcaactaatagcttttatatggtatgtaacaaatctgaattatgttatgctgtgaattattcagtgcattataagaaatcttagttaatcatgcttttgggcttcattagtcaatgtgattggccttttattttctttccataacttatctgctattattagtttcttattccttattattaatctgttagctcattatcattagcttactaacttgaaagttagattaatatcaaaataagaatagcagcactatgaagagttaataaaatgcaatttcatgttagagctagaataaaagtaattgagcagtcatttgcaaatgcttcattataacatttatgtgcttaagatttctaaggttttaaaaagttacctttaatacaatccttagaaactcagaaatttcctgatattcattagattatggtgtttgcctaatttataccggttttcactgtatattttaatgaactttgattggttacttttccagacatacagatttaatttggaatatgaactttggttcttcatgagtgcattttgaaaaagaaaaaaagtacacattcagaatctggccaatttaagtttgtattttaaaaatattttatgcatgttaagtatggtcgcagtaaatgaaattgtgtttaagactaaatttactaccgttttgaacagacattcccagatcattcttatattgtcagataacacttgtgtataatatcactttggaccatggacatgagctggaaaaatgatgtatttttgtagattgtatgtccagaatgactttagaaccgcatgatacggtggaaggagcactggactagtcgtcactaccctttttggattcagggctcctcacaattaaaatgagtgtaatgaaacaaggtgaaaatatagaagcatccctttgtatactgttttgctacttacagtgtacttggcattgctttatctcactggattctcatggtaggatttctgagatcttaatctaagctccaaagttgtctacttttttgatcctagggtgctccttttgttttacagagcagggtcacttgatttgctagctggtggcagaattggcaccattacccaggtctgactgaccaccagtcagaggcactttatttgtatcatgaaatgatttgaaatcattgtaaagcagcgaagtctgataatgaatgccagctttccttgtgctttgataacaaagactccaaatattctggagaacctggataaaagtttgaagggctagattgggatttgaagacaaaattgtaggaaatcttacatttttgcaataacaaacattaatgaaagcaaaacattataaaagtaattttaattcaccacatacttatcaatttcttgatgcttccaaatgacatctacagatatggttttgtggacatctttttctgtttacataaatttatccacttaaaatgtgataatgtggagacaaagcaagatttgattacataaacttttctctgcattggtcttttcactatcttatttgctaacttttcttatttttcttcaacctccccaccctccattttttggatattaaacagggaaagcttgctacattataaagattgttggcaccatttattttacacaaaggctaaaggttaacttttggaaatgatgagctacttttatatatgtgtttactcatgctttgtgatatttctggatcattccagtcataaagacttattacatgtactatttcttgctacctgtgaaaaggtatattttaaagaatgtataaccaacagtccatttactttttattagtatgtagaggatttgtatctaattcatgaatgtagttttacagtagtttgtcattgtaaatggagcaaagtacattatcttctaaaatgtacattatgtaagaattgtaaatatacttaagtaatttgtatgccaaaaaattacaataagtcaataaagatctcacctctggc

SEQ ID NO: 145962 - DNA, 6358 bp, Homo sapiens
  misc_feature (4215)..(4215): n is a, c, g, or t
gaaagtagcgtttattatatgtgagtggggaccaggagagtgaatataaaagaaaatggaagaaaagccacagaacattaacatttattgagcatctactaagtatcaagtgttggaccagtctctttatatgtaaacaatttcatttaatctctatataatttatgaggtagatacagttattaacaggacaaaattacttttatgtctatattgataacccctgtttctaaaataaaatataaatcttgaaaattagaccagttatgccaagtaatatttttaagtatttcattattggtagtattaaaacctaagtggaaaaatatggaaatttggtttcctcactataggataatccgactgtggtagttgaagacctcaggctttgcacagtgaaacattgtgaagacatagagcgacgattctgctttgaggtggtctcgccaacaaaaagttgcatgctccaggcagattccgaaaagctgcgccaggcatggattaaggctgttcagaccagtattgctactgcttatagagagaagggtgatgaatcagagaagctggataagaaatcatctccatccacaggaagcctagattctggaaatgagtccaaagagaaattattgaaaggagaaagtgcgcttcagcgggtccagtgtatccctggcaatgccagctgttgtgactgtggcctggcagatccacggtgggccagcatcaacctgggcatcaccttgtgtatcgagtgctccggaattcaccggagccttggggttcatttttcaaaagtacgatctttaactttagacacctgggagccagaacttttaaagcttatgtgtgagttggggaatgatgttataaatcgagtttatgaagctaatgtggaaaaaatgggaataaagaaaccccaaccaggacaaagacaggagaaggaggcatatatcagagcaaaatatgtggagaggaaatttgtggataaatattctatatcattatcacctcctgagcagcaaaaaaagtttgtctctaaaagttctgaagaaaagaggctgagcatttctaaatttgggccaggggaccaagtcagagcatctgcccaaagttcagtcagaagtaatgacagtggaattcagcagagctctgatgatggaagagaatctttaccctccacggtgtcagccaatagtttatatgagcctgaaggagaaaggcaagattcttctatgtttcttgactcgaaacatcttaatccaggacttcagctttatagggcgtcatatgaaaaaaaccttcctaaaatggctgaggctttggctcatggtgcagacgtgaactgggccaattcagaggaaaacaaagcgacaccacttattcaggctgtattagggggctctttggtgacgtgtgagttcctcctacagaatggtgctaatgtcaaccaaagagatgtccaagggcggggaccattgcaccatgccaccgtcttagggcacacagggcaggtatgtttattcctaaaacgaggtgccaatcaacatgccactgatgaagaagggaaagaccctttgagcatagctgtggaagcagccaatgctgatatagtcaccttgttacgtttagcaagaatgaatgaagagatgcgggaatcagaaggactttatggacagccaggtgatgaaacttatcaggacatatttcgtgatttttcccaaatggcatccaataatccagagaaactaaatcgtttccagcaagattcacagaaattctgaatttttttaaaaatgggaaaatatgaaatctggtgaccccctaatgtatacagctaaaaattcacaatttttttactgctttaattctacttaattttggtagatattgaatggcttggaaaagaggtacccattcatatatttataaattaaaacatagttatctagtagtaggagaggaacctagtttaggacctcttttattaaaaaagcctatttaaagggctatttctgtagacagaagttcagtctagatttaggccatctctaggttacaagatgataggaggttagacaaaagtgattcttttgccaatgggtggtggcattgatttttttcctccatgcatcttgcccaggatcactcagtcaagcatgtcttcatcaagtggaagccaactgtcctgcctgcctcaagaatatgtgttttctttagcttccctgaggatttttggtggttcagaaataggtgtgtgtgttgatgtgtttttggtaacctagctttcatacacataatatatgatttattagaactagagaatgtgttttccccgtttgttcataaatgcggtcggttatacttcttaggtgacaggttattgtccagtactttaatgtatgtatgtataatggctgtacaggtagaccataattcagtcctttagatttattttatgcagcaaaaagaagctcttttttttttttaatcacaaaaaaaaaccccagttcaaaatgtgtagttcttcattgttgggttgattccccaaaaccttgacagatgtatcgatggaataaaagtatgttttaaaggttacttgaatgtcacaaaattatgccttcatcaaaactttaaaggaaaaatcaatttataaaatcatgtaggccatttttatatttgaaatttgtccttttaaagatagttttgctgttgctcctagtgaaagaaaaatctctgtacaaaggagaaaaagaaccccacttattcttagttaatactaaaatatatagcaataaattgctgtttattttttctacatctattttgtgtacttgtacacagtgtacattcttttaaattatatcgtgtatatagctttagtattcggttacatgattcacagacccctgaattccaaaatattatggataaacattaccatttatatgctacaaattagtctgattccatctttgaaaatgtcttaaagtataaaataattaatttgcttttttttttttttcccgagatggcgtcttgctgtgtcacccaggctggagtgcagtggcacgatctcagctcactgcagcctcctcctcttgggttcaagcaattctcctgcctcagcctcccgagtagctgggactacaggcacccgccaccattccgagctaatttctatatttttagtaaagacgggtttcaccattttggccaggttggtctcgaactcctgacctcaggtgatcagcctgctttagcctcccagagtgctgggattacaggcgtgagccaccgcacccagcctaatttgccttttgattccttcccattgttgtcaacaattaagtctattcttcttttagaaattatatgtaaatgatattattgatactctttctaaataagaggttttaaaatatataaaaactttatgatccaattatagataaattttctaacatttcccagtcactagggttttataagttgattaaacatcaaatcagaatctagccaagcaggaattatattgaaataagttcacattacagaaaaggttccataatttggccaaactgcatgcatgtaatgcttatttagtaatggtcactgtatgttagataaggataaaaatatatttgtgaattacttctgaggaaatgctaacttccacagcattgtatttaattataacaataacaggaacattaaatctttatctttgctgtttcacctcaaagtcatagatcatctggctttttaggcaccttcactaaaggcaaaaatctgatttgtagtttttattagcatgtaccttgaaattatttgaccaagaagctcaaagaaaagaagtacgttaaagaaaaagaaaaaacctcacttttcctttatagtgtcccttcctgttttaattcctaaagatcctgacttttatctgaggaagtctaggtagttttccttttggatctggccattggtgcgtgtttcattcagatcacctctggaatctctgtggttgtgaaggcaattccttatgagactcttgcctcctgtggcttacgtgatgaattgttaatatggcagtaattaattagtatctacttaaatttagtggtcagaaatgtatttgaagtgccttaaagatgatcatggttcagaatatcttcagagaaagcaaaatctttaatattgcagggagcctagcaatacaantacacatttctgtggcttgatttcttgaatatgctgagacccaatttggactacatttggcagaaatgatggagtaaacagcaaggctttaaattaaattaatagttacaaggtaggttggctcttaggtgaatttagccatgtcaactaatagcttttatatggtatgtaacaaatctgaattatgttatgctgtgaattattcagtgcattataagaaatcttagttaatcatgcttttgggcttcattagtcaatgtgattggccttttattttctttccataacttatctgctattattagtttcttattccttattattaatctgttagctcattatcattagcttactaacttgaaagttagattaatatcaaaataagaatagcagcactatgaagagttaataaaatgcaatttcatgttagagctagaataaaagtaattgagcagtcatttgcaaatgcttcattataacatttatgtgcttaagatttctaaggttttaaaaagttacctttaatacaatccttagaaactcagaaatttcctgatattcattagattatggtgtttgcctaatttataccggttttcactgtatattttaatgaactttgattggttacttttccagacatacagatttaatttggaatatgaactttggttcttcatgagtgcattttgaaaaagaaaaaaagtacacattcagaatctggccaatttaagtttgtattttaaaaatattttatgcatgttaagtatggtcgcagtaaatgaaattgtgtttaagactaaatttactaccgttttgaacagacattcccagatcattcttatattgtcagataacacttgtgtataatatcactttggaccatggacatgagctggaaaaatgatgtatttttgtagattgtatgtccagaatgactttagaaccgcatgatacggtggaaggagcactggactagtcgtcactaccctttttggattcagggctcctcacaattaaaatgagtgtaatgaaacaaggtgaaaatatagaagcatccctttgtatactgttttgctacttacagtgtacttggcattgctttatctcactggattctcatggtaggatttctgagatcttaatctaagctccaaagttgtctacttttttgatcctagggtgctccttttgttttacagagcagggtcacttgatttgctagctggtggcagaattggcaccattacccaggtctgactgaccaccagtcagaggcactttatttgtatcatgaaatgatttgaaatcattgtaaagcagcgaagtctgataatgaatgccagctttccttgtgctttgataacaaagactccaaatattctggagaacctggataaaagtttgaagggctagattgggatttgaagacaaaattgtaggaaatcttacatttttgcaataacaaacattaatgaaagcaaaacattataaaagtaattttaattcaccacatacttatcaatttcttgatgcttccaaatgacatctacagatatggttttgtggacatctttttctgtttacataaatttatccacttaaaatgtgataatgtggagacaaagcaagatttgattacataaacttttctctgcattggtcttttcactatcttatttgctaacttttcttatttttcttcaacctccccaccctccattttttggatattaaacagggaaagcttgctacattataaagattgttggcaccatttattttacacaaaggctaaaggttaacttttggaaatgatgagctacttttatatatgtgtttactcatgctttgtgatatttctggatcattccagtcataaagacttattacatgtactatttcttgctacctgtgaaaaggtatattttaaagaatgtataaccaacagtccatttactttttattagtatgtagaggatttgtatctaattcatgaatgtagttttacagtagtttgtcattgtaaatggagcaaagtacattatcttctaaaatgtacattatgtaagaattgtaaatatacttaagtaatttgtatgccaaaaaattacaataagtcaataaagatctcacctctggc

SEQ ID NO: 145963 - DNA, 4197 bp, Homo sapiens
  misc_feature (2054)..(2054): n is a, c, g, or t
taaggatcccctgcgcttgatgtcctgcctgcctcaagaatatgtgttttctttagcttccctgaggatttttggtggttcagaaataggtgtgtgtgttgatgtgtttttggtaacctagctttcatacacataatatatgatttattagaactagagaatgtgttttccccgtttgttcataaatgcggtcggttatacttcttaggtgacaggttattgtccagtactttaatgtatgtatgtataatggctgtacaggtagaccataattcagtcctttagatttattttatgcagcaaaaagaagctcttttttttttttaatcacaaaaaaaaaccccagttcaaaatgtgtagttcttcattgttgggttgattccccaaaaccttgacagatgtatcgatggaataaaagtatgttttaaaggttacttgaatgtcacaaaattatgccttcatcaaaactttaaaggaaaaatcaatttataaaatcatgtaggccatttttatatttgaaatttgtccttttaaagatagttttgctgttgctcctagtgaaagaaaaatctctgtacaaaggagaaaaagaaccccacttattcttagttaatactaaaatatatagcaataaattgctgtttattttttctacatctattttgtgtacttgtacacagtgtacattcttttaaattatatcgtgtatatagctttagtattcggttacatgattcacagacccctgaattccaaaatattatggataaacattaccatttatatgctacaaattagtctgattccatctttgaaaatgtcttaaagtataaaataattaatttgcttttttttttttttcccgagatggcgtcttgctgtgtcacccaggctggagtgcagtggcacgatctcagctcactgcagcctcctcctcttgggttcaagcaattctcctgcctcagcctcccgagtagctgggactacaggcacccgccaccattccgagctaatttctatatttttagtaaagacgggtttcaccattttggccaggttggtctcgaactcctgacctcaggtgatcagcctgctttagcctcccagagtgctgggattacaggcgtgagccaccgcacccagcctaatttgccttttgattccttcccattgttgtcaacaattaagtctattcttcttttagaaattatatgtaaatgatattattgatactctttctaaataagaggttttaaaatatataaaaactttatgatccaattatagataaattttctaacatttcccagtcactagggttttataagttgattaaacatcaaatcagaatctagccaagcaggaattatattgaaataagttcacattacagaaaaggttccataatttggccaaactgcatgcatgtaatgcttatttagtaatggtcactgtatgttagataaggataaaaatatatttgtgaattacttctgaggaaatgctaacttccacagcattgtatttaattataacaataacaggaacattaaatctttatctttgctgtttcacctcaaagtcatagatcatctggctttttaggcaccttcactaaaggcaaaaatctgatttgtagtttttattagcatgtaccttgaaattatttgaccaagaagctcaaagaaaagaagtacgttaaagaaaaagaaaaaacctcacttttcctttatagtgtcccttcctgttttaattcctaaagatcctgacttttatctgaggaagtctaggtagttttccttttggatctggccattggtgcgtgtttcattcagatcacctctggaatctctgtggttgtgaaggcaattccttatgagactcttgcctcctgtggcttacgtgatgaattgttaatatggcagtaattaattagtatctacttaaatttagtggtcagaaatgtatttgaagtgccttaaagatgatcatggttcagaatatcttcagagaaagcaaaatctttaatattgcagggagcctagcaatacaantacacatttctgtggcttgatttcttgaatatgctgagacccaatttggactacatttggcagaaatgatggagtaaacagcaaggctttaaattaaattaatagttacaaggtaggttggctcttaggtgaatttagccatgtcaactaatagcttttatatggtatgtaacaaatctgaattatgttatgctgtgaattattcagtgcattataagaaatcttagttaatcatgcttttgggcttcattagtcaatgtgattggccttttattttctttccataacttatctgctattattagtttcttattccttattattaatctgttagctcattatcattagcttactaacttgaaagttagattaatatcaaaataagaatagcagcactatgaagagttaataaaatgcaatttcatgttagagctagaataaaagtaattgagcagtcatttgcaaatgcttcattataacatttatgtgcttaagatttctaaggttttaaaaagttacctttaatacaatccttagaaactcagaaatttcctgatattcattagattatggtgtttgcctaatttataccggttttcactgtatattttaatgaactttgattggttacttttccagacatacagatttaatttggaatatgaactttggttcttcatgagtgcattttgaaaaagaaaaaaagtacacattcagaatctggccaatttaagtttgtattttaaaaatattttatgcatgttaagtatggtcgcagtaaatgaaattgtgtttaagactaaatttactaccgttttgaacagacattcccagatcattcttatattgtcagataacacttgtgtataatatcactttggaccatggacatgagctggaaaaatgatgtatttttgtagattgtatgtccagaatgactttagaaccgcatgatacggtggaaggagcactggactagtcgtcactaccctttttggattcagggctcctcacaattaaaatgagtgtaatgaaacaaggtgaaaatatagaagcatccctttgtatactgttttgctacttacagtgtacttggcattgctttatctcactggattctcatggtaggatttctgagatcttaatctaagctccaaagttgtctacttttttgatcctagggtgctccttttgttttacagagcagggtcacttgatttgctagctggtggcagaattggcaccattacccaggtctgactgaccaccagtcagaggcactttatttgtatcatgaaatgatttgaaatcattgtaaagcagcgaagtctgataatgaatgccagctttccttgtgctttgataacaaagactccaaatattctggagaacctggataaaagtttgaagggctagattgggatttgaagacaaaattgtaggaaatcttacatttttgcaataacaaacattaatgaaagcaaaacattataaaagtaattttaattcaccacatacttatcaatttcttgatgcttccaaatgacatctacagatatggttttgtggacatctttttctgtttacataaatttatccacttaaaatgtgataatgtggagacaaagcaagatttgattacataaacttttctctgcattggtcttttcactatcttatttgctaacttttcttatttttcttcaacctccccaccctccattttttggatattaaacagggaaagcttgctacattataaagattgttggcaccatttattttacacaaaggctaaaggttaacttttggaaatgatgagctacttttatatatgtgtttactcatgctttgtgatatttctggatcattccagtcataaagacttattacatgtactatttcttgctacctgtgaaaaggtatattttaaagaatgtataaccaacagtccatttactttttattagtatgtagaggatttgtatctaattcatgaatgtagttttacagtagtttgtcattgtaaatggagcaaagtacattatcttctaaaatgtacattatgtaagaattgtaaatatacttaagtaatttgtatgccaaaaaattacaataagtcaataaagatctcacctctggc

SEQ ID NO: 145964 - DNA, 1281 bp, Homo sapiens
  misc_feature (5)..(6): n is a, c, g, or t
  misc_feature (1229)..(1229): n is a, c, g, or t
  misc_feature (1257)..(1257): n is a, c, g, or t
gtccnngcggccgctcccgcggccccctcggctttgccagcgccgcctgcgaggcggaggcaggatgaagatgactgtggatttcgaggagtgtctgaaggactcgccccgcttcagggcagctttggaagaagtagaaggtgatgtggcagaattggaactaaaacttgataagcttgtgaaactttgtattgcaatgattgatactggaaaagccttttgtgttgcaaataaacagttcatgaatgggattcgagacctggctcagtattctagtaatgatgctgtcgttgagacaagtttgaccaagttttctgacagtcttcaagaaatgataaattttcacacaatcctgtttgaccaaactcagagatcaattaaggcacagcttcagaactttgttaaagaagatcttagaaaattcaaagatgccaagaagcaattcgaaaaagtcagtgaagaaaaagaaaatgcgttagtaaaaaatgcccaagtacaaagaaacaaacaacatgaagttgaagaagccaccaacattctgacagcaacaagaaaatgtttccgacacatagccctcgattatgtgcttcagattaatgttcttcaatcaaaaaggagatcagaaatcctaaaatcaatgttgtcatttatgtatgcccatttggccttctttcatcaaggatatgatctgtttagtgaacttggaccctacatgaaggatcttggtgcacagttggatcgactggttgtggatgcagcaaaggagaaaagagaaatggagcaaaaacattccaccattcaacaaaaggatttctccagtgatgattctaagttagaatataacgtagatgctgcaaatggcatagttatggaaggatatctgttcaaacgagccagcaatgccttcaaaacttggaacaggcgctggttttcaatacagaataatcagttggtttaccagaaaaaatttaaggataatccgactgtggtagttgaagacctcaggctttgcacagtgaaacattgtgaagacatagagcgacgattctgctttgaggtggtctcgccaacaaaaagttgcatgctccaggcagattccgaaaagctgcgccaggcatggattaaggctgttcagaccagtattgctactgcttatagagagaagggtgatgaatcagagaagctggataagaaatcatctccatccccaagaatctagaagatgtgtnaacaggtattttttttaaatcaaggaangctcatttaaaacaggccaaggtt

SEQ ID NO: 145965 - DNA, 1224 bp, Homo sapiens
  misc_feature (5)..(6): n is a, c, g, or t
gtccnngcggccgctcccgcggccccctcggctttgccagcgccgcctgcgaggcggaggcaggatgaagatgactgtggatttcgaggagtgtctgaaggactcgccccgcttcagggcagctttggaagaagtagaaggtgatgtggcagaattggaactaaaacttgataagcttgtgaaactttgtattgcaatgattgatactggaaaagccttttgtgttgcaaataaacagttcatgaatgggattcgagacctggctcagtattctagtaatgatgctgtcgttgagacaagtttgaccaagttttctgacagtcttcaagaaatgataaattttcacacaatcctgtttgaccaaactcagagatcaattaaggcacagcttcagaactttgttaaagaagatcttagaaaattcaaagatgccaagaagcaattcgaaaaagtcagtgaagaaaaagaaaatgcgttagtaaaaaatgcccaagtacaaagaaacaaacaacatgaagttgaagaagccaccaacattctgacagcaacaagaaaatgtttccgacacatagccctcgattatgtgcttcagattaatgttcttcaatcaaaaaggagatcagaaatcctaaaatcaatgttgtcatttatgtatgcccatttggccttctttcatcaaggatatgatctgtttagtgaacttggaccctacatgaaggatcttggtgcacagttggatcgactggttgtggatgcagcaaaggagaaaagagaaatggagcaaaaacattccaccattcaacaaaaggatttctccagtgatgattctaagttagaatataacgtagatgctgcaaatggcatagttatggaaggatatctgttcaaacgagccagcaatgccttcaaaacttggaacaggcgctggttttcaatacagaataatcagttggtttaccagaaaaaatttaaggataatccgactgtggtagttgaagacctcaggctttgcacagtgaaacattgtgaagacatagagcgacgattctgctttgaggtggtctcgccaacaaaaagttgcatgctccaggcagattccgaaaagctgcgccaggcatggattaaggctgttcagaccagtattgctactgcttatagagagaagggtgatgaatcagagaagcatggaaagaaaagtgcttgtaagtcgacgcggccgcgaat

SEQ ID NO: 145966 - DNA, 471 bp, Homo sapiens
tagatacttaatgtttaacttactgtcctaacactggctagtacttactgcaccttactgtgtagataatgctttgttgtcatacttcttgcctttctgtggacatagagatagatacaatagctgtgatatgtggctagatagatacatagataaacttgtagagagagagaatgactctggtgggggtgataatcttctagcagaggtaatttggtgaagaacagcaaggtgataatattactctcagttcttgtctcattttgttttaacataaaacttctttgtagaataagcatctgcagaatgtgtaaggggattagttaactgtacttgcttaaaggatttttaaattttagcttattttaaggtctttaatgtatagcttatttttctatttttttttgccaaacagcttatgtgtgagttggggaatgatgttataaatcgagtttatgaagctaatgtgga

SEQ ID NO: 145967 - DNA, 203 bp, Homo sapiens
atactaaattccaaggtaattattacttcatgtgaagtgtaatttttaagcattcatatctatcttttcatttagagttacttttcaagagtaaagtgtacatttaaacaaacgaaataacttattttatatttaatttttctagggcagctttggaagaagtagaaggtgatgtggcagaattggaactaaaacttgataag

SEQ ID NO: 145968 - DNA, 375 bp, Homo sapiens
ccactaaagtcaaatactttaatgtattgaaacatttctttattattgatcatttaagtcccccttcatttttcttattaatattgttgtaactgtcttaatataaaccttttcttccttttgaactcttttcttaggatccatttcttgtctaggaaacttagtcaagtcatatgaacttctttatgtgttattttgtgtaggatttctccagtgatgattctaagttagaatataacgtagatgctgcaaatggcatagttatggaaggatatctgttcaaacgagccagcaatgccttcaaaacttggaacaggtaatatatttcaaatactagtcttgatctatacatagttttgattttctgactttccc

SEQ ID NO: 145969 - DNA, 823 bp, Homo sapiens
atggctgaggctttggctcatggtgcagacgtgaactgggccaattcagaggaaaacaaagcgacaccacttattcaggctgtattaggggtatgcgtttatacaatgacattttcagtagcaatcaaatatttaaaaaaaatcataatatgttctgaactggctttagtattgtctttgcttcaagagatgggttagaaaatagaaggaacctctgtgctattaatagtagtggtttctgagcaccacttcggttgtttcaagtttttttgcagtggaagagaattccgataatgaaagtatataatgtgttttgctagttcacaaactgcaaatgaatctctattagaattagttcttgggaagaaaataatataatttataatttctctgccttggctgagggatattttttgttttggagagaaggaaatggaaatgctatttgagtaacgaaaaccaattgtttttaaaaagaaatgtattgttgtttcttgttatttgcttttgtctatagttatcctcttttttcctttaagggctctttggtgacgtgtgagttcctcctacagaatggtgctaatgtcaaccaaagagatgtccaagggcggggaccattgcaccatgccaccgtcttagggcacacagggtaactgcagtgctttcatatttaaggagactttatttgaaaaattattttgaattaatgttttagtttttcttaggttaaagttttcaggtagtgtttgtaaagagatgtgttccatgacttattttgtcacgatggaatttgaaagttaaaaaaaatctctttcagaaaaag

SEQ ID NO: 145970 - DNA, 683 bp, Homo sapiens
ttttcagcatttatttttagttgccccttttcttccaaaaatgctcatctgaacaaaattttaatgtaatgaattataaaatagtactagtaataaatatgaatgttgtttgattaatacttgtgtaaatgtttaaagtgtctttattttatttcatgcaggtgatgaaacttatcaggacatatttcgtgatttttcccaaatggcatccaataatccagagaaactaaatcgtttccagcaagattcacagaaattctgaatttttttaaaaatgggaaaatatgaaatctggtgaccccctaatgtatacagctaaaaattcacaatttttttactgctttaattctacttaattttggtagatattgaatggcttggaaaagaggtacccattcatatatttataaattaaaacatagttatctagtagtaggagaggaacctagtttaggacctcttttattaaaaaagcctatttaaagggctatttctgtagacagaagttcagtctagatttaggccatctctaggttacaagatgataggaggttagacaaaagtgattcttttgccaatgggtggtggcattgatttttttcctccatgcatcttgcccaggatcactcagtcaagcatgtcttcatcaagtggaagccaactgtcctgcctgcctcaagaat

SEQ ID NO: 145971 - DNA, 389 bp, Homo sapiens
  misc_feature (5)..(6): n is a, c, g, or t
gtccnngcggccgctcccgcggccccctcggctttgccagcgccgcctgcgaggcggaggcaggatgaagatgactgtggatttcgaggagtgtctgaaggactcgccccgcttcaggtaaccggcacggccgcccggcgtcaccgcggagctccttcccggcgctgggggcgtgaaagccgggcccgcgcacccggaggaggccccgcgtccgctccttccgacggggcgagcggctgttgccgccgtttcccaccctgcgagggcactgcagtccccaccgagccctcccgaggggcgacgaagtggcggggacggggacgtcgcctctcatttctttccttgccctctgccggggcggagcgccccgaaggccggcgcaccctctc

SEQ ID NO: 145972 - DNA, 7082 bp, Homo sapiens
  misc_feature (4939)..(4939): n is a, c, g, or t
gggacgccgacttctgcttcgcggtgcccccggccagagcgactctccggagggcgcccgcggtggatgcgtgcgggaatcgcggggggaagcgctgtgatcaaccgcattccgtggaccctagttgggcagctttggaagaagtagaaggtgatgtggcagaattggaactaaaacttgataagcttgtgaaactttgtattgcaatgattgatactggaaaagccttttgtgttgcaaataaacagttcatgaatgggattcgagacctggctcagtattctagtaatgatgctgtcgttgagacaagtttgaccaagttttctgacagtcttcaagaaatgataaattttcacacaattacccagtctcaggcagttctttatagcagtgtgagaatggactaatactgtggtcttggataacatctggaagaattctctggattaccagatcctgtttgaccaaactcagagatcaattaaggcacagcttcagaactttgttaaagaagatcttagaaaattcaaagatgccaagaagcaattcgaaaaagtcagtgaagaaaaagaaaatgcgttagtaaaaaatgcccaagtacaaagaaacaaacaacatgaagttgaagaagccaccaacattctgacagcaacaagaaaatgtttccgacacatagccctcgattatgtgcttcagattaatgttcttcaatcaaaaaggagatcagaaatcctaaaatcaatgttgtcatttatgtatgcccatttggccttctttcatcaaggatatgatctgtttagtgaacttggaccctacatgaaggatcttggtgcacagttggatcgactggttgtggatgcagcaaaggagaaaagagaaatggagcaaaaacattccaccattcaacaaaaggatttctccagtgatgattctaagttagaatataacgtagatgctgcaaatggcatagttatggaaggatatctgttcaaacgagccagcaatgccttcaaaacttggaacaggcgctggttttcaatacagaataatcagttggtttaccagaaaaaatttaaggataatccgactgtggtagttgaagacctcaggctttgcacagtgaaacattgtgaagacatagagcgacgattctgctttgaggtggtctcgccaacaaaaagttgcatgctccaggcagattccgaaaagctgcgccaggcatggattaaggctgttcagaccagtattgctactgcttatagagagaagggtgatgaatcagagaagctggataagaaatcatctccatccacaggaagcctagattctggaaatgagtccaaagagaaattattgaaaggagaaagtgcgcttcagcgggtccagtgtatccctggcaatgccagctgttgtgactgtggcctggcagatccacggtgggccagcatcaacctgggcatcaccttgtgtatcgagtgctccggaattcaccggagccttggggttcatttttcaaaagtacgatctttaactttagacacctgggagccagaacttttaaagcttatgtgtgagttggggaatgatgttataaatcgagtttatgaagctaatgtggaaaaaatgggaataaagaaaccccaaccaggacaaagacaggagaaggaggcatatatcagagcaaaatatgtggagaggaaatttgtggataaatattctatatcattatcacctcctgagcagcaaaaaaagtttgtctctaaaagttctgaagaaaagaggctgagcatttctaaatttgggccaggggaccaagtcagagcatctgcccaaagttcagtcagaagtaatgacagtggaattcagcagagctctgatgatggaagagaatctttaccctccacggtgtcagccaatagtttatatgagcctgaaggagaaaggcaagattcttctatgtttcttgactcgaaacatcttaatccaggacttcagctttatagggcgtcatatgaaaaaaaccttcctaaaatggctgaggctttggctcatggtgcagacgtgaactgggccaattcagaggaaaacaaagcgacaccacttattcaggctgtattagggggctctttggtgacgtgtgagttcctcctacagaatggtgctaatgtcaaccaaagagatgtccaagggcggggaccattgcaccatgccaccgtcttagggcacacagggcaggtatgtttattcctaaaacgaggtgccaatcaacatgccactgatgaagaagggaaagaccctttgagcatagctgtggaagcagccaatgctgatatagtcaccttgttacgtttagcaagaatgaatgaagagatgcgggaatcagaaggactttatggacagccaggtgatgaaacttatcaggacatatttcgtgatttttcccaaatggcatccaataatccagagaaactaaatcgtttccagcaagattcacagaaattctgaatttttttaaaaatgggaaaatatgaaatctggtgaccccctaatgtatacagctaaaaattcacaatttttttactgctttaattctacttaattttggtagatattgaatggcttggaaaagaggtacccattcatatatttataaattaaaacatagttatctagtagtaggagaggaacctagtttaggacctcttttattaaaaaagcctatttaaagggctatttctgtagacagaagttcagtctagatttaggccatctctaggttacaagatgataggaggttagacaaaagtgattcttttgccaatgggtggtggcattgatttttttcctccatgcatcttgcccaggatcactcagtcaagcatgtcttcatcaagtggaagccaactgtcctgcctgcctcaagaatatgtgttttctttagcttccctgaggatttttggtggttcagaaataggtgtgtgtgttgatgtgtttttggtaacctagctttcatacacataatatatgatttattagaactagagaatgtgttttccccgtttgttcataaatgcggtcggttatacttcttaggtgacaggttattgtccagtactttaatgtatgtatgtataatggctgtacaggtagaccataattcagtcctttagatttattttatgcagcaaaaagaagctcttttttttttttaatcacaaaaaaaaaccccagttcaaaatgtgtagttcttcattgttgggttgattccccaaaaccttgacagatgtatcgatggaataaaagtatgttttaaaggttacttgaatgtcacaaaattatgccttcatcaaaactttaaaggaaaaatcaatttataaaatcatgtaggccatttttatatttgaaatttgtccttttaaagatagttttgctgttgctcctagtgaaagaaaaatctctgtacaaaggagaaaaagaaccccacttattcttagttaatactaaaatatatagcaataaattgctgtttattttttctacatctattttgtgtacttgtacacagtgtacattcttttaaattatatcgtgtatatagctttagtattcggttacatgattcacagacccctgaattccaaaatattatggataaacattaccatttatatgctacaaattagtctgattccatctttgaaaatgtcttaaagtataaaataattaatttgcttttttttttttttcccgagatggcgtcttgctgtgtcacccaggctggagtgcagtggcacgatctcagctcactgcagcctcctcctcttgggttcaagcaattctcctgcctcagcctcccgagtagctgggactacaggcacccgccaccattccgagctaatttctatatttttagtaaagacgggtttcaccattttggccaggttggtctcgaactcctgacctcaggtgatcagcctgctttagcctcccagagtgctgggattacaggcgtgagccaccgcacccagcctaatttgccttttgattccttcccattgttgtcaacaattaagtctattcttcttttagaaattatatgtaaatgatattattgatactctttctaaataagaggttttaaaatatataaaaactttatgatccaattatagataaattttctaacatttcccagtcactagggttttataagttgattaaacatcaaatcagaatctagccaagcaggaattatattgaaataagttcacattacagaaaaggttccataatttggccaaactgcatgcatgtaatgcttatttagtaatggtcactgtatgttagataaggataaaaatatatttgtgaattacttctgaggaaatgctaacttccacagcattgtatttaattataacaataacaggaacattaaatctttatctttgctgtttcacctcaaagtcatagatcatctggctttttaggcaccttcactaaaggcaaaaatctgatttgtagtttttattagcatgtaccttgaaattatttgaccaagaagctcaaagaaaagaagtacgttaaagaaaaagaaaaaacctcacttttcctttatagtgtcccttcctgttttaattcctaaagatcctgacttttatctgaggaagtctaggtagttttccttttggatctggccattggtgcgtgtttcattcagatcacctctggaatctctgtggttgtgaaggcaattccttatgagactcttgcctcctgtggcttacgtgatgaattgttaatatggcagtaattaattagtatctacttaaatttagtggtcagaaatgtatttgaagtgccttaaagatgatcatggttcagaatatcttcagagaaagcaaaatctttaatattgcagggagcctagcaatacaantacacatttctgtggcttgatttcttgaatatgctgagacccaatttggactacatttggcagaaatgatggagtaaacagcaaggctttaaattaaattaatagttacaaggtaggttggctcttaggtgaatttagccatgtcaactaatagcttttatatggtatgtaacaaatctgaattatgttatgctgtgaattattcagtgcattataagaaatcttagttaatcatgcttttgggcttcattagtcaatgtgattggccttttattttctttccataacttatctgctattattagtttcttattccttattattaatctgttagctcattatcattagcttactaacttgaaagttagattaatatcaaaataagaatagcagcactatgaagagttaataaaatgcaatttcatgttagagctagaataaaagtaattgagcagtcatttgcaaatgcttcattataacatttatgtgcttaagatttctaaggttttaaaaagttacctttaatacaatccttagaaactcagaaatttcctgatattcattagattatggtgtttgcctaatttataccggttttcactgtatattttaatgaactttgattggttacttttccagacatacagatttaatttggaatatgaactttggttcttcatgagtgcattttgaaaaagaaaaaaagtacacattcagaatctggccaatttaagtttgtattttaaaaatattttatgcatgttaagtatggtcgcagtaaatgaaattgtgtttaagactaaatttactaccgttttgaacagacattcccagatcattcttatattgtcagataacacttgtgtataatatcactttggaccatggacatgagctggaaaaatgatgtatttttgtagattgtatgtccagaatgactttagaaccgcatgatacggtggaaggagcactggactagtcgtcactaccctttttggattcagggctcctcacaattaaaatgagtgtaatgaaacaaggtgaaaatatagaagcatccctttgtatactgttttgctacttacagtgtacttggcattgctttatctcactggattctcatggtaggatttctgagatcttaatctaagctccaaagttgtctacttttttgatcctagggtgctccttttgttttacagagcagggtcacttgatttgctagctggtggcagaattggcaccattacccaggtctgactgaccaccagtcagaggcactttatttgtatcatgaaatgatttgaaatcattgtaaagcagcgaagtctgataatgaatgccagctttccttgtgctttgataacaaagactccaaatattctggagaacctggataaaagtttgaagggctagattgggatttgaagacaaaattgtaggaaatcttacatttttgcaataacaaacattaatgaaagcaaaacattataaaagtaattttaattcaccacatacttatcaatttcttgatgcttccaaatgacatctacagatatggttttgtggacatctttttctgtttacataaatttatccacttaaaatgtgataatgtggagacaaagcaagatttgattacataaacttttctctgcattggtcttttcactatcttatttgctaacttttcttatttttcttcaacctccccaccctccattttttggatattaaacagggaaagcttgctacattataaagattgttggcaccatttattttacacaaaggctaaaggttaacttttggaaatgatgagctacttttatatatgtgtttactcatgctttgtgatatttctggatcattccagtcataaagacttattacatgtactatttcttgctacctgtgaaaaggtatattttaaagaatgtataaccaacagtccatttactttttattagtatgtagaggatttgtatctaattcatgaatgtagttttacagtagtttgtcattgtaaatggagcaaagtacattatcttctaaaatgtacattatgtaagaattgtaaatatacttaagtaatttgtatgccaaaaaattacaataagtcaataaagatctcacctctggc

SEQ ID NO: 145973 - DNA, 6140 bp, Homo sapiens
  misc_feature (3997)..(3997): n is a, c, g, or t
aaatattcagtgatgggttatttgtttttaagagataatttgtttcattggcaccttaatttcttcgttaacatactttgccctaaagatacatgaaataaaaccttctttcaacaaattatatatatttttggctagaaaattattaaatagcaaagtggaaaaaatataaagcttatagggtgtttttggcattaacttagtgtctgagaaaacaatatgttatttccttttagaagttgcatgctccaggcagattccgaaaagctgcgccaggcatggattaaggctgttcagaccagtattgctactgcttatagagagaagggtgatgaatcagagaagctggataagaaatcatctccatccacaggaagcctagattctggaaatgagtccaaagagaaattattgaaaggagaaagtgcgcttcagcgggtccagtgtatccctggcaatgccagctgttgtgactgtggcctggcagatccacggtgggccagcatcaacctgggcatcaccttgtgtatcgagtgctccggaattcaccggagccttggggttcatttttcaaaagtacgatctttaactttagacacctgggagccagaacttttaaagcttatgtgtgagttggggaatgatgttataaatcgagtttatgaagctaatgtggaaaaaatgggaataaagaaaccccaaccaggacaaagacaggagaaggaggcatatatcagagcaaaatatgtggagaggaaatttgtggataaatattctatatcattatcacctcctgagcagcaaaaaaagtttgtctctaaaagttctgaagaaaagaggctgagcatttctaaatttgggccaggggaccaagtcagagcatctgcccaaagttcagtcagaagtaatgacagtggaattcagcagagctctgatgatggaagagaatctttaccctccacggtgtcagccaatagtttatatgagcctgaaggagaaaggcaagattcttctatgtttcttgactcgaaacatcttaatccaggacttcagctttatagggcgtcatatgaaaaaaaccttcctaaaatggctgaggctttggctcatggtgcagacgtgaactgggccaattcagaggaaaacaaagcgacaccacttattcaggctgtattagggggctctttggtgacgtgtgagttcctcctacagaatggtgctaatgtcaaccaaagagatgtccaagggcggggaccattgcaccatgccaccgtcttagggcacacagggcaggtatgtttattcctaaaacgaggtgccaatcaacatgccactgatgaagaagggaaagaccctttgagcatagctgtggaagcagccaatgctgatatagtcaccttgttacgtttagcaagaatgaatgaagagatgcgggaatcagaaggactttatggacagccaggtgatgaaacttatcaggacatatttcgtgatttttcccaaatggcatccaataatccagagaaactaaatcgtttccagcaagattcacagaaattctgaatttttttaaaaatgggaaaatatgaaatctggtgaccccctaatgtatacagctaaaaattcacaatttttttactgctttaattctacttaattttggtagatattgaatggcttggaaaagaggtacccattcatatatttataaattaaaacatagttatctagtagtaggagaggaacctagtttaggacctcttttattaaaaaagcctatttaaagggctatttctgtagacagaagttcagtctagatttaggccatctctaggttacaagatgataggaggttagacaaaagtgattcttttgccaatgggtggtggcattgatttttttcctccatgcatcttgcccaggatcactcagtcaagcatgtcttcatcaagtggaagccaactgtcctgcctgcctcaagaatatgtgttttctttagcttccctgaggatttttggtggttcagaaataggtgtgtgtgttgatgtgtttttggtaacctagctttcatacacataatatatgatttattagaactagagaatgtgttttccccgtttgttcataaatgcggtcggttatacttcttaggtgacaggttattgtccagtactttaatgtatgtatgtataatggctgtacaggtagaccataattcagtcctttagatttattttatgcagcaaaaagaagctcttttttttttttaatcacaaaaaaaaaccccagttcaaaatgtgtagttcttcattgttgggttgattccccaaaaccttgacagatgtatcgatggaataaaagtatgttttaaaggttacttgaatgtcacaaaattatgccttcatcaaaactttaaaggaaaaatcaatttataaaatcatgtaggccatttttatatttgaaatttgtccttttaaagatagttttgctgttgctcctagtgaaagaaaaatctctgtacaaaggagaaaaagaaccccacttattcttagttaatactaaaatatatagcaataaattgctgtttattttttctacatctattttgtgtacttgtacacagtgtacattcttttaaattatatcgtgtatatagctttagtattcggttacatgattcacagacccctgaattccaaaatattatggataaacattaccatttatatgctacaaattagtctgattccatctttgaaaatgtcttaaagtataaaataattaatttgcttttttttttttttcccgagatggcgtcttgctgtgtcacccaggctggagtgcagtggcacgatctcagctcactgcagcctcctcctcttgggttcaagcaattctcctgcctcagcctcccgagtagctgggactacaggcacccgccaccattccgagctaatttctatatttttagtaaagacgggtttcaccattttggccaggttggtctcgaactcctgacctcaggtgatcagcctgctttagcctcccagagtgctgggattacaggcgtgagccaccgcacccagcctaatttgccttttgattccttcccattgttgtcaacaattaagtctattcttcttttagaaattatatgtaaatgatattattgatactctttctaaataagaggttttaaaatatataaaaactttatgatccaattatagataaattttctaacatttcccagtcactagggttttataagttgattaaacatcaaatcagaatctagccaagcaggaattatattgaaataagttcacattacagaaaaggttccataatttggccaaactgcatgcatgtaatgcttatttagtaatggtcactgtatgttagataaggataaaaatatatttgtgaattacttctgaggaaatgctaacttccacagcattgtatttaattataacaataacaggaacattaaatctttatctttgctgtttcacctcaaagtcatagatcatctggctttttaggcaccttcactaaaggcaaaaatctgatttgtagtttttattagcatgtaccttgaaattatttgaccaagaagctcaaagaaaagaagtacgttaaagaaaaagaaaaaacctcacttttcctttatagtgtcccttcctgttttaattcctaaagatcctgacttttatctgaggaagtctaggtagttttccttttggatctggccattggtgcgtgtttcattcagatcacctctggaatctctgtggttgtgaaggcaattccttatgagactcttgcctcctgtggcttacgtgatgaattgttaatatggcagtaattaattagtatctacttaaatttagtggtcagaaatgtatttgaagtgccttaaagatgatcatggttcagaatatcttcagagaaagcaaaatctttaatattgcagggagcctagcaatacaantacacatttctgtggcttgatttcttgaatatgctgagacccaatttggactacatttggcagaaatgatggagtaaacagcaaggctttaaattaaattaatagttacaaggtaggttggctcttaggtgaatttagccatgtcaactaatagcttttatatggtatgtaacaaatctgaattatgttatgctgtgaattattcagtgcattataagaaatcttagttaatcatgcttttgggcttcattagtcaatgtgattggccttttattttctttccataacttatctgctattattagtttcttattccttattattaatctgttagctcattatcattagcttactaacttgaaagttagattaatatcaaaataagaatagcagcactatgaagagttaataaaatgcaatttcatgttagagctagaataaaagtaattgagcagtcatttgcaaatgcttcattataacatttatgtgcttaagatttctaaggttttaaaaagttacctttaatacaatccttagaaactcagaaatttcctgatattcattagattatggtgtttgcctaatttataccggttttcactgtatattttaatgaactttgattggttacttttccagacatacagatttaatttggaatatgaactttggttcttcatgagtgcattttgaaaaagaaaaaaagtacacattcagaatctggccaatttaagtttgtattttaaaaatattttatgcatgttaagtatggtcgcagtaaatgaaattgtgtttaagactaaatttactaccgttttgaacagacattcccagatcattcttatattgtcagataacacttgtgtataatatcactttggaccatggacatgagctggaaaaatgatgtatttttgtagattgtatgtccagaatgactttagaaccgcatgatacggtggaaggagcactggactagtcgtcactaccctttttggattcagggctcctcacaattaaaatgagtgtaatgaaacaaggtgaaaatatagaagcatccctttgtatactgttttgctacttacagtgtacttggcattgctttatctcactggattctcatggtaggatttctgagatcttaatctaagctccaaagttgtctacttttttgatcctagggtgctccttttgttttacagagcagggtcacttgatttgctagctggtggcagaattggcaccattacccaggtctgactgaccaccagtcagaggcactttatttgtatcatgaaatgatttgaaatcattgtaaagcagcgaagtctgataatgaatgccagctttccttgtgctttgataacaaagactccaaatattctggagaacctggataaaagtttgaagggctagattgggatttgaagacaaaattgtaggaaatcttacatttttgcaataacaaacattaatgaaagcaaaacattataaaagtaattttaattcaccacatacttatcaatttcttgatgcttccaaatgacatctacagatatggttttgtggacatctttttctgtttacataaatttatccacttaaaatgtgataatgtggagacaaagcaagatttgattacataaacttttctctgcattggtcttttcactatcttatttgctaacttttcttatttttcttcaacctccccaccctccattttttggatattaaacagggaaagcttgctacattataaagattgttggcaccatttattttacacaaaggctaaaggttaacttttggaaatgatgagctacttttatatatgtgtttactcatgctttgtgatatttctggatcattccagtcataaagacttattacatgtactatttcttgctacctgtgaaaaggtatattttaaagaatgtataaccaacagtccatttactttttattagtatgtagaggatttgtatctaattcatgaatgtagttttacagtagtttgtcattgtaaatggagcaaagtacattatcttctaaaatgtacattatgtaagaattgtaaatatacttaagtaatttgtatgccaaaaaattacaataagtcaataaagatctcacctctggc

SEQ ID NO: 145974 - DNA, 1801 bp, Homo sapiens
  misc_feature (5)..(6): n is a, c, g, or t
gtccnngcggccgctcccgcggccccctcggctttgccagcgccgcctgcgaggcggaggcaggatgaagatgactgtggatttcgaggagtgtctgaaggactcgccccgcttcagggcagctttggaagaagtagaaggtgatgtggcagaattggaactaaaacttgataagcttgtgaaactttgtattgcaatgattgatactggaaaagccttttgtgttgcaaataaacagttcatgaatgggattcgagacctggctcagtattctagtaatgatgctgtcgttgagacaagtttgaccaagttttctgacagtcttcaagaaatgataaattttcacacaatcctgtttgaccaaactcagagatcaattaaggcacagcttcagaactttgttaaagaagatcttagaaaattcaaagatgccaagaagcaattcgaaaaagtcagtgaagaaaaagaaaatgcgttagtaaaaaatgcccaagtacaaagaaacaaacaacatgaagttgaagaagccaccaacattctgacagcaacaagaaaatgtttccgacacatagccctcgattatgtgcttcagattaatgttcttcaatcaaaaaggagatcagaaatcctaaaatcaatgttgtcatttatgtatgcccatttggccttctttcatcaaggatatgatctgtttagtgaacttggaccctacatgaaggatcttggtgcacagttggatcgactggttgtggatgcagcaaaggagaaaagagaaatggagcaaaaacattccaccattcaacaaaaggatttctccagtgatgattctaagttagaatataacgtagatgctgcaaatggcatagttatggaaggatatctgttcaaacgagccagcaatgccttcaaaacttggaacaggcgctggttttcaatacagaataatcagttggtttaccagaaaaaatttaaggataatccgactgtggtagttgaagacctcaggctttgcacagtgaaacattgtgaagacatagagcgacgattctgctttgaggtggtctcgccaacaaaaagttgcatgctccaggcagattccgaaaagctgcgccaggcatggattaaggctgttcagaccagtattgctactgcttatagagagaagggtgatgaatcagagaagctggataagaaatcatctccatccacaggaagcctagattctggaaatgagtccaaagagaaattattgaaaggagaaagtgcgcttcagcgggtccagtgtatccctggcaatgccagctgttgtgactgtggcctggcagatccacggtgggccagcatcaacctgggcatcaccttgtgtatcgagtgctccggaattcaccggagccttggggttcatttttcaaaagtacgatctttaactttagacacctgggagccagaacttttaaagcttatgtgtgagttggggaatgatgttataaatcgagtttatgaagctaatgtggaaaaaatgggaataaagaaaccccaaccaggacaaagacaggagaaggaggcatatatcagagcaaaatatgtggagaggaaatttgtggataaatattctatatcattatcacctcctgagcagcaaaaaaagtttgtctctaaaagttctgaagaaaagaggctgagcatttctaaatttgggccaggggaccaagtcagagcatctgcccaaagttcagtgattgctgtaaatagcgacgaggccaggcgggagtctctgttttgtcctgatgagctagattca

SEQ ID NO: 145975 - DNA, 571 bp, Homo sapiens
ttgctttgtgctacataaaaatctaacatgccacctttgcagcataggggaagagataggcttaacaagaaattaataccgacaatgacaagtttaaactcctcattaaacttaagttggagaggtggctgtgctggggttggtatacactcccggagcttggtagagcagaggatgtggaagtgtcgcctatggatgtaatgcaagccattcatgagataaaaagagctggcttggaggtctttaaatcatttcccaaaatacaggatagagcattcaataaagagagactgtgtggagtggacttccccaaactggaggctgatggagaacagcagcctgagaaaagtgcatcactcatatcatgagacatgcatgcaaatattccctgtggtggcccttgaagatccttgaaagccatcacaagaagaatgaaaggtcagctccaaacacctaaaaggctcagaaagccggaagccatcttacaatagtaccaattaaaggagagctttcttgctatcctcaccccgccgtcctgaattgagactgtttggcaacttaaaaataacca

SEQ ID NO: 145976 - DNA, 173 bp, Homo sapiens
ctgcttgtcccctaaaggcgttcgagtattctaactctggtagactttgggctgcttaacccaattccctgttcatttcgttctggagtaaaccgagtgattgaattctctcccgggccacaatcagatcttgctggtggaactcactctctgccttcccaggccccagcccg

SEQ ID NO: 145977 - DNA, 913 bp, Homo sapiens
ggctccaacaatgagcaggacagagccagggccgacccgccggaagtctctggcctggcagggaagacaagtaggaaagccagcaactccatccgggggtgagggtgagagggagacaggtgggaaagccagcaactccatccgggggtgagggtgagagggagacaggtgggaaagccagcaactccatctgggggtgagggtgagaggcaggacgtcctggaaccacagaggcttgacatccagcccagatcagaggaggacaaagcaggaaggacttcctggaggaagtgacttataaggtgagacttgaaaaattaggaagaatcagaaaggagaagcaaagggggaaagagcattctagacagaaggaatggcacgcacaggccatgaacgaaggcaccgttggtggaaagcccagggagaactttggctacagtgaggagggaagtggggagtgtggcgagaggcaggtgagggccagatgttcccatctcttccctgtaccagccagtcgtctggcccatgccagcctccctcctgaaattctccaaagaagacgtgatccgggcggggccctcaggatgcccttcaggaagcttctcttacccagggcctggggcctttggtgctcaggaatgggatgtgatgctgggcttcaacagggacttaggcctctccatgcctgtcataaacgcttcctagtcctcaggtcacgcccaggctgcagtcttcccagggctgtactctcccagcaccctcaggagggcagacctcaggcggagaagcctgccggtgcctactgcccagaatgggcttcaaatcaacctctgctgggtttctgggggcagggaccagttcacaagcccctccaggttcccccgtctggccttccctccccacagggctggcc

SEQ ID NO: 145978 - DNA, 299 bp, Homo sapiens
atagaacccatattcaggaatgaacccaggatgaataatgaggaatctaggattctaattccaactttcctcatttcacactgactttggggactttttacattacagagatttggtcttcccatcggtaaaatggggctaaaacctccaacctgctttcctgccttgtggggactgctgtgcaatctctccacatatgaaagtttatcctctagggaagtaaaacatcagcggtttccagcatgttgaagaacagtgtttcttacatcattcctccacccctagggttttgtagggag

SEQ ID NO: 145979 - DNA, 305 bp, Homo sapiens
gtcccagctgcttgggaggctgaggtagtagaatcgctttaacccgggaggcagagatttctgtgagccaagaccatgccattgcactccagcctgggtgacagagcaagactctgtctcaaaaaaaaatcctgtctcacaagaaatacataaataaaaatgaaaactatttcctatgggccaagactgaagaaagtactgttgttctaatggtttcatagaaagttaatgccaccaccataggctcatgagaggccatgaagtgctttaatgggtcttaaatgggaggggcttcaatagaatag

SEQ ID NO: 145980 - DNA, 149 bp, Homo sapiens
gacagacacggcctgcaaaggcattaaacccaggtagagtgggctgtcttcggcctgcagacggccgcggtcatgctttgcagaggagctgtggccccttaaagtgacatgacattatggacaatgacagttgatccttgggggctttc

SEQ ID NO: 145981 - DNA, 771 bp, Homo sapiens
acatatggctagccagttttcccagcaccatttattaaacagggaatcctttccccattgcttgtttttgtcaggtttgtcaaaaatcagatggttgtagataagcggcattatttctgagggctctgttctgttccattgatctgtatctctgttttggtaccggtaacatgctgttttggttaggccctgagaatgatgcagccagtcctacacatatgtgcacacatgcacgtgcacgcacacacacaaacacacagagacactgaacacaggtgtgttcggagtaggaggagtccctatactatttactacttgaaggcaaaactgtacctgtttactggtgtatcccggataattcaccagatagttagagtgaatgaatggagagatggtactgaatctatgtatgaggaacaatgtaacaaatctgtcagtgagttaccagtacctacactgggggcaaatctgcttatttgataccttcacggcatcagcagcataccttgcaaaatacgtttatttcgagaggctgacagcagaaatactctgtggtaaggtcacaaaatttaatgaacaccactgctgaaaatagctagttcttttaatttgcctatacttatgtagttacagttcacacttttcctgaagatcattataaatttgctggttagtaggaagataaattaaccaaataatttgatctagattaaatttagttcaaccccaaaatttaaattgtcccttgaggcaaagcttagtttctgcagg

SEQ ID NO: 145982 - DNA, 210 bp, Homo sapiens
atttaagacatctgtattataaaaggaagaggaaaagcgacctaaaaggtgatagtttctgtattctactctaaagtgaagaaatattgactagtagactgtgataaagtaagtacatacatactgtaatctttagcagcagtggttttcaatcaagggaggttatgcctttcagaggacattttggcaatgtttggaaacataattaca

SEQ ID NO: 145983 - DNA, 375 bp, Homo sapiens
ggaggctctgagggagaatctgttccatgcctctctccttgttctgctggttgccagcggtccttggtgttcctggcttgtagaggcatggctccaatctctgcctccatcttcacgtcaccatctctctctgtgtgtccctgtgtcttctcctcttcttataaggaaatgtcactggatttaggacccaccctaaatcgattctgagatcatcgagagccttaattaataacatttgcaaagaccctgtttccaaatatggtcacattctgaggttctagatggacatgaatttagggaggatgctattcaacccaatgtagtggtcagatgattgaacagccaccacagaaagcagcaaggaccatcacagaa

SEQ ID NO: 145984 - DNA, 332 bp, Homo sapiens
agcctcccagtagctgggaatacaggtgtgccccaccatgcctgatgaagctttctttgctctaaaatctgaactccacaaagacattgatctgccctgtaggagccagggagcttttttcatttacccacgataggtcagcaataggtgttttgcctgctgctgaaagaagttcccataatcagaattcactgcatattttacagggatcagtgcaaaatgaaatgtggggtcccatggcagccccttaagccaagcacaggccctgggtgacctcaccggccttgtgcccagagagctgctctgctcagagctacaccagggatttgaca

SEQ ID NO: 145985 - DNA, 391 bp, Homo sapiens
taaatagagatagggtctcactctgtcacccaggctggagatcatagttcactgtggcctcgaactcctgggttcaagagatcctcccgcctcagcctcctaagtagctgggattacaggtgtgcaccgccaacagtccacttactaactgctcctcaaattgtccagtttgagtgtgccatctgcttcctgctgggaccttgactgatatagcaatcccgaatcacacatcttcatactacactgctcagtggtagaaaggcgggagaaagaggttctcttttggccattttaacaggaaagagagtatgcttcttgcccggcaaacaacttttaaattcttttttattttattttatttttttgagacggagcctcgccctgtcatcca

SEQ ID NO: 145986 - DNA, 362 bp, Homo sapiens
taactgctccccacctcacctccattcctgcgcaagttacataatgctagtgagtgcttctgggaaagaaaagttttctctttctttctctagagctactgaaagagaccctttctttccttcaaaatggtgtcatatgaaatttgaggtgtggaatggctgcagccgttgttgccaaggttggatgtagcctgaggatgaacctactcatggaacagggcagaaccaagagaatggcagataagtgaaactgcaaccctgatgacattgtaaatctctggatcagacttcctctgcatgtttcaatttgtgatacagtaaagtccatccctctctctcccctttttaagtgagttagaatt

SEQ ID NO: 145987 - DNA, 401 bp, Homo sapiens
ggcgtggtttcccagtgtggaggcgcggcacttggagtcttgcctctggctgggttaatgttcttgagcagggctgtctcttccttgagcctcagtttcccctcctgtcaaataaagggcaccaggctgagggcacgccagggtctcttcccagtcccgtctagctcctgggtggaaagccaccattctgctgtaatgcttggcttcctcagagcccttgtggtctcggcacagatagggagactgaggcacagggaagccctcctgccccagcctcactcctagaggccctaggttctgtgaccactgccactctgcatctgtgtgtctgtgtgtggctggctggctccctctcctctcccaccattcccaaatttcctggtctggctgtgtgagcttca

SEQ ID NO: 145988 - DNA, 537 bp, Homo sapiens
aaatacctcagcatacctctactcctccaaccaggtccaaggatcaggccaaaactccctgatgtggtaaacagcctgaccccttgcggacctctctctctccagccacttccctaagattccccagtgctctgtgccctagccagcccgactcatctgcccagattcctcaatgtttcactctctcattcaccattttgaccccactgtgctcctgggccactctccaaggccccgcctcttcatctcctccctccttactcatccttcaggtcttggcttaggtgccattccctccaggaagccttccctgacaccaatcccatcctcacctagaacagattatgtgcgcttctttgtgccccccatggccccctgtgggtttgcttcacggattataactgcctgactacctgcctttctccaccctctagactgagaacaccatagaagcctcctcagaccactggtgcacttcactcctgcaagttgagctggactgcattgggggccagctgaggggatcctcagagtcac

SEQ ID NO: 145989 - DNA, 380 bp, Homo sapiens
cgagcctggcaccgggtgtggagtcggactccaacctctcactgccatttgtttccactttccctgcccttgccttctctgcagctatccatctcccgcaccccctgcaactttctctctctctccgtttccctatacccactctccaacaaagatactccatagccagctcccattctaccaggaccccaagctacaaacatgggcactatcctggactccacctcttaaactctgggtatagtttccacaatgtgtcaattctatccctacctaactcttttggcaaacccttttctataccctcccaataaacatttttgtctttgatagccttgaagccgaatcactgttcacataaccccagaaccatctttctc

SEQ ID NO: 145990 - DNA, 424 bp, Homo sapiens
aaaatcatggcccctttctagtcctttccttgcttaacagaacatgccatgccatgcccctggccagcaccttccaggagtctcactgccatttgtttccactttccctgcccttgccttctctgcagctatccatctcccgcaccccctgcaactttctctctctctccgtttccctatacccactctccaacaaagatactccatagccagctcccattctaccaggaccccaagctacaaacatgggcactatcctggactccacctcttaaactctgggtatagtttccacaatgtgtcaattctatccctacctaactcttttggcaaacccttttctataccctcccaataaacatttttgtctttgatagccttgaagccgaatcactgttcacataaccccagaaccatctttctc

SEQ ID NO: 145991 - DNA, 539 bp, Homo sapiens
gaggggtaatatttatctcaggatttatctcaggatttactgtaaatatgtatacacacatacaaaaacccaggcattgttaagagaaaataatggcccagaggttgaaattatcagacagaacctttaaaaataattatgattaatgtgttaaaattctagtggaaaagataaataacatgctcaggaaattttagcagagagatagaaactatataagaagctcaaatgaaaatgctagaaatgaaaagcagtattggaggtgaaagattcctttggcaatttatcaacagactggagatggcagaggcagaatcagtaatattgaaggcagattactatatattattcaaacagaaaaatgaaagagggagaaaaggagagaagagatggaggaaaaaattgggaagactggcaatactaatttgtgaggatagggggcaactagaatcctcatacattactggtggagatgcaaagtggcaaagcctctttggttgagtttgatagtttcttatgaagtaaaaaataccatgaaa

SEQ ID NO: 145992 - DNA, 377 bp, Homo sapiens
aggcaataggagggatcatcatggtgacggaaatgttctacatcctgactgcaagcatcattgtcagtatcttgactatgatattgtgctgcagttttgcaagatgttaccatagggaaaaactgggtaaaagatacataggctctcctctttgtattatttcttacaactgcatgtaaatctacaattatctcagtttaatttttaaaaaatagctcaggttaagggggaggcaagacaaatcaaaatctggcatgcagttttcatattcataagaggattataataactactaaggaaattttttaaatgtatacaaagtaaggagatttgggaacacaaggtctcttaatgacaaatggtaatttaatattact

SEQ ID NO: 145993 - DNA, 337 bp, Homo sapiens
aatgaggtgcatctcccacactgcctttcacagtgactataactgcctcttcccaaatccagctctcctctttttgtgtgggtgccgggcgaactcgtgtctgtctccatcacaagacccctgacacctttgcttgatgccatcaggtactgtccccttaatcagatgactttgagagcttgaatcaattcagctcagctgaaaggctgccttatctagggtaaaggaggtgagaaggcagagattcctgcctggggacatccagaaggcaccaaaacttaagcgtacattcacagggctagtcaccccttcaactgctgacagccccttccctggg

SEQ ID NO: 145994 - DNA, 267 bp, Homo sapiens
tgaattactattacaaatcttacatgtgaaaggatccataattctgggacagacagaattcaagccgaacatgttggcctgatagggtagaacctggaaaggagatttatttgctacagaatcgtatgtcaagctaaaatttaccttatgagatttgttgaaataacattctggatagaactcccaaatctgtccaatcttgtttgtttcttaactggttaaagaatatttgataatgagttaggctatgttgatactgttgatcgc

SEQ ID NO: 145995 - DNA, 511 bp, Homo sapiens
aaagccaggccagcctggaatcacatcctgactcctcattttcttgctgtgtgacactgtacaagtcacctagtgtctctgagcaacaggtttcttacctgtaacgaaaagctttatacctgcatcatggggttgttataaggcttagaagagatgttcaagcccaagagcctgtcagtctcctaccctagagagaggaggggacttgcataaggtcacacacagaggcagatccaggcctgcaactcaagactcactgctcctagcccatgctctttctctgaggagccatccctcatgctgctctgtgagtccttgttccagtgacacagtgccagtctggggggcggggagcgggtggaaatcacgccttggtacgtggtggtttactctcatctctgctgggctgatccagctgctgatggtgagagaaccagtgcttttaagaggccttcatgcgtgatcccatggaacagtgagttcagtctggccagcctcataggctgccagc

SEQ ID NO: 145996 - DNA, 181 bp, Homo sapiens
gcttccttcttgtagagcatcgtgctgaggtcgggcagctttgctctgggatctcagcccagtcatgttgtcccttcgctatctgtgttttgccagccatgaaacagggtgcgagatccctgattcctctggctgtgaggccactgagcaggatgtgttgtaggatggtgggtagagacca

SEQ ID NO: 145997 - DNA, 297 bp, Homo sapiens
caggggaggctcctggcttcccaacagaggaaggcatcacttcagaaagggctgtcccctcaggccttctgtaggtggccggtggggtctaagtgtgtgtgcccttcactccccgcttcattcccctcatcctccctgtgctcctgtaatgcccactggaccactggagagcccccgcagacggcaaacagcagcagagcacacaaccagccctctcaggtctagtaaaagtgagcttcctacagaaatgcacaggggactgagatgagagtcgagcaggcctggaaggatcccggg

SEQ ID NO: 145998 - DNA, 369 bp, Homo sapiens
aggtacctagctcataagcagtatagaatattatttcaagttaataatcataagaaatcagaaacaggaaggatttttacaattgtggaaaaattctttgatgagaaaatattagttccacttatctgggacaataaaaagtaggtacatttgatttataagctgtagtttcaaaaatataagagtataacataggtttttgtaatgagatgttaaataggaattattctattgtctctgacaggttgctggaatctaaaagctaaaatgaagaggtactaagtgccttactcttctacgagacaacagaacaacagaatagaaccaaacccagtcagatacgatcactgtggccagaaccactatctg

SEQ ID NO: 145999 - DNA, 436 bp, Homo sapiens
ctcgaattcctgacctcaagtgatctgcccgactcggcctcccaaagtgctaagatgacaggcgtgagccaccacgcccggctgtgactttgtatttacagagaaaggcacagtctatgtttcagtttcttcccagcttgtactaatgttaatgctaagggaaatctgtggagtgaaacttctctgtagtataaaatagccttgtattcctaaaattcaaagtaatatatgttcaccaaagaaacttttgataatatcaaaaagtagaaagaaaattaattgcctattattctgtctcccaaagaaaagcaactatttatcccacagatttcactggggacttcttttgtgccacgtactaaactaagtactagagataaaaggttaaaagttacaatttctgtcctcaaagagctcatggtccaattatgagaaa

SEQ ID NO: 146000 - DNA, 245 bp, Homo sapiens
gcctggctccagagtcaacccttttacccattagaccacagtgcttctcagagattcctacactgattctaagcaagagacaattacagaaatatttcttgctgtgttaaacttacatagcaagcatcacttgcttgttttatttctgattacacatgatatactagtaaactctgaaagctggatcacagccttttatttcttgtagcctttggaatgtgtgtgtgtgtgtgtgtgtgtgtgtg

SEQ ID NO: 146001 - DNA, 269 bp, Homo sapiens
agccactgggaatacaacatggggggtatagtctgagctgatatgcatgaaaggcggcctctcagtctctcttggagatccccggataatgatattaaagataatttatactaaaggaatttctaaaagccagtctatatgtaacttatgggcactctgtgcacaatataattttgttggtagtgggacactttgtctcagacatgtgtggcaacattggaaagaccaccactaactgaagtctacagttatttcaacctccagacacc

SEQ ID NO: 146002 - DNA, 319 bp, Homo sapiens
taaattaatattagaaaaaaagtaaaaagaaataagaatgaagggagagaaaaaagaaggagggagaaaaacaagggaaagtaatagtaatacactggctgaaataaccaaaatgtggaaaggacagccttaggtgtgagtggctccagaggtttcaacgatgctacctggtatttttccttgtgccacttctgaccagcatttccagaaagcatggaagccagccacctgtagcttcagatttcttcttctttttttttttttttttttttttccaacaaaaggggggacaccttttttttttttcaaaaacttgggg

SEQ ID NO: 146003 - DNA, 963 bp, Homo sapiens
aatcttgcagccgcacactctttgggtccgcccgtttctctaatcaagttgtaacactcgctgctgtggtccacagcttcattccttgaagcccgtgagacacgaacgcttccattgagaaaaaccttccatcagaagaagacttctcgtctcagtgggactgctgagttgaatgagacgaggtttcaccatgttacccaagctgatctcgaactcctgggttcatgcgatccacctgactcagcctcacaaagtggtaggactacagctaacatctctactcctctgcaagatgacctcctcctgcatgcacacagcagccactggctcatagcagcccgagagcccccaaatccctctgaaaattgctgtgaaacagaggtttgcctctctttcctgagaaccagaatgagtcagaagcccagtacacatgggaacagttgagcctttggatcttctgtgcagtttctcctttctgataagttattcttttcttgcaaatgattctctcccagataacaatctgagcagggaggaaaagaagaaagggacaatttgtctattgagtcaaacttcaggcagcatttgatgtaccctagccttggaaaagggctaaaactgcatttagtttgtggcaaatgtgaattatcatctttctatgtcaagttgttcatgtcttttgataacatagcaggtgatacttactcagagtattaatcatggcatttaacctactctgaaagaaaaccaaaatacccttagggagagcttccattaccaggatatccaatattcattttgccctaagtgcaacctccaaagatgcagtcctatttaaataatcaattcttctcaatcaccccacccaacaatgactggaaattaccccaaagaaaagaagaatggaataatcaactttgaaagaaagccctttttatattaaaattggaactattttttctc

SEQ ID NO: 146004 - DNA, 511 bp, Homo sapiens
aatcttgcagccgcacactctttgggtccgcccgtttctctaatcaagttgtaacactcgctgctgtggtccacagcttcattccttgaagcccgtgagacacgaacgcttccattgagaaaaaccttccatcagaagaagacttctcgtctcagtgggactgctgagttgaatggtgcttttttttctgaagctttggtagtgtaactgtaagagtcctggaattggaaaagcaaatccagaagttgagttccatgacttttttgctgtttgcctttggacttgcatcatttatatttttaattcatcgaggatgagaaaattgattaacacaaaatcttttcatgtcttttctgatgagagactagctgaatccaagaagagaagcccttgaagagtgtattctattctagacaagcattcacacattggcttctttggtgccagatcctggtcacagattttggtgtggatgtggtaaaaagggagcacttttacactgctggtggga

SEQ ID NO: 146005 - DNA, 726 bp, Homo sapiens
cctgccgatctctctttatttccctgcaaagctaacatctctactcctctgcaagatgacctcctcctgcatgcacacagcagccactggctcatagcagcccgagagcccccaaatccctctgaaaattgctgtgaaacagaggtttgcctctctttcctgagaaccagaatgagtcagaagcccagtacacatgggaacagttgagcctttggatcttctgtgcagtttctcctttctgataagttattcttttcttgcaaatgattctctcccagataacaatctgagcagggaggaaaagaagaaagggacaatttgtctattgagtcaaacttcaggcagcatttgatgtaccctagccttggaaaagggctaaaactgcatttagtttgtggcaaatgtgaattatcatctttctatgtcaagttgttcatgtcttttgataacatagcaggtgatacttactcagagtattaatcatggcatttaacctactctgaaagaaaaccaaaatacccttagggagagcttccattaccaggatatccaatattcattttgccctaagtgcaacctccaaagatgcagtcctatttaaataatcaattcttctcaatcaccccacccaacaatgactggaaattaccccaaagaaaagaagaatggaataatcaactttgaaagaaagccctttttatattaaaattggaactattttttctc

SEQ ID NO: 146006 - DNA, 297 bp, Homo sapiens
gagttgttataagaggtaaatatgaagtgttaagcatggtgcctggcatgtagtaagtgttccataaatgtcagctattttaattgtcatcgtgaagcagggccagcctttgtttatttacagagcaataatttgatgattattggaaaattctcctttcccaaggttttctaattataattccctaaattccacttataaatatccattactttggatttagactttctgtctttggggcctttttgttaatatgaagattaatcttttggaacaatgggtaataactgggagggg

SEQ ID NO: 146007 - DNA, 129 bp, Homo sapiens
tggagaattaatggtttttttttccccaagtacctttgtttttggtgtatgccatgtacgtgcaagggccttgtgcttttgaagatacagaaaatactttagatttgacagaaatctattttgaaatta

SEQ ID NO: 146008 - DNA, 429 bp, Homo sapiens
ttctgaatttatcttagagttgtgttacccatgttggtgtcaatagttgtttgttttttattaatatggaagtgacagataattaagaataaaaacaactgtgtatgcagtactgcttaaatgtgtgtcccagagttttaatatcattggcagcatgaaaagttcctgcatgccaaaagcctaagtttacataatagggagagaggacacacagaatagagagctgatttttccaccttaactggtaaccgatgttcttaaagactgtcagatttctctgaggctagcagaggccctaactccagcattgccatttgctttcatgatgggattgggtgctacagaaatgtgaggtggtagccttggccttctggcacagttaatatgccatttggagtggtgggtcagaacataagggtggtcagaaca

SEQ ID NO: 146009 - DNA, 446 bp, Homo sapiens
  misc_feature (34)..(34): n is a, c, g, or t
gtctgaggatccccgatgatgtccacgctcattngctttattattctctctttacatgggatattgggtgcaagtcgagttctgtggaccacgctttgggaagtgctgccagaaactatccaaaacagtaatctccagagcacttatgaggcagtcacagcttgaagtgtgacgcttagtgtgtcactgatgttggagctgggctctcaggctatgcttgcaggatggtccccacgtgcctgtggcaaggtctgtggtgaagcagagattatcaaggctttccagaggcagaggaggaacccagctgccctgcatcaccctggaggagtagggagtcagcagtcaaagccttgagataattggggaacacaggatgtgataaaaaccagaagtctgtgatgttgtttgttctctatgaggcatcagaggaggcttcatggagcggg

SEQ ID NO: 146010 - DNA, 726 bp, Homo sapiens
cttcataaaaagattctccaataatcctatttgggtatttttctttagtataaacaaaataaactacagtttcattaagtgtaggactaaattactctctttgtttctataatattgaaaggatctgaaactgcagatctgtgaataatttcaaaatttcaaaatattaggtatatatattctaaaactgtatatagactgagcaggctgttggtctaacgttcaggccaaagcacaacaatgaaccattctactagattaataaagttttttttttttttagctttaatcagatgtgtccaattataaaggtttgaaaacattaaggtcgaaaaccctaatctttttaaaattaataatagttgcttcacttgttaataattttgggataccacatgacagtaaataacagagaagaaaaattggtattaacattaattctagagctgctcaaagaaaatccaggaattggttgataatgttagtgttctttgaaactaagtttatttttagagcaataggatttgaaatagcattattcttttaaaataaaatgagaggttagacctggtatcgtggatcacgcctgtaatccctgtactttgggaggctgaggtaggaggattggttgagtccaagagttcaagaccagcttgggcaacatagagagaccctgtctctacaaataaaaaaattttttaattagctgggcgtagtggtatgtac

SEQ ID NO: 146011 - DNA, 306 bp, Homo sapiens
ctcaaccttcctccatctttcttcccaggtaggatagttgttattaccgttttaaacataaggaaacacactcagtgaagaactaacctcctcagtttcacacagccaacctggtacaagtctctgggcctcaggatattggttcctgtcaagtttgccatttcctatctgtgctaaggtggaagctgttctagtcactgggtatgccattcaggaaagtgcttctgattttctgattttcacagttctgactctttttttttttttaagacagagtctcactctgtcaccagactggagtgtagt

SEQ ID NO: 146012 - DNA, 274 bp, Homo sapiens
cctgctgagttgctccttcgctggaggggtacctccgagcagggcatctgcaggatggtgggcacacttgcctctcactcttggcggggccaggagtctctgttgccactgagtgacgttatgctgggaaatggaggcgtggtgtccgcttctctttccgtgatcctcatacccttcccaagacccccattttgttagtgaagaacttgacgcccagatccacctgccagcatgtgtggccttaggtatatctggcattcaggagccgatgaag

SEQ ID NO: 146013 - DNA, 695 bp, Homo sapiens
cttaatgtagatgatgggttgataggtgcagcaaaccaccatggcacatgtatacctatggaacaaacctgcacgttctgcacgtgtatgccagaacttgaagttaaaaaaaaaattataaagttctaaaactcagatggtttctatccaaaaaataacaagtttccacctaactttatagaagagaatgtttattgctatgtaacaaaaagattttcctaaaactgggcacttctgctttggacaggtaattttctttttttttttctttttctttttttttttttaaatggattcttgctctcttgccaggctggagtgcagtggcgtaatcttggctcactgcaacctccgcctcctgagttcaagtgattctcctgctcagcctcccgagtagctggaactgcaggtgcgtgtcaccacacccagttaatttttgcatttttagtagagacaggatttcaccatgttggccaggatggtcttgatctcttgacctcgtgataagcccatcttggcctcttaaagtgctgggattacaggcatgagccaccacaactggccagagaagtaattttcttattgtgcaaatacaggctatttgtggctcaataaataaaatgcttgataagcgctgttcccccactggaaaaaaaaatcttattacccagaagtgtgttgattggcaccataag

SEQ ID NO: 146014 - DNA, 306 bp, Homo sapiens
  misc_feature (286)..(286): n is a, c, g, or t
gatctagaggacccctgcggtctcataaaaccttttatctgaaacatttaatattaatctatcttttacaactagtgcaggctcaactgggtccctttataaattaacaaaataagctagtaaaagtatgttttatcaaattcctttataaccatattttcctaaataaaaaagtaaatagtgaactttttttaatagtttctaatcaatttcagtatctggttctcataggctgaaacaatgctacaatgacggggttgcacaacagtctatgagacccgcgagnattcccgggctcgaattcgt

SEQ ID NO: 146015 - DNA, 391 bp, Homo sapiens
cttctttagatagggtagttaaggaaggcttctctgagttggtggcatctggcataagccctgaagaatgagatggcgcatgtggcaatctggggtaatgatgttccaggcagtactgcaaatggccctgtggctggaatagacttggtttggtctaggaactttgggaagattagtgttctggaatgatgggcaagaaggcaagtaattagaagagataggcaggggttgattgtgttagccttgtagaccatggtaaagagattggcttttattttatttgcagttgaaagcctttggagtgttttcagccaggagagtaaactttttatactcagttcagaacaagtcaggtagaaataccattgacagtataacacttaggagatac

SEQ ID NO: 146016 - DNA, 390 bp, Homo sapiens
ccacagtgatagctccaccgctccgggctcatttatgtctttatgcacttagatttttttttaactctatgtattataatccagtattcttattctgttactcagatggtcgtagcttgggtcatgggaagctccggcagttggggtcctatgtcctttcatcatgttttcccaatttcttattttcagctaccacaggacactcagggtgcatctggaattttcttggctccagctctggagtcaggcacttgagggagcggtggagccaccgctcctgctgtaaaggtgtatctgctctaagcctcacttaaaagctatcacttggcagaagatcaagttaaaagtgcaggctagcaggtgatggtgagggtaggagagggtggggag

SEQ ID NO: 146017 - DNA, 236 bp, Homo sapiens
gtaacattaggcatataaagcagaaatcctgaagtcatcagagcttcaaaaagctattctacttgctacggagaactacaaaaacctacctttaaggaaatgcctattttctcttttttcagagtgtggtgacagtgacaaatactatatgtcagaagaatacgtaattgctttaaaaacctctaaacattagtatatgtcttagagaatttgttacatagttttattacctaacc

SEQ ID NO: 146018 - DNA, 379 bp, Homo sapiens
cctttgtcaaagtcagagctagatatttttccatatcagagacagtggctctgatacttaagacagccggaaacaaaagctgtagtaattaatgtcagtgaattcggatcaaagttgactaactaactaattgataaaagactgccatactaaaatacacaggaatttgcccagtataaaatacaaatcttaagacttctaagaggttaatacaacaatacttcacttatctaagatcatgaagaattaagttaatatgttaattttgtaaatgcagcaagcaaacatttttaatgaaacgtcctataaatttttcttaaggaattatttctatggcaattatatgatattatacttaagtgactacttggaagctact

SEQ ID NO: 146019 - DNA, 366 bp, Homo sapiens
gaaggtgctctagaggtcccggaagatcctggtggtgataattcctatggtcattcaaaagctggggaattggtgtagttgtcttaggcatgaataatggtgttgagcttacagggtgtcttcattcctaggagatgcctcaggctcagagaatttaagctacttggagagaccaggggcacacagctcatctgatgtagaactggtttataaaaactgtgataaacaaaacaacccaaaagtaggcacgggaccggaatggaaattctcctaagaagatagacaaaggtcaacacgcacgcaaaaagatgtccggcaccactaatcagcaaggaaatgcaaatcaaaaccacgaggtgctgcttc

SEQ ID NO: 146020 - DNA, 288 bp, Homo sapiens
caacccttgtggttctggctaattgaatgtttctgctgcttaagaagcagtacctctgaactgttgtcatagtaaggattggaggaggccaaatgacagcttaggctgcaacagagacatttcacacactgacaatggccaaccccacgaagccttgcaactaaagggcttccttaggcattattttttaaatgtcaaattaaagtgtgcattatgcctgggttctgtttgccacttttctcattagctggggcaacagttgcttgtggccagaagcacacaaacaca

SEQ ID NO: 146021 - DNA, 1234 bp, Homo sapiens
ctgggtactttccggcccctcctcccatggaagttgctgcactgatttggcctgtgcaaacaccaggcacttttcgctgggtcaatatttcacatccgttgtcagggtctaatccatcttcaacatctgttccctgggatgttgtgcactgctctgccacctatgacccctcatggtctttgtccccagaagaggatctctacaaggtccccagggctttctccagcttgaggctgctcggttcttctctttttttcctctttaaaccctctcacctttgcctgagccaataatctccctcaaattacagggagaagccccttctgtctggaagccttccctggctccagaacacagggacgtggtagctgctgttgtgtagaattcagcaaacctcacctgccagtgggtccagaacacgttctgacccagtgtcctgcttgccaccttgtacttcctgactgctgcttcctgctgtgagcctgctggagccctggggacacacatttacttgaataacatctcaaaatagactgggaagacaaaatgtactacaaggggccaggcaccgtggctcatgcctgtaatcctagcactttgaggggctgaagcaggcggattgcctgaactcaggagttcaagaccagcctgggcaacagggtgaaaccccgtctctactaaaatacaagaaattaggctgggcgaggtggtgggtgcctgtagtcccagctactcgggtggctgaggcaggagaattgcttgaaccaggaggtggagtttgcagtgagccaagatcatgccaaggcactccagcctgggcgacagagcaagactccatctccaaaacaaacaaacaaacaagaacccaaaatatactacaaggtgtaactagaaattgttttcaagattggtgcttttgcaccattgattagacgaggcaaccaagtgcatttattttgatgcatgcctgtcttgttcctctaatcaactcccaagaacagggacagactgggcatggtggctcatgcctgtaatcccagcactttgggaggccgaggcgggcagatcacctgaggtcaagggatcgagaccagcctgaccaacatggtgaaatcccgtttctattaaaaatacaaaaattagctgggcgtggtcgtgggtgcctgtaatcccagctacttgggaggctgaggcacgagaatcacttgaacccgggaagtggaggttacagtga

SEQ ID NO: 146022 - DNA, 213 bp, Homo sapiens
ggaagagtaaccagagctactgctggcctcagcacaggactccataaaggagaaagccattagtggatcccagcaggacaagacaagatgacacaggatgattctctcgctggtcaatggagggccattgaattggtcttaatctgcaaacttcatatttgatcattttcatgttttcccacactttaactaagggctcaccatacattttgg

SEQ ID NO: 146023 - DNA, 254 bp, Homo sapiens
cgggaagctgttgtgggaggattgcttgagtccaggaggttgagactggtgagccgtgattatgccactgcactccagcctgggcaacagagtgagagcctgtctaaaaaaaaaaaaaaaaagtttcctgaatgggcggcttctgacctgatgccagggtaacaagatagacaagatgtctttaataataaaaacacaggccaggcacagtggctcatgccggtaatcccagcatgttgggaggctgaggcagg

SEQ ID NO: 146024 - DNA, 316 bp, Homo sapiens
ctagcaagaataaataatagctatcactattattgaattacaaaaaaagactttagattaattccaaatgctaacgaactaaaatgaactcagtaccatctgtgcgttgagatgactcctacttgggtctgttttactcaaatactcaagcagtagcagagtaatgagcctaaagtagaaagatttagagttctgcacaaactatagaatcactacttattaagacagcagaggaggtcattcaacagtctgtggaagaagagcaagagtatcttaaccacctattcggcaattaatgtttctatatgaatgtcaa

SEQ ID NO: 146025 - DNA, 457 bp, Homo sapiens
ctgaggcaggagaatcgcttgaacccgggaaggggaggttgcagtgagccaagattgcgccattgcactccagcctgggcaacaagagcgaaactccatctcaaaaacaaaagaaaagtagaaagtccccacttggattcttgtatactcatataaacatataattagaagtgagcagggaggcagatgcataaggcaccttacctttgagtttcaccctcccttgcctaatcactgtgtctgagatatcacagtaaagcctgagagggagagaaagagaaaacatggattgagaagcagaagcttctcaagggcaatgggaagcattcagcggggtggagggttgatttttacataatgacatagtctgtgtctaagccgcctttatttcaaaggactttttgtaaccatcatctaatattttctaagtagcatcaatgtgaaagagtaggggaaa

SEQ ID NO: 146026 - DNA, 804 bp, Homo sapiens
ggaagctttttacttgtttccctctctgctatttgaaacattagcaacagacccctattacttttgtaattaaaggggagactcaaaacccaaaaataatctgtaggttaaagaagacagcttggagcacatgtggtctcaggaacttgtttggcctaattggctggatctgttacagcttaatgcagctccagttttgcttcttagcaaattgtccactctgcaagccaccagagtgtgtttcatggggaaaaatcaagcatctttagttgaggtcctgccaagtaatttaatgaacaataaataggaaatttcaaatttggaaggcactgtagagatcattatacccaaagctgtcaagcctcaaggagactgctctaatgtcaggatagtgccagtggaaccagcaggagagtccaagtgtcatcatagtccaccgccctgccagtgttttctgtctcctctgacaccatctttcttactgtaatggcagtcactgacatttgatttgggttcttttctattttcagtgttatgactttttgtaaaaactacagtttactgtttttgacagtgaaacctaattcttctctattgcattttccattttagcagctacttttacttctaaaagttatcaataagcaaggcaatttgaaaatctgtcctgagatttgctttctgaaagttatcttatgaaaggtaattcttcagcaatagactctaggagaaaagcaaggatcaatgatttcatggtgggcaagattactagtaactgctaattcattattcgatgataacttg

SEQ ID NO: 146027 - DNA, 152 bp, Homo sapiens
atggtctctatctcctgacctcgtgatccacccgtcttggcctcccaaagtgctgggattacaggcatgagccactagacataatgctattacacaggtaaatggtatgtttacagtatagtataaacataacttttatgtgcaataagaaa

SEQ ID NO: 146028 - DNA, 1087 bp, Homo sapiens
ccaagtttgataatttgctagaatgactcacagaacttaggaaagcactatatttactactacagtttttgtgtaaaggatacaacttgggaacagccaaatggaagagacacataggggaaggtatggaggacagagggtgcaaaactttcatgccctctctgtgccaccctcccagcacattaatgtgtttggaagccccttgagcttccaatgatcagacatgactcattaatcattaatcactagtcacttatttgaactcagtctccagttcttctccccttgtcagagatagtgagatgggctaaaagttttaatcctgtaaacacctagttggtttttctggtaaccagcctccatcctgaaggtacctagggtccctctctatctcccaacccctatgagtcacctcattaacataaactcaggcataattgaaagggatatattatgaagtataaaagacacctcctattaggaaattccaagggttttaggagctttcttccaggaaccaaggacaaagaataaatatattttttattataccacagaagagtaataagacgaacatatatacccagcatccaaattaagaaacataacataaaggtatcttttaagcctcttgtgttcctttgtgaatatatttcctctgcttcccagaggaaaccattatcttgaattttgtgttatctgttaccttgcttgtcttcagagtttattatagttttaacgctatctagcggtatatccgaaataaacctctttttgaccttaatataaacggagttgtagtgcatgtatgctttcagtggtttattttcttaataaatatagaacatatcatttgttagataattgtattgggccattcgtgactactttttttgtctttttgttttcttaagattttgttcttagctttgagaatttcatttctttaacatggactagtgatatattaggtaacatgtacttaacagaactgaaaatcatactttaaaattatttattctgaaagtgttcaaatatacacaaaagtaaagaattgtataatgaacccaacaacccaacacctcta

SEQ ID NO: 146029 - DNA, 662 bp, Homo sapiens
gacaaagggaaaaaagggcaagatttataatttattttactttcatgatttttccaagtgtcttcagaagtagaaacctatagcattaaaaaaaaaaatctacattaactatatatgagctgagagaatgagaaggtaaaaaacatggaggataagtttcctttgtacttacgaaatagtcccctttcttaggatagaagatagcaactgggtagcttctgaagcaccataaaaacagctagaaagaatgcttatttttgaggggatagtggacaaatgagcccttgttgctagagagacactgataaattatctgaatcctgtcaaaaaatactgtaatacctgtgttaggttctctcaggaaatagatgaatggccgatctgctttaaaaataggaatccgagaccttttcaataacaacagagctgcaggaaagaaagaaaaattccattgcattttctgtgcatttttaagaaaataactattggttatgaagtaagttaattttttaagaaatcaaagcatcctaatggcatttgattgtttactgttgtgatgggggtgcagatgggaaaattaaagagaaaagatgccatttagccaatcctgtctcctgttttcaacacattccatggaataaattccttattgaaggtaactt

SEQ ID NO: 146030 - DNA, 596 bp, Homo sapiens
gtctcattggcaggaccattcgatcatggtgattaatgcattaagctatcatttcttaacctggggcaattaaacatgtatctaagcaactcctctccttctaattccatgcacaccaaacaaccaacaggcttccaacagcgaggtctgtccacagaaatatattaaatagtcttgcgaatggcttgagtgttctagccttagtaatagttatttctcatggtaaagtaacaaaccaacaagttggtttcataacatcagtcaaatgagctttactcaagtcttaacttgtaaggatagtccttttcttgacgaatctacaaaatcagacttctaagcaaacaaggctctgaactagggtaaattcatcacaataggccacattacgatgctacccaggaaacagatccttctgtatcatggagctattcaagcttacattacagctcctgcatttttaaactttaaatgtctatggacatgttttcagagtatctggaatggaatcttaattccatttctattgcctttttctttcattcagtctctaactgtatttttatactgtatttatttttatatatttttgagactgt

SEQ ID NO: 146031 - DNA, 101 bp, Homo sapiens
  misc_feature (16)..(16): n is a, c, g, or t
ttttggatggtggggnaagttgtaaccttaagctgaaaaggaaaataaaaatttctcagtgtattggccaggtgccatggctcacacctgtaatcgcagca

SEQ ID NO: 146032 - DNA, 269 bp, Homo sapiens
cacaaattggtcattcgtcatattaattttcagtctacttcctagtctaatttttgatagctataccctaattgtctctataagaaaccttaaaaataattcttaacaataatcctaaacctacattctcataaacatggagtatttaaccattttaatccctgctatgagatagatggatatatcatctccttccttcattcattcattaatcaacccattcatttaaccagtatttactaagtaagtatctactatttgccactcac

SEQ ID NO: 146033 - DNA, 394 bp, Homo sapiens
atagcgtcaggtaggggaaatttcagattgactgcaactgactgatcttctagactaagggtatgcaaactttatgtgaagggccagataattttgttaggcttttgtggccatatggtttctgtacaactatctaactcagccatggcagtgcaaaaactagtcacagataacacatgaatgaatgaatgagtgtgtctgtgttccaatgaaactttgcttcattttgttatgttaatttgttctacaaaaactgggttgactgaatttggcccaccagctgcagtgtgtcaatccttttctaaactcaccaggtagattaatatccagtggcatttcccaatgaaaagaaaatttaagtacttgttggcatattcacccaaaatgctgatgt

SEQ ID NO: 146034 - DNA, 327 bp, Homo sapiens
atgtactttgtgcccagaggccatgtatttctgatggatttagaagtggattcccatttccttcagtgtttaaaacatagctctatgtatatgtacagtagcatcttctgagatttaatgtacagataggaagtacttacttgctaaagaagggttgatggacagataacaagggcaagcctcaaaggacatgggttatttgaagggtttatttataaacaagccggctcatgagtacggttcacttttaggacttgaaactcccttctgaacatgagtcttcacttgtggtctccttgctgatttttctgagttcctagatttgat

SEQ ID NO: 146035 - DNA, 731 bp, Homo sapiens
ggtttgaaggttcatttacagactgacttccctgctctctttctagcagtaggatcccatcccatcaaagaaccagctggtgccttcaaaccctggacgaacacagaccggcacaggctcattcatttcatccctgtcagagccccaactcctctctttacccacacatgagcctattatatttgaacggatgaggagccacagaggtgatccattagttcagctgagcttgaaattagtagctcatccccttaaatggtgtgggcagtttggctgagcttggactgcaaagctgttcccccttggattgcacccagcatggaaatgaggacacacctaatattttttccttttgacacttgattaatagttgacaaatccaaacccaagtagttagctttcctattatccatcttttgacaggcattgctggttttctttttgagtcccattgttctaaaaatacactcagatctggagctgttcactgtgcatatataggcctgatttcatggtgtcaaagataagagacatctggcaggcagattacaaacaaagtgggttgctgggtttcagaactgaaggcagggacctctgggctacttaaatctacttaaattcagtgctgccaattctgtcccttcttccttggtgttgtcatgtcactgataacctgccagggtcaaccatcttaccacccggtaggaaagccaagcgtggggtgtgtgtgc

SEQ ID NO: 146036 - DNA, 584 bp, Homo sapiens
ttcccacccccacctttgacttctatgaagtccaaggaagtttgattcttttatctgaggctcaactccatagagcacagtacccagaataaggtaggtgcttaatgatgtttaccatttgaatgagtttcctggaagtacttagcagatcaggaattctgatgcataagcacaattcaaaggtggctgaggagtgacatcagagaacatagtggcataggaactccaagggccacctctgcacagagacaatgtgcttgtaaaacatcactataaaaaaaaatcccttggctgggcatggtggctcatgcctgtaatcccagcactttgggaggccgaggtggggggatcacctgaggtcaggagttcgagaccagactgatcaacatggagaatcccagtctctactaaatatacaaaattagctgggtgtggtggctcgcgcctgtagtcccagctactcgggaggtgaggaaggagaatcgcttgaacccgggaggcagaggttgcagttagccgggatcatgccattgcactccaccctgggcaacaagagcaaaactccatcaaaaaaaaaaaaaaaa

SEQ ID NO: 146037 - DNA, 457 bp, Homo sapiens
gtctgttttcttgctgtgtcctcacatggtgaagagcaaagaaagagtggaagcaagctgtctagggtctcttgttgtaaaggcactaatcccatgcagggcttcacccttattatttaatcaccccccaaaggccccacctactaatatcatgtcattggagattaaggcttcaatatatgaattctggtgcggagggaggggggaccacaaacatgcagtctataaaatgctttttaattttttgagacaggatcttgctctgttgcccaggctgcagtgcagtggcatgatcttggtttactgcaacatctacctcttggacccaagtgatcctcccacctcagtctcctgagtagctggaactacgggcacaccccatcacactcagctaatttttaaattttttgtagagaagaggtctcactatattgcctaggctagtctccaactcttg

SEQ ID NO: 146038 - DNA, 447 bp, Homo sapiens
gcaggagaatcgcttgaatctgggaggcggaggttgtagtgagtcgagattgcgccactgccctccagcctgggcgacacagtgagactccatttcaaaaacaaaaacaaaacaaacataggttattctcttacagttgaagaggtcagaaacccaggatgatccacctgtcaggggtcagcacctggaccctcaactgccactgtaagctcctctcggtacatgctcacaggttctggggttagaacacagacagctttaggggccgtgattctgccgactgcagcggaccgggggccgagaatctgagggagtgcccacaacccacctccagatcctcctccactgtctccaggtatttccttgcgtctctctccatcctcccttccatctcattttaatgcatttcagggaagttgtggatggtaggacggttcccctaaatac

SEQ ID NO: 146039 - DNA, 720 bp, Homo sapiens
gttatcaggggttgggattctgtcccaagggccctttgcgccgtcagggcggtctcatttccagtggccaagcttgtggcagagaggcaagccattagaggctttttcccatttatcccattagggcactttgccttccagtggcctggcttcccacaccaatggcagttacctggaggagtgcccttagggcaacctggagggagttggtgggcttgcagagcagccagtacttgagcccacctcctttctctgtgtttctcctttttcttagccttgtcctccttattctgctgtcagttataaaagactgaggaggctaatctgaggacctcctgcacaggggtactgagttctaaggctgacttttgcaatttcctcccagttcattcttaagccaaatagtattacaaaggaaaactagttttttgttttaaggtttgggggaatcagacttttcccagtttgagggggcgcctccaaggagcatgatctttaatttggagatgctattacccatctgcaaaaggcaaacagaggagaaaaaggggggtaaaatttttcctccactttcctattattctgaatgaggcatcctccattgtccttagggttccagaataaaccagtcttaccatgtacccttggtccatctcatcacaattacccacttgaaaacagaagagatactggagtgaaaagtgggccctctgttcgtcc

SEQ ID NO: 146040 - DNA, 421 bp, Homo sapiens
gtgtgccttctctccttgggtgtcctgatgggcctgagcaagggaggccatggtcatccccctacaccccccgacctgccgtccagcatcgatcccagcctggccccgctccggtctgtgacttgcctagaaccagcgccttccgtgtgtcctgttggcttcgttgctatcaccggctttttttggattatttccgtggctggcttggttttccttttcctttccttcgctgttcggtgatgcgctcatttaatttctgtttaaattttgtgtgtctctctttctctcccctggcttgttccttgtctgtccacgctgtcgctgactctgtcttcgctgctcattccctgctgcctctagtattcatcaggtgcaaactgcggacctgcggcgagtgtctgctccccccggctccttcacc

SEQ ID NO: 146041 - DNA, 730 bp, Homo sapiens
ggagattgttctcaaaccctgtcctcaaccgactaaaattgggggtttcatagcagggaagaaatataaccacgtgtgggaaagcaggaattaggagggctaagaaaaaagagttggtcagcaagaagctggtggtcccagaggcaggcatgatgggtgaggggtctagggtctcactgtccagatgctgtgatctagtgagtctctgttccttgatactatttaggaggactgctggttggtttcctgaggaaggagctcagataagacaaatgtaacgttcccaagttttaaagaatggaagggtcaatttctatgtttatttaaaagaaaccatagacatcagttctatgggacaattgggcccgtttcaacacccttcccccccattcgtcaattcctcaatcatgaggaatcaggccacgcatccgtctcgctgcttcatgctgaggaggggcgtcgtgggcagctgcacaccatgggtgtccctgcggcttcccaagaatcaaaggttaatctgatactagagtttttttctaaaatgcaatctttctttccaatcccccacttccaccaaaggcaaatcacagcaagaacaacctacctgcaaaataagcttcagtggcctgattacccacacaaagtgcagaaagaattattgtccttttttttcttttgaggcagggtcccactctgtcacctaggctgcagtgcagtggtataatcatgg

SEQ ID NO: 146042 - DNA, 463 bp, Homo sapiens
aaaaacagctggatatggtggcacacatctgtatcacctgagcctgggaggcagaagtggcagtgagccaagatcatgccacttcactccagcctcggcaacagagtgagataaaaaaaaggaatggaacctgggtcataccgtgtctgcagccagagtgacgagagtagggaacagcacatgctaattgccaaacaaagaaacctgccacttttcaatttggcttttgggcaaagctggctctgtgagtatctgtgtgccagaccagtgttcatccttagccatttatcaaacccctgacgagtgctggaacatcagagctctgagaggtaaatacagcaccccacaaaaccctccactccaagcccacagggctgtcaaggaaggacctctgaagtcaggcagactgagttcaaatcctgactctcctaggagagtcatggcctcccagcttggccagcaa

SEQ ID NO: 146043 - DNA, 357 bp, Homo sapiens
tgctacaggaaccccttcaacataaagaacggtatgaaaatattgtacaaaaatatgattcaaaaatcctaaatgaaattcacattatcatttacatgtaagggcagaagaaaatttttgaatatgcatgcatttataaatatatccccatgtactcttttgcagaaaactaaaagaacatagaactagaatttacacatcaaaatagaaaaagatgacctgaagataaaagagatgataggatttttttttttttttttttttttttgaggcagagtctcgctctgtcacccaggcttgagtgcaatggtgggatcttggcttatggctcactgcaacctctgcttcccgggttca

SEQ ID NO: 146044 - DNA, 476 bp, Homo sapiens
gcgtgtgtggggcagggtgggggtgggggaagttctgctctgcctcccctccgtttcagaggtcctagaagcccagattaaacagtcactagagagtctgcggttattttttcttggagaataataggccccgccactgggcctccagagaaagtgaattgaggctcagtggttggcagttatctccgccaggtctccaagtccctgactttctatcacaagagaggaactagaacatagtgcagagcaagcttacaagagttcaaatcccgtctgtgccactgacttagctatgtggcctcaggtgaagtacctgatttctcaagtgcctcagcctcctcatctgtaaaatgggggagggaggggtagtaatagtacccacaccataggcacagagccatcctatgaaagcccttggcattttgccccatgctatgtttgtgtttagggagttcagggattcttgataggattga

SEQ ID NO: 146045 - DNA, 683 bp, Homo sapiens
tgaattatgagaatgagaaaatgaatagttatcagtgcactgagatttacgtaactacctttccttggtggtggcttttggtatacaggagatgaaatacaaacctacttctaactattaactaagataagagccagtttgcccaggacagttttggtatactgctgtttttagagaataactattaagagcttcttctttaagttaataaattggatttggaagataaattatatagtcaacctacttggaaccatccttactaacagtactcttactctgtacgttctaataatagaagaatttgtagaatggaaatcttactgtgggatccccaaagaaagcttcccttcctctagcaaaaaactactttttgtagtagtagagaagaacaagtgtataaataatattaatttactaagctatacttttttattgaggtgaaatttacataacaaaattaaccatttaaaaatgtacaacttaattgcatttagaacacattattgtgcaaccattacctttaattccaaaagttttttactaaaagccataagctctttactcactaagcagtcattccttgtacctgtctcccaacccctggcagccactaatctgctttctgtccctatgaattaaaattgtgtactttaaaccatataataaaaatactgcagatc

SEQ ID NO: 146046 - DNA, 204 bp, Homo sapiens
agccaagaaattgccccagatttagagggtttctatagtgtatcacattatactaaaggggaaaaaaaaagcaatgataaaaattctgttaatcagattaagcacttatattagtaaataatttcatgtatacaaaatatcacaactgcttattccttatctgtgaagacatgggagaaattaatatctccctttagtaaatga

SEQ ID NO: 146047 - DNA, 338 bp, Homo sapiens
tctaaccccagagcctgcctgctagtcagtgtctgatctttcccttggtcacactgtctagctaaagaggccatctagctcattccagacaaatgaaagtccttaggatatgattctgcacagaattgcatcttacaaatgttaccattagactgaaccgttcttatttttctaaagagctcatgatacaggaatgagattttagactgtgtaataatttcctgtcactttttttttcaatttgatactctacttcaaatggtaacagaatgaaagtgccagtgttcattattatcccatttatttatcccacaaacattccatgagccctatactat

SEQ ID NO: 146048 - DNA, 288 bp, Homo sapiens
atctgcaacttgctgttcttaaattcatattatcacacatatttctctatgcctgaaacctagtcgacttcattgtattttaaatggctgcatagtattgcattgtgtggtcatattataacatttgtttacctgcagctattacgtggaaaccttcaggagcagtttcacagacatacttgtctacgttataacctagaagtatactgtaaagtcattttctgaaattagaagtggagataatgtcactaatactttccagtttttttgtaaaagtaacttgcgctg

SEQ ID NO: 146049 - DNA, 543 bp, Homo sapiens
tccctctgcttcaaagttttctatatttttcttctactgagaaaatctacaattcttaagatagtattccaggctctacgtatgacccaaatctaccaatattccagaattatcttctactatatatcctcccacaataccctgagttctacaagtagctctgtttcattaacattcaacattaccctgtaatctttacttatactattcattttagtttctttcacaaatcttgaaccaaatccagccctataaaaagccaagttcaaaatccccctcattccaagaccttccataactaccctggccagaagttctttcctctcttctgcaagactatagtgccctaatagcactagtcatattctgtattagaaagtatgtgcatgtacaacctagattatcaagtcattgaaaacttaaatcgaccaggcacggtggctcacgcctataatcccagcactttgggaggccaaggcgcgaggatcacctgaggtcaggagtttgagactagcctgatcaataaggagaaatcctgtctct

SEQ ID NO: 146050 - DNA, 247 bp, Homo sapiens
ggaggatctgctatgggatgtgtggggaaagcccctggcaccactttccatgccatccgctcagggactgggaaacagctacatgtcttccttgtggtcctaccattgagagtcctccccttcccacatactgactgataccccgaggcagtgccgtggtgctctagggagtgtcaggctaggagagggggcttgccctggggtatctgagctgtgtctggatgcctccgaggggtgggcgtgatcc

SEQ ID NO: 146051 - DNA, 259 bp, Homo sapiens
cggccgaataaagagaaagaggaaggtcactttaccactgtaggctcagtattctcttactttggagatttaatctgtccttgattcttttccccatccttggccaccggcccattagaagcctcatctcatgatactgtaaaaatattttctcatcttttttgttaaattaagctaaaacagttaagtgaccacgtacaacaaaagataaaggaaaagtctttggtgaaagttatcccttccttctttctctttcttt

SEQ ID NO: 146052 - DNA, 523 bp, Homo sapiens
aaagaaagaaagaaagaaagaaagaaagaaagaaaggggagggaaggagggaaggaaggaagaaaggaagaaggaaggaaagaaggaaggaagaaggaaggaaggaaggaaggaaggaaaggaaggaaggaaggaaagaaggaaggaaggaaatgctggtgccaaattggtatcatccccagagagcaagtcacacctttagtcatgccttttgcctggacagaagaagcaattctctatctttgtggtacctgggcttattagaacccgtgctcctagagattaattatacaagtttgtttgctatataatagattctcttactttggagatttaatctgtccttgattcttttccccatccttggccaccggcccattagaagcctcatctcatgatactgtaaaaatattttctcatcttttttgttaaattaagctaaaacagttaagtgaccacgtacaacaaaagataaaggaaaagtctttggtgaaagttatcccttccttctttctctttcttt

SEQ ID NO: 146053 - DNA, 712 bp, Homo sapiens
ggggcgggcggggagatgggtactcctagcctgcgcctttaagaagggtaggcctcgactttgacgtctctgccttccccgcccttcaggcccccactggtcgcgtccggcgctggaggagcccagtcagccggcgcctgccgggttagcacgtggactccgaggggccaactatcagctttccctgacaaaatgcctttgagctcccccacagctctgaaactccagcttgggagcagggagagtgcaatctgtgacctgtaaaggggcgctgggcaaaagggcccgagagaaggcgtcctttccattcccttcccatctcaagctgagttcagaaatgacacgaaataatttaatcaactatcagtcaaggtcgggctcacgcctgtaatcccagcagtttgggaggccgaggtgggcggatcacctgaggacaggagttcgagaccagcctgaccaacatgacgaagccccgtctctactaaaaatacaaaaattagccagcggtggtggtgcgcacctgtagtctcagctacttgggaggctgaggccagagaatcgcttgagcccgcgaggtcgaggctgcagtgagccgagatcacaccactgcactccaacctggatgacagagggagactctgtctcaaaaaataataaataaataaataaataaataaactatcggtcaaggtgaaagcctactctccgccaa

SEQ ID NO: 146054 - DNA, 645 bp, Homo sapiens
ggcgagttccatgcctgtccagcgctgagagctgccggccaacttcgcggtctccacgtcgcgcttaacgtggcagcagcacgcacttccagcatctttttttagacagcatctttttcagcctcgctctgtcgccgaggctggagggcagtggcgcgatctaggctcactgcagccttgacctcccgggttcaagagaatcgcttgaacccggccggcggaggttgcagtgagccgagatcgcaccactgcattccagcctgggcaacagagtaacactccgtctcaaaaaaaaaggccgggcgcagtggcttacgcctgtaatcccagcctttttggaggccgaggcgggcggatcaccagaggacaggagttcgagaccagcctgaccaacatgacgaagccccgtctctactaaaaatacaaaaattagccagcggtggtggtgcgcacctgtagtctcagctacttgggaggctgaggccagagaatcgcttgagcccgcgaggtcgaggctgcagtgagccgagatcacaccactgcactccaacctggatgacagagggagactctgtctcaaaaaataataaataaataaataaataaataaactatcggtcaaggtgaaagcctactctccgccaa

SEQ ID NO: 146055 - DNA, 827 bp, Homo sapiens
agatcccaccttcgcgtgaccttgggcaaatcacaacctcgcctaaggcccggaatgactctgcgcggagaggaagagcactgagtgcgggagggcatcgacgttttggtgttggttgctctcgtatcgtgatttcttctgagtctcaaaactctttgcagtaggttattgttgaaatagattaccacaggccgggcgcggtggctcacgcctgtaatccagcactttaggaggccgaggcgggcggatcacttgaagtcaggagttcgagaccagcctggccaacatggtgaaaccccgtctctactaaaaatacaaaagtagccgggcatgatggctggcgcctgtaatcccagctactcgggaggctgaggcaggagaatcgcttgaacccggccggcggaggttgcagtgagccgagatcgcaccactgcattccagcctgggcaacagagtaacactccgtctcaaaaaaaaaggccgggcgcagtggcttacgcctgtaatcccagcctttttggaggccgaggcgggcggatcaccagaggacaggagttcgagaccagcctgaccaacatgacgaagccccgtctctactaaaaatacaaaaattagccagcggtggtggtgcgcacctgtagtctcagctacttgggaggctgaggccagagaatcgcttgagcccgcgaggtcgaggctgcagtgagccgagatcacaccactgcactccaacctggatgacagagggagactctgtctcaaaaaataataaataaataaataaataaataaactatcggtcaaggtgaaagcctactctccgccaa

SEQ ID NO: 146056 - DNA, 623 bp, Homo sapiens
cttatgccactgattggacatcctaatgtggtcccatgtcagatgtgggctgtgaccctttgcagccgttttacaattcccgttattttagattctcacactgaaaggaaggtgatagtgggacaagttagatggctgggagaaataactcacttataactatctggctgtttgcaaataccaactaatatacaaatcctgtctggctcgtgtggactgcccacctgtgtgttgtatggcctgccaattcccgcatggcgggtggtggtctctgggattacaggtgtgagccaccgcgccaggccattttggtttttaaataccaaaaatttgaaatgaactagggctcctggaagtaatggttgattccaggactggggcaggaaaagtacaagatgagcctggaacatattgctgtatttaaagcaaggaacagctgaaaatgaaaggggtatgagttttccaaggtcaaagaagccagcttgaaagggcacccactggccttattttggacaatttgaacatcaaaaagaacaatgacagtattagattataacacatttcattttctgaaattccatgagtccataataatactaagaaaatacaaaagcaaaaaaaaa

SEQ ID NO: 146057 - DNA, 424 bp, Homo sapiens
tacaagcaaacttcactatgacaaacctttcgtttgtcaagagccacatgttggctcggcctcccgaagtgcctgggattacaggtgtgagccaccgcgccaggccattttggtttttaaataccaaaaatttgaaatgaactagggctcctggaagtaatggttgattccaggactggggcaggaaaagtacaagatgagcctggaacatattgctgtatttaaagcaaggaacagctgaaaatgaaaggggtatgagttttccaaggtcaaagaagccagcttgaaagggcacccactggccttattttggacaatttgaacatcaaaaagaacaatgacagtattagattataacacatttcattttctgaaattccatgagtccataataatactaagaaaatacaaaagcaaaaaaaaa

SEQ ID NO: 146058 - DNA, 442 bp, Homo sapiens
cctgggccctgcaaagtaagaattgagttggctcaatagaaattcagaatagtaggcatggcagtgcaggtaaaggggttagatctgacggtaataattgagtgatttctgatttaataattgagggatttcagattgatagtctgattacactgcagtagtggaagtaagatttaaaagtaaaaacattttaatttgggataaaattcagaacacaagtttctcaatatgccatgaaatctaagaaaatgtcctgcaatcattcaagaatgcagttttcatttcagggttagaaagcaggagaggaggtagataaaaaatccttagtaacatttttttctggtgctgcataacgtataattgggaaacttcttctagggtaattaataaattgctgctgtctcagtgggatgagctaactggaagctgtcaggtgggaatg

SEQ ID NO: 146059 - DNA, 447 bp, Homo sapiens
ctccccagtgtactttgtaagaaggtctctagatcattatggctgtctcacaaaataatgggctgctctgaaaacttgggagcttcctgtccctgtatgaatcacaaggctgttaagtgaccgtgggcaaagagcttcatacataaagagtgctggatgcttattagatgaattaataatattgtatgataaagccctgcaaagagagctctgagtcttttcccctcttaaaatgctatgatttgattctttcttcttaagcattacttgctttaggatgcaggcccgatacaatcattcaacagtccgtacagagtatttactacatgccatgccaggtactatgctaggtgttaaagataccgtggtaaacaaaactaggtgcctgtctcacagatctacattctagcaggggagccaaagaataaaccaataaatgtatacaca

SEQ ID NO: 146060 - DNA, 363 bp, Homo sapiens
gagagaggagaaaggaggaggagggaaaaggagaaggaggagggaggaggaggatgaggaagagaagagggggaggagggggaattgtatctccactaggaaatcaggtagagattgctgaattcagctttgtatctcaggccttgagtacattgtcaaggttggtccccactccaagtcacaattcattcctacttctcccaaactcctaaagcactttgtagggcagaaactgggccttgctgcactctatcagcactgcccctctattattgaaagaagacagaaagaaggagatcctgaaggcctttgtataataggtaaaaatcttttgactcttcagccaatcactgctccatttgg

SEQ ID NO: 146061 - DNA, 456 bp, Homo sapiens
ctccacagagggaagctcatggcccaagggctgaacaaaattgagttctttctctggggtcgcactgcattacatgtgcccaggacttcgaactgctgtgaccccctcaccccaggactgagggagcccctcaccccatgaccgagtgaacccctcatccccctgaaccaggtgagcccctcaccccaggactcagggagcccctcactttgtcctctcacatggtatccatcagtctagcccaacattgctgattctgtgagggtctcctccagccttctgaggtctctggcccaggccacgccccctcctgtctgtgcccctagtaggggcatcctgtgtcctccatggacaaagctgcccatacgtctgcatccttcaggagaccccgcggccttcccaacccctggggctgctgagctctccccctgcccacacctcgcacccaagcggccg

SEQ ID NO: 146062 - DNA, 431 bp, Homo sapiens
ctccacagagggaagctcatggcccaagggctgaacaaaattgagttctttctctggggtcgcactgcattacatgtgcccaggacttcgaactgctgtgaccccctcaccccaggactgagggagcccctcaccccatgaccgagtgaacccctcatccccctgaaccaggtgagcccctcaccccaggactcagggagcccctcactttgtcctctcacatggtatccatcagtctagcccaacattgctgattctgtgagggtctcctccagccttctgaggtctctggcccaggccacgccccctcctgtctgtgcccctagtaggggcatcctgtgtcctccatggacaaagctgcccatacgtctgcatccttcaggagaccccgcggccttcccatgccactaattggatgaaatagcactgta

SEQ ID NO: 146063 - DNA, 202 bp, Homo sapiens
ttggaggtttatccaaacctctgtggaacctatttatgctttcagccggtagctccttttacaggctcttgagtgttgtggttcagagtccaggccctggagctgaactgtcagagttcaatgcttgctattagccgtgtggccctagacaagctactttacctctccgtgccttggcttctttatttttaaaatgagtata

SEQ ID NO: 146064 - DNA, 155 bp, Homo sapiens
cgttgcctgctcttctccaggaagctgactgtggcctcaccagacccccactcccacttgtcggatcccaatccccaggacaatgcccagtcaggttccaccacgggctgctggctgcagggagtggactgcagctctgcctccacagggaagtg

SEQ ID NO: 146065 - DNA, 133 bp, Homo sapiens
gtttctcaaattaatgccactttaaaattttcaatgagccagactttaactgataactctaaactaaatcacacatgtagaactacaaaccgctgtatctgctatttacttgttcataagccccacaccttgt

SEQ ID NO: 146066 - DNA, 412 bp, Homo sapiens
atttctcacccaacctccttgcccttggctgaatcatccaatcctgaacttccatggagaagagagaagtccatggacagggattttcctcatcagctgctcctgaccacagtattggggtttgagtgctcaaggtgcccctaaggaaccatcccaagggtattttccctagaggtctcttaagagttgggtgaaatttaagaagagcaagctgccttccatctgctatccccggggtcatgtgcccccagatggtgcaggatgagtgggggcaaagggcaagggggaagtatgtcaactggaacatcacagaagtctaaataaggactgttctgtttgccatccatctcttaattttttgatctcactaaaggaatacaaccctataataaacactccagccttacataaa

SEQ ID NO: 146067 - DNA, 968 bp, Homo sapiens
taggatccataatcatctccattttgtaggtagggaacttgtagcttagagggattaggtaacttgtccctggtcatctgaccctagagcccacaccactaacccctgtggccttcgccatggccatggttcaccagttggttaaaaactcggagagggggccgagctcagtggctcatgcctgtaatcctagcactttgggaggtcaagacgggcggatcacctgaggtcaggagtttgagaccagtctggccaacacagtgaaaccccgtctctactaaaaatacaaaaaattagctgggcatggtggcaggcacctgtagtcccagctacttggaagctgaggcaagagaatcatttgagcccgagaagtggaggctgcaatgagccaagatcgtgccactgctctccagcctgggtgacagagcgagactccaactcaaaaaaaaaaaaactctggctgggcatggtggcttatgcctgtaatcccagcacttttggaggctgaggcaggaggatcgcttgaagccaggagttcaagaccagcctgggcaacaaagtgagaccttgtctctaccaaaaaaaaaaaaattccgggcttgggggccttccccgtataatcccccgcccttttggaaggggctggacgatacggacggtgatcctttgaccccacgggctgtttgacgtcgtaatggaccttttgttggctcccctggccctccaggccttcgcaaacaggaccctacggcctgtcccgaaacatcaccaaccagagctctccccaggcacccaattttttggccctcctcgaacacgcggcgtcggtacactcggctatcacgccgttccccgccggcgccacaatcacgttctaggggggggggagccccgatactcaccctctcccgcacttttccctgttgtttgcccccccccgcgtcatggcccaggccagtccctcgctc

SEQ ID NO: 146068 - DNA, 291 bp, Homo sapiens
atgggtgggcgcggccctgtgggatggtgctctgtggcagggctggcagtttctgggtgtgtggcctgtgggtagcctttgtactgggcgcacagtccccggctcctcccttccaacaccttcgccctgagcggcctcggaaatggggcttctggcggctctgcaggcaccgtcagagtcagagggagggcgagcggcttttggtttctgtttaaacagcgtcctgtcgctccctcctctcctgtgcggattggcgctgcggcttctgtgttgagagggaaacttgaaacc

SEQ ID NO: 146069 - DNA, 544 bp, Homo sapiens
agaaacatctgtttccacttactttctcatggaaaccacggtcattgagtggacagtttcattgttccttggcagaagaaggtagaacttcttcctttcattttaaaaatagataaacataaaactttgaaacccaaataaaatatgacagggcacttctagtaactgagcttggttagcaagctcatgaacagaataataacacgcacatattattgcacttacatgtgccagccacacttattcttttcccatgaaatgaccccattagggaatgaggaaatggaggtgtaatttaattaattaaatagctaaagttgctcagctaacaagtgacagaaccaggatttgaaccctggaagtcttaactccagagtccatgtccttaacctctacattatatcatacagattgtcagagcacatggaaactagtgagatgacggctcatcttttttttcacgggcgtaggacagcctagtattaatttgtgtttgtgtctaattttagaagacagcagccttgtccagtttcttggaagttaa

SEQ ID NO: 146070 - DNA, 734 bp, Homo sapiens
ttgttgttgggccaactgatacctcgaaaaaagaatggactaatcccaggtaccaatgcttgttaaccagtggcaaagccagtactggaatataggtattttcatttcccaactaatgtgcttcctgcctcatggtgtctccttaatctgtcctatattcaaacgattgtaatttctttatccagtcacagtggggtttttctcatagaagaggtctgacctttacatttctttacagggaggtgtgtgtacatagagaatgccaagatggtagttgtttgtttgtatgttctcttacattacttgcagttgaagcaggtaaggtgactacttaacaagtcttcattcaaaaacctgtaatttgagaagcttgctccatattagtggaaaatgcacttttcatcatggggcctaaatctcttgatgcttatcattttttttggaatagtttactatttacttaattttgctatttttgtagatttagttgtaaggtctcaaagtacataactctgttttttactccattatctcaaaatcctgtaaaacattcagtaatttggtcaaactgcctcagttcagatattgatctgccacctgctagcagtatgactttggaggcagtgttaacctcttgttacttcagtttccccctctgtaaaatgagttgtgatgattgaatatattatataaatctaatgctttgaagtacctggtacaaacataataagtct

SEQ ID NO: 146071 - DNA, 132 bp, Homo sapiens
atcaacttgacattttactatccacaagaattttacataatctgcacaactgattttttttggactctcatctcccacattactttttttaaatgttaaaacaaaactagatccccaggcatccactcctag

SEQ ID NO: 146072 - DNA, 593 bp, Homo sapiens
aagagagaacatagccccaccacatttaacagactggtgaaaacagaggagcccgcaaggaagcaaaacgtagaggaaatgtcaggggatagcagactcacagaaactaaggggagggtgtgctcacagaaggcaggcagggtcaccacagccgatttttgccaagatgaccaataagatgagcaccaaaaagagcccactgagccaggcttctcactggcagaggaaggagttataaagaaagcaagggggggatggtgagaatgaaccctctggtactagactagtgtcagagtatcagtatgaactcatgcttatttttacacaccattctccaatgaaaagaaccagtgactctagaggaagagctaattctagggctggtgcagggagaatacatgagcctggaatatcttgcagtgccagaaagtaagaaggtgttggagaaaaaaaaagagtaaagaacacaggagccaacctgaaagataaacgctgatggccaaggctaaaacaacttgagcaaaaaaaaattgattacaataatgttggggtatgcccaactaataaatattcatgagtcacacggaaataaa

SEQ ID NO: 146073 - DNA, 308 bp, Homo sapiens
atcccccatgtgtggaggaggaaggttgagacagacagcactgggggcctagactttattcccaagaagttctcaggatgctatgctttccaaacatttatttcaagattccacagtcatcaaacttaccctctgtctagactcacttccttccacaaagcaattctgctgctagaactgaactagcaacagcagaataggagcatgcctctctggtgggagaagtatgtactgcctgggccacccctaatgtctctctgtaaggtaggcctgtagcacctgttgtaacaaacatgtagtggctgggc

SEQ ID NO: 146074 - DNA, 336 bp, Homo sapiens
aaaaaactacaggagaaaaaacattaattgtcatttgaatgtcacatgagcctatggaagcagctgtaagtaaaaactgattgttagttactatttccagaatggatttctcacaatcaagaattagctcagcaatccattgttgaatgtacactatgagcaaggcaagaacagcagcaaatttggtgcccaacattgtagaatcactggggaagggaattagatagagtcccactaaccaggatgaaaaatggcgaggaaaatcacacaaaagcacagaggctgacttagagaggtcagccaggtagtctagaagcagtccatccaggtatactc

SEQ ID NO: 146075 - DNA, 237 bp, Homo sapiens
aatcccttttatcatgttttcaccaaaagccccctaaatgcatttatttgtgttcccattttcacttgctaaatattaggtcagaacttctggtcaaggctctcaaagtgaccagaaagggtttattacatttcagccacaagcaaggaaacctgatttactcgatcttatcataagcataacttcctagattaggtgtgtgggatgtttttgtgtgtgtgtgggtttttttttttt

SEQ ID NO: 146076 - DNA, 479 bp, Homo sapiens
catgatgactcattcattcagctatttttttattgagtacccactatgtgccaggcacagttctggatgtcagggatacagtgggtgcatatgacaaagcccctgccccatggaactgagatgccattttgggttgcagctggtgtgctgatgtcaggagcttgcattttggagcatctaccccaggtaccacacgtaggctcagctcccatgtaactcgtctcctttgccctcccagcagaactgtagagtatgttccaatattgtccctctttataaggagctgaagagatggaggttcagaaaagttcagtgagttttccaaggtcaacagctaagaagtggcagaatcaagagtcagtcttagatcttttgccccaaattctgtgttcttgctcatatagttctggatattttacctcatagtcactcataccttaccggggaccagcaggtcccagccccgtcaaatgaagaat

SEQ ID NO: 146077 - DNA, 634 bp, Homo sapiens
cagtggctggactggagatgtctgaggaggctgtttggaagctacaggaagcagtggctggagatgacacttctgaggaggtggttggaagctacaggaagcagtgggataaaggagggggtgatcttcatcctgagcatgcttgccaaacacactcatgcccattgcacacgctgagatgtgcacccagctctcttctccagagaggtccacatggcacacatgtgaatggcccaaacttctggacgtgtggtcctctgtgcccaaagcctccggggtacctagggaaacacgctggctgccttatgagcacgtgaaagaagcccaggtgccagacctgagcactgagcagttcttggcactcatgctgctcatggggattgtgtacagagagcagactgggctggaggaccagcaggtgcacacagaggccacctcaaagggacatggcagcagtactgtgggtcccttgctctccctatgagtgaatgcagctttgggcagcgtgactgagtccacccaaatctaagcacatctggtgagattgctggggagccagtcacggaacacagactctgacgtctcctgagtcggcagagattcaggctcagacatctccagtcctcagcacccc

SEQ ID NO: 146078 - DNA, 165 bp, Homo sapiens
ccttggcttgggatgagggtatcagggaagccaggggagccaagacaaaacagttaaaatgttaaagtaattcattctggggaaactcagagtctgttctagatcctagtctcccaactcaattattagttggaactgagatgcctcacagtggttctcaaaaag

SEQ ID NO: 146079 - DNA, 158 bp, Homo sapiens
aaggggatggagctggaagcaggaaactagttagaatcctgttgtaatcactctgatgggctgaaaagagtggagatggagaccagggaacatttgagggaaatgttttgaagtacaaccaaagggatctggcaactaaatggatattgaggctgtag

SEQ ID NO: 146080 - DNA, 460 bp, Homo sapiens
ttacacaatacgttggccacctatagtcctcaagcccccggaggctctaccaataaacaggttttattatgcattggtttggggaatttaaacccccacctctgtcacttttatctgcttccagtgtgattctactcctgtctgctctcctaaattaaaaaaacccttttttgggtgatacataaaaatctgcctttgtctgcctcattcaggtgatttttgtctaaatgataaaatacactagtctatgaagtcattatttcacagaaatgcaaaagtaaccttttcaaagtctgtgactactatccagactgtcttctgcaggctctaaggttccactggggccagccagaccccactcttctcctcgcaggcctcctccagccccatcctgaatcgcaggggtgcgatcaagacccctttttttgtgtaaactgattgggatcctctagatcgccgc

SEQ ID NO: 146081 - DNA, 432 bp, Homo sapiens
ggctggcgcacgctttgtattgagtggtgtcttcctctttgtagcctctgtggttggcccaaaggtaagtccccaccctgatccctagaatgtgacatttgccttatttggaaaaagagtctcaatatattgacaccatgaagatctgaacgatatggagaagattgtcctggggcatcctaaacgcggtcacaatacggagacaggaggagatttcacacaggcagacgaggaggctgcagtgcgaccacagagaccgagacgggagtgatgtggccgcaggccaagcacacctggagccttcaaaagctgggagaggcaggaaggagccccagggcctctggagggagcgaggcctccacacaccttgacttcagccccgcagtcctgattttggacttttcatttccagaaatgtaagaaaatgaacgt

SEQ ID NO: 146082 - DNA, 468 bp, Homo sapiens
ctctgtttaataagtatccagcctctaccactcctgattccattcttcccattgagatcagaggaaccccagtgtggtccccagaccaggtgcatcagcaacctttaaggactagctagaaatgcaaattcacagctccgctccccaagacctactgaatcagaaactctgggaatgcagcccacacttgaaacttgagtttcaacaaggcctccaagtgattttgaagcctgctcaagtttcagaaccattagactagagtagttagtctcaatcctgcctgcacattaaaatcaggggagttggctggacgcagtggctctcgcctgtaatcctagcactttgggaggccgaggcgggtggatcacgaggtcaggagatcgagaccatcccggctaacacggtgaaactccgtctctactaaaaatacaaaaaattagctgggcgtggtggcgggcgcctgtagtc

SEQ ID NO: 146083 - DNA, 454 bp, Homo sapiens
acttgatacccgggaggtggaggttgcagtgagctgagtattgcaccagtgcactccagcctgggtgacagacgcaagattccgtctcaaaagaaaacaaacaaacaggccgggcatagtggctcacgcctgctatcccagcactttgagaggcccaggcgggcggatcacttgaggtcaggagttcgagaccagcctggccaacatggcgaaaccccatctctactaaaaatacaaaaataagctgggtgtgatggcacacgcctgtaatcccagctactcaggaggctgagacaggagaatcacttgaacccgggaggcggaggttgcgtgactgcgcaagggtcctggtgagggtcccaggccaactcctcccgtcccagtgtctgccaggccaaggggtgtgggcgctgccccacctctttccacactttcccttccagctgcgttgtga

SEQ ID NO: 146084 - DNA, 519 bp, Homo sapiens
cactcagtagcagagaaattccttgagattggcattcaacccattcacagggagggaggcaggatcaatggagtccctggtgggctccagacagagggctctggctaaaacagacagaaggaaatagaaagtgtttaaaaagcaggaagaaacacaaagggagtctgggggaatgatgtatcaaggatgctgtcagatgataacatttagtggaaaaataaacagaaaagcctagaacacagaacagtgtcaatgctgtgataacaactacctcaaattatgtacacgcaggaaagactgacagggatcctgggggaaaaacactttaatttgatgcattgagaagattgtgggtacatttttatcttctgttttgatttctgttaacattgataaatgcttatgcaagagtaattttaaatgctttcagagataaagaaatcacaaagaagaacaaagagtttgactacataaaaattagaaacttctgcatgtcaaaaaaagcaactaaaatggaaa

SEQ ID NO: 146085 - DNA, 256 bp, Homo sapiens
agtccacctgcctaggcctcccagagtgctgggattacaggcacaagccactatgcccggcctgtccctaaacagattagtgagattaacatgttttaaaaggtagagctgttaaaaattatttcagaaaatttgcaggtgcatttgtgtgtcttatgtagtgcatgtatataggcaggagtttagtttggtgagatttgtattaagaagggtttacagtgatttaaatttcccctaatatgggatgactgtgaca

SEQ ID NO: 146086 - DNA, 271 bp, Homo sapiens
gtctttgcgccacatgtgtttcttccaagaattcactctctgtactttgagtattgttagttcatgagaaagtgagtctttcatggtactatatattgataaagggtcttttgcatttaattttacttaacatgtagattaaccctgggagagagtaaactgaccacgtttatggaagtagtctgatacacactaaaaatgaataaaaattagcattcaggagcacactttggcctccctgaccttttatttcggtaaaaaaagttatttc

SEQ ID NO: 146087 - DNA, 835 bp, Homo sapiens
ggacagcctctttgaggctgccttcatcaacacctgttactctgttgcccacttcattttccccagtctgttgtgttggctcgacatccctgagtcttgcccactgtctgctgtcttattcctgtgtttgttctgacttgacaaattactctcatctcaactactgtgtagcaatactttttattcaacttttaccaatttcctaataccatggtcagtgcaaatattctccattctttggctttacctcaagtttccatcctattttttttctctttcctaaagagaagtccatacattctaactctgttatgacttgcttgctccttaatctcttgtcatttggtttccactcttcatgctgtgttgttcccactgggaaaggcaccatagacttgaagagtctgtccttgatcttgtcttgcatggtttctctgcagcctttggtgctgtggaccactgcctggtcctgacactccttcttgcttttgctgccttaatgctccatgtgtctgtttcttctgctactgctatttctccatccagtcctttctgagattcagtctctgcttggttttccttagaggcaattttcactcccatgacttcaattatggtcacctctatgccaggtcacacttccagttgtctactggatttttctacttgtccatcctactattattaaaacttgagatatctcaaactggatttattcccccttccaaaactgcttattttcttctactaacttcaaggctgaaggtttctgcccatccattgattgtaatcttccatcagtcattaaagtacatgattccttcagatctattct

SEQ ID NO: 146088 - DNA, 383 bp, Homo sapiens
tctagaggacccaccaccatgttggccaggctggtctcaaacccctgacctcaagtgatctgcccgcctcggcctccgaaactgctgggatcacaagtgtgagccaccacacccggccaagtagcaactacttcttatgtcctaccttgtggattatcattttgcaccttctgctcaattacatcctaaaatctcagcaggtcggctgcaaatatctcccccactctgtgcttgcttgcactaatccatttggtaatttgataaagtctcaattatttaatcatatcaatctttcctttgtcatttccccttgatgcacagaaaggcctcccttgatgacaaattcaataaacatttacatctattttcctttacttaaaaat

SEQ ID NO: 146089 - DNA, 381 bp, Homo sapiens
tgctccttctgctggaacattcctcctccagctgctgactggccccctccttctgtggagaggccaggcccagtctctccccactgatggagcagccactctgctcttcctcacaggaggcgtcacctccacggttgttttgctttggacaaaccaacaaaccgacagcctcccctagagcgcagcgcctgtctgtttgctgcccagcaggttacgagtgctcactttagttgagcccctgaggggcaggggcaagggcagaggagatggagtctgggagctgcagatgcagtcaccttcccgcgtgcctcccacacatgcagccatgagaaccacacggcataaagggtggctgggctgggccgccccacgcgtcctcat

SEQ ID NO: 146090 - DNA, 367 bp, Homo sapiens
gtcgggcacccccactcccccgtgaagatccttcaagtccccattcgctcttccaaactccagacttaactctcagcccacttttgaggtccagctaggccatggaatcatctctgtcctcccatttcggggtgggcagagctggcaggacccttaacccagccagcatcttggaaatctaccaataatccacccttaggaagagaaaattcccctgaccaagtccagtttttttgtttcttcttgctggggaaggggacatccttatttgctcaatatctgggattcccagttcctgacctcagaatgctctgtctcaaggaacaacaggtgccagttacaggttgccagtcggggccaggaagct

SEQ ID NO: 146091 - DNA, 414 bp, Homo sapiens
gagaaattcactgttgagctgcaaggagtatagttggccgacagcctctagctgcagcatcttctagatatgccatatttttgatctgaggcccatctcttcctgggtagcccccaggccaatatcgtacaagctgggagtgctcgggtgtggccctgtctgcccagcatgagactcctctaatgagtagtctttgttccagagctccttgttgcattggcagagacttatgcagatccacagcatggtctgaagctcctgttgcccagttctgcttctctttctttcctttcacaagtgtctaatctgcatggaggtgtgaagaattttgttgcccagtcctgtttcctctaccttcttctgtcacagccattagcccccaataaatttcttgtactcctaattccatcacag

SEQ ID NO: 146092 - DNA, 1489 bp, Homo sapiens
cgccccgggatttcccccgcacgccccggggagagacacgaaaaccacttctccagcctctcttgccatccccggctgtcccccgccgacctgtcattgctcttaaagggttctccactcgtgcacacctcccaagtgataacctcattccgcctgcttcctccgtgccctggcatcctttttgtaacgggctgttggattcctattattgcctcctcttcgccgcctacgggatgataaactcctggcaaggatgcactgaggttgctggcaaagagaaactgggatgtgcggagtgaggaaggggacaggctgtggttgatcactctgtcgcacgggaatctatcggcctccttgtattcctaggtgtagtgggggaggaaccatcctatgaatcctggaaggctgaggcaacagagcagaaccacttggattaagtagtatctcacattcctgggggtcaggacaccaagcaaagcagagatgggcatgagctgtgcggggagcgggcctctgaaattggaaacagcactggctggtgtaatgtgtgtgtgttgtgtgtagaacagagatggtatctaatgtggccagagcatgcaactagagtgcaaggcaatcaagtcgtttgcaccatgagcacttaaaagtgaagtaacccagcagcccaaagaccatgatacacaagtccctctggggtttcagaaatgattctttctccttagaggtttactcagtttttaaagtaatttttctgtgtgagtggtggtggtgatgggggaaattacgttcccttttttcagaaagaacaaaatatcttcttttgttttggttttactggaatcattcctgcttcagcttcggtgcaggattcatatacccatgaaaataatgaggaaatagctctgcaaaaatgattcgaaatagggctgcagagagatgcacagctattttatttttcctgcaggcatggattttcatggaaacagtccattcacatttatttgagagagctgtgttttgcatgaaaggcttctgttgacattttcaaaaattgagaccctttgcagaaatatcagagaatgacaattatctccttaatgtgtgaagtttagatgtagctccaatctaggttaagatcaaaacaatgtaaagcttataattcaaatgatactagtgaacgtgttggcaattaaaaaaacacttgtgcacacataaggtcacattccctgttttaaatcataggatgtggattcttaatgtaggtgtaaagtcatcaggtgaacatgtaaaaataaatgtttatactttctggcttagtttctctactgcttaaaatggaagagcccactcaaccattccaaggctactttgccttgctttttttcaatactgtaccattataaatgacttttcattttaggtacacacactcacccataatttaaaaaattttattcacatactatgtggatagtagactcaaaatagg

SEQ ID NO: 146093 - DNA, 444 bp, Homo sapiens
aatggaattgtaagattttaaataatcggcgttctggactgtgtgacatagaacatgtcatttcactaagccgtggtttccctttcagtaaaatgaacaggtgagttacagtcagtgattttcaaaatcttatcagtgagcacattgcctctcttttcaggcaatcttgtgtggattaccagttttaaatacagtatcccttcacccctaccacatcacacgcattcatacacacacacacacacacacacacacacacacacacgcactctgaaagcagacagcactagaactccagtggtttgagtggaggacctgggtccttgtcaccctccacaaggctttcccagggatccagccctcacctgggtcctggctactcatgggctcagaccagcagtatcagtaccatctagaagcttgtgagacatggaccgttatgac

SEQ ID NO: 146094 - DNA, 239 bp, Homo sapiens
tatataagaactcctacaactcaacaacaaaaaggaaaacacacacacacacacacacacgcactctgaaagcagacagcactagaactccagtggtttgagtggaggacctgggtccttgtcaccctccacaaggctttcccagggatccagccctcacctgggtcctggctactcatgggctcagaccagcagtatcagtaccatctagaagcttgtgagacatggaccgttatgac

SEQ ID NO: 146095 - DNA, 337 bp, Homo sapiens
ctcaagtcccccgaccttctcccactgcttgatccttcttcaaaacgcaaatcacattggccagattcatgcatgtatcacccagcagttagcgatgagcactcatgagctctgggctacaggtgtcaggagagaccgagacaagagaagacacacagtaagaagagtccgctttccctggttttaaggtttagattgcaaaagtcagatttactcccagccagtaacttgaaaatatttccccagccacctaccttggttgccacagagacccccctaaagagctgcctgtgcgctccaccatgacacccactggccgggtctccctttgcctgtt

SEQ ID NO: 146096 - DNA, 269 bp, Homo sapiens
cccactttccctttcaaagacaaagctgagatgagagctgccggtggctgggcctccatctctggaggaagccatggtacaggaggagagtgagagccgctattcaggaagaggcagaggggccgatcgcccggtggaatctggttgtttccagcaatacccggccccgctcagcttatctgagccaataaatccctgcctttaaaataaaaaagatgcttcaggttgggtgtcgctagcaatccaaaggtttataacctaaacactga

SEQ ID NO: 146097 - DNA, 286 bp, Homo sapiens
aggtgcatggctgccagtggtcctgagtggcccagtaacacatcacagcactgcgggcaatggggcttaagagctgagccaggattccacgtgccggcccatcgcggttaatgtatcaggacagagatgccacagcatcagttggtgtctttcctaatatcaaggtaccaggcagagctctttggaacaaaatacatggggatcacaacaaatttatcagacagagcagggcctttaccaaaagctctagtactgcggacatcctgagagtgatgtagctgctgac

SEQ ID NO: 146098 - DNA, 533 bp, Homo sapiens
cctcgatcacacccataacagagcctcctgggccctgcctaagtggctctcaggagctgctggatggaacactacccagtgctgaaattacaggagaaagaataacaagaaactgcgggagttagttgtctccactcagagatcttggggccagctgagatggaatagcgagtccattaacagggtccagggcagctggaaggctggacaggaagtgggcgtgtttcctgcctccttttcccagattcaggagtggggattttcccccatgttgaggtctaccccagggcttggtcctgctgccatcaccctgcagaggcagtgcagtgcagtggaaagagctctgacccgtcagtggaccccagttctcatcccagttccggttggctcatgggggtaccaggcctacatgctgtggccacactgggcctcagtttacctgtctgggagtgagagggaggtaggcatcaccctctcttggagcccctggcaggttaagccaacacttaagcttatttctctctgtgtaatcg

SEQ ID NO: 146099 - DNA, 723 bp, Homo sapiens
cgaagtgctgggattacaggcatgagccactgtgcccggctgggttttctagacaagttcttactttttgccttattggaagcaacctagtgactgaaaaagagacatcaagtgacaagtcactcattatagctatataccactggagatttatggcagttctaagtgacacaaaatcgggggtggtgattgcgttcctcagctagggctgccgtaacaacttgccacgtgtgccgcagcttcagacacctggaattatcctcatagttttggaggccagaatccaaactcaggcttcagcagggcaatgccctcagggtctggagaagaatcccaccctgcccctttctggcttctggtggcagccagccagccatggtgtcccttgtcttgtagtggcgtcactccagttcctgcctcacatggcattttcctgtgtctgtgtccagtttccctcctacaaggacatcggtcattggaccaggacctaccctcatccagtatgatctcaacttgatgacagctgcaaagaccctaatcccagatatggccactttcatgtgtccttgatggacttgaatccaggagagtcactaaccaaatacagttactatttccttctggggtatttacacagaaagcgatatattacaaatgtaaaatcttagccgtttctttgagaagtgattatacctggcctactgtatgaacatgattctttct

SEQ ID NO: 146100 - DNA, 388 bp, Homo sapiens
ctgccttagcctagccatgtcccctgtcatttagtctcagagtatcttgaacgtcttcttcacagcccaacttacaatcctcactcatttgctgagtgggtgccatcctttccacctagaatgcaagctccctgagggcaggggctggaaccgtcttgttctttgccaaatccccagtgccatctctggcacagagtgggcattatgaaaatatttgctgagtgcataaaaggagggaatcatggatttaagcactcggcttggtgccctggggatggggctccataaaatcagttcccattttttctctctcctcttctcctgggaggtgggtgtctgggttctcctgccaggcgagcttctctctcataagactccaggtgcctct

SEQ ID NO: 146101 - DNA, 320 bp, Homo sapiens
ggacattcagaggtaggatggcacaaagacacagggtccactggagatcactggaagcagctgcagcagggttaagagaagggagtcccagcgagtcttcagtcaccacacactaacatcatcagtgaaaagttcctgggcctgaagatccagctatgttgtttctagttgactattttaagtgacagaacttggcccaagcattgaccattttggttcctcaataagcctgattcaacagggtcacctttgaatctgtcctccacctttccaataaacctattttatgcatcattcagtgagttatttatttatttact

SEQ ID NO: 146102 - DNA, 468 bp, Homo sapiens
aaaatgttcatagcacatacatctgacaaaggactcgaatccagaatatataaagaactcttccaactcaatagtaagaaaactaaaagctcaataaaacaacggactaaagattggaacagacacttcaaaagatgaaacttataaatggcaaaaagcatatgaaaagattctcgaaaagaagaaaagatgctcagcatcaccagttgacaaggaaatgcacattaaaaccacatgagacagcactctatatcccctagcatggctcaatttattttcttttgtttttatttttattttggagctttcaaagccagaaaacctactagacaaattctaaaagctataacactgaatggctaaatttaaaaggttggcaatactaggtctgggttaggatatggagacactggtacactcaaactgctggaaaattaaaatactacaacccctttgaaaaactgacgg

SEQ ID NO: 146103 - DNA, 153 bp, Homo sapiens
cggcggctgggaaatgggggtacaacccagagtgaggggcctcgagggacaggcagcacagcggagtcgacacccctggacctgagcctcaaggagagcagacgtgcagcggcacggggttgagccgactgctggggcagagcgcacagagtg

SEQ ID NO: 146104 - DNA, 319 bp, Homo sapiens
ccaaatttatactgtaaacggcttaggtttagggaggggttttgccctagtcactgatgttttgaaataggactcagaaacctctttcataaagtctctgcggtgattgggctaccccagcaatgtgatatagtggtaggattacagaatattttaacccttttctgaatgttgcaatatattcttatatgggaaatgattgattattaactacttagaatgtgtttcttttccaagcatgtcagcagagtaagtacagcagacttcgtaggcgatcagtgtagtgtcaggtgtgagcagtatggactggagatggtct

SEQ ID NO: 146105 - DNA, 574 bp, Homo sapiens
ctgggccgtacttagagaaagaggagggagaagaggaagaggagaagagaccctatataacccacaaagcctaaaatatttactatctggtccttcacgggacaaattgcaaagaaagagaaagaaggaaggccaacagatattaaaggcaatctgttgaagacattatactgaaaggactatcatattttaaagacaagatcactgtctccataggtttttgaaacatttttaaaaaccatatagctgtattaattagagcacttattttctacaataatagtgaccttaaatttctttaaaaaaattacaattagctacaagtatcaaagaagcaaagtcatctagagtagtctacataggagctctttggactttcttttattatggtaaaatagtggtgcttttaggatttacattattgtactctccaatacaaagtatgagtgagggttagagtatacagtacaccattttcatacatgtacaacgtgggtggatgaagaatgtctcttagcagtaatactggatgtagtctctgcttttaccagctgcataatctaggactattata

SEQ ID NO: 146106 - DNA, 942 bp, Homo sapiens
ccatgaagtaatttctaagaagttccagactttctctacatttctgcttttcttctgagcccttagcagaatcccccttagcactctgttcacagcaatacaggctttttccagccttcacttcaagactgttccacatctgtccatcacccagctccaaagccatgttttcaggtatttactatagcagtagcccacttcttgataccagttttcttagtctgttttatgttactgtaacagaatagtacagactgaatcatttataaagaaaagagatttcttataattctggaggctgggaagtccaaggtcaaggggcccacatcaggcaagggcttcttaccgcatcttcccgcggcgagggctttctcactgcgtcgtcccgcggcgagcgccttctcaccatgtcgtcctgcggcgagggccttctcactgcgtcgtcccatggcagagttggaaggcaagaaagtgtgtgcatgcacgagaaagtggctgaacagatccttttatcaagaacccactcccgagataatgccattcatttgttcgtgagggcaaacccctcatgacctggtcacctcgtaaaggccccacctgccaacaccattgcattggggattatgtttccaacacatgaactttggggatgcattccagccatagcacaggcacccgtaacgtattgcagatgggactcttcacttccagccccgcaacacaaaaaaactgctgtaagcccttcctttcaacttttctggtcaaagcaacccaattttctcttccagaaatggcccgttgacttcccatgtcggttggctatataagaacccttaaataaaaaatgggggagggccccgaaaaggggcgggaaaaattccggtgcgaacaaggggggcacaattggagacacaaaacttttttggaaaacaccacaaccag

SEQ ID NO: 146107 - DNA, 411 bp, Homo sapiens
tgacttacgaccagctgacacactgttcccactggtgatcagccacccacagcacctcgcaccccatccatccacctgagccaatgctgctgccgtgtggacactctggggctcacattcagagcagaacctgctttgcctagcaggtaaagctaggtggagtagccaagtgtgatgaagtctgggatctgaaacacaggctactccctcttcaatcaccctctgtatagtgataacagccgtcccatgttgctagcacaaatgacctaattaatcagtcaccagactcagtctctagcctgaactcttccaccagctccagacccatatttctaactgcctgttcatttcctctgcccacaatccactcatctgaaacagaattccttatctacataggatcttcatctt

SEQ ID NO: 146108 - DNA, 203 bp, Homo sapiens
atgtgcagaagcaaagaagcttccatgcaacagctgtgtggcagcagccctcagcaggcaccaatccagacagaagaaaagatatggtctgagagctctaggaagggtatctccaatgaaagaagctgatttgcttgccagtttgacaggtgttttccagatttggtgacaagtctggtaatgagttaataatggtatataaa

SEQ ID NO: 146109 - DNA, 320 bp, Homo sapiens
gcgaggtgttctagaggatcccggtgatgagtaagtagatttttggtagagaataacaggggcatagaattttgcagatgtggagtgctaaataaatgcagcataacaacacattttttgaaatgaagatagataacagagggacttgttagatatcaaagtctgaatttgtcagaccaagggcttaaaaaagaggcccttagcatttcacctggaaacacactggtataaatatgacatactagaaactactccaggagagttattcttattatccacatcctctcatgaaacagaaagcaatcaaaagtaggatgcat

SEQ ID NO: 146110 - DNA, 281 bp, Homo sapiens
gaagaagaggatccctgcctagatgcatacataggatcatattattttgcaggacattcgtctagtgatgaaagcagcagcagagcctccctccagtagatgggaagactaagacgtatctgagtagtatctggattggttgatggggagagggtctatctgtaataaatgttaagcaatttgcttgaggtcacattctgatttgattacaaagcccatgctctttctactaaccttggtatttctgcaacaagttgagcatgttcaactcattttttttt

SEQ ID NO: 146111 - DNA, 260 bp, Homo sapiens
aggatgaaggctgaggcccttaagctgacccacaggggtctgcctcactgagctccagatactctccagccacgtcttgtaccatgatcacctaccatcatgcccctgaggtgggctccttcaagcccccggcagctgcaggctccatccagcccaggaagacgcccacatcgttccctctgtctgcgacactttcctgcctcctcttccaaatttcttcacccagctaacccctgctcatcttccaggtctcagacaca

SEQ ID NO: 146112 - DNA, 348 bp, Homo sapiens
ttatttcccctttttctgctttgaaattccataacaattgctgaatagacaagtaggcattaagattagcagtcacccacatgagtacttattttatttctgctatgtggaaggcactgtgtttggttccagaaatataaagatatgtaagatttcttgtcctcagaaagtaaaatgccaagtaaatcattccataaaaatagaacagtaaaacattgctgccattctgatgatctgttttatttggagagttatgctatgagtataatctgtagactgtgactttgttgatcagcttcctccctgttttaaatatcgagagtcatagaatcttaatgttagtgctcc

SEQ ID NO: 146113 - DNA, 252 bp, Homo sapiens
aacaaacaattttttagccactgcacacaatggtatgttaagttttaccacatatttccagttcacaaagcactttcataaaattttaaagttgattcacaataggccaggcacggtggttcattcctataatcccagcattttggaaggccgaggtgggcagatcacttgaggtcaagagtttgaaaccagcctggccaatgtggtaaaaccccatctccactaaaaatacaaaaattagctgggtgtggt

SEQ ID NO: 146114 - DNA, 456 bp, Homo sapiens
gtccgatacctcagatctaacataatacttgtcatagactaggtgcaccaaatatataagtccatgaatgcacattgccatattcattaagtacctattatggaacagtaaccaccgcgtccggccaagaccacccttttcttagtggcctcttgttcaccacccctggtgcttaaagctctgctcttggcttccatgatcctgtatacttgcttgtttttcctcctacgtcttcaaccagtacttctttgtgctttttctcccttgtttctcctcttaactgtcagcagctttacagatccactttcaattctttcccttattgtcctgactgccattttccttgagttgtgctctacctccatcctttttgctgctaggtctagcttgactctttcctgccttctcccatcatgcattcaccttagagaccctccaccaagttgccctcactcc

SEQ ID NO: 146115 - DNA, 485 bp, Homo sapiens
aatgaagccccagcctctctctcctccagctctctggtcttttgtgaggatgctcatcgcagtggccaagcccaaccagaggccgggggctctggaagtgcaatctgatgcgtatagcctcctggggcatggaagggcagagaagagattagctgggggctgatggggagagcctaaccagcacacacacttttttaggctagggctgggcaggaggattaagactggtacctctcaacacaagcacatgttggaatggggtagggtaactttccaaaatatgttgtgtgtttggcagaaggggttcctgttgttagaaaaagtgaggctaacagatggtaggccaaaaaagcaataaactagagtaaaatcaacaggtatgataatgcctaccccacagaaatggataggaaaaacatgcatgaaagcactgtgtaaactgtagggctctgttcccttttcatgaggccatcagtcatactgga

SEQ ID NO: 146116 - DNA, 395 bp, Homo sapiens
cagggttgctgggaagcgtctagcaggtgctgtgtgagcatttgctatgatttgtttttgtttctatatcttttgccagatcatgacattcctgagggcagggatcaaatctttcactctgttctttgtcccatccagcacagggtctgaggcaaagaagggctcagtaagtgtttgttaaatgaatgaatcaaggttaaactgtgtaacccattataggtcaggggaaagtgggattgggggagcagtaaggaggccccagaggtggcagcttgtagtggtcttaaaggatttcagtgcagggaaaggaaggtggcacagggtgtgacattggggttaggtggggaataagggtagtaggagcaggtcatgtgggccttgaatgccagggtaag

SEQ ID NO: 146117 - DNA, 412 bp, Homo sapiens
gtttgtttctaaacttgcattaaaatagccaaagtttttttcctatctctttgcctaccttggctccacagagtggagagaattttctatttcatctacttaactttcacataatgctgtttcctttccaaatctaagccttaacttctgttaaaagttggtttcagtattgaggctccaaagctaggactaggaataaaggaaactaagaaatgaagagggtactcattttgcaagaatagagaggtggcagtctgtagcatttttaataaagattttgaatattctgtagattgtgaagcagaccatactgtatccaaccaaccaaggggaggtagagaaagatggtggaatttcagcatttttataactaagaatgaccggacacaaaggaaattccaagtagagggtt

SEQ ID NO: 146118 - DNA, 187 bp, Homo sapiens
ccgctaggtcctgctgtcattagggattgctcacctgttgcttgtcaggtcattcaaaacctcttgggtctgtgctgcacattaaaccccagagtcccaaggagagtgggagatgtacccccggagcacccctggggtcgggggagcttctccgtttctgcacatgttctaaaaactcgaggacttc

SEQ ID NO: 146119 - DNA, 153 bp, Homo sapiens
taatttctttcattgaatacatttttttatataaatcaagctaaaacttattctagcttgtttcaaaatgtccaaacttgactattttatcaaataaagaggttactgtagaaaataagacaaatgctttcatatttatatttgcctgtttga

SEQ ID NO: 146120 - DNA, 398 bp, Homo sapiens
ctaagatcgagcgaggaggttctaagcagagggtgaaccagcaccatggcccctgaaatgcagcagctcagagttcaaggaacagtaaaaaggtcattgatcaaagagggtgagagggaaggagagtgaaggagaccatcactcccctaactggaaaatagcggccacctgtccaagcacttgactcatgtcatagtgaccttcagttccctacctatgacccaggtgtcattatcctcacttcatcagaggaggcgacatcgctcgaccccagtggctgcccgtgctaggtgggcagtgtgtgggatgtgaagccaggcagcccacctccgagccacctcctttccatcagtatgcattctgcatcttaccaaggcctatgtttgtggcatccagct

SEQ ID NO: 146121 - DNA, 359 bp, Homo sapiens
aggcctgcctcacaggagaactgacccagggagtgcatgcccaggagggagtctgggtgctgtgtagcacagcaggtcttgagctcaggtctcggcctaaagtgtccctgtccacaaccatatccactcaaacaaataatgagaaaggaaaacagaaagacatgccctatcagttcctgatgtatctgttgaacactcctgttcagtttgctgagtttgtaatgtcctctctaagggagaagaaaagacattacaaactcaacgggaatgttcagcaggtatgtcatgaacttatctgctggtttcaacagatcttcccttccaaagggcagggactcatggaccaactccacgcccaa

SEQ ID NO: 146122 - DNA, 257 bp, Homo sapiens
cgtattaaggtattccttagaatttcacttcttaggtgcttttaatttctgaagccccttaagattcagcaccaagtctttgggaggacagaaagtgacaggagggagaagggaggaatgaaagaaggaagagaagaaaaggagaagagaacaaagggagaaaaaatctaagagaacttgagtgaccctaccaggagacagatggagagcagatgggagctgatcccaggtgaatactattccaggtacctctaaac

SEQ ID NO: 146123 - DNA, 757 bp, Homo sapiens
tacactgccctctgagatctgatggggtaaagcaaaggataccaactaagcttgcaggctttggagtcacctcacctgttcctatcacttagatgttgtgtggtccaggatcagttacttaacatctctgtgccacagttttcttatatgtgtataataggtatatgattagtagctaaatgagacagttgtgagcatgaaataatatatgtaaagcattcagaacagtgcctggcacatagcaaactttatatatgttagctgttattatcaggcctatccaatttataagtgatatggaatcgagaaggatagcaaatgttttagaccataaaatcaagaatctaaaaaagattttgacagaaaggaaatgagccaaatataaaaagatgaagtttaataagtacacataaaggtcctgtcttggggtaaaatagcaagaatgagggaggcctataggtttttagtttattataaatttaatataagttaaccatgagatgcacttacaaaacaaaattagatttaggttgccttgatagaaacacagtattggaaacaaaggaaaatagaacccaactctgtctctgcactggttggaccacacttgaaataatagatttccttctagtattcctcacagcagcccctgaaaattgataattgccttcacgttctttaagggctggtatatgaaaaagaaaagagatgtattttggggatgctacagaagacagaacatccccaatatgaataa

SEQ ID NO: 146124 - DNA, 688 bp, Homo sapiens
gaaagaatttgcactatacaaaatagtcttttgagtggaaagcatcacccatttttgtgattctgtctttaaaaatgtagaatgaaactacatgagttattaagttctgttctagaagaaagtgtgtattgaagttgtgattggaatggattcactttaaactagaaatagctttttattgctgaaatgtaatttgctcatttttgactttaaaaatgttaagtaaaataaggttgaaatcacagagttcttaatacccttacccttgtttttcttttccttctgttagagttcagctgatttttaccttgattttcatttataaagaactttagttaaaaaataatggcaagtctatcctgttggtctagcttactaaattcctttacttctttcactaaattttggcatcttttttttactttggatatccattatattcagagtgttccctaatgttgcttttgatttttgtccagctaatttaaatagtgacttaagagtttcagttccctgtgaacacagattcccttttggaaaatcccttttggaaatcaccgtaactgacagtcttgataggtaaatatgcaagggaaaccttcctaggtcaggatttaagtatctccgttaacgaaaggaaaaggtaatatggagaatatatttggcaaagtatctctgtctctcaaaa

SEQ ID NO: 146125 - DNA, 340 bp, Homo sapiens
ttttgtacattgtataaatgaacctgccgtaagtgttttagatcaaaccatatttatcgtactctctctttcattttggtaacttaatttgtcagtttattttgacaagtaatgggactaggaaatgtttggaaccaaatacatagctctttaataacttctgtggctttgccagatggattgtaaaactggtaattattcagttgtccaggagtgttcaaggactttcttaagtatggcatgagaataaattgttttcattccattttctctgagggtttattgtcttgtttttaaatttaaaaatttagtaatgtctttgttttaggggcttgaaata

SEQ ID NO: 146126 - DNA, 143 bp, Homo sapiens
tgcaggctgatggctgagggctcatagaaattttactggctggtggagctgacagagaaattagagacaaagggaaaccatggcttggttacatgcttgcccatctgccagtcaaatcctggcagaaaatctcacacatgggc

SEQ ID NO: 146127 - DNA, 544 bp, Homo sapiens
gacaccggatgctggtgatgcctgagaaatgagatggggctcccatttcccaggggcttggagtcttggggacaggacgaggaaaccaaggactgtagaccggttcgtccggatgctgggggaggggcacctacagcacacccaggtctgggcaacttcccggaggaggtggcctcaggctgagctctggagaatacacggatggagaaggtggaggagaaacaggcatccagacagaggaaagagcgggtgccagaggacggagacctcaagtgtgatctgttagggactgagtagctccagggagctggactgaaagggactcacgcggggtggggaagggccagatggaaacgctcagggcttactccctcctttactggcataggaagcccttggagccaggggtggcattcagatttgcgtttttcagagctgcctctggaagcagcgtgggagacagatgggaggcagaaaaccagccagggctggggaagaagtgatggagaggagaggagacctgcagggggctggcgatggatga

SEQ ID NO: 146128 - DNA, 150 bp, Homo sapiens
ggatttgctggtgcagtacaactaggcttaatggctcatgttgataatcccagcattttgagagtccaaggcagaaggatcgcaagaggccaaagtttgagaccagcccaggcagcatagcaagacctcgtctcttcaaaagggaaaaaa

SEQ ID NO: 146129 - DNA, 472 bp, Homo sapiens
cagaggactgctgtacaaactccaggcttatataagcaagaagacctctagggagtaggctctgggccccttccatccccaggaaggcagggcccaggacacagagaggtttggggtctcccccagattacagaactgaaccatgataaagacccagatccaaggctgggtttttccagcccaggagcagtaaggggaccatggcccagccccgggccccaagcagacacatgaggcctggtggtcctcagcattgccctctatgagctccctgtgaccaaagacactacccccacagtgtctcccagcagtgggcagagctgcccctctcaccagtaggagaaccctgagctcagagaaggggagtgactgccgcaaggtcacacagcgtgagactcaccctcaccaagtccctcaccccagcactccaggcagcagccacacagcatcgggggaagctgggctgtgactc

SEQ ID NO: 146130 - DNA, 537 bp, Homo sapiens
tcatcgagctcggtaccagttcgacggagactctcagaagtggttcttctccttcgtaatgaggttcagttttagtcggagggaactgtgatgaagtgggtctggaaaggggcctctcccttctgggcagccagtgctccctttacttggctgacgactctgaaattggaggagagggtatgtgtgcaccccagtcagatgtatatcaatgccattcagattcagaagcaaattctgcacattggctcatggtgcctgtgatcagaagggaagtccctggctttcaacactctgcctctgtgtcagggtctagacatgagtgaagaggctagccacatacagaaagataaaaacaaaacaattcttctcattcagtgccattgaataagcccagctaaagagtatcctgcaagtttaggaattgaacacagtctaaaatccttattagcttgctaggactgccataacaaagaaccacataaacagtggtttaagcaatagaaatgtatgctctcacactgctggaggctggaaggc

SEQ ID NO: 146131 - DNA, 598 bp, Homo sapiens
acaactgtgtttagtaaagtgaatgtcctctggagcagaaacagagatttgggtgtgaggaagttcagtagcagatgaaggtgttagaatgtggcaaagaagcaaacttcctggcttggcagaggggccttaagggccttaatgcagatagtttcctacagtggcactagtgagtctgaactagtctagaccaggaggctgtgcttttccaagtcctatttctctaaccagatattaaggctggttctgcttgtcagtaaagcttaacttctttagctactgtaaatttcttggcattaagcagacatttattaagaggctgctgagtgtatcttagacacaggggagagaaagacacatgggtgtagtttctgccttgaaggatcttaagagctaatagagaagaaagacacttaaacagaaggtgacaactcagtaaaataagtcatgtatcgggaagtttcagcagatgctgtaggaacactgaacagggggcactaaccagagctggggtactggtatcaggaagacctcctagtggagggtataaattgggtcagggatatggtttggcggtatccccatccaaatctcatct

SEQ ID NO: 146132 - DNA, 294 bp, Homo sapiens
ctgagacaccagctggagcaagccgtcccatctgccccccgtgaaaatgaggcaggtgccgtgtgcctcacagggcagggcttgcacggggctcagggcagcgcctggcagagtcactggggtgctcacggtggcttccctgccttctcagggagagacccaggccccagcagacggaccccagtgccccacgaagtcttccctgatcccacagctgaccggcagcactcacttcaggaatggggctcggggacccgcaaaggtccagcctgggtgacagagtgagactctgcc

SEQ ID NO: 146133 - DNA, 557 bp, Homo sapiens
caaatagccactgagacagatgtccctgaggtggaagccagtgaggttgggcagtctcccatcaccccgaccctggtgcctcctgtgcacccttcccctccctcgtcccgcagccctcagccaggccaggacaaggagtcaggggaggcccaggtaacccctactggccctcctctgtctgaacctctacagggacctggccccactcccctcagccctcagagaattcaggatgaggaaattgagtcagacaaacttccacccagcagttcccaccatgatcctccaaaagattcttcccacactgacttggtgcagaaacttgctggcgattctcagcaagctctgaaggaggaaacctccaaaccggaagccatccgagtcagtatccctcacccagaactgccacatccccaagacttagcaacagataccaagcagccccaggccaggggagccccggggaccttgcttcctagaagccggctggctcccactcggctgccccagcctcaggtgctggctcccctccagagcaggaggcccacacccaaact

SEQ ID NO: 146134 - DNA, 362 bp, Homo sapiens
aacaatcctcctcccaactaaatagagcaattatgatggctaactcagtcaaaaatgaatgcaaacataaattcaccttccatggtcatttattattttttgattggttctcattttttattcctgtctcttgttctcctttagtacatatttccttccttttttactgtaccatcttttttcatatcccttttcctccctcccattcttatactcatctccattcctttcttttaaaactagccattctagatatttttaaaatttaagttttgccacttaaggatccctatttatggattagggaatgtatttacagagttaaaaaaaaatcaaaacacttaaaaagagtatacaggaaa

SEQ ID NO: 146135 - DNA, 397 bp, Homo sapiens
cacccagtcccagagagcacttggggtcagactacctgcacctgatccctacagaacctgtgtacctaccatttctcagtacaggtgaataaaggcaacccctcaccacacctcctccctgcctctttaattagatcccaggacgtttgcttacactggcctttgcaatggccaaaagagttgttgctgaactttcaaaatgagacagcagagagctctgggtaacagttgcctagactggtctccttgcccccagagctttacttttacttctctctggaaatgccatctgatttcattctaatcttcaatcttctcaatagccacttatctcatcctcttgtggaccaatgaaaggagcccagaattcacttctgttttcaactctgctcagtag

SEQ ID NO: 146136 - DNA, 307 bp, Homo sapiens
cagaaaccatctggaccacaaagctgaaaaatactcactgcctggccagcaaagcttgctggtctcttctcttgggaggatgacttgagtgtaggagtctgagaccagcctgtagaccccaactctacaaataaataaaaatattagccaggtgtggtggtgtgtttctgtagtcccagctactcaggaggttgaggcaggaggctgattgcttgagccccagagctagaggctgcagtgaactttgattgcaccacggtactccagcctgggcaacagaatgagatgctgtctttaaaaacgtttt

SEQ ID NO: 146137 - DNA, 106 bp, Homo sapiens
actgaagagggagcttggtcaagccagtcctgttactggctgggctcatgtgaaagaaccacagcagctcatgggctggactttcaaagaactcctcaggactttt

SEQ ID NO: 146138 - DNA, 306 bp, Homo sapiens
ctggactcaggtttctggggtaggcatcctaggaaagcccaatgctggggctgtcttggagggggcttgagacatggaggaaagtgacacattcctagcttctctggctccagctgcctcagagcccccagaccaccctaatcagcctggcttctcacaggcatgcccaaggtcatgctttggagctccatgacatttgcgctagagacttgttatttccctgtgctgcagcctctagctttctaggtcttccttgccctgacttcttctcacattctcccagtcccagtggaggccccaactctc

SEQ ID NO: 146139 - DNA, 491 bp, Homo sapiens
tgtgcttgtggattgctgctggggcgacgggtttgaggccacgtctgcggccagcagcaatgtcagttccaggaggaccttggtggctgcggtgctgggaagtgccattgtgctgcgttggtgtgaccctgtggcacctgctgccaggggaccattctttttgagtcatgttttcttcaaattaaatattgagagattctagtcacatcccacagttgccatttgctgtctgagtagaaaatatgaagaatcgcctgatttgaagctatgtggtcagtttcatgtccatagcagccttgcttttcttccttgctgagagatggaattccccgtctcacgctctttctgccattatgtctctgtctgctctgatactgaggttccaggagggctgccttggcctcctttccctgtagcccacgacccccgcattctctggcttctttgccgacagttgtggtgtgcgcttacatctggtgctgggttgcagg

SEQ ID NO: 146140 - DNA, 812 bp, Homo sapiens
tcagaaagtgttctccactctaaaaataaaatggtttgctcactgtttaaattaattttcataaattataaaatactgttaaaatgagtgaattagaataaagataaatattttcacaaactgtacacctccatgtaaccagaatctgaataaatataagtaagaataaccaacagtcaagaggccctcccattctcccctcatcagagtaatcactatcatttatctaacaccataagtttatcttgctagttgttgaattttatacaaatggaatcctatagtatatattgtgtcaaatcataaatgcatgcttttctgcactgtcatttgcacactcaacactacatattttgattttttttcttatgggttttcatatacttacaatgaggctgtatcattttgattataaaatcactaaatactctttcaaataaaatctctacctcattggcatattgtcatgtacccagtgcctatctaatgaatccaagtgtgttccagttgtgactttcaaatttttctgctcagccacagctttctcacaggtgcttcatggtaggccaagtgaatgaattgtggaagacaaatgcataggtatagtatgatcccaacacgctgcacaatgatcatccacttttcttggcttgttttttaaaatagattccattttgagaatactgagatgattcagtatattcagaaatacaacttgggcaaaccttcttgccagaccttgatcctggaggtttgcttaaggattttgaaataaaatctgaatgagacgagaggaaggttaaaaaaaaaaa

SEQ ID NO: 146141 - DNA, 758 bp, Homo sapiens
tcagaaagtgttctccactctaaaaataaaatggtttgctcactgtttaaattaattttcataaattataaaatactgttaaaatgagtgaattagaataaagataaatattttcacaaactgtacacctccatgtaaccagaatctgaataaatataagtaagaataaccaacagtcaagaggccctcccattctcccctcatcagagtaatcactatcatttatctaacaccataagtttatcttgctagttgttgaattttatacaaatggaatcctatagtatatattgtgtcaaatcataaatgcatgcttttctgcactgtcatttgcacactcaacactacatattttgattttttttcttatgggttttcatatacttacaatgaggctgtatcattttgattataaaatcactaaatactctttcaaataaaattgtgttccagttgtgactttcaaatttttctgctcagccacagctttctcacaggtgcttcatggtaggccaagtgaatgaattgtggaagacaaatgcataggtatagtatgatcccaacacgctgcacaatgatcatccacttttcttggcttgttttttaaaatagattccattttgagaatactgagatgattcagtatattcagaaatacaacttgggcaaaccttcttgccagaccttgatcctggaggtttgcttaaggattttgaaataaaatctgaatgagacgagaggaaggttaaaaaaaaaaa

SEQ ID NO: 146142 - DNA, 309 bp, Homo sapiens
tcgcgtgggttggtgggctaagaactgagcgatgttgttagcgaaggtcccacgtgaaggagaaccctggggaggggcccggtggtgaagggggtataccctgtaggctcagcgcccaaacctcccttcagtcctgggccacggggctctcccaggcagtcagcgggtgaatctcagggcaggacaagctccaggagggcccagaggtggtggaaatgtgagtccagcctcagggcctccatggagcaggtctgagaaacatcgaggtgtggatggatggttatggagaggaacttgtctagcctcatg

SEQ ID NO: 146143 - DNA, 423 bp, Homo sapiens
agtgaaatggaggcacagagaggggtatttgtctcaagcacacagctattaagtggaggggccactgggatttgaacttagatcaatagaccccagagcctgtgtgcttaactaaggaccctaaaagactattccagcctggtgagctgagttcctgtttgagaggagtctccgcagcctgagtctggggggttttcgcacctgtgggccatgggtgcccccggggaggtggacacgctgcaaggtggaggttgtgtgccacgtttccaggacaccatatggccccaccctggtccaggtgctgctggagcaggacctgtgctgtcactgctctctgacaccgctccactgtctcctccaaaggctcccaccctggtgggctctgcacccacagatttgatgaaactcacaggagtcaagcat

SEQ ID NO: 146144 - DNA, 262 bp, Homo sapiens
ccacctgctgctcgctgccctgtgcccttctgccgtgcctgctatgtctagcccactccccacctgctgctccctgccctgtgcccttctgccgtgcctgctatgtctagcccactccccacctgctgctccctgccctgtgcccttctgccgtgcctgctatgtctagcctactccccacctgctgctccctgccctgtgcccttctgccgtgcctgctatgtctagcccactccccacctgctgctccctgccctgtgcc

SEQ ID NO: 146145 - DNA, 720 bp, Homo sapiens
agaccttaaagccccgatgcccactgggttaccgacttacggcactaagttggctgcctgtggctgttaataaaccacggggattgttgtcaacgaggacagatacatccttacctttccacacgactgtattttagtgtttgtttctacatgtctgcactcttccccacacgcctcaaggtagtttttctggatacatatgtttatttttcaggaacaggagttcaaaggagagataagccagtatgtatgttgcaaagttaaaatactgttgcataatagcaatccagtttcattcttagacatacgaagttgaggaggaaataaaaagtgacaatgtaaataaaacacatacagaatgcttacactggggaagaagctgtagtaactttaatattgcaacctgatggattgcaagtgtaaagccctgcaactaaggattttactcagtaaattctttcagataaaatgataaatggaatttgaagtctgatgtttactctgattaggtgggaaatgcaccataaaagttagaagtcattgttttattttatctgggtataaatagtataatttatttaacttgttgacttgcctgtcatcctcagattttgttaatcttattgaagcctatttgtatagttggaatttattctaagttttattggcttctttgtaatacatgaggaaccccaaatttcctatttatgccattgagac

SEQ ID NO: 146146 - DNA, 278 bp, Homo sapiens
acacggaacactcactgggtcccagcactgctctggacacatctcacctgtgtggcatcatttgattcacccctcagtctcttgaaatagggaccgtcatttcctccacctgacagggaaactgaggcagcctgatgcatgaggccacaaaagaagtgagagacgctcgctccaagttgcaaggaggcgagttctttcctcagcagatcccagccctggctttacggctaatcatgagcaaggggaatctaaacagcatggtaatttgatttttgaat

SEQ ID NO: 146147 - DNA, 796 bp, Homo sapiens
tgaagtataagaaattatagatttacattgtggttgtttttacagcttctggacatctttgagaaaatacttgggtggcattgaaacactagccaatggaagcatttgattttgtagaattttgaaatgtagtgccttactcatagtacacttcctagtcttgggggtgggaagaccagtctgtagctaacttattactgtcttatacatcatgctaaagcccagcctgggcatttgtaaacctcggggaggtttctactttagacaacagtttttgttgagggattacaccacagtcagttccctccatttctccctctcttcctggcccccctcccacccaacatggagccttttcaactcttcaaagaagtgggaaaaaaaagtagactctttattaatggcagaaaacaaactggctgctgtacttccgaggcagctctctaataataaagcagagtaggcactgcaacaaagaattcttgaatgtactaaatatatagggaagcctatttaaattcaccagaggggcttagaggacaagcagcagaaagtttagaattcaattcaagccatgccagaaaatgaaaatgtacttaaaaaaggatttctgaaacaattgttcaaagaaatgtcaacttttaaggttctttctagaagaatgaaatttgtactctaatttatgtggtgactttttcaattagagaggaaaagtgattaacagaatctcaaaggaattgtatcttatgtttaaagaaaacgtgttttctttccataggatgttctctagtgaggg

SEQ ID NO: 146148 - DNA, 673 bp, Homo sapiens
gattttcttgactcatagcatccctcagagcaccttgcatccttatgattaattcattaatttttttatggttatttttgattaaacacctctgttttccagtagaacaccaatagcaggagtgcaagaatgacgttctgtctgctgggagcctcgttaggtcatcattatccctagcctggattagacagatgtgtttctaaaacgtacatctgcgcaaaacccttcagtggtccctctttttactcaggtcgctctttttactcagtcaaactcctttatgtcgcttccaaggccctgcatgatctggccccaacttcttctgtccttaccccccatcttcttcaaccttcatctagaccgaaataccactcagtgtaataaaagggctgaccctcttgcctacaagtctccagatatgctctacccattttttctggtagagacaactcctattaattcttcagctcttggctgatagattgcctgcttgattcattaacttgttcactcatccccgttctagttgccaggaactaccctgagtgctgaggaacagtgaacaagacagacccggcctgccctcccccgccccgcatctgtctcctccgtgttgtcttccctcaccagcctcacctccaggctgaattagttgtctctcctctgggtcccc

SEQ ID NO: 146149 - DNA, 703 bp, Homo sapiens
gttggtgttctctctcttatactgggactaaattagagcctaagtcactggggatggctagaaaaaaatgaaagggattccctttctaagtggagagcattctagactctggaaagttcaaagagcttactgcaattctttccagcttctcctgtgagtcccctgttttttcctttgtttctctcagtttataacctgtgaacagggagtagcctggggctctttacaggagatttagaaccagggaagctgtgtctgggcctggggtatataaactcaaacatgaacctgatgatgtatatagatgcagatcaaagacctggcttctcacccaccttctttcttttctgccagaaagctaactcatttgtatcatgaacattgtgctctagacacagaggagactgtgacattagggatttttaccaccactcctcttcctcaaactgtgtgatccttttgctttctgaccagttcagccaactcccagattgccaagagctaatcttcctttagaggaagacctcaccttggaaatgcggaaaagtaaagcagtacctttctgaccttaagtggcttgcttccattgcagcaaaaaggcttatgttttaacttcagggagatatctattataaattctgggatttaagaccctagagttgtctcaaatcacactttccttccatacctatttaaaaaaaaa

SEQ ID NO: 146150 - DNA, 1178 bp, Homo sapiens
atctatcggtacctattaaatacacttttaaaacagctttattgagattatttatataccatgtaattcacttatttaaagtgtacaattcagtgggttttgatatagtactttttttaattataaaatttgccattttaacatttttaagtgcacaattcataaaaggcattaattacactcacaatactgtgcagccatcaccagtattttcaaaatattttcaccaccccaattaagcagcaacaccccatttccttcctccccctaacccttggaaacctctaatctactttctgtctttatgagtttaccaattctaagtacgtcatatgtgtgcaagcatacaatatttgttattttatgttgggtttatttattataatgttctcacagttcatgcatattacagcatctgtcagagctttactcttttttatggctgaataatattctttttgtttctgatattctgatattctgtttggtttggttttgtttctccatgtatctgttgatggacacttggattgttttcgccttttagctgttgttaacaatgctgctattaaaattgatgtacattgcttcttgcccttttgactaagatcaagtgtctatcagagcccctgctctcaattcctttagatatatacattggagtagactagcagggtcggtcatatggttattctatgtttagctttttgaggaaccaccaaactgttttcacagcagctgcacctttgtacattcccaacagtgcacaagagtacaaatctctccatattttcccaaacccttgttaattttatagccatgctagtagatgtggagaggtctgtcactgtggttttgatatgcatttttctaaatgattaccattattgagcatcttttcctgtgcttattgaccatttgtatatcttctttagaaaaatgtctgttcaagtcttttgcctattttttaattgggttttttgttattgaattgtaggagctctttatatattctggacactaaacgcctatcagatgacatgatttgtaaatattttctcccattctatagattggcttttcactttcttaataatggccttggccaggtgtggtagctcatgcttataatcccagcactttgggaggctgaagtgggaggactgcttgaggccaga

SEQ ID NO: 146151 - DNA, 116 bp, Homo sapiens
gaaataatgattctactgttttaagttactacgttttggaataatttgttatttaggaaaagctaattggtatacctagcagtagaaaatgtgcattattttatgtcattagaaca

SEQ ID NO: 146152 - DNA, 361 bp, Homo sapiens
gctctgtctccagtttgctgtgtggcctgatcggcttatagcccttctcggggcctcagtttccccatctgtaccatgaaaggtctggctagatgctccgaagtgctggacgtggtgcgttcttgttgagggggtcttgatctttgtcagggtttccccaacagctgccaattttctgcatgattttcatgccgaagggtgactggttctagcaaagcaaggagcgcccagtgaaggcccaaatgcaggtgagaacttcgtggatgaacgagtgttgacagagatctgggcttcctctcggtggttctgggtcccttcaacttgttcccagcactcatctttcctcatgtggcccaagcac

SEQ ID NO: 146153 - DNA, 156 bp, Homo sapiens
tttttttcttaaatagtacttcaacagaccaaaatagaactgggatagttcttaaaaaataaaaagaccagaaacaacaaaaaagtaccacttctgttgcctccaacatgcattcatatgtagtgattgcacctccattctgtgtaaatatttcag

SEQ ID NO: 146154 - DNA, 208 bp, Homo sapiens
aaacagtactagagatggggcttatcctatgaaaatagaacactgctaacctggacattcacataattcattttaacaaaatgaaggagaaagaaaaaacaaaacacaacaaaagagccaccaaaaagcagtgcatgtcatataattaatcaagacaatttacctcactggaccttaattttccaggggtactactgaggatcaaaag

SEQ ID NO: 146155 - DNA, 308 bp, Homo sapiens
taattttgttctcaacattccatggacagtggccctcagtttccttcttccctctctctgtctttttttgtttgtttgtttttggtttcagatggagtctcgctgtgtcatccaggctggagggcagtggtgcgatctcggctcactgcaacctctgcctctcaggttcaagcaattctcatgcctcagcctttcgagtagctgggattacagacacacactaccatgctaggctaattttttgtatctttagtagagatgaggtttctccatgttgcccagtctggtctcaaactcctgagctcagg

SEQ ID NO: 146156 - DNA, 146 bp, Homo sapiens
agtgcagttaagaataagaaactaaagcttcaatatagcctcttgaaacccagaagagtacaaaatacctatcgattttcattttggagggtgagttctttatcaatggtgccttccctaaacttgtacttgagatggaatctcgc

SEQ ID NO: 146157 - DNA, 122 bp, Homo sapiens
ctcttgatcagaaaccatcctgaaacatggcttatctctctcttggggttgatccggtccctccagttggtctagattttctttgaagttaggaaccattatgcctttcactctctgcttcc

SEQ ID NO: 146158 - DNA, 362 bp, Homo sapiens
gcaccccctgctcaggctctgtggctgaccatataaagcgtcagagaaaaactggagctgcttcctaatacggtcacaagagggaaatcctgggcctgcagctgggacttgctggtggcacagggcccatgagatgccggctgggacacaggaggctgggatgttgaaacctctgaatttaaccagctggagaggggctcgtggggccagagaggcagaaacacagccaactatggttgggctgggtcgaggtgaaggagaagtggctgaataatgtgggaggaagagcccgatgctgaagccccacgaccctgccgtgagatgtgcggctgcctgcaccagtcttaccttcactccatcgt

SEQ ID NO: 146159 - DNA, 172 bp, Homo sapiens
tgggtggcccggaggctgtggtggggtgaccagttgggggtaacatggtaaggatgcttggaagaagaaagtgagagaagggggtcaatggaaagacataggtcagtgggctcacagcctcgtccactgtgccgggtcatccagtcccactcaggctccctccctcctgctg

SEQ ID NO: 146160 - DNA, 820 bp, Homo sapiens
atgtttgtcatgaccttgatcaccttaaccctggtctttccattcagtatgcctcctggtaaatgactctttagtgagtgttatgagcttcacgtttattctcatgaatatgtgtgggttcctaaggtctttaatcaatagcataaaatttagattttatttttaaagtgaaaagaaatcctaggattctttttggcactagctaagagagaaagtacgattataaaatatacatgatctaggccactctactatccaaaaggataattaaagtctacaggaaatattaatagttgctgcctgtcttcccaaagagaggtaaatcaaggtccttccatgttattttttttccccaggttagcagatgtatctacaattgatttaaaaaaatcagaatgacttatataagatacaaaacctaaagggaacatccttctttcatgtgttgtagtttttctcaggtccttgatccccaagccaaaaaattacttaaaaaaaaacaataaacctttttgagataaaaataaatgtaagccaggcatgctggttcacacttgtaatcccaacacttcgggaggctgaagtgggaggactgcttgagtccaggagattgacaccagcctgggcaacatagtgagaacctgtctccagtaaaaaatttaaaaattagccaggcatggtggcacacgtctgtagtcccagctacttgggaggcagaggcgagaggatcacttgagccttgaagttcaaggctgcaatgagctgtgattgtgcaactgcactccagcctgggcaacagagggagatgctgtcttaaaaa

SEQ ID NO: 146161 - DNA, 180 bp, Homo sapiens
cgtgtcctgctcagcgcggtgtcccacgggcgcgtccacagcccggggcgtccaggggctgcagcggtgcgagctgctctagagacggagggcccggccggagaccaggggccggcggtttcatcctgcgctgacccttgccaacgacgtggctggtcctggggatcacagggcttcgct

SEQ ID NO: 146162 - DNA, 216 bp, Homo sapiens
atagtggtacctccttgcggtatttatttgcatttcccttatggcttatgatattgagaatcttttcatgtgctcgtagcccatttgcatatgttttttgcttaaatattttgctcttttttgtgtatgcgtgacagagtctcactctgttgcccagcctggagtgcagtggtgcaatcttggctcactgcaacctccgcttcctgagttcaagtg

SEQ ID NO: 146163 - DNA, 236 bp, Homo sapiens
tctcccaaaacatgcttggtggcttaaaaagccctcacacaattgtaaggtcacatgaggctcagagcagctttctgcagagggaagggtggacaaacatcctcctcaccttgccaaatggggaggtgcctgcccaggtcacccggcagctcctggggctgcccctccctgacctgcacctcatggtgtgacctctagaaagtgacactttgcctccaaccctcagttcctcattg

SEQ ID NO: 146164 - DNA, 496 bp, Homo sapiens
acagccttcctgaagagaggcagaagttattagttgtttatgattctggtattgaggtcacctgcaaataactctgaatgggatatcacatccaaaagaaaccagtcggtaatggtgggatttctgggcactgtggccttctgctgtcctatagactgggaggaaattcagagcacaggtgtcaggggaaactaagaaggatgatgcgagggagaaagactgaatggtgagctttggaaagcaggagaccatgcattgtcattcattcattcattcattcattcaatgaacactgaatgcttaccatgtataaaacagtatattcagtccaggggcccaggggccaggactttagacactttgtatatgtttaattttctacctgatttttttaaagccttctgtaacctgaggaggttggggaggcagcataggtttcatgtcacatgacatgtcatccccagttgatttgttgtggctaaccagagagttctga

SEQ ID NO: 146165 - DNA, 301 bp, Homo sapiens
aataaataatttattatatggtaaaggtggcatttcaaatcaatgggaaaaggtacgttcattgacaaaggtattgaagcaacgggttaagatttggaaaataactatctctgctcccaaacattcaccatatgagactgtagacctaataaaaataaacataagattatgagaataaaatatcaataaatattttatactatcttgcagtgggataggaattgtctcactcctgctggggtgactccccataaccccagggctctcagttccaaagagaaaaagggaacagatgcctcct

SEQ ID NO: 146166 - DNA, 499 bp, Homo sapiens
atggaaaatcatgcacgaggtggatcacttaatttgctcacaacggatcgaaaccagtcatctccagcttcctcttttaattttccacacctgaattccctttatgggattctcagtttttccttttccaattagaaaatgatgcccaaaatagaaacagctcagaaaaggaaaggattatattcccaccactgtataacactacagcttttcaaagagttgacagagaaagaaaggaaagaatgagatgagcgagcaaaaaatggagcatttccggggcacttgggagggtgagagacaggcagtgagaaaggcatgaagaacttcacagttcaacttagaacctaggctgcttttttacataaaataaatgagattactgtactgtactacactacatcaactgaacctctgccatgggaggatacgagtattttatgcaaaggaggatgtacgatagcttccgtgtttctgcattgggagggaaaaagtttttgac

SEQ ID NO: 146167 - DNA, 322 bp, Homo sapiens
gtcccatgaatgaaataaataaaattgatatgcacttggaaataatttttaaaaatcagtgtggggttagatagcattctgggtatagtgtaccatatggccaaaaaggatatttaaaaatgtcctggaaaataaaaactgcatgacttgcttatgaaaccaaaaactctctgctctgcttaacttcttaaagtcactgttcttctcacatgcagattagagattttttgaatgactcctggtttgttatcccaggatcagaataaaacttaaacagttagcatatgtacacctgtcagtgagatagagtgtcttctttggg

SEQ ID NO: 146168 - DNA, 393 bp, Homo sapiens
tacagcgatcttcatgttgacaaaacccccaaatagtaatattttattttcttctttgtggtaattgtgcagcagcagtcaactaataacaccattcaccattctgctcgtcctaagtgcataataagtgtatttcatgaataatactgctacagaaactggataaaaataagtagagggggccaggtgcgatggctcacgcctgtaatcccaacactgtgggaggccgaggcgggcggatcacctgagatcaggagttcaagaccagcctggccaatatggtgaaaccacgtctctactaaaaatacaaaaattagctgggcatggtggtgtgcgcctgtaatcccagctacttaggagggtgaggcaagaggattgcttgaatctgggagg

SEQ ID NO: 146169 - DNA, 369 bp, Homo sapiens
ttgggaagaaggatggacctgagggagtagctggagcgtggagatttctgcatcccatattaactcccactgagagcatgtatcatagacagcagacagccagggagacatgatgacacagccagtggatgtcagccagcctctgccactggtcacctgtacatggcacagggctcatgaacacagcagccgtggtggcagggatggaggctgcgcgtgggcctgaaagaaggggctcccactcccacggctgggtagccaccactgctgtggaatgtccaacctgcctgcgacagagatcaatgctgagcccctgatatgacggcattccccgaggagactgaccagccacctggtagcaagctgatg

SEQ ID NO: 146170 - DNA, 311 bp, Homo sapiens
tttatgtattttatagcttttttagcatccattataataaatacataactattaaatatataactctttcatatgtaacagttaaaatcatattcttgctcagcactttggaagatactgctttgggcctaatcagctcatttttaaaatgaagattgaactaaagcttatgggcttgaaaattctgtgatctctatgatgatgttcattatcataacacaattctagcaaagtttactggttccaccagatgaaagtagattagggccgggcggtggttcatgcctgtaattccagcactttgagagtct

SEQ ID NO: 146171 - DNA, 172 bp, Homo sapiens
aggtggatcacttgagctcaggagttcgagaccagcccaggcaacatggcaaaaccttgtctattttttaaaacataagatttgactttgttgtggtataagttgtttcatagaatatgaaatttgaaaatttgagtagtatttggtaatgttcagagttttaagccttttg

SEQ ID NO: 146172 - DNA, 1016 bp, Homo sapiens
aaaatacatggatcaatgaaagacaacagatatttgttgaatgcatattatattctagattcagtgctagccaggatagatacgagtatgtataagacatagttcttatcctccagatggttataatttagtatgattgtattcagcttacagttatgatacctgttaaatagaccattagccatagtataatatgatcagtagtttatcagcaaagtgaataaaatgatattggcacattgatagggggtcatcagttatgcttggcaggtagaacaaattttagagaaaagataacatgcaatcgtggctttaattgaatgtgggccagttatggtggctcacccctataatccctgcactttgggagttcaaggtgggaggatcacttgaggccaggagttcaagaccagcctgggcaacatagtgagacccctctctctacaaaaagatttttaaaaatcaactaggcctggtggcatgtgcctgtagtcccagctacttgagaggctggggtgagaggaccgcttgagcctaggagtttgtggctgcaatgagctatgattgcacccctgcactgcagcctgagcgacagagtgaggttttaatatgagttgagcaataacccctaggtagtctcaaaaacaaaaacaaaaagatggaatgtgatttcagcaagtggaaaatggctagttttgcactcatgagcaaagagacatggaggtacctcgctttgcgtggcagatgttagcaggggcatgtgggaaggagggacctggtcaggtgaaatgggctttcacaggaccttgcctgctctgctgaattagccacaaaaggcttcaggcaggctgatggcctgatcctgtggcagaagaagatgattctggccacgttttgaaggttggactaaagtagagagaatgcttcattggataaattgaaacctcttttatatatgtattgtctttttatctcacccacaagattataaactcctttattcttaagattgtgtt

SEQ ID NO: 146173 - DNA, 520 bp, Homo sapiens
agctctgccaccgtcctgatgcacagagtgtgcactcaataaatcatggccctaattgtagtgggtattagctctaccagcaggtattgagtgcaaccaaagagtaatttggcataaaagatgaggattgtgcttccaggctgggttatatttgttatactcaccccattaattctgttctggggtcctcatttcttcgatgtttgctttccttccactcctgttctttcagagccttctgatactggagcgggagggaggtggttaccagctgcagcctcattacagctaagagagtgccactgctgtttatttacctttatgtgctttgctacccagctcccaaagtctttaaatagccacatgtggctagtgactactgtattggacagctcaggtctaaatagtcgttttataacccattttgcagatgagaaaaaatgagggttagagagttaagtaatttgccaaaggtgcccacctctgtagtcgcagagccacactttggacccgggtttcc

SEQ ID NO: 146174 - DNA, 291 bp, Homo sapiens
ttcccagttgggtcacagcactgtgccccattcctatgggccccccaaaacattgggaatacaaagtaatagtggaaaaaactgggaacaaatcgttctatgtgtttccaagtcagctgcaattttgagtagtgacctccttttaaaacatgtgcatggagggtgagatggcccgggtggggccatttgatgagatcaaatcagttactcatttgatccagagcacaaaggttgccccagcagcagggaatgggggacctgccctcgccctgagatcctcccacctcaaca

SEQ ID NO: 146175 - DNA, 119 bp, Homo sapiens
taaagacttaaatctaagacctgaaactatgaagcgactggaagaaaacattggggaaatgcttcaggacactggtctaagcaaagccatttagctaagaccttaaaagcataagcaac

SEQ ID NO: 146176 - DNA, 232 bp, Homo sapiens
acaacaaacctccgcagacctgcacctcttcctctccttcagtgacaccaccattcatccaggagttcaaaccccagacctaggacacatccttgaatctcccccttcctgtacctccaatattcaagccatgagtaaatctcatcatctttacctctcaaatccagcctgcccatttctcagcacataactccgccaccatatcggtggcaagggtgccgatgaatagcga

SEQ ID NO: 146177 - DNA, 128 bp, Homo sapiens
ctctcttatttaaccactaagtattatgctgaccttatctgtagtctaaatgttttatctacacctaatgaattgtttaacaattactattttattaagtgtgttttttattttttattttttttgta

SEQ ID NO: 146178 - DNA, 661 bp, Homo sapiens
tctgggggccagccttcatccaggccgaaggtggtcagtggcccaccatggcccaggtagaaaactcacggattaagatttcatgcccgactccaaaggcaagagactttattattttattttttttgagccagagtatcgctctgtcacctaggctggagtgcaatctctgctcattgcaacatctgcctcccggactcaagcaattctgcctcagcctcccaagtggctgggattacaggtgcgagccaccgcacctggctaccagacacttcagagttacaggttagtttttctttttcttttatttttttttttttggcggaggtgcagggggagttaaacaaacaaacaaaataaacaggccgggtgcggtggctcatgcctgtaatcccagcactttaggaggcctaggtgggtggatcacgagatcaggggttcaagaccagcctggccgagatggtaaaaccccgtctctactaaaaatacaaaattagccaggtgtggtggtgcatgcctgtaattccagctactcgggaggctgaggcaggagaattgcttgaacccaggaggcagaggttgcagtgggccaagatggcgccattgcactccagcctgggaacaagagcgaaactctgactaaaaaagaaagaaagaaaga

SEQ ID NO: 146179 - DNA, 772 bp, Homo sapiens
aaggctcttacacagagaagagccggcatgaagttcaccaggatcccagggtggggactgggaggtggaagtcgctggctttctggcatggtcaccaagtaacacccacctgagatgttctcccaaagtcttgtggtggttattgttttcaactccatctttaagagcacatatgaagaagttatgtagttgggattaaccaacctgtcagctgtgggcccttgtgttatcaagttactaacacaattaatagttctaattacatagtttttagttcaagtttaattccactaaagtgtcatggtgaagctagaccaattatgaaggtttatggataaaaggatagtgataagattaaaggttatcatatatatgattcacagttgagacacacaagatacttgcaaaccaagagtggtccttcttgttctacgaacagcaataaaagtaaatgtgcccctcacctatacagatttctaaacatctggactcttactgaaaatagattgaagcctctgctctgagaaggtcatggaaggcctaactgcacaatggccctcaggtgggagagtgggctaggccctccagggttacagggagctctgcacaggggaagaaggacttaaggtggtagaaagccactgtgattgccaaggtcagcaaaagtggagttctcacccctgagggcaggacaaagagttcccaagattccaacccaggaggtgtttacaaacttagggacataaaccagggaagtctatgagagccgtta

SEQ ID NO: 146180 - DNA, 449 bp, Homo sapiens
aaagaaccaaactgtttcatccacagacttttaaaattcaaacatgtagttcagagtcagccggcactcaataaacattaataattaatgttacttatcccaagtaatttagaacaaagcatggcagagagaggggagtgtaatgggttacatgggaataatgaccaactcttacgtttttagcagtaattcaataccccctcatgtctgtgtacatagcaattcagagtcccacagaatgtgcacaagtccactgccctcaagactacaggggtgtacatcacaacaacattaagaatcttcatatcctttggtatgttgttatgatcagcagtaccacttgtggaaatgtacactgccctggctagctcttttgttgatccagctccctccctcttccattaacaataaccctcttctttgtgggatactttgtctccccacagccc

SEQ ID NO: 146181 - DNA, 146 bp, Homo sapiens
gttggttcctctgtatgtactctctcctcgcctagaatccccagtggctttctatattggtgtaaaagctgaagtctttaccttggcctatgtgatatgtggtcatcacttccccacactctgccacccaaatgctgttactcaaa

SEQ ID NO: 146182 - DNA, 156 bp, Homo sapiens
ttgtcctaaaagacctcataaatttctttaaacatgcaaaggagaggctccttttcaatcagaaagactcaggaaatgtcaaacctgaaaagaaccgtagacatcacctccatccctcactttataggtgactgaagtgaggccctaagaggttaa

SEQ ID NO: 146183 - DNA, 469 bp, Homo sapiens
aggactgggtgaaaatgagggactgagctaagccagtacaattttccagaatttgtcactctggtgaatcattccacctcttcagggaggatggagtaaagtggacagagaaagatcttaaatgcgtttaggaaaacaaaactccgtctttatggaatccacaagtggcacaaggcatcccctcctctagccctgagactctaggggcctctgttgggagggccaaaggaatgaataaaaacacatgtcaaatctgcaactgtgatgctccactgagtctcctgacaggacaccgttaacatctccgcaacaccaaagtcaatgaaaaatcaaacacgataagtgttccttctccatttcctccactttattaatttttttgcagagccttagaaaaggtcattgtaggagattacagtataccccaaaagtctttagagttccccagaggaaatattgtaaccaatag

SEQ ID NO: 146184 - DNA, 410 bp, Homo sapiens
tgagacagagtcttgctctgtcgcccaagctggagtgtagtggtacgatctcggctcaccgcaagctctgcctcccgggttcatgccattgtcctgcctcagcctcccaagtagctgggactacaggcgcctgccaccgcacctggctaattttttgtatttttagtagagatggggtttcaccgtgttagccaggatggtctcgatctcctgacctcatgatccgcccgcctcggcctcccaaagtgttgggattacaggcgtgagccccccgagcccggcctccacttttcttaaagttggagaaaaccatataactacaaagaacagtatcactgtaaattcatggtttcaattcatctggatactcaatgctattgaataacctttaaataattgactcagctcta

SEQ ID NO: 146185 - DNA, 708 bp, Homo sapiens
agggggctgcccctgaccgtgggtcctgttgctcacatcttcccagggactctgactctcaactccccaaaggtcacagtcaccctatccaggaaccctcatgttcctgatgcctccaaactctgtgggacccccagcttctatagagcccaacatctgaaatcatctgtgagcttaaaacccttctaaactttaaaaagcctccaagcgccgggcgcggtggctcacgcctgtaatcccaacactttgggaggctgaggcaggcggatcacttgacatcagcagtttgagacctgcctggccaacatggtgaaaccccatctctactaaaaatacaaaaaattagccaggcatggtggtgggtgcctgtaatcccagcaactcaggaggctcaggcaggagaatcgcttgaacccagggggtggaggttgcagtgagccgagatcgctccattgcactccagcctaggcaacaagagtgaaactcttgtctcaaaaaaaaaaaaaaaaatattagccgggcatggtggtgtgtgcttgtaatctcagctacttgggaggctgaggcaagagaatctcttgaactcaggagacagaggttgcagtgagccaagatcacaccactgcgttccagcctgggcaatagagtgagactccgtctcaaaacaaacaaacaaacaaacacctctttgttttagcactcacttga

SEQ ID NO: 146186 - DNA, 347 bp, Homo sapiens
aaatatctcataaggcaggtaatatattattatccccattatacagatgagaaaaataagtttagaggtgttgagcaaattacccaatactatatcgctgttatgtttcagagaaaaagaaaaaaaatagaaaggatgagagagaagaaaatgtataaagcgaggacaatgtatagaactgtaattaaaggcttattttagggaagataggccagattcagtaatcagccttttctttttttttcttcctgagacagagtctcgctctgtcgcccaggctggagtgcagtggccgatcccagctcactgcaagctccgcctccctggttcacaccattctcctgcct

SEQ ID NO: 146187 - DNA, 179 bp, Homo sapiens
atgaatattttatagtgccttctgagggcaggcccaaggcaaaagaataacgtcattatgctgttgggcccagcggtatgttacaatctttgctgcaggtggaacctagaaagaagagaggagtcacaccagccaggtactgggcctagcagtatgccacaagatgttttgtgagaagg

SEQ ID NO: 146188 - DNA, 241 bp, Homo sapiens
  misc_feature (177)..(177): n is a, c, g, or t
tatccatctccagaagtctttcaccgtcccagacagctgtattttttaaaatagtcggatttatcaaattcgtttaatcttttatgggttttgtatcacagttagaaaggcccttaccgctctgagtttatttgttttgagacagggtctcattctgttgcccagggagatgcgganagctctaggattggatttctgttgcgtttcctccatgtttggagggtgtcggaatagagtctga

SEQ ID NO: 146189 - DNA, 116 bp, Homo sapiens
ttgttagtgacagtctacatttcatatgaacctatgaatttcattcacatacttttcaactttcctttcaagccactaaaaacaatgatgaattaaactgagcttttaagtctctg

SEQ ID NO: 146190 - DNA, 609 bp, Homo sapiens
tgtagttatccaacaaatatttcatgaaaattcatttttttatccttctgtgtgtcacaaggcattatataatgtataagaatggagcttacagtgcagaaggagctgatggtgataaatttcacaagtaaaaataaagttcagggttaagatagtatcttattctctattaaatcagaggattaaccttcctatgcatttccagctacaaaatgtgacccatgatgaggtgagtgaagtcaaatcagcttttcaagactatatgtaaaataacatgaatagaaagaaatacttcaaatttatagaatgttaatctgtatagtctttgaggttaaattgatttagtatctttgactaaaacttatgaatcagtgagaatttgatggggaaatatgagcatgtaatttcgatccatcatctatctttatttgttggtttagagctaagcatatgtcagtattcccagtataggtctttcaaggtatgtctctgtatgtaagggtaatataaccttgtgagtatgagtatgagtgtgagtgtgtgtggagaaatcaattgcttattaatagctttaggaaatggtattagttatttagttgcctaattggg

SEQ ID NO: 146191 - DNA, 471 bp, Homo sapiens
gataggaaccgcatgcagtctcctgatagacgagggagtactcatgagatctaatggtttagaagtgtctggcagttcaccctatgcaaccatgtatcactctgtctctcctgctgtcatgtgaagaagaggtcctatgcctccccttggcccactgcacctggctagaattaactttttcaagagattcacataaccaaagcaatagaaaattctccttgattactttaccaaaaagcaacagcgatctaaaaataggatctttgtacattccagttggcctggaacaatccctgtttatgcctgttgtctggacttattaataatgtttccttttctctccaaagtgacctggtttgctaaattacattattagtctacctaaaaaatgattcctagagttgtttgaagaatagtataaagttttcattgtttctgttttgatttttttgtttgtttgttttattatta

SEQ ID NO: 146192 - DNA, 424 bp, Homo sapiens
acaatttagaaacaaaaaaataaataatatagttagccaggcacagtggctcacacctgtaatcctacactttgggaggccaaggcggacagatcgcttgagctcaggagttcgagaccagcctgggcaacatgttgaaaccccgtctctataaaaaacacaaaaattggcctggtgtggtggtgcgtgcctgtagtcccagctactcaggaggctgagatggaaggattgcttgagcctgggtgatggaaccagaccatttctaaataaataagttatttattaacctattatggtggcatgtgtctgtagtcctagctactcaggaggctaaagtggaaggatcacctgagcctgggagatagaggctgcagtgagctatgatcacaccactgcaccccatcctgggtgacagagtgagaac

SEQ ID NO: 146193 - DNA, 815 bp, Homo sapiens
caggatgaaaacagcatcaaccacattggattattttgaggttgttaaatgaggtaatacatttcaggtggttggcccatcaataagcgcttcttcctaaatatagttttgttatctatattatgtatagatttgtttttaaatggtaggagggagtatgactaaaaagcccctcttttttttttcttgctaccaatggtaaaagccggatgatccagttgtctataatagccatgcatttattaaaccctgtgggttataacccctctgtttcttatggttcactatgcccagagcattcaagtgtttagtaaagttgtgaaaggctttgcaaatatgagggatgatgcccattttctggtaggtttcttatggggttctttcccccaacatacacatttctcagtgattgtcccctctttgccctttgctggccatgtgaaatgcaggaccacatcttctccaacagatgaatccacattaaagccactcactgacctgctttctacatttaaagctactcaactttgctatgtaattgtaaggctcccaaattcaaagcatggctagtgagcaatggatgagggtatacctagtattttttccatagacttatggaatctcatgcatggaatttagatatcaggcctccctgtcctcatctgggagtgctgggattcatgagctactcctatgtgctctgcagtacgttctggtgtgtttaaggtaaggtattattctgtttacataaatcaccctgacatcttgtactttttcatggattattacttttttaatgaggtaacagaaatgca

SEQ ID NO: 146194 - DNA, 293 bp, Homo sapiens
tctagccactcactccactctgacaggtgcaaccccatctgtgaatttagcaggtttttaacaggatctgccctcaaaaggtggctattttaaacaacacgcaggtgcccctgcaagagctaatgtaagcattgtcaacttctggcaggtgaagacattgtgtgtcacagtgagtggcttgcctggtgtcacacaggcagtggtcgtgcaagccggtgcttagctgtggttcagtttccctctgcactgctcgcagtctcacctgtcccaagccgaccacctctggactttga

SEQ ID NO: 146195 - DNA, 424 bp, Homo sapiens
aatattcctcacatgaattttcagccccacaccgactctcccaccccccttctgcagtactggatgcctacacattctgaggcttcccaaagttaaatctgacaagaaaaaaaattaaaactgatcaagaacaaaattgcatacataccataattacaactataaaaaaattaatatcactatatgtgaaagactgaaagggaataacacaaaatgaaaacagttgttgtaataagcaccattttttaacataattcctttgtagtatttaatttttccattaaaaaattttaacataactgagtcaaaggagtttaaaacttcactcaaactttctaaattagggagtgtcatcaagtaaggtttcattggtcagacaccactttcacagggccatcagttcacccatcccacaaagaaacaa

SEQ ID NO: 146196 - DNA, 240 bp, Homo sapiens
tgttatactgtaggtactattgttgtaggatttctcacagttcgtttgccttgactaaatggtaactgcacacatactatactataaatggactcctcctctagtcctttaactccttgagggctgtgatagaccttatttaactttgtaccctctttgccagtggttttaacatagtgcaggcccggtatgtgtttgaattgggtaaattacttttactgcctagtggtagctggtgta

SEQ ID NO: 146197 - DNA, 491 bp, Homo sapiens
actggaatatttactatagtcaggggaatgtaatctttaaaacatcagtaaataatgatggtccagaaattatgatgatgcgtatttcttcatgcacattagtaacttcactaaccacaatttttagctgatttgctaggatttttctttaaacatatggaggcaaaaggttttaagaatagtgtcaggggcattatttaatcagtgttagttctgacaggtgaacaacctgagttggtctctgcagatagtacctatgaaacattaaggtcagattgattcagctacctggtgtgtaagataatgcccaatttatagtttcctttttattttttctggtacttctacaaatataaccctgagcatagaaataccctcattattttaatgggacatcctatttctaccatgcaatttgagcttgatctgagacatttctgtgaagtgtgaaagtacagttaatcattcttaaatgttctttttatgcacaa

SEQ ID NO: 146198 - DNA, 877 bp, Homo sapiens
ccgtctatctatccgttcatccatctgtccatccgtctgtccatctgtccatctatccgtccatccctccatctatctctgtccatctctccatcaacctctttagccatctcttctctatctatccacccactgctccactcacccacccctccttcttccttcagtctgtctggcttccctgcaccttcccacctctggtcctgcccctggtctggacaggccatctcaagcctccagtctcttgaccgacctcagccccagcttttctcagcagcccaattaggaaggctgggcagatacctgctcagaggagaagcctatggcccagagaaggcatgggcttgcctgagtccctccttctgcagcagggacgaggctcactgggccctggtgtcctaacttcctgctctctggcaggtgtcccctgtcctgggcatgatcacaggaacactcatcctcattctggtcccagccactaaaaggggtcatgccgaccagctcggggaccagctcaaggcccggacctcatggctccgagatatgaaggccctgattcgaaagtgagtaccgcgggaaggggtctggtgggaagagagaggggtgctgagatgagagggcctgtccctgcagggcagcccactagcaccctcagccagacaccccacctctgctgtctcagtgctgggagggacattttggccccagaatcgattattcctgcagcctgaaccctcacccctggagcctgtaagacgaggcatttgggggcctcctgttcccccagtgcatggggctgcctaggggggtgaaggaggtccctgagctcagtgtcactgcctggcctctccccagccgcagctacgtcttctcctcc

SEQ ID NO: 146199 - DNA, 377 bp, Homo sapiens
catgtatagcaattgctgactctagctctttttctttcttcctctccctcagggtcaggtgacactttgtctgggtaatgcaacattaactcactccctttaacctcttggttatgtagcaacataagtgcctgaatgtaggggaatttttaaacgcttcctcccatttcctcaaacattgacaaaacagctgtaactgaaagatataatagcttaaagaccccaaaattggccaccattttttggatcctaaagcatacattagccaaaccatattacaatagtaaaccattttcctcttagtcatgggggtaacctcgtactatttccaatctgacagcatttttcccagagggctccctgagggaaggaaagca

SEQ ID NO: 146200 - DNA, 468 bp, Homo sapiens
tgagtcaattaaacctctctcctttataaattacccagtctcaggtagtacctttatagcagtgtgaaaacacactaataaatccctcaaagtgatgtatagccttaatgaagatcaatcaaattcaagcaagctttataaaaaaagcaattcaaatatttatagaaatgcaaaaacttagagtagcgaaaacaattgggataaagaacaaagttgaaggacttgcactaactgatgtcaacaattactataaatctacagtaatcatgacagtgtgatattggtaaaaggatagttagaagccaatggaaaagaatagagaatacagaaataggccaggcacagcggttcatgcttgtaatcccagcacattgggatgccaaggtgagaggatcacttgagtgccagagttcaagaccagcctgggcaacataacaagaccccatccctaccaaaaaaattaaaaaa

SEQ ID NO: 146201 - DNA, 327 bp, Homo sapiens
tctacccataagtgacggatgctatagctagatgtagccagctcatctgagccccctccttctgactccatttctatgaagctgtcagaaatctctatagaaagagaatgtgttgctcatgccaacttccagtggtctgactttgtggcagtttcactctggtggcctggcatcagccgtgattacatggccttagttaagagtgaatacctgccaatcagatggctctgttcttggtgtctgtcccagtcagggcctggccctgcagagctgagagctagaccctggaccaaggtaaagttcacagaggctgtaaatactacttgg

SEQ ID NO: 146202 - DNA, 711 bp, Homo sapiens
attttaaagtacatatgcacattaaaaaacacaagtcagcttttatttttaagactgcacaatactgactactagatcatacttcaattcatttatagataaaccaaaatagaaatggaaaaatgacctctgcatctgaactcatccaaggcctagaatagtgacacatcttacctctacccacagttgttccactgatagatatttctctctcctaaatcccctttaaaaaaccacataaatatttcatgccttgtttgtgagatatttcgcaaagattccttttaaggaagatgttaaactaacattcttatcttccatcactagaaagttttcagaacttttagagcagaaagtcttttccacaggaaagttaggctggaagcccactcatctttcagggaaaaactggaaattaaccttcacagcagaaaataaaaggtatatgaaattttaagccataacccagacataaggggttcttcttgatcaagtgagtccctaagtacgcagttttctgactggaagataaaagaaaggctcaccccaagatctacagtgttcaaagaaccaagtagattattttgtaccgccattcagaaattgtaaaaaatcatccattaaattaagacatgcctaagaaattattatttttaaattaaaagattccattcatctggcacaccttactggacggggatcctctgaacg

SEQ ID NO: 146203 - DNA, 916 bp, Homo sapiens
aatcacttaataaattcagcttaatttgaggtctagagagtaaattgtgtagttgtgttttgctaaagaaaacactttagcttcgcttaagaaatttaagtgaagccactggatttagtgtttttacggtattttaaatatttaactttgttattctggttaaagagaaatctaagggtaagaattttttattttcagatgatggtgatggattttaaatttttaagttaaaaaatcttattcagaatttctgcagatctgatatccttcagtattaaacgaaatgtttctagtttttaaaatcctgtaaataatactaggaactatttgattttcatatagaaagttttcattttcttttgttttaactttgggtagctttagtataatccagttggcccttgaacaaagcaggggttagggatgccaaacccacacgcagtcaaaaatctgagtataacttttgactcccttaaaacttaactacttataactactgttataagcgttaccgataacataaatagtctattaacacattttgtatatttattatataccgaattcttacaataaagaggataaaaaatggtattgagatcataaggaaaatatatttactgtttattaagtggaagtggatcaccatgaaagttttcattgtcatcatcttcatgtttagactgaagaagaagaggagggattggtcttgtgtcttgggggtggcggaagcagaaaagaatctgcatataattgcactgtttgaagtttaaatccatgttcaagattcaagtgtataacaacttcagtgtaaatacttactacttacttttaaatacttgattcctaatgttttagtgaaaccctactagcacccatgaccctgattaaataaatttacttttttcctgcttaa

SEQ ID NO: 146204 - DNA, 490 bp, Homo sapiens
  misc_feature (246)..(246): n is a, c, g, or t
tttcatgctgacttcttttgatcagcattttgatggcaagattcatcaataatattgtatcaagctttattttgtttattcttgttgctctgtggtatttccttgtatgaatataccgccacagtttatctaatctactgctgatgaacatttgtgttgtttacagtttgaggctataatgaatggtgctgctatgaacatacacgtgcatgtatcttcctaacagaatgacgtatattccttggngtatatatccagtaatgggattgctgggtcaaatggtagttctgcttctagatctttgaggaatcgccatactgtcttccacccactgtgtttaaggcacaatcaacacataggccaccatgtacaaggtacctggctacggtgccactaataaaagtcattcaagacacatatgtaaatacatatagtgcaaagtgtagggtacacactatgtgcttagtgtctactaaaacacagaacacag

SEQ ID NO: 146205 - DNA, 107 bp, Homo sapiens
aaggctcagacaggcaggaggctgtctgcccaggaaggcaggtcagaagctgctattaaccactctggcagggcagtgtttctgtcagcctgcagagcacttcaggt

SEQ ID NO: 146206 - DNA, 120 bp, Homo sapiens
ctagcccctataaactgcagtctgaatgcagtcctgcccacccaggaacctgccaggagtcacactgtatgtaccctgggaagcaggcttgctgaactccatcccacagcagatcctacg

SEQ ID NO: 146207 - DNA, 276 bp, Homo sapiens
agataccacttggtgagaagaagattctcctcctctccaggcccaggtaataaatagatcctcatccccaggagaaggcatggctgtttcacacaagggtagaagtgtgtgtggaaaccagagatccacctgggagccttctggtttcccttgccccattgtaagtgtgagcagaatcatccagcaattcagcctgagaggatttgatttccaagggcccagacccgtcagggcagaaggtttgagtcacacttgtgggcaatctcccaaggccct

SEQ ID NO: 146208 - DNA, 1014 bp, Homo sapiens
aattgtttgggccttaagaaggggaaaaaaaaaaccttttgagaaaaatgagaaactcagatgtatcaaaatgccttccttatgattacctgaggctttaggtttttaaaagcctttgtacctaaaggttctgattcattctctattgtggcaactttttcctaccagacaaaactgaaagattttgtttctttaggaaacatacttaaagaagtatagtagacctggcattccttttgcatgctctggtagaccccggctcttgtataataaaaacaatataggcatgttatatttgccatatgttagttagggggtttcagcaaacaaatacctccttgtgcacagaagtagatgaaagcaaagcttactgatgtctactatgccttaacttaccttcttggtcctacatagtctgccagacttctttctggtgggtggtatgcatattgggataatgggtgatagctcagcatattctttatgcttggttccgctctgaggacagctagtacactcgattcagtattatatgctttcctatttccttgcctgatgcttctgtgtaatgctaaatctcagtttattctgtcagtaaagttgaggagagtgagtgaggagtgcgttgcatgtgtgtgtaacttatctgtaaagttgaactttggttatgtttaaccaggaaaatcagaggacaaggagattaaataaatatattcggtgagaatctcagggtatgcattatataaatgggggttgagataaagtctgagtaacagtattaaatagggaagggggttagaaagaagttaaagaagcatgaaacagtgttaaagtaaatggatagaatcaaatagcagaatagacaaaacggaaactgaaaagagggtgtccggaatggtgtcaggagaagattttagaagtagagaatatagtaggagaagataaaagaataaaagaagatgaaaaaagataagagtggataaaacaagtgtatatggtgattatagtgatggc

SEQ ID NO: 146209 - DNA, 223 bp, Homo sapiens
tccaagatgggagaccccttacggaccagctaccacttttctcactggacagttaggaagattgacggccagagaagggcagggatgtgcccaaagcaaggatggtaacctgtgtcccctaattacgtgggactcctctaatgggaaaagtagccagcatatattcagataattagctgtgatcagtgtgtgtgagcaaacccagccacgcagtagcatgctg

SEQ ID NO: 146210 - DNA, 197 bp, Homo sapiens
tgctggggttacaggcgtgagccaccccacccagctagttatgagtttttctgtcttgcctctctaaataagccatgttcctgtgccttccacttgtatattccttagaatttttagtatagggcctgcatgtggtaggccctctgtaaagagctgttactttgatagtgtgtgaattatagaattagaactctgag

SEQ ID NO: 146211 - DNA, 228 bp, Homo sapiens
ctacctcagccactgtagggaatgtaataacgtctgaaaatcattagaaaaacaattagcatacacaaagatttatgatcttaaaaatcttagtcgtttagaagctctgtgaatcagatatatttgaataaggaagaacaaatagcaagtcttatatcaggatcagcaaatcagtattattactgctataatcaggataaaaattgatacattatctttaataaaaga

SEQ ID NO: 146212 - DNA, 329 bp, Homo sapiens
cgcggaccttatgttgaccactggctgagtcaggagtgtgtgtaacctgcccacctgcccaggctggttagaagcaagcgtaggcgttgggtctgcctgtcctggtccaggcacctctcctggtttggccaggttttggtttgtatatgttcctgatgttgacgtgtaaatgatatcgttacaaagcaggtagtttgctttgctattctacgaataacccaagaacctgaggataataggacacgttaacagtctgctagttgagagttctgtttctgtgacttcaggggacatatgaccatcccgattgtggtgggtcagaacataag

SEQ ID NO: 146213 - DNA, 250 bp, Homo sapiens
ccccttgcggatctcatagcatcccctccctatgagactgaggggtatatcctgaattcagacaatttctgggcaagatataatctgccttttccccaaattattctggatgatgtggaagcaactcctttgttagcccaataaaaaatacgagtggttttactactacctgtctactctgattgaaagaaatcaaatcatcctgtcctgaatctgttctttttcctcaagtgccacttctatgaagccc

SEQ ID NO: 146214 - DNA, 437 bp, Homo sapiens
acaagttaagaaaaaaaatattaattggattttacaatagggaattctctgtgatcttaacaaaagcagtttcattgtaggtgctgagtatcaaaagcagatttgggggatatggaaatataagcagaaggtaaggagttggactcagcagatatagacaacatggctgcaaatgcagagagaaatacaaatttggtgttagaatggtgtgtaaattctctgatggcttccattttcttagaagtttgaaagagaagtcgatggtacgattcagtcgttccacaaagtggacaaagatcagtaagagaagtatagtaggattgctgcctcaacatgtgttttcttacaatttgtcattagaaattcaaattgaatttagtagaactggtcattagatttctgcagcaatgtttaactgcttgcatgtaggcatagag

SEQ ID NO: 146215 - DNA, 420 bp, Homo sapiens
ttgggaccccctgcgcctggtttctcttaattctacctccccttgctcacacgacttacatcaaccccaaagaggccagtggcattttgcctattatgataggagagactaggtcctatttaagtctttcgttgtaacagtcagtaaccctgttaaattaatcatgtgggtcttggctacttttatcagctgtggctccagtggcactctaattttcacagactttgaggtgttattttgttctgcttgattaatctggttgcaagaggccactggttcctgcctctaccccactgccttgtggggcagaacagatttccccacactgggcctcaggtatctctcagtgggagaggaatacggtggggtctgccatctgcctcagtgtctttgggcagggaaggagagtctcaggcatgt

SEQ ID NO: 146216 - DNA, 828 bp, Homo sapiens
ctcagatggagatgaggaactttttgggaactggagtaaaggtcacgcttgctatgctttagcaaagaaactggcagcattttgcccctgccctggaaatatgtggaactttgaacttgagagagatgatttagggtatctggcagaagaaatttccaagtggcaaagtgtccaagaggaagcagaccataaaagtttggaaaatttgcagcctgataatgtgaagaaaagaaaaacccatttcctggggagaaattcaagccagctgcagacatttgcataagtaatgaggagccaaatgctaatcaccaaagcaatggggaaaatgtctccagggcatgtcagagaccttcacagcagcctctcccatcataggcctggagacctaggacagaaaaatggtttcctaggctgctgctattctgtgcagtgtcagaacatgttcacctgtgtcccagtgacttcagcttcagctgtggctgaaagaggccaaggcacagctcagacccttgcttctaagggtgtaaaccctaagccttgcagtttcccacatggtgtttggcctgttggtgcatagaagtcaagaatcgaggtttgagaacctccacctagatttcggaggatgtatggaaatgcctggatatccaggcagaattttgctggagaggcagagccctaacagagaacctctgctaaggcagtgcagaagggaaatgttgggtcagaactcccacacagagtccccactggggcactgcctagtggagcagtgagaagagggccaccatcctccagaccccagaatggtagatccaccaacagcttgca

SEQ ID NO: 146217 - DNA, 623 bp, Homo sapiens
tgcattaattgccaggagcaatgaaggctcaaccagggtagtagtagcggaagtggtgtgaggtggtaggattctgtttatgtttttaaggtagagctaagagtgtgtaatgattggatgttgagtgtgagagaacagtatctgggacaatttccaagatttttggccttagcaactggaagccatagagttgccattggctgaattaggaaagcctgcaggaggaccatgttttgtagggaaagattaggagtttagtttttgatagggtaagtttcagatgtctgttagacatttcaaatgtagacatcaaataaatagttggatctatgaggctggcttttggaatagaaaatgaagttgcagatacaaatttgggagttgtcattatatatataaattgtatttaaagtcatgagcctggatgagtcgttcacatcacctagggaatgaatgttgataaagacagaagcagtccatgatctagtcttaggatggtgttgtgctatcatgagatgggggaggaagtaaagtccagcaaaggaggctgaatggagggaacacagggtaggaatatcacttatagtatgtggtgtcctggaagttgcaagaacaaaaatatt

SEQ ID NO: 146218 - DNA, 246 bp, Homo sapiens
cggggcgggcgtagggggcaaaacggcatcccagctcaaagaagaggcccaaaataaagttcaaccaagaaatgccttcttgcctgatgggcaagtgcaatctatatatttacatagctttattatgactgaataagaaaatatctttttcagcttctgagtctagcaatgaatctagatgatgaagacaccatagataaatgatcttcagtttaaaagctgaatttcagttaactgcatgctttc

SEQ ID NO: 146219 - DNA, 336 bp, Homo sapiens
caaattattttaaatggctcaaccatgccaaaggatagcaagtttactttaaatcagccatcttctcaaaaagccacttaaaatgttaaatgtttctaagaaaaataacattatttttagtccatttgtctctatcaacaaaatattatatccccttttgatacacattcttccctacaaataaagcagacaatgtgctcttttagaactttcgtttatctttgtaaagagaaaataatacaaggcattcactgtggcactcacagtctgctttctctaaggacaagcctatctatactcaacagtcagaaaagcaaatgatctggctggaagggt

SEQ ID NO: 146220 - DNA, 143 bp, Homo sapiens
ctgcctcaagtcttccagatgagggactgtggacctacacctagcactcaccacagtatttggcaccaaagttagttatcatctatctcaccacccacccaaaggcaggaattatgacagtttcatctccacaggaccaggca

SEQ ID NO: 146221 - DNA, 487 bp, Homo sapiens
atggagttaatcctagctcagtgcattttaaacagctttttctccctatatgactgtctgataggatgctctgaggcctgggggatgtaggaaagtctgcatttggttgcctgaacatttcagaacggatggcattcttagtaccctgcctactatttcccagtaagacaccacaatcattatgacaaccaaagtgcccacacacattccaacagtcccctagtgaatgatatccccctgttcataaatgtgaatccagtcagtggctcctgattttaaaaaatggaggtcacttcactctgtctggccagaggacgtggctggacgtccaactgggccccttctgacaggccctggattccacagctgggctcactgggatgtgggtgtcagctaggcctgctttccaggtaagtggctcacttctgcatgccaccctcttggcacagacactttccgacgttatttcatttgagccttaggacaa

SEQ ID NO: 146222 - DNA, 373 bp, Homo sapiens
ctccttttcccattctcagttaacagcatttcaaccagttccttatgtgaaacgaccgcgtggtttctgttttagacatttccctgactggcccacctgtgatccccgtggggatcctatcctcatctctcgggcctggggcccctctgcaggaaactcctcccttgtggttttcactcccagaggcacaagtgtccctattcactggactggctgtgctgactgtccccaagtggggacagcagggcctggctcttccacagcactaccctcaggacagcccaggacccggcacctggcgagcattcggcggatgtactcaatcaatcaccgacgcatcttccaaagcctcctgcgagatggagacctcact

SEQ ID NO: 146223 - DNA, 405 bp, Homo sapiens
gaaagacttttattttttgtaaaatgtaaaatactgtggcaatgtcagattgctataaaaggttttcaaatctgtacttccaggtacttcaaaattagtttgcagattagtaccagtggtcttagtacaatttgagtagctacagtaagtaaggagtcgatacaaaagaaatacagcatattgtcaccatcattggtgtaagaatgttctggggaggactaggcttacctatgtaaccagtggaaaatgcagcatatggtacaattactaaagataaatatagacataaagaagagcgatgataaaagctgttctggatcccagttaaaatctttggggttactgcttaactctctggactcacagccccgacccaccatccccaatgtgcagtttcactcatgg

SEQ ID NO: 146224 - DNA, 370 bp, Homo sapiens
catatgactatctgttcaccctggtgaactcagtcgtcaaaaccaggactggctggtccacctaactcattcctccttgggaggtgcccacctcgcctctccaagctgccagccagcagcaaagaatgctatgactatggcgatgggccttctgtctcgagggtggcagctgccagcatgtggttccagcccacagctcctaaactatgagattctcagttcaaaggcccaagctccgagttgtgaggtggtctggagcctgttggaaagaccaccaagaatgcccaccatctgctcagcctcacctgtaatgaaaaccagctgcctgtagccaaggggccgcctgggatacccctactttacatatccc

SEQ ID NO: 146225 - DNA, 288 bp, Homo sapiens
ttgctcaaggccagggacgacaccacagactggggcgggggcggggctgaagcagcagacatttgttatctcacagtcctggccgtcagtccaaggccaagtgtcacagggctggttcctcctgaggcccctctcagtggcttgtaggtgctgttctttccccatgtcctcacctgaggcctctctccgtggcctgtagatgccagcctctccctgtgtcctcacctgaggcctctctccgtggcttgtagatgccagcctctccctggcctgatcctcacctgaggc

SEQ ID NO: 146226 - DNA, 402 bp, Homo sapiens
cggttttcgatggctgccacctgtctcagtctgctccagctgccataacaaaacaccactctgggtggcttaaacaacagacctattttctccagttcctgaggctggaagtctaagttcaggctaccagcattgtggggttctggtgacaccctcttcctggtttgcagatggctatcttcagtggcagagagaaagctctctggtgtctccttctgttttttgggaggagtctcactttgtcacctaggttggagtgcagcggcggatctcgcctcccaggcccaagtgaatctcctgcttcagcctcctaagtagctgggattacaggcgtccaccaccatgcctggctaattttttttttttttttttgagacggagtttcgctctgtcacccaggct

SEQ ID NO: 146227 - DNA, 291 bp, Homo sapiens
taactttatttctttttgccttttaaaaaatgtcatgtaattcttcagacttggtgatatagcttgaatctgtgtccccacccaaatctcatgttaaatggtaatccccaatgtaggaggtgggacctggtgggaggtggttgtacaacattaagaatatcctaaaatgccacttaattgctcacttttaaatgaagggtaaaagatacaaagtagcagatatgtaagatgaacaagtctagtgatctaatgtaaaacatgaggactatagctaataacattgtactgtat

SEQ ID NO: 146228 - DNA, 252 bp, Homo sapiens
cagcctcctaaagtactaggattacatgcataagccactgtgcccagacttggcttcttcaaaggatgggattttgtagggttagggacacactttccctctcttactttataatttctttgcttgaaggttttttttcccaattaacatatatataacatgtatggcttttgataatgtattttataattttaaggccagatgtggtaactcacacctgtaatcccagcacttttggaaggccaaagtggg

SEQ ID NO: 146229 - DNA, 266 bp, Homo sapiens
gcataaagaaattccagcctttgtttcctaactataagcacttctgtgccatgtgtatccaacaagcatcttgggggcagctgatgcatttaggtggaggaaggaagagtgaagaccccagctaggatacttatagacaggtatctagaaagagatggattcttctgggtccttatgacagggacccaaggtccagatgatgaaattttggccaataaacaagaaaaccaggcttcccctgtgatttagaaaaggagaaaagctag

SEQ ID NO: 146230 - DNA, 560 bp, Homo sapiens
ttttgtttttcttcatgtcaatttgacttaaatctgaaactatttcaatctcaaattatgtagagatatgatcattctattctttaaaggcgtctaattttacttatattataatatggggaaaatgcagtaaattttagccaaatcatgtttgattttatcttcccactggcatttataatttactttcagtttttaaacaaagaatttgctcataatttttatttcaaggctcaattactatcatttggatataactttgtccaggacaaagagaggcatagctatctgtgatttattagtttgacactggatccccgttttcagactaaggaggatttcagactaatgaggagtggcaggattcacgcagagtaggaatggagtgagtcagggaggagagatacagcagctgagtcagggcaggaggtggagggcaggttacttagagcatctaaggccactggagttttacttttcttctgagatagacatctattggaaggatttaagcagatgatttaatgtgaggaactctgaggttgatttgagtttgtaat

SEQ ID NO: 146231 - DNA, 381 bp, Homo sapiens
tggtgggaaccagagttgtcagggtagtagagggagataaaaaacacagaagaggaaatggaatggaagaagcccgtggtactggattgtaacgggaggcatctgtataaactcataaagaatatatattattacctagcttgcccactgaagtagaagcaatgaacatactgtctagatcttggtttctcttcctaaaaggaatcaggactctggagaaatggttgattcaaagttagggcaaaaatgtgtaaggtgagacttgctcaaagaatgatggccacatgtcaagattatagagaagctggcctaaagcagttttcattagtcaaccatgggaaaaggtgaacatcaaaaagaataatgataatggactatagc

SEQ ID NO: 146232 - DNA, 250 bp, Homo sapiens
gagaagggaattcggagagaacagtctgacaataccactttcggacctgggcggaccacggagtgctcagcaaccccgggggtgtgctggacctcctggagaaggtgcaccataagcaggagagcatcatggatgcagggccggtcttggtgcactgcagtgctggaattggccggacagggacgttcattgtgattgatattcttattgacatcatcagagagaaggtgttgactgcgacgttgatgtt

SEQ ID NO: 146233 - DNA, 285 bp, Homo sapiens
ggaatggaaggatgggaggtatgaaagagatgagtcatgaatgactctatgattttggatccaatcaaccagaaggatgaaattgccatgagctaaactaggaaagactgcaggcgagcaggtttagaatgtatagtttgaggtgcatatttggcacccaagttgagatgatgaataggctggtagaagtatgagcttggaattcagagaatcctgggctggagatgtgaatgtgggagtcatcagcctacagatgatattaaaacccatgcgactggataagat

SEQ ID NO: 146234 - DNA, 231 bp, Homo sapiens
cagaacacatatttggtggtacgtagcctcacatcgccacccggaaaagtctgcatatattgaatttggaatggatcaaactgcactgagtgcaaaattgtaaattgcatcttatataaatgttttagaactagatgatggagcagatgggatctattaagagaacggggtgccagatgactgaccataaacatgctttttaataaagactctgctgagagattaactcat

SEQ ID NO: 146235 - DNA, 286 bp, Homo sapiens
tggggctgggttcgtttgaatgcacatttgtttttgttttaagaggaagatggtcatcagagttctacgttggacatgttgagcctgagctatccaggagaaatccaagaggagatatgaagtaaactattgaattaaggctgggcacagaggctcatgcctgtaatcctagcattttgggaggccaaggcgggagaatcacttgagcccaggagctcaagaccagcttgggcaatatagggaggccctgtctttacaaaaaatttaaaaattagccaggcatggt

SEQ ID NO: 146236 - DNA, 305 bp, Homo sapiens
cacagacaaaatttcaaacttgcagtcaaaaccataaggccctcattggaaataaggcaaagcaaagccagcaagaaataacagacaattaaatcagatattacagatttcaaatattagaattattagactgaaatagaataatatatttgttatgcataataaaataaataggaaaggaaaatttgactaaggaataagggactataagattggtcaggcagatttaggaaaaaatcaaatgaacatgtaggaatacaaaaattgatatttaaatttaacatctgtgttataaataggtataa

SEQ ID NO: 146237 - DNA, 474 bp, Homo sapiens
acacaagaaaatatattaattcctccttgtcttttgagatttatgggtgtgcagaggtactgtaggtcccatgtcctctagtgtatcacactgtcctgagctttaattcaggtctaagaatgtctgtcctaccctctcaaaaatattttgaatggaataaatacctcctagttactgtctctttctttttgtagataatttgcccctttggctgacattatctttcttactaaacaggagtagtttttatgacagcatttggaagatgctgatagttaattattcatccaatgtctattaaaagggagaggtggtaaaaaacaaaacaaaacaaaacaaaacaaaaaacagttactggctgggtgcagtggctcacgcctgtaatcccagtactttgggaggccaaggcgggcagatcacaaggtcaggagatcgagaccgtcctggataacacggtgaaactccgtctctact

SEQ ID NO: 146238 - DNA, 308 bp, Homo sapiens
tagttggtctcttgaactcaggggctttgtcaatatggaggagacttgttaatattgtaactggaaatgatggagttggtaaagttgaggccattattaaaagtggctatgatgatgtacaaattagtaataaatttctacttttttctgatgaaaacaatcagaaatctcaaaatttccactttgcacaggttataacaaaatagtagggattttatgtccaaactagtcataattttctgtttttattgattaaaaagtagtgatcagaaatctcagtttttcttctaattttttttttttttttt

SEQ ID NO: 146239 - DNA, 360 bp, Homo sapiens
cttccagtttcccctcctccaggcacccacacggttcatcctggaagcatttggctatttgagaaattacagaaggaaaatttttgccacaaagaaccacaatctacctaataaatatctgcatctggaaagaacttaagtaaatctctaatggagtaaaaacgtgtgacatttgcttagcagtcataaatcccctgaactcctttcctggcctgtaacgatggaactcgcccacctgtgtcttcagcaagagtcacagtcccgaagatcacataggaaagattcccctgtgctgtccgtcacccccaggttggatcagctttgccgggtcagaagccagaagccccattaacttgtggt

SEQ ID NO: 146240 - DNA, 811 bp, Homo sapiens
tcctctgcagtggggaagtcgcgtttaggaggagacagcttatcatctgattgaggatactggcttctttccacacttgcatcactgtcttcaagattttttctaacagtctccaactgcggtgggctagatgtctgaacactaccagaattggaaagttctatgcagatattctgatcagaagatggaacatggtaatcctttgaagggtcatcattcttcttagttttatgaacatttgcatatattggaatatcttgcatttttgacaagattatctgtaactgtttaagtatcctcctacggtgacctgtaggtgatattccaattttctgcagcaggctgtcatttattgctgcacagtccttcacagtagtaaaaccagactcatggaaatgtaagagatactgctccaaattaatgctcattaggaaatcttttatatccacatttacttcactgactgaggacataatggtggcttcattactaagctgagttacaaaaagtggcacgatgagacacacacacaagaagatgtacttctctactggcttttcctctatcaattgtgacagaaaagtttcttaaaatgttattttcttcacagtgactgctttacctgcttaagccttgcgctcgggtcgcggagttcgaaaagcgaggtgaggcggcgctgggaagctcagcgccggcgtctctcccagccttgggcgctcggtcctcgcccctctgccggaggcgccaggcctcctctttcccggtccccgccggctgtccgcagtcgcctctgctgcctggcggcggccgc

SEQ ID NO: 146241 - DNA, 726 bp, Homo sapiens
agacagggtcctcccacccccgcgtgggccatcccggcccagccttcccgaggccccgggtactcgccttgcgctcgggtcgcggagttcgaaaagcgagacagggtctcactttgtcacccaggctggagtgtagtgaggcaatctcagctcattgcgcctccgcctctgggtccaagctatcctcccacgtcagcctcccaggtagctgggattacaggcgcgcaccatcagccaagacatagtctcatcaccctgtcacccaggctggaatgtagtagtgcaatctcgggctctctggaaccttcaactcctggattccaggtgattctcctggcctcaggccttcctggagatagactggggattaccggtggccaggggatatttctggctggacacattcaacattccaaggggatgtagtgtatggacggtctcttaagagatgtcctgggagtggcatggtagaagggactttttatggagaactacttctccaaatcactattcacatcctggtagaagtcaagccatgaagatggcacagaaacacattccaaatactatggataccataaagtatactgtagcaatgcattggcacaccctcatttgaacatttgtctcagaagaattttgacagaagataaaattgtctggctttttatttcaattggctttcatgaaacctttatttcactggctttcatgtcacaggcccag

SEQ ID NO: 146242 - DNA, 244 bp, Homo sapiens
cgctctggcgtcctcagaccctgggccttggtgtgtcctcttagcaaccagggaaagatgtgccgatctcaactgagaaaattaaaggatagcactcaagtctgtagagaaaattccagtgcctcggttctgtaggatctcacctgtcctctgggacccaccctaaaaagtgtttcttacttgaaagtttgagtaacatgcatccgacgtataaagaggacttagaaacagaccttttatcaca

SEQ ID NO: 146243 - DNA, 258 bp, Homo sapiens
gaggagggtttaaaaacagagagaaaagaagcaagccttatatctccaggcatttctcttctgctggcatgtcaggaaggaaaggagggcaactgcctagatgttctatcaaatccaggcaaagcacccccagactgggccattccctctgaggctagcccaggcagcaaaagaaggccaagagtcactgggcagcaccaaggccagttcatctttggactccccactcccaaagccctgagcttcccaagttaggga

SEQ ID NO: 146244 - DNA, 305 bp, Homo sapiens
agtttgtgcattcctaagataactctgttccttgttctctgatcagtgactttcaggagaaaaccatttttccttcctcagaggcacagaacttttattgtctttaagcttaataattcatagaaccttgctaatcctttgtggttggattattttttcttatccatgtgtcccattgccagtcgatgttttgttcttactactttaatttccattatcgcgtgccattttattttaatttttatatattttgagacagagtctcactctgtcgcccaggctggagtgcagtggtgcaatcatgg

SEQ ID NO: 146245 - DNA, 424 bp, Homo sapiens
cccctcagaagcccatgtgggttttgtggttgtcacagccctggtcccacagggtacattgctttgaactgagttaggaactggcaaccacaaatcatcctcatccgtaaggagttgggatttcttcttctggattctgttaccaatttgtgagttgagagtaaagatattagccttttgtttgccatattggcttcaaatattttccaggtattatgttgcttttaattttggacaaggaactttatatattaagtgttaagttttatcaaattataggtgaaaatttctcttatgatttatttcatgaccattatgattagcattatcttcaaaccaaagatttgatatatattcgttcatattttcttctagttttttttgtttttgtttttccatgtaggcttttaatttacctgatatg

SEQ ID NO: 146246 - DNA, 185 bp, Homo sapiens
ccttggttcctgaggggcagggaggaagggcgcaaactcagccaggatcttgggtgtgaactcagatgccaccagtttccagctgtgtgatcatggacaggaggcttccccctgccacccctccgttttctcatccatgacctgagggctgtgaagcactttgtacctggtgggtgccgataagt

SEQ ID NO: 146247 - DNA, 169 bp, Homo sapiens
ctacagtacatgagagcccatcctctctcccccatcccttctacctcctgtgtttcctccctgattttttgtgtgttcactctttggatgcccttgcacaaaatgtgctccaaattgttccttacgtgatgaagacagaagatcattcttagcttattattacttgctg

SEQ ID NO: 146248 - DNA, 482 bp, Homo sapiens
  misc_feature (7)..(7): n is a, c, g, or t
tatcgantgccacctgcctggtcttagtatttcttaggaaaaatgaaggttggaagccagggcaaggtgggctccaccccccggtatcctatcacttcgggaagctgaggtgggaggatggcttgagcctaggagtttgagatcagtctgggcaacatggcaaaaccctgtgtattagttctcttgctgctataaataattaccgaaactgggtaatttataaagaaaagaggtttaattcactcacagttctgcatggctggggaggcctcaggaaaggtggaaggcacctcttcacagggtggcaggagagagaaatgagagctgagcgaagggggaggccccttataaaactgtcagatcaaatgagaactcactgtcataagaacagcatgggggaaaccacccctgtgattcaattatctctacctggtcccacccttgacacatgggtattgtgggatctggccagcagcccgcaa

SEQ ID NO: 146249 - DNA, 339 bp, Homo sapiens
tctttcctctctatggtaaattctggcagctgatgatcatgttataatagcattcatttgaaccctggaagcaccagactcacaggagagggttctacaaatagataaccacaaataaatccctatgatcatcctaatgtgacagagaacagaaatgtgagcttgactatgtgtccattttcattgtatcatgattttcattatatcctattaggtttggcatcatttctttaggctttaggtcctggctacagtatttattttcctgtgaaaattattcacacagtgaatctgaccctgttgagaacctccatttgaaggtttgcatggggatcaagt

SEQ ID NO: 146250 - DNA, 208 bp, Homo sapiens
cagagtttcaaatacattttataaaagaaaaatataagtgaatttttggtcttttaatttaacacataatagcaaaatgtaaccatatttttatatttcagctaaaagcaactgggcaaaatgaccccgaggattttctgtgcatctattcttaagagctacatctgggccagctgggcatggtggctcatacctgttaatcacagga

SEQ ID NO: 146251 - DNA, 763 bp, Homo sapiens
gggagtcttagctagagcaaccagccaagaaaaatacctaaagttatccaaactcaaaatgaagaagtcaaattatccctgtttgcaaatgatataatgttgaattcaaagagttttaaagacttcaccaaaaaaccattaggactgataaacaaactcagtaaagttgcaggatgcaaaatcaacatacaaagtcagtagcatttctatatgtcaacagcaaataatatgaaaaataatataagaagtaattccatttacaatagccacaaataaaattaaatacctaggaattaacttaaccaaagatcttaaagttttctacaatgaaaatgtaaagcattgatgaaagaaattgaagatgacataaaaaattgaaaaaatattccatgatcatggattgaaataatcaatacattaaaatgttcatactgtccaaaacaatctacagattcaattaatataaaaatatcaatgacattcttcacagaaataaaaaaaaatctaaaattcatgggtaaccacaaaagacccagaatagccatagctatcctaagtgtaaagaacaaaactagaggaatcacattacctgacttccaattataatacagagctatactaatcaaaacagcaaggtattggcataaaaacaaacacatacaccaaggtgacagaatagagaacccagaaacaaatcctcacatctacggtgaactcatttttgacaaaggtgccaagaacatacactggggaaaagagagtc

SEQ ID NO: 146252 - DNA, 331 bp, Homo sapiens
tccaggagattatagatgcccttagaccttcttccctggctcctcccctctgactgttgccatacagtctaactgtaacacgtcctcctttatacgttctccctgccagccacacagcagtcagaatagtatatctgaagggccctgagttcactcacctcacctatccaatacccaggctctctacaacacagtcttaccttaccttcccagccatttctaaacaccctacatcctagtcaagccaagcaggactgattgcatttccaaacacactagatactctgtgacagtgttcctctgcctggcatgccctcctttggatcttgcc

SEQ ID NO: 146253 - DNA, 356 bp, Homo sapiens
tctaatactttggggccatttaatttcgagacaaatagttttacagatttcggtggctcctaataatgactccaaatcattaaaaataagattaaattatctacattgtatttaagagggccgagtatggtatgaaatatgtatttagaaaactctccatcaaatttttttttttttttgagatggactctcgctctgtcgcccaggctggagtgcagtggcgcaatatcggctcactgcaacctctgcctgctgggttcaagcaattctcctgcctcagtctcctgagtagctgggactacaaggcgtgtgccaccatgcccgcctaattcttaatatttttagtagagatgggg

SEQ ID NO: 146254 - DNA, 679 bp, Homo sapiens
acctactcctgtgataagcattaattgtctgtagcatggtatcaagaaaatctgtctgtgaactgagtttagggctgctttttaaaaaaatctcatatcttgcattttctgaactgtttttggtgtcggttttggcatggatgatgttcatcagatgccggatcagatagcacaaatattcaagaattcgtaacccataattccatgtccatctattggtctgatcattttttgaggattctttttaagaacaagattattttcatttttaatgtcatgagcacattaatggtaacttaataatattagtacaattagatgtccatatgcgacaaaaaaaacctaacctaataacatcttagagaataatcaactcaaaatgtgtcatcgatgtaaaatataaaactataaaacttttagaagaaaaatgtatttatcatatgacccaagaagtaccactcctaggtatttaccctagagaaacaaattttgccaggcacgatgtggctcacgcttgtaaccccagcactttgggaggccgaggagggtgaatcacctgaagtcaggagttcgagaccagcctggccaacatggtgaaaccccgtctctactaaaaatatgaaaattagctgggtgtggtggcgcgcgcctgtaatcccagctactcaggaggctgagg

SEQ ID NO: 146255 - DNA, 344 bp, Homo sapiens
caaaggacatttgaggtttctgagaaatcatatggtgggtggagactttaaaacactgatctttctttactttctgtaccctcataatctttggcactaactgcagctgctgggtttagggctcagggaaaagccaccacccctcttagaacccaagaccccaggctggtatggatatggaatgtacacgtctctcttcttccccactccgctagtttaagcagagtgagcctgagtgcctgagtcctatgtctattaactttttgttgtcagctccactggtaatagtgcttcaaagaaatgaacgtcttaggatccttcttagaagcatgtcgtcacgattg

SEQ ID NO: 146256 - DNA, 443 bp, Homo sapiens
cccactaaattcctagaggcaggcagaaagtctacattctgtttatttggaattgctgacataaaagattatgcccacagaaacatgtcctgagtcttgatgaatcaagttcataccatgtaaagcctgagctactgcactggtgaaactattctgcaggcagctattgagtgacatatggtcacataaactttgtaccccacaaaggcagagactctaaagccatggaattcctgagttcaaactaggaacaatctgtctgcacagatgaagcatgcaaacacatgcccaggcccaagcatttctcttcaatgccatcttgatgccatataacgtcttaccctgaaaagaagaaagacttaattttaagtctcatactgccccccactatctagactccttcctcctgccctagtcaatgtttactaaaatccccttcatcc

SEQ ID NO: 146257 - DNA, 382 bp, Homo sapiens
ggagtcaggcagccagggtcttgagtctgagttccctcatctgtaaaactttcataaagtaagaaagcatatttaagacacccagcacaatgcctgagacaaacaggtgcttagtaaatattacctgttattatcgttatagatcataggcagccataatctaagttattcatcgtcagtgttgtaatttaagaaacaatcacaacactaagttgtaccagcggtaagtcacacaggaacttgggtggtgattagtcatccacagacatggacactgtataaatgacaattggctgtcctgtctctgggaaaaagagcaacaattataaagcctgtgagaaacaacacaaagcagtatgaagaaagttgtgggtgctttctc

SEQ ID NO: 146258 - DNA, 254 bp, Homo sapiens
tttttcttttggttttgtttgtttgtgggttgtttttaaatagttgtaatagccctgtctcctcacacctcagctttagctaggaggactggcactcctcagaggccagcatggaccagagccaagcttttgctgtgtatagttaatgcctcttgacttgcaggcagttgtagcaaacctaactctcttaggttaaagctgatggacaaagaaggcacagccccaggactttacagctctacttattccaagga

SEQ ID NO: 146259 - DNA, 444 bp, Homo sapiens
gacaaagagacgctgtgatgatctgactcgaaggatgcgcagagatggttggccagctatgtgtatccatggagacaagagtcaaccagaaagagattgggtacttaatgagttccgttctggaaaggcacccatccttattgctacagatgtagcctcccgtgggctaggtttgtatagataggtgtctctgtcaatggtatatgtatcttttggtttaaagattcgtcatttcaaattcagacttcaagtttagaaagttgtatatacatgtggttagataaatatttgaaagaaaaaaatacaaagcgtgattctccccattccctgcccccccccttttattttcaaagtctcttcctgctcctaacaaacaggctttggtctgcagcaaggcctaggcatgactattcaaacagagggagaggagacagacagctgaat

SEQ ID NO: 146260 - DNA, 351 bp, Homo sapiens
catctctactaaaaatacaaaattagccaggcatggtgcgcacgcctgtaatcccagctactgaggaggctgaggcaggagaattgcttgaacccgggaggtggaggttgcagtgagcctagatcgcactattgcactccagcctgggcaagagcgaaactccgtcttaaacaaaacaaaacaacatttaacctcattatactttaattttctcctctataaaactatttcatgtcacgagtacatacatacatttgtaagctgacacattataagtgttcagtaactgttagtataatagtattatgtatattacagtgagtgaattaagatcaaattgacgtgatattt

SEQ ID NO: 146261 - DNA, 690 bp, Homo sapiens
ggcaggggaatggaggaagatactgacagggtacagaggaggtagaatggagcgagggccatctccaccgggctaggaaatggggctttggtgggccacactccattgtgctggagcactctggcatctccattggcagtggggaggggcttgtgacctatcagcatcttcaccctttctgagtttccgccgggctgggctctccagccaggagtcacaggtaccgggtggttgttcatgctgaggccttttgcttggcaaaaagttaatccatttgtgttcatttttaacctaagcaagggttggagcttgttggattcagcatctgtggaacacagtctgtagcccatgggaagacgtggacattctttcccaagttcttgaaggacggaaaggaccatgaacttgtgaggtgaccggaggattggttttgggtgtcagttttgtgtctgtcccagtgctgccacttttgctttgaaatggacggggagagctgaaggccagcatgggtttctgcacctgtttcctacagctctgctggggactgtggctcaggtggcagctgtggacacggatcctgtcagcctttgggtggccagagctccaaggccaggtgtctcttagctgcaagcagccttcactgttaatcaacaggctacacaaatctcacctctaaagaggtgaaatgtg

SEQ ID NO: 146262 - DNA, 252 bp, Homo sapiens
ccctttaccgaggaaactgaagttaagtaatttgtccaggtttgtcttattaacacttccttaatcactctacttattcaagtagcctttgaagctttgtcacaaaatcaatgtttcacaaatttctataaaatcatgacattagagaagcacctaatccagcggtccccaaactttttggcaccagggactggtttcatggaagacagtttttccatggactgggagggcagtgggcaggggttggtttca

SEQ ID NO: 146263 - DNA, 339 bp, Homo sapiens
acctgagtgacagatgagacaaatatattggcagaacttgttaaattctgtgttaaaatgctcggcccagctgatatgagtttacttactctgctgctatcagcaagtgatgctggaagagtctgcttctttccctgtttatagttttctccagtttctgactctgaaatattagggtcgcataactcattctgtgttccagtaacattttagggctccatttacctctcgtatattgttcttttctgtaacaatttttctttgctttctgcttttcacaaatggaaagtatcatgaaaccttttaaatttatatcttctaataagtcttttctagaca

SEQ ID NO: 146264 - DNA, 366 bp, Homo sapiens
actagagtaacaccatcctgctctgggctgttcttcagggcgtttacagaccttcagcagcccaagaaagaaaacccactgaaaagatcaccccaacacgtgcatgcctgagaccaccagggaaaggccttctgatgggctcagcttgacccatgagggtcgcagactcaggagcatttgctgtcaacaccacttacagggaggactagagacaaatgtccattgttagagaccctggtaagggaaggaaaagcggtgcagttgcttaaaaatgaggacatgggttcacatctgatgctgaaacacttccaagaaatgctgagttaaaaaaaaaaatacacaccgaagcccagcagccactgtgcc

SEQ ID NO: 146265 - DNA, 290 bp, Homo sapiens
aggctctgcttctgcctcactggggagtgaggatcacagaatcacaagataccataataaggatggaatgtcaaggccattcataccccagccaccctcaccctccaagaaacaggtcttgcccttcaatctctgaagtgccattcttgctaaatgatcatctttcctgcctctgcttgggccccttctggggacggtgatttcatgactctgttttagtcctcctttttagtctcctatggggcttcagtaagttcctgggtcagtcgccatttataccccaaagccgg

SEQ ID NO: 146266 - DNA, 259 bp, Homo sapiens
taccacctcagcctcccaggtagctaggacttcagacactcgccataactcccagctaatttttgcttatgttttgtagagatggggcctcactgtgttacccaggctggtcacaaactcctgggctcaagcgatccacttgcccatgaagcctcttgtaatcccataaacctcattcacaagagagcaacccctctggcctaaacacgtcttaaaggccccacatcttaataccattacattggccattaagtttcaa

SEQ ID NO: 146267 - DNA, 1125 bp, Homo sapiens
cctgctatatagcaagcagtgttgaggcacggggtacatgaagatgaataagctgcagtcctgattctccaagggttctcaggtgaatgggaggataatggaaggaaaccacagcaaagaggggtggcctttatcacttgggcaatgggaaatgttgagggggataaataatagatttttgctttaaagatttttctctaataaaagtacagaggaaattgaaagcaggatcagatagatgaatcaaggcttcttcagattcagtggtttacaaatatacctcaaaattcataaacaaaaataatacgtaaaagagaacagaaggtaacgcaataaaggtaacagagatagtgtcttcagtatataaagagatctgaaaaatttaagaaaacactagcaatgcaaagaaaaaacagacaaaagatttggaattcacgggaaaaaaagaaatggtcagtaaaaatgcaaaactgtttaagcattatattttaaaaatacatatttaaacaactacaagttactgacttcaccccattagattggagagcgtggagtaagtcagcactgacactgccattgggaatgaaaaataatgaaatccttctgaaagcaattttacaatatgtatcaagagtctccaaaaatattacatcttcaatctaaaaattctattttaaatcaattattttccctaagaaaatagaggtgaaaaagtttataagccaaaatattcaatgtaggataacttataaccaagaaaaggggaaacaacctaaaacaataataatagagtggctaaatatgttatggcctaccccatcaacagactattatatgatcattaaaaatgaaaaagagaaagtgttccctatgtgctattaactatgaaagaataagaatgatacaaaattgctttcatattataatgcccataggatcattccagtgtgtatctgtgtttgtgtagatgaatgaattctagttaggtaggcaattattcatgaacaaaggattaaaagaataaaaggaaatataccaaattgttaacagtagttattaatttactagaagttttctgcattaaaaacgacccacagaattgaacaacgagaacagttggacaca

SEQ ID NO: 146268 - DNA, 431 bp, Homo sapiens
attgccttctataaaaaaacattataaggtacttaattatatatacattccataaagtctcatgcagaattttctagaccattatggatgtggtatcctttgtttgccgcaatgtgggagataccttgtaattaattatgtagtactttgtatttttgcggtgttttatcatatattatcttttgtttcttataataaccttatggaatagatagaggtgatattaaatatacactgctaacaaatctagtatctgagaacccttctacttagtgaatattttaagaacagtggtaaaaaattaatggaaagcagggcattggggaaccattgaaacattttaaaaggggagtgatgtagtcagaagatagccaaaagaatgtatctaaaggtcaaagtggggtgaggaacactgttatagtgaatcttta

SEQ ID NO: 146269 - DNA, 371 bp, Homo sapiens
actcaggtttaggctcagcgagatatcacaatactgcgcctttgagtggcacagaactgccattgcaatgtgtgaaaactctaaagtggctatttagtgcaatgggatggatgtttgtgcagctaagtataatggacaatgaagaatgattttatctccttttgagaacataagtatactattctatatttatccctcccatctcctaatttagacagggaagaactttttctgatcagcacccacttgccaataatttcgctctacatctaaatggagaacaggagtcatataagttcacagattgaatggatggttgatttacgaagcccttgaaatgtggctgcaggccgatgctggcaaccccataa

SEQ ID NO: 146270 - DNA, 301 bp, Homo sapiens
  misc_feature (257)..(258): n is a, c, g, or t
gcatggtggcgggtgcctgtagtcccagctactcgggaggctgaagcaggagaatcatttgaatccgggaggcggaggttgcagtgagccaagattgcattactgcactccagcctggtgacagtgtgagactccgtctcacacacacacacacacacacacacacaaaataaataaataaaataaaaattattagtatggggataatcagaacagtggttgctgttctagagggaagaagattaactgaaagcacnncgaggtagaagcacccgcgagtagaaggtaccggctcgatcgt

SEQ ID NO: 146271 - DNA, 372 bp, Homo sapiens
gcatggtggcgggtgcctgtagtcccagctactcgggaggctgaagcaggagaatcatttgaatccgggaggcggaggttgcagtgagccaagattgcattactgcactccagcctggtgacagtgtgagactccgtctcacacacacacacacacacacacacacaaaataaataaataaaataaaaattattagtatggggataatcagaacagtggttgctgttctagagggaagaagattaactggaaaaggcaaggagggtggctcaggcctataatcccagaactttgggatgcctaggcaggcagatcgcttgagctcaggagttcaagaccaacccgggcaacatggtgaaacccagtctctac

SEQ ID NO: 146272 - DNA, 203 bp, Homo sapiens
atgcaataaacatatgagtgcaggtgtttttttggtagaacaatttctatacccagtaatgggattgctgccattgaatggtagctctgtattaagttctttgagaagtatccaaattgtgttccacagtggctgaactttaggactgttatgaataatgccgctgtaagcaattgtgtacagctttttgtatggatgtgtgt

SEQ ID NO: 146273 - DNA, 526 bp, Homo sapiens
aataaacttatacaatagcaaaaggtcccctcaaagcaagagctatggattcaaatatgcctctcaagcgcaagtgacagccaaaaaaggtacaaaaagtgcaagggttgcaggaggggctcaaaggagacagggagatccttacgcccaattctgccaactcaagaatgttctgctctgtgtaaatatttcactctgttgctctgccgcttagaaacagagtgggcttcaacagcccacctcatcagaaaacagctccctcatcatgtagcatccaagctagatggtaatcaggagaaccacatgtaactcccctctcctgagtcacacccagatctgcggcatgtgtcattctatccacctgcacaggcccatggaaggaaggtactcactgtgagcactgaactcctttccatgttttattgtgctttgccttgtaatctataactaaaatagacccagttttaaaatattttttacaatgcccagtcactaaaaattaatgagctgccacagtaaaaaaaaa

SEQ ID NO: 146274 - DNA, 251 bp, Homo sapiens
agacccatctctgcaaagggagtgactgtaaagaaacttccactcctgcctctgcagctggcttgtgcctacggggcaaaagctcaggcagtaggtggtaaaggcaagcccagagcccagccagccacatcagacacttcgaggaggattacggattggctctgcagtcctgcctttgaagttcccagcttttatcagaatgtctgaaccttagcgttatttcaagggagcttttctttctgtctgtaaac

SEQ ID NO: 146275 - DNA, 336 bp, Homo sapiens
ttcatatccctggcaagatctcttccccacaaaagacataaatgtatatatgtccaccaaagacatgtacaagaaagctcatagcagctttatttataatagccccaaaccataaacaacccaaatgttcattaacaatagagtgaataaattaactgtggtataatcatacaatgggatactacacaacagtgaaaacaaacaatttacaattgcaagtaacaggaggaataatggtcgggcgtggtggctcctgcttgtaattctagcactttgggaggccgaggcgggtggagcacctgaggtcgggagttcgagaccagcctgaccaacatg

SEQ ID NO: 146276 - DNA, 713 bp, Homo sapiens
cttcctcttcctagcgagaaactgcatgcggctgcaggtcctggagcttgaccacgtgtcagagatcacccaggaggtggcagcagaggtctgccgggaaggcctgaagggactggagatgctggtgctcacggcgactcccgtcacccctaaggccctactgcacttcaacagcatctgccggaacctcaagtccattgtggtccagattgggattgcggattatttcaaagagcccagcagccctgaggcccagaagctgtttgaggacatggtgacaaaactccaggctctgcgacggaggcccggcttctctaagattctgcacatcaaggtggaaggcggctgctaacccgggtagggggcggcagggcccctgccagccccacaccagggcactctctttggacctcagagggaccctggtttggactagacctttggaggccgagtgttatccctggcttctggagggggactgtcaagtctcctgtcctcctcctggagcagcagagcaacaggcctgacccagggcactgcctccccagtacaggggcttggacagaagctgccctccgacccccaccctaccccggctggagtagcctctggcacagccagtgaggagctgtcaccaccagcgcctggtgtcatcacctggaggatctgcaataaccacccagtggctcctcagctgttctggctggcctctc

SEQ ID NO: 146277 - DNA, 303 bp, Homo sapiens
caacgcgttgtatggatggatgccctgaatattctgatgatttgggttcgacttcttttcttttctacctgaggtgggtgagctacaatgactctgaataatagaatcaacattatattatctagttaatataaaatctgaataaaatctaaggaaatcttggaaagcaatattttcataaaccatatcatctgttgccgaactccccacacatacaagtactatggaaaaagtaatgtctactgcccaggagtcatcttatagaaaccacaattctagaagttgctgtacccacctggaaat

SEQ ID NO: 146278 - DNA, 700 bp, Homo sapiens
atgaagaattttttctaaattaggcatttcaacttttgtttgggtatgtggttactttttgtcccttttaattttcatcatgtttgcttcatgtttatgaacaggtgttgtttgaaaaatatcagaacatagcttttatagtgtggaaactatcagaatttacctttgaggtggatgtttatgtgctgaatactgaagaatgggagaaaggggatatgaacaacacaatgagctttagtgtggcttggaggaaaccaggcaacctggtttgctagttcattattgcagacttatttctgtaacagtttgtgaaatcagaaggtattataagaaaaactggaatgtaaccggaaaagatcctcaaaatttagcttaggatatttcaagcttctattttttccatatgaatactttttttaaaaaagagagagagattcataaataagattccaatgtttatacaaaatttttggaaactgaatactgattactgtaaagatgatatatctaccagtcagtaaagatgagctcctgtgagctttgggggagaaaattttgactagagattttgctggtaaaaatgaaaatagtcattatgaggctttggaaagaaaatgtaggaaacactgtagattgaactatgcttgaaatacaaagttgggagacactggtttttagtaatctatttaatctgaagtag

SEQ ID NO: 146279 - DNA, 241 bp, Homo sapiens
gaaagaaaggaaggaaggagaaagaaaaagaaagaaagaaagaaagaagaaagaaagaaagaaagaaagaaagaaagaaagaaagaaagaaaagaaagaaagaagaaagaaaagaaaagaaaaagaaaatagtgaaaacgtcctctcacaggcttcattgccattcctcaaaatgtagcctttttatcaggttattttctatctttatagaccttccttctttctcttatttcggccaggt

SEQ ID NO: 146280 - DNA, 216 bp, Homo sapiens
agagaaagaaagaaaaagagccttccttctttctctttctttcgaaagaaagaaagaaagaaagaaaagaaagaaagaagaaagaaaagaaaagaaaaagaaaatagtgaaaacgtcctctcacaggcttcattgccattcctcaaaatgtagcctttttatcaggttattttctatctttatagaccttccttctttctcttatttcggccaggt

SEQ ID NO: 146281 - DNA, 463 bp, Homo sapiens
cacacatatacgaggagaaaacacctggttatatagctgttttgtttgctcaattcagataaaaggttatatacctttttaatgtagttttgacttttgaactatgtagatattttatgtattcaaaaattaaataaaggagggaaaaaactaaattaaatacaaaccaaaaaaagcgaatctaggctgggtgcagtggctcacgcctgtaatcccagcactttgggaggccaaggcaggcagatcacgaagtcaggagttcgagaccagccctaccaacatggtgaaaccctgtctctactaaaaatacaaaacttagctgggcatggtggcgcatgcctataatcccagctactcaggagactgaggcaagagaatcgcttaaacccaggaggcagaggttgcagtgagccaagatcgtaccattgcactccaggtgggcgacaaagagaaactccatctc

SEQ ID NO: 146282 - DNA, 428 bp, Homo sapiens
aacactcattctttcatgtagttaccaacaaataaataggtgactttacagatcagaagagagaaaaccggttcatttatttaatttctcacaccttccctaaggagccagcaaagaaaaaataagcaggggcaaagagcccaggctgcactccacgctggcccccatgtgacgaacgagggctctgccactcttccggtctccacatggagctcacgaagccactccagaatgtgccacatgctccttccatggaaaagtcaattcatttgccacagatttccaaagcatccaaatgacaaacagagcacagccctagtcacccctcacaggaagaaggtgggcggagtggcactgatacatgctccagtgacccaaaggctgtgggatggcagcggagacttctctttcttgggagcggcaagatg

SEQ ID NO: 146283 - DNA, 260 bp, Homo sapiens
caattggagatggcttcatggagaaaaggaggaggaatatggtgtctctttgggacttgaggtcatgtaaaactgatgttagaagaaacatgtaggtccctgtctgaggcaattagaagcaagttcaaggaaatcatcttccacttaatctttgcttatgctgaatagtttgagtgaatgatgtcacagggagttgaattaccaaaatgctcacctgccttcccccatttctccctcccttcctccttccatccttcttt

SEQ ID NO: 146284 - DNA, 456 bp, Homo sapiens
ggcgggtgcctataattccagctactcaggagactgaggcaggagaattgcttgaacctgggaggtggagattgcagtgagctgaaatcgtgccattgcagtctagcctgggcaacagagcgaggctctgtctcagaaaaaaaaaaaaaaattaaaaaaaaaattgcaaaaccattaaaatgtaaaatacctttgatactagaattttgttttgtctttaggggacatatgtgggcctttgggttagaaatactttttgatacagattttaacaggatttacgatctatgattttatttgaatattacacttcaaatgatacctcgccaaaccttgtttgaaaaataaagtgatggctgggcgcagtggctcatgcctgtaattccagcactttgggaggccaaggcgggtggatcatgaggtcaggagttaaagaccgtcttggccaaggtggtg

SEQ ID NO: 146285 - DNA, 729 bp, Homo sapiens
ttcggatagcgtcgggtgttcgcccccgcggacgcagcccaccctgctttgccggcgagctgccacctcctctggcccagtgctgggcctcggtccggtagagggagcccaccggttggccccgcgcgcggccaccgccgcctcctcctgtccagtcttcggtctctaccctagccccgcggacgcagccgactaggcccggctccgcgctcggcctcctccctgctccaggtccttggcctggccccgcagacacagcgcacccgctcggcccctagcgcagacaccgccgcctcttggcgccaggtcctcggcctctcccaagtggacgcagcctggcccagaggggccccagagaactcgggcggcttgagtaacccctgatcgttgggagagaacctgggattttttcccttctttctagccaaggctcatggagagcgcagttactattctaatgcaatgacttaaaataattaagcaacataaattatgcatgttgggattaaggtgcaatgttttcccaaatataagccacgtgcttcatgaatgattaaccgaaatagttaacatgaaaaccagtaagtcagctgagaagaaattgtggatccaccgcagtggaggagcgcaggaaggcgcctacagactccctagtgctttagtccaaggtagaattgtgagggccaccagcaacacatgtaaggtgtttggaccttacccacggcaaga

SEQ ID NO: 146286 - DNA, 695 bp, Homo sapiens
ggaaaatgcaacatttgggcaagaaggcagaagtgccttcctcacttaggtcttgggagtagagccctagccaggggccacgcccttcctctacccagcttttccctccccaccttccctatcatttaaagggaccatgctcttctattcccagcactcctgtatcacttgttgcctaccacctgcgatgccctgtttgagaagcatgattagaaaaatcccagcaatcttttctgtttctagtggtgtggactcctgcttggaaggcttttcttgtgattttttttttcccccataatgtttatattctgtgttttcctattcagttataatgagttcagttcaggggagaatgaggttcaagtggactgtgcttccctgagagagcaattgagtgctctcctggtcacataggtcttgcacttctggagctctaaatggaaccctcccagcatatccaggtccttcttagagcccgactgcaggccaccctgtccttcagccgtgtgattttacggttttactgttcagcttcagcatagattctacctggaagcacaggggtgtgtggtcatcttttcttcctggaaaggtcccttttggtgaatgattgagttcccaagccaatttctgtcccagagggaggttgtttcagggactggttgggaatggcagtctccactgactccatggtg

SEQ ID NO: 146287 - DNA, 481 bp, Homo sapiens
ttctcctgcctcagcctcccgagtaactaggaccacaggcgcgtaccaccacgcccagctaatttttttgtatttttagtagagaccgtgtttcactgtgttagccaggatgatcttgatctctccacctcgtgaaccaccgcctcggccgcctgaagtgctgggatcacaggcatgagccaccacacccggcccctttaattgattttaattgttcattatccagcagatatttactgaacaccaactgtgtgccaggcactgctctgggttctgaggatacattagtgagcacaatagactatccatgctcactcttcacagttacattctggtggaggagagacagtaagcaaacaagacatgaagtcatctggaattaaatgctatgaagaaaagtgaagcagtgaagggggatgaaatgtgatggaaggtgctaatttagatgggatagtcgggaagggcctctatgaggaggaaa

SEQ ID NO: 146288 - DNA, 227 bp, Homo sapiens
ggacctcctgtaagatggctcctacgcgaccacgctaccagagaatcagctctacgtgccaccaacattgccaccaactgtccatagatcgcctgcgtgcctcagcccactgacactcgatgccggactgggccagaaggacgaccccatatttgatgcctttttgtctccctggaccagagactccatccttccctttcctcccacgctcatttctttttctttag

SEQ ID NO: 146289 - DNA, 303 bp, Homo sapiens
tgtggggtccagtccctgtctgcatggataattttagtggcattatatccccatccacctcctccctccagctggagcgacttccagccttgaattcctctccatttttgcacttgtctaaataatccctttcgagaggaggatcagtgtcactgggttgacaagaatcagccgagggggagggcaggtgaagatgactgcgtagcatccgctgagaccaagtttcaagagggaaaccaggactcccccacccttccacccacgggtcctttctcacactgctcctctgggagtgtgtaaagc

SEQ ID NO: 146290 - DNA, 629 bp, Homo sapiens
ctacctccttttcactatccctcattttcctcatatcttcattttccttatttaatttaaattgtcaacatttatcatattcactaccttgcttacattcatacccttgccctctcatacatagtacttacgttggctaaattacagccataagtaaatttaatgatctttttattcacctgactgtgttactccaacagaaagccacagtgaattagggtcactttagattttaagagggcccataatgacttctggaaatgatttccttagtcctttcattctcctgctcatccagattgggtctttagttcaaacaatgggccagctccacctgtctattgtcgtaattaaaattttattggaacagagccttaccagttccttaatgtattatctatggctacacagcaaagctgagtagctgtgacagagatcatatggcccctgaaagcctaaaatatttactttgtggcccttttaaaagcttgtcagtctttctcctaaacaggtgtttcatacattctcctttccataaacctccaacacttcccccaccctgtatcaatcactgagcaaattgaagtaatcagacgagaaattcagtaagtttgtagtacttctgctta

SEQ ID NO: 146291 - DNA, 794 bp, Homo sapiens
cacaattttctagaacatggggtgcctcccctccccccagcccaacagaagttctacaatgactgatgggcccttgtttttgtttgagacggaacaccccacagggttccgagtggtgatttgtggcccacaggccactggcaagtggaggcagagctgcagagccctcgggagccacagagggcctgctggccgccacgacatgccaactcagctgctgctggccctcctgtgggcggcagtgctagtgatgtgcagaatcttaggactagtgccaaggaacctataaataccctgggtgacccaggcgtgcactgctgtggtggccttcacagtcagaagatgacaagctgagaaggggagaatcggcccaaggtgagatccacagaaaggccagggccaagatgcggccagcacctcaggctggtggtggtcttacgttgaccatgccagaggccagtccttgattgctccaaaccctctgttcgagggttccaaatgaaatgagcaggtcctcgtgtcaggacctaggttagtttctgaaaaagcatgaaaagcaggcctcctgaacttccccgagtgactgatgcaaagtgcgtcctgcatgcttcacagcaccatggagaggatcttcaggggcaaactgcagactatctgaatgacggcactgaccatcagcaaaccgcagagctgcctgaccaagaaattgcgagacagaagcaatgcttgcaggcgaagaagaaggggccagacacagtggctcacgcctgtaatcccagcactttgggaggcca

SEQ ID NO: 146292 - DNA, 756 bp, Homo sapiens
tccttctctttagtaaccttcatccacagtgaacaagatttacccttacctttaagcagtagcggctactttatgtgaagtgaacagctgctttttttatctgcatctagacatcaagtagtccagagtcctttctaacaccctagcaatagaagtaagaatattttgaccattccatgacttgatgatacttctagtaataatactgtattattaaaaacaaacaaacctttgtgcagtggtaattgaagcagttccttgggaacatgtattaagtactttttagcagttaagtccactctctgtaggttaaggaatatttaaataaaataatgtggcaaatgagttcaagatgataaatgcgatgagaactaaaacagctttaattttatgtgggaaataaatagaggaaaagtacattacagggctcctggacttatttctttcttcaaagtgtttctcctagcgaatattattactattttttctcttaagtaaaaaatacacaaagtatgaatctacacaggataataatattgaagttaaggatgatgtctcctccttcactctccaaaatactatttacttggcttcatggaaatctctctcactccaattccaccgtgtcaactgaggtcttctgttctttctctccctatagcatattcctgttacataaatcctaaactgtgtcgtgttagtcacacactgtaacctctagataagcgcctgtccagaggttctcaatcagagcct

SEQ ID NO: 146293 - DNA, 353 bp, Homo sapiens
cttctcccctaaagcttcgtagaagcctggcaggacagcagcttagtctcatcctagaacaagatttgccagtcaaatccttccttcccagggactagacagacagtgtgaggctgtttagcaacaggtttggggcagatttcctaaatctcctttctctccaatccgtcagcctggcagaagcaacctagagatgggatttagtctcattctgacacagcacagttccagaatgatctccctgcttgctactcaagccggaatcaagccagagcctacatacaggtcccaggatccagagaggaatgaaattgctttattaatatcataaggttggggggaagggaagcatg

SEQ ID NO: 146294 - DNA, 641 bp, Homo sapiens
tttgggatgttctgcgggggcgatctgtatgagggcggaggcacgtacactggaggttccaatccagggtctgacaggcagagctcatgcctggggacataggcgtccatctgctggctgtcctgagagtcactgctgtccgctcctcccctagactgctggtgcgagctgtaagatgggggcttgaggggcctcccaaacttaggccggggaaatggggctgagcagccactcttctcagaattcctcgtggagtccaaatttggtgcgcaagtgggaggatacggtggcattttaggtgaatgtctttcatttaatggaatgggaatttccgtgcaactcaggctctcgggggaaagaactctaggcagtgagcgagacttccctttgttttgagaattcaacacatgttctccttgaatgaatgggtacaggtcttgaaacagtctctccccatctccatcagacatctgcctccctaatttccttggctggttccagctttccaggctgacgttctgccacttggcaggacctgacattcgcaattcttcttcccaaactggcttcttcatcacatgctctgaccttcctccaacttcccatggaccctccctcacgtggacaggcaggctgtgggc

SEQ ID NO: 146295 - DNA, 339 bp, Homo sapiens
tctttttcggcgaatagtctacataaccgtcctgattaggatacatcgctggcgaagaactctaggcagtgagcgagacttccctttgttttgagaattcaacacatgttctccttgaatgaatgggtacaggtcttgaaacagtctctccccatctccatcagacatctgcctccctaatttccttggctggttccagctttccaggctgacgttctgccacttggcaggacctgacattcgcaattcttcttcccaaactggcttcttcatcacatgctctgaccttcctccaacttcccatggaccctccctcacgtggacaggcaggctgtgggc

SEQ ID NO: 146296 - DNA, 102 bp, Homo sapiens
tgctctcccctgcccacctctctgtagagggagcctcctccttcctcattctggggcatgttgaagcacatgtttctcctgcccaccagaagagggagccct

SEQ ID NO: 146297 - DNA, 401 bp, Homo sapiens
tgagaagaatgtttagttcacagtatcagaatctccagctacctaattcaaggggaaggaggtaaccttaagaactcaagaacgagaatgcagctggaccaagaacagactggaagagagtggcttaatgctgtcagagagtcaggtagtgttctctctgcttctctttagacagttactttattctccccatccataaatcatctttcttagtccccagacagcagaacataactgcttataactcccaatcctttacttagggtccttgagcatattaaggccaaatccttctctattgagcctagtttcaaatttccagggaagaaacgaacactgattgggccaggttggtcaggtgcccaacccgagttcaatgtattatgtcttttgtgtagaga

SEQ ID NO: 146298 - DNA, 1516 bp, Homo sapiens
gaatattgttaaatgttttcaactaaacagaaaagataattttatctaaactacagttttatcagattttactaccacacccatataccttttggtttgcacaaaatttaattaagtttaaagccagcttttaagactcacaacacaccagcagtgcacatgtcggttgttctcaggttcagcaagtcatcacattcttgcatcatgcacagtcgcacaaacatgcacaggtcagcgacaccatttacagtctgcgccatcttgcgcgggcgcattgcacacacaataacattcacatcatctattatgcaccagcgaggcaatcatcatctcatctatcacgcacaactgtctttcatgcaatatatggcatgcacgtctaagcagctcacgagcaactggccaggttcacatggcaccaacattgacgttaattgcgattcataaaaacagtcacaccactcgtccaatacaggtgttcacgcaattacactttgtataacatctgacaggcagctgatccccaagcaacattggcgatcatcattgggatcccaatatacgcgggcacactcacgacgaaacaaccacaaacatcccacacgtggcgactcatcaaccacacctgctcgcagtgatcgattatccaattcagattcgtctccactttcatcacacttaggtcgcactccaactcacaataggttaccaccaaagaccaatttaggtgaccaccagacaaagctcgacatcctggtatcactacttggtctcgaactaacgatcatacattcgaagcaggtcgaacaacaactcgcagcagccacagctcaaccgccaaaccatacacccgcgaatccatagcaaagcacaccctacagactcctggacatggtcaaccacacgggtcacatccggcacgacaaccaccagaggctcgaatacaccatgcaacccgaaccgcaacacacagcaacccaccacggagcataatacaactaaccaaaaacatgacaagaacagcaaccaacaacaaaacgacaacaagcgaacgatgacacatcgaaccatacaatacagcacaaacgaaaagaaaaaccaccaacacacaacagacagaaaaaaactcacaacgacgagagacaacagacaacagcacacaatgaaagcgaatcacccaacgcccgacacggcgcccactaaccacaccccacctacgcaggacacggcgacagaccaaacagaacgagcacacagcaccgaccaagcccccaggaacggccggcacgcacgacacaagaagaaaacgaaacaggactacgcgccaccacgacacacgacaccccagcgacacaagtgaaggggcgccgacgacccccgcaccgccacaatgacaaggcgaagaccaccccacaacacacacaacacgcaaaccgcacacacacgaccaaacgccacgtgagaagaatccgacacactaacgcccccaccagcacgaagaagaccaggagagcca

SEQ ID NO: 146299 - DNA, 319 bp, Homo sapiens
gtgctcggtgaatactggcaggtgcgattttcatgagctctgattcttgcaaggggctggctgacttctggctccaaggagggcagtgccaggaaagcgcagctaaatgccagctgcccagatggcacggaaaacatgcactccgggtcatcgaatcccaaattcactggggttgagccccctccatcttgagtggctcaggataaaatctggagcctgtccactccacgctcactgtcaggagcctcctaatgaaccatcgaggctgtgtgtcccttctgcagtcttttgtccacccagtggccagaacgatcctccg

SEQ ID NO: 146300 - DNA, 445 bp, Homo sapiens
atgtgccttttgtgtacatctttgtaattatcaatttatgagttgaggaactaaaattattggtgtgcttttcctgagagaagagatacaggaaagtgtcacagatatttgcacttagagaaaaagtttacccagaagaacttacaccaaaatgtattgtcattattttctggaaatacatcaaaattcatataaaatgttatcttcatggttttaagcattcacctctgttctagaagataataaatacctgcaagtttttattgggctattactctgtggcagtaaatatgaaaagacccagacacatgagccatggaacacacaggaaaacaaagtatttactcatgaaaaccagtttgtttaataatgacaaaacatgttgacagtactctccagcaatactcagaatttacagttttagcgtaacatagctgattctcac

SEQ ID NO: 146301 - DNA, 343 bp, Homo sapiens
ggtggatggaaaggaacaaaaagagggattggggagtcctaaactctgacacattccaaagctgcagccaggcaagtgatctcaactctcaatgtcgatataatccagaataggtgagaaaaccaccgtttgcctactgacttctgaatatagtgggagaaatgtatgagaggtgatgcgggatgggcaaagtgcaacaaaaatacattttaagcctaagaaatcatatagtacaatggaatttagaaggcaatcacacagccatttattaggcaatacaattaataggttgtacagtctggttatttttgaaactatgggcattaaacatttttttatttat

SEQ ID NO: 146302 - DNA, 514 bp, Homo sapiens
cagttttccagcttcttctccctcctcctagtctctgtttgtggacggctttaaatggttttccaccctgggtgggccaggtgttccttgccctcattctggtaaatgcacaacctcccagcatgggcattatggccatcatgtacatgtcacagtgctgcaaagattttgtttatggccagttttggggccagtttatggccagattttgggaggcctgttcccaacaaataataatctctgaacataagaatttgactagtgttaaccactccacttctccagtacactgatacttctccctttttcttagcataacacaaaacagatacatgactacacaccatctgctctccagtgcggaacagaggaacaaaggcataagcaagcttcagaacacagtcagccatgttcaccacatctatatctagcactgcttaaaacaaagtcaatgagaaactgagaagatgagtgactaccctattttcagcacttattgtcacaagaaaagaaa

SEQ ID NO: 146303 - DNA, 417 bp, Homo sapiens
gctagattaaatcgtagaatgtgtgccagcaaagcttaaagtttccaggttagctgagggaggccatttggaaacttgtgtctgaactccaataggagagagaatgttcaagcaatgggtcttctgcccatttccctctgctttgccatcccatgggataagggaaccacctcaggttcccaatccccaaatcaatatcacagagtttagagtccaggccctcggctaaaattagaccccatagagtttctagtattaattggcccattattttaatagtaattaatgtaattagtctgtagctatgtttatttgtaatatggaggatgcctgtctgctgtacatacatctttctaagacagatcctaagctgtgttcaatttcttttccagtgtaatacatttctagtcacaggac

SEQ ID NO: 146304 - DNA, 247 bp, Homo sapiens
tctctgtatttcaatggttttctgtaatgattaaggttaggctgggacttaggggcagaggcaggatggaaagggaggggagctaactgacatgcccattgctagtaatgcaagacattctggagaaaaattagaggagggagcttcccagctaccaaagatgatggcaagtgagaaatcttttgaaagttctctgagcaaagaggtaaaaggaacagccagaagccaactattttgctacagaaag

SEQ ID NO: 146305 - DNA, 162 bp, Homo sapiens
tttccctcattttctatcatgttctttgttgttgtactgtcaagttttgaggatatgtggtttccaaatgttttctccccatctgtagcatgtcttcatccacttagtggttgttttacagacagaggtttttaattttggtgaagttcaattggtcagcct

SEQ ID NO: 146306 - DNA, 293 bp, Homo sapiens
atcttgtatactttgccacccacaactccagattttctctacaaaacgttgaaacaaataaatacacatagaaacaaaacaaaaataataacttagcacacctctctagtaaatattgttttcctcaatgctggtgtcgagaaatattttctaaactcccacagtgccctagatttttctctgttattgcacttactacaagatacagtgctttttctttcctactaccagactcttgcataaataaggcatgttttgatttaaagagacataaacacaaattgaaatattta

SEQ ID NO: 146307 - DNA, 427 bp, Homo sapiens
ctgaagaaactaaatgcacacataagccaccttccttagatatgttatctgagcaaacataaaacaatcttaaaaatcataatatactctacagattcttgactctccagctagcagtgaataaatgttcattttttcagcctaattgttttcggaccactgactagaattacagcatgaaaaggccactgtcatgttcagtatacatttttaatagacatctttaaacatttagacaaaatattatttttaaatggcaattctttaactggtaaatgtaattatctaactttataaagaaaaaaaaacctgacaatcaaaatattctgtcactgctttaacgaaacacctaaaatatcttttcagcaaatgaaatgattctttattttacgcttttaaaaatgcattagaataattgctctgcaac

SEQ ID NO: 146308 - DNA, 635 bp, Homo sapiens
agtgcctgcctctcaaagaacattggttggagtggatgatgtatcagtcgtaagaatcatgagtgatgtgaatgatgtatgatagggtgatcaatcctgaatatgacttgaacagaagagagagagctccctgtcaggggaggtaatcaaagaaagtttcacaaggaaaagggggtgaaagctgagccctgaaagataaggcagaatttaaagatgaggggagggaagcaggagtcgactaggggagggtatctcatggcaagatggaaatgtcattagtgagggacagagacaggaaggcaggtggtgttttcggtgagcagaaatgtctggactggagagggtcctaatgggaaatggaaggtcctgtgagtcagcgtcagactccagagagccttgaatgccagccgaggacccgaggatgtcagaactctccaagccctagagatcaccttgtctagcccttcctttacacacgaggaaactgagactcagaaaacttatccaaggcgacgtgggtagtcagtctctcggatagctgtcgtgttatttccaccgtgcagtggctttctaattgggtactttggaaccccaagtttccctagagagtcctcagcagtccccatatggtaagg

SEQ ID NO: 146309 - DNA, 374 bp, Homo sapiens
caacatctgtgtcatgttgtggttgccatctgttggctgtcttttccccttatgattttcctgatttttcatagctgaagtaattctgaattactggacattttgaatattatgctatgtgactctagctcttgtttaagtcccacgtaaaattttgaatttgtctttgcagcaatcaacctaattaggtccagtccacaagttcctacccaccttctgtgggctgtggtaccaatatgatatcagttttcaaagccttttaagtattattttgatttttcccaagcataccgtccaggggccagtgcagaactacttgagcagtaatgtactccacagtttggtcctcaaagcctttggtatgctgtttaggg

SEQ ID NO: 146310 - DNA, 379 bp, Homo sapiens
tatggaagcaacatcatgagtaagtgactgggggaaccttttccctaagtgttgtggttgctagccacacaccatgtattcaacatctctccaactctcctcatcgtttcccagagctgaaagtaagatgagcacgaagaaaccatgtttagttaagaacatgacccgaagagtgaaaggtatttcctgttccaaataggagcccagtctgcattttctactacatgatttagtagaaagacacattggatttgaaccatatttcttctgctagccaattccatcttatctacaactttttgataattattttgagaaatagatctagatcacagccttccaattcctaggccaggatactttccatttttctacacag

SEQ ID NO: 146311 - DNA, 321 bp, Homo sapiens
ctgagtctgaggctgtcgcaactcaaaaagcttttctgttcacactctgtacttagcttatgtttgaacaatctatagtgaaactcaaaaaatgggcatggatctatttatttgttcctttcttctagttctctgctcctttggctgactaaggcactgccaacctgatttggaagtaaccggtctaatttccacaagctggtttgccccttcttttctagcatgtcaatctccacccatttggtggtggctaaatttccttaggtggagtggagagaaccacacactgacaaatggagcagggggcgccaagatgcttcg

SEQ ID NO: 146312 - DNA, 498 bp, Homo sapiens
atgtgggtgtgcaggagggaagagctcccatctccggggatcttccatgacattctccatgacagcaggccaacaggaagtggcagaaccttcatgacaaagcattggagtgctgcttctagtgtgaatcctgtcatggataggaccatgtatcctgtacactctccaggtgcccagtgaatatgagcttctctgaactgactgaagaccacaagatgaaaactggaaactcgcagccttcatacaacaaggcatctggtatggaagcgttcagtgcgggcttctctggctgatacactcgccatggaccttgctatccctgagctgggaccctaatggatgtgcatgagtttgtctccaacttgtaaaaaatgtgcttttgcaagaatgagtgaatcacagactgaaagaatatatttacaatgcatacacctgacaaaggtttcacatccagaatatataaagatttcctagaaatgcgcaataaaaagacaactc

SEQ ID NO: 146313 - DNA, 175 bp, Homo sapiens
agccaccgcgcctggccaagacattggtttttaatataacatgcaagtcaccttcttaatttgataacagtgatttttttgcaaccctagaagaagaactgggcatattgggtatatagagactcagagttggccttgaagaaggtgtctttggaaattttctaggtctgtcata

SEQ ID NO: 146314 - DNA, 243 bp, Homo sapiens
aagtcagcactcaggtaccagaaggcccccagggaaccccaccttcactaaccccctattgagtacctattatgtatgggctcagcccacactaggacactagggactttggactcacatcgccctggggttccaattctagttctgctaattactagttgtgtgaccttggatgagttacctaatctctgtgaatctcacttttctcattagtattatgggggtactaatggaatgttctga

SEQ ID NO: 146315 - DNA, 570 bp, Homo sapiens
atacattttccctttggctattttacaaggacattgaggattaattaaatttaaaagaaagtagtgcagttaactcccaggagacagagggagatgtttatcatttttctcatcattcattccttattcattcattttacaaatgtttgttgaatagtaattataatgaagatactataccagcttcctgaattgggaatacaaagatgaaggatgagagtgacttctgccttcattatgttatgtgttcatattttctttttaaaattctcattataatatgagtaattgtgcagggatttaatattgctggtctcagcaatagttgatctttgattaacatctcactgacacatattttcactgtgtatatttatttttcctttctaaatttagaactactctttatcttctactgtaagagatatacaacatacttttgtttttttctatgttgtaatcagtgcagtttttttaaccaagaataaacataagttctaatagcaaacagaaataaactccctacacattaccttctccattaaaatatgttttatgccacatgcagaa

SEQ ID NO: 146316 - DNA, 281 bp, Homo sapiens
tgctgggattacaggcgtgagccaccacacccatcccagaacttttttagtttaaattttgccaatagtggatagagtgattctgttgagatctgaatggtgccctatgtagtgaatccatttcttttttggtctggactctacttattttaatgaaacccaagatttcattagcacttctagtagcagtgtctttctacttggaacgtgttattttatggccaaacaagatcaaacacaaacaaaaacctttgggtccgtcatcttctttttattttaat

SEQ ID NO: 146317 - DNA, 126 bp, Homo sapiens
tttaatttagtctgctctaaagtcatctccacagcggtaattttgtgatattgtctataattgggaaaagtttttcctcttagttgacaaaaccctccagtttaaaaatatatattataaattact

SEQ ID NO: 146318 - DNA, 191 bp, Homo sapiens
agagaatttgaagcagttacctaatttgctcttattgtcaccattttattgaaatggaaagtaactagacaaaaagaaaccttaaaagattgtcgcctaaatctcttctcttcaaggtacaagttacccttaaactcttctctccaggtaccttacaccttagttgtgattatccagctgtcctagagcaa

SEQ ID NO: 146319 - DNA, 177 bp, Homo sapiens
agtggcctgtggtaataatccggtatacgacaatgcctcaatagcagaacaaataacaaatggcatattgttagagattttagactacaaactgccatcttgcttcaaggaacatctcataccccattcatattaccctctcaaacctgaaattatattgcaaaagcttcaaagtaa

SEQ ID NO: 146320 - DNA, 1158 bp, Homo sapiens
gacctcaggtgatccgcccatcttggcctcccaaggtgctgggaatacaggcgctctgagccaccatgcctggccctgtttattttcttaataaactcgctttcactttactccatggactcaccctgaattctttcttgtgcaagatccaagaaccgtcctttggggtctggatgaggacccctttccagtaacacttgggcaatggcagatgaaaggagaagaggccacagacagaggtctggaaaagacgcacgcaacgacatgcaaggtgttttttctattaagtcatcactgaacaaattccaaggagaaaaaggtaaaatggatgcaggaggattagaatgaagcactactgcttgtaaaacaaatcaaaactaagaacctaggaaacgataataatgctgtttaaagacttgaaggaaatctctatttccaacaacgtcaacagaaatcaaaggagaatatatttcacttttcaagagtgaaagataataaaagtcaaaccctatacaacatcaatcctgagccaaatcctatcttatctctacttttttcttctccttttcaacgtgtgtagctaaaccaggttgcaatctagagctggactcgtccagaaagcctggcaaacatccacagctgtgacaagatgctgacgagcctgttgcagtggggtcttgatgcttccactggggaggaatcaggagaatgtaagtaaaaagcaatgaaacttctgcaaataattaagtaattcacatccaccccttgaagagaaaataattcctcccttgtcactgtgacagcctcggctggctgcccagctgagaacacccagcaagcaccctctcagcaaagccaggtggggaggggagaggtcagccactgcagcctgcaggctctctgaccatgggcacctccacagcagaccctcccagccaccaaggacatctggcccaaacacagcatgaagcagaagtggcttcggccatatccaccacctctgtgcaggctgtcacacagaaccaaccccaccccagcctacgtgaagctccatgctggagccccagagcagcgggacagatcactgattcccttctatgaagcatgtgtgcctccctgcatccactcaggctccagtgaaaagcactatttggctcc

SEQ ID NO: 146321 - DNA, 431 bp, Homo sapiens
  misc_feature (18)..(18): n is a, c, g, or t
  misc_feature (26)..(26): n is a, c, g, or t
actactactactaaattngcggccgntctgacgacaagggaggaattattttctcttcaaggggtggatgtgacagcctcggctggctgcccagctgagaacacccagcaagcaccctctcagcaaagccaggtggggaggggagaggtcagccactgcagcctgcaggctctctgaccatgggcacctccacagcagaccctcccagccaccaaggacatctggcccaaacacagcatgaagcagaagtggcttcggccatatccaccacctctgtgcaggctgtcacacagaaccaaccccaccccagcctacgtgaagctccatgctggagccccagagcagcgggacagatcactgattcccttctatgaagcatgtgtgcctccctgcatccactcaggctccagtgaaaagcactatttggctcc

SEQ ID NO: 146322 - DNA, 421 bp, Homo sapiens
gcacatatgcctcagaaggcaagttagagcccttggcacaacctgctgcagccactgctggggagatacagttggcactgacccagcctcttggaggagcagcacttcaaaagagcttaatccacaattcatctcgtccacctgtgcatactcctcacccatgctgcaacatctaagcctggcaggatttgaaagggagctttttgctacatcataaaatgtctccctctttcaaaaacattcagaatgaaaccccagctggccaagctccctcctctcttacaaacacactgaatgactccagttgctgggaatatccctttcccttcttcagtcattcaaattctcctcttcctcttttggggccctgcttaagctctcagaatttgaaagtctgccccacccagctgaacagcctata

SEQ ID NO: 146323 - DNA, 304 bp, Homo sapiens
  misc_feature (155)..(155): n is a, c, g, or t
  misc_feature (207)..(207): n is a, c, g, or t
  misc_feature (221)..(221): n is a, c, g, or t
  misc_feature (239)..(239): n is a, c, g, or t
  misc_feature (242)..(242): n is a, c, g, or t
  misc_feature (252)..(252): n is a, c, g, or t
agttgatacagaaaacaccggtacgatttggcattcattcacaataactggcatcaaaagagactgtccttaaaacaggtgaatagagtttaccgtaaacgtgcagtgtattttatatttcaaaatgaacttttagaagcagtcagctccccccngatccttctctaggtctcgtagtcgatctaggtcaaatgaaaggaaatagangacagtttgcaagngaagtggtgtacaggaanttncttcatttgncaggagtatgtacagaaattcaagttttgttttgagacttcataaggcttgg

SEQ ID NO: 146324 - DNA, 876 bp, Homo sapiens
  misc_feature (865)..(865): n is a, c, g, or t
ctattggatagcaatggtctatgccaattctgcaagtagatttgttatttctcttccaatggtggcttttaaaaagcttgtagaaaatatgatctagaataacgaagaaacatgaaaatatacagcatgtctgactcagaatgaagacccttgatactgatctaatataggaacacttgtatttctcatctactgtcacttgacgttcttatcaccagttttcctagagaagagaaaatcagtcccacctctgtgaccactatgtatattcatatgtatagccatacaaacacactgtataatttacattgacttagaaccgcaattaactacatacaaatccctaacagtgtcagactgaacatcaagatctttgaacatgaaaactacctgggttcccattcaccatccaaccatcctcaactcccagcatgtatttcaatatcatagaaaagaagggccgggcatggtggctcagcctgtaatcctagcactttgggtggcgaaggcaggtagatcacctgaggtcaggagtccaggaccagcctggccaacatggcgaaaccccgtctctactaaaaatacaaaaattagggcatggtggtgcatgcctgtaatcccagctactcgggaggctgaggcaggagaatcacttgaacccaggaggtggaggttgcagtgagccgagattgcgccactgcactccagcctgggcgacaagtaagactggctcaaaaaaaaaaaaaaaaggttgatggacttacttaaggttccaagggtgaagtgggacagggacttatttgtttagacttgggttcaatgctagtagtctgttttcccatctgtaaaaggaggacactaatgnctgtttagcta

SEQ ID NO: 146325 - DNA, 912 bp, Homo sapiens
caagcaagggtgcaccccaggcccagaggtgaccacgggaccctttcaaaacaaagctttcccaggatagccctgggcagaactcctgggattgactgggcagtaatgtagttgagaggggggcctctctgcatggggctgatggacagaatcacaatctattccccaccagcctacccaccctaggtaccactctacccagtctgtgctttatagggaaggaaaaaaaaaccaggcagaacactggcttgggctattggaatcaaggacacagataagtatcatgggtgccagctacctgcaccagcctctggtggtgcctgatgggaaaactggtctgaaatgtgggttctaggttctaaccctctggagaagagcttgccctcctaaggaagagctcatttcttgtaaaactcctcccccagggtatggaaagtcccatgagaaaaaagaaacgaacaatacgcagaggagaggaaatggggtatgttctttagccttcccaaagtcttgactaagttctgccatctgccatcagcaggctgcaacccactgtgaggggtgaggaagaagcctgtggcccctgaaggtgaatcttggctgaggaaggcagcaaatgagttgaatgggaaatgtccctgaaatgagcgcctgactcaccgtccatggtggtgttgaagcaggcagccaggagggaggaggctgagaagagtgtcatagcgcaccacatggggaattggggctcaagcgctcatcgtccagccctgcccccaaagtcttcctccaccactcctcaaggcaggagtcccagaagccaataatctaggttggaccaaaagcccagacccagccatacagctctgtcttagtcctcacccatctcaggggatcctataacctttggtgtcccca

SEQ ID NO: 146326 - DNA, 616 bp, Homo sapiens
agcatcctcccactttttggattgggaagacagaagacactgtcacaatggcccttaaaccttcccaaccctagcaaagtagctggttttatgaaaacacttaattcctatgaaataaaagccacatccttagagtggcatgcaaggctttccacagtctgggtaaactcacacctcttgctaccatctctcagtgccctatccaatacattccatggtttccaacttcagtgcctttgctcccatcatttcctgtgccttaaatatctattcttcccattttcacctaaggcgtctccaagttcctcaagttcatgttcaaatgcctcatcttccaagatgctaccccgcatcctgtgggaaacacatcttcccctccttgagctcccacagcgtcacaaggcctcccatggcatctgcctctcagttatttggtgttttgtgaagaattaccccttctgttaactcctcaagagctgttgtatgccacagctcttagcaaaggtattttctgaatgcacagagaatgctccatgacatctaggtcaagaaaatattacaaaagaaaaaagaggaaatgatttcaaaatagccagaatggctgccaaattcttcc

SEQ ID NO: 146327 - DNA, 895 bp, Homo sapiens
tctgtgtggtgaggtactgacctgacaaaaatttccttaaatgtctgcagagaaaagagaaaatggtcatgtctcagtaaatctgtgatagatgctacagggaaagctgctcctgcccagaaggctgaaaccaaggaagtgtctgctccagaccagcccaaacacacaatcccaaattttggtaaaagttcctatcagccctgtgtacagccagctgtgccaagaacatagtatgctattcccaaagctgagttgggatgaggaatgagggatagtggctggtttgtactattcacttatgaatgatcaccagcgtctccctggattgctcctgtatttgttttaggtgtacagtcaggttctagagatccaaagtagttggtttcaatcattttttcccactcaatggttgcttgggtggaagtacttatacctagaacttcttgccacaccatttcgcctaaagtctctgtcttcatctgtattttttcttttttaaaaatttgttatttcatctgttttttttatgtcagatttacaaggatcttgtaactttaaaattataaaaataaatgttcggtattcttgtaatttatttttacattaaattttttattaaataatttttaaatttaagactttatcttgtattaacgtttatgtatgatgaggggtaggtggctccccaaattttattttatgttggaatttctttcggtgtgagacaagaattcaaagtaatatttctcagttgcttcccagttgttttatactacttttctgaaaaatttatataccctatttgaaatttcattgtatactaaattccttgatatattggggcctgtttcagacactttttgctggtgggccggctttcttattccttacctca

SEQ ID NO: 146328 - DNA, 411 bp, Homo sapiens
gtggcttaaacacaggcacagggcctctcccagcgcctctgaggggctgtctgggcggatgtactagatagtgctcttgagttttgtttttattccttttaagcaccacttgaagatggtgcttcagaaaggaagttccgaggtcaagtcgtgactcagggttcatgccctgatacacagctcaccctggctgcatgacagcacgtccatcactgggaattttagctgagagctgccaatatttcttttcccttcattcagagaaaatggcagcacacatagcagaagggcatgggagagggaagtctgtggaacacacaaatatgaaagtgtaaaaacatttgcattcggcactctctcctccctcatcatctttacatcgcatctttcacgtaagtactctgatggcta

SEQ ID NO: 146329 - DNA, 412 bp, Homo sapiens
tattagtatggaaaggggagttactcttctggtgtagtggtccgattgagtccatggcttcccagccttaccagaggtgataaaaatgtcaattcctttggggccaatcttgctcctccagtgtgttttagccctaatgaggtcatggttatttctagacttctgagacttactgtggctttgaattgacacaaacactaattttctgtcaaaggctagagtgatggatgttatatgcctgaattttctttgaacattttattttaaaagagatactttgggcttttcatgaaactaaaattctggaaccctagagcagtctattatatctgtcaccacaaggactttccttaaaaagctccctccataagcacttggatgtgtaaacaagatcctttcacagatctttttc

SEQ ID NO: 146330 - DNA, 440 bp, Homo sapiens
gtcttccagcccacagatggcacatgtttcaagctcagaggatgaaaggtctgaggaatatttcaacattgatttagaggcaagaaggaaagggcaatgagttacctgggtccaggaagatatcccaagaaatacggagttgctgggaagtttggtttaagaggcagaggtcaagtattaattgtatcatcatgtagaccccagcagaaaagaatagcttagagcataagctctggagtctgagtctcagggagtctgagaattctgagttcaaatcctagcctctccactcttaaggctgtgtgtgatccacggtgtaatcctgggaaaactactcagtctctaaaactcattcctcttctgggaaatggtgataaaaatacatacttctcaggggtaatccaagaattaagtgagaaaataaatctgtgaagcttagc

SEQ ID NO: 146331 - DNA, 539 bp, Homo sapiens
aagagagccaccacagattcctggggagcatcaacatttaacagggaggaaaaagaactagtagaggagccacaaagagatggccaaaagcaggagcccctggagaacatggtgtgatggaagtgtaaggaggtaaagtttgaggaaagggggcatggtctgcagtgttaaataccacagagaggtcaagaagcatgaaaagtgaaaactgccctttggatttaacacttagtgacctaatggagaaggcagggatgaggaaaagtcagattgtggtaggttgaagagataaggcaatggaaatgccaatatacactgttttttcaaaagcctggctgtgacaggaatagagtaaaataggatggtagctggaggggaccaagaagatcaagggagaaggttctttttttgtgtgttcttaaggtgggaaaaatttcagtatacccttgagagaaggagccagcagagaaaaagaagctgggacgctatgatgggaagggggacaactgatgataaaggtggtggagaaggcaggcatg

SEQ ID NO: 146332 - DNA, 787 bp, Homo sapiens
gtaggattaaaggttgtctgatcttgagatgggtaaagaatttcttgatttttttttctctttgtaaacattttttaaaaattgttttattgaggtgaaattccctaaaatattaaccattttaaagtgaacaattccatggctgttagtgtattcacagtgttgtgaaactgccacttctatctagttccaaagcattttcatcaccccaagaaaatactccatacctgtgtagcagtcagccctcccttccctcctccccccagccctgggcaacaaccaatcatggttctgtggatttgcctcttctgaatatttcatgtaaatggaatcatagaatttatgactttttatgtctcctttcacttacaatgtttttgaagtttatccattttgtagcatgtactagtatttcattcctttttgtatgtggataagattccattgtgtggatataccacatttatccattcatctgttggtggacatttgggctgcttccacctttggctattgtgaatagtgctgctgtgaacatttgtgagcttatatttgtttaggtaccagtgttcatttatttggggttagaaatttctgggtcatatggtaattttatgtttaactttttgaggaactgcccaactgtttttcgtagcaagctgtgccattttacattctcaccaacggtataagaaggttccaattcctccacattcttgccagcttttaaaaattttctccttttttaatgacagccatcctagtggttgtgaaacggtacctggtt

SEQ ID NO: 146333 - DNA, 259 bp, Homo sapiens
ggttcccattttgtagggtctacacagggaaataataagtgaacaaatgtgggctgaaagcataatggctaataatatttcccagaagagaagaaagaggtgagctgtgtctttacagacattgccaataggtaagagagggcacagaaactcaaagaagccttagatttactgaatgtaagagaaggaagaggagaaaagagatgtagatacaagattaaagattataaataaaattaccataagtgaccccaattta

SEQ ID NO: 146334 - DNA, 994 bp, Homo sapiens
aaattcaactccctcatctgagaaccttgactttccagttgccttgaagtattgggaatagtaactgtacgttttcaatttaattatttggtattttatttgactgtcttggccatgtcattttatggaagcatttttaaatagcactttttgttagtggtgtggaatttctgcggttattttttttttttgcaacagatgaagcaaaaaaaaaaaagcactcattggagaaatagtgagtgtaaaaagagatttattttgtacagacagcaaagtatcctgtgtaatgttgctgacataaagcactttgggggaaaaaagtggaaatctgttttccataaatcacacagactcttgtacatagttatatacactcacgtagagaaatgaactgcatatatcatactggatatggggccgattttactctagaggcacatctggtgcttattgtcataaatcttttaaagaattaggtacacttttttctattaatatgtatagttttgtgatttgtcacagttatgtttcatataatcataagttattttgtcttgttcatgaagtcctttttttatgtcaaaagtaaaatgaagggattgtgcacttggtacagaataaaactggaaatagagaagacgccctcctgcctaaaatcctccttcagcctgtcggtttaaaacacaatggcaaccatcattgtttgtttgtttgtttttttgttttgttttaccatcagcctcttacatactgggaatggtaattataattaaaggcagatgatgcgggagggaatgttcaagtccagctttaaaatgctgcattgctttgggccagagctgtagcctggatttaattatagatatgaggaggaaatggcagtaaaaatgaatgtctccctgagtcctttacatgttgggagtgtccataaataaaacatgaagttttatttcatcagatttaattaaagcttttatacatgttaaaaaagtta

SEQ ID NO: 146335 - DNA, 149 bp, Homo sapiens
ccaattaatttgtacagaaacatttgtagtatctgtgtggctggccctcttctccaaagattttgccagctttcagccacagacctagttttcccttcccaagaatctcagcaacaacagtcatctttgatattgccaaaggcccccct

SEQ ID NO: 146336 - DNA, 543 bp, Homo sapiens
caaagtctttaaggaaatggggggactgccccggtgtctggaggcaccatctgaccacagcttctcatcattgcactcatctttaggttcttggatgtaagttgatgtagaaatacgtctgcctagcacctagctttggccaggggttgatggcataaatggggaggcaatagtagctaatatgtatatgcatgtatattctgtgtctgccacctgctgataactttacagacattaccttcttatatcctcaaaacaactctaaagagtgagtagaatgattaaccccattttatggatgaagcttcctactgaagctgttgtctaattctggagactgtgattttatttatttatttttttcagatgaagcctctctctgttgcccacgctggagtgcattggcatgatcataacttagtgccacctcgacctcctggcctcaggagatctttccgcctcagtctcctatagctgggaccacaggcacgtgccaccatgcttggctaatattttcaatttttttgtagagatggggtctca

SEQ ID NO: 146337 - DNA, 432 bp, Homo sapiens
gcaagcctttcaccagtttttctgttggggtgtttacctttttctcattgcaaattctttgaggccaggttttaaagagtttcttctggggaaatcatttatgttcatgtttaccaggtaccttgaaggggcctctaccaacttgagaatattttaaataaaagtttggtgtgtatgttttctattacatcaggagtgtaaatttcaaacctttaagtgctggcttacagttatgaattcttagggcatactttccttgcttgagctgaggcaggcacttttcaaaaatcttcctttccacaagggagatacaaagatatttttagggttagttgtcatcatttgttctgttacctgtttcattttaaagagtctttaattttttccttaaagtaacagttttctcaaaaaacattttcttaatctgtatta

SEQ ID NO: 146338 - DNA, 230 bp, Homo sapiens
atatggtatgtttacggagtgaatggacacaaacacgaagcagaacttatatcagacccaaactggcttttaaagagctcggttcctccacatttatggccacaagacgtcccctaagtcagagctaactgtggatacttccagcagtaatgtctcctgacttgctggcaccgagttgcagtgactccacctcactgccctcccaggctgtctgcgtgtgcacacacttc

SEQ ID NO: 146339 - DNA, 189 bp, Homo sapiens
ttaatttaaaaaactatactggctaacaatttagcgaacttggtgcgggaaatggcacagtaacagcttcatctcttcctaccaagagaggtaggaattataacattttaaatttctgtgttggaaaatttattcattttaagattttttgctgttacttaaattttactgaacttagtttattcctga

SEQ ID NO: 146340 - DNA, 358 bp, Homo sapiens
tccggatttgctgtaaaaggaagagaaatacaaactactggctgcagaagctgtataagatttggaaggaaaatgaggtgcagtgatgttaacaagcagagacaaaggctttccaccctacctcagattgcatcctctcctcagcctgaagaagggagcacagaaggagagaaagagagagaaaggaagtagttactatggaggtgaagaagtcaggtcccagtggcagggtaggaaatgtgaagaagcatgactcagaggtgcagagaggctgaaactcttgtttcctggccctggctcctcacaggactcggctcagatctatactagggtttcaataaaagatttctttggagct

SEQ ID NO: 146341 - DNA, 398 bp, Homo sapiens
tccgcggcctttcgaaagcgcttcccgccgcactccccgggccgagcgggggctgcggcttcatcctcccggggcctcctagcctcctcaggccgtctcgtcggggtgggcctctctgggagtgtagactctggtttcaccagggagaccgcggtccccagggttccaggcttccttgcctcccttgcccagccttttctcaccgtggcgtaacctaactcagcccgttcaggctcacgttaattcttctcacgagcttttctctacaggattctcttaagcctttctccttttcggtggagctcagtgcttccaagattagatcgggagttttcttcatgaggtcaagatgtgttttttttgggggggaggcaaaattctgctactaattgaagaag

SEQ ID NO: 146342 - DNA, 721 bp, Homo sapiens
gttgtggcagactggcatctagtggccagcgataaaggtgcagactagtgtccacacctaagtggggacagtgcaggctgtaatgtccatacctagtggggacatcaatggggtatttgtcagagaagctccatggcatagtttggacattgtttctggctgtgcaggttcaaacccagagtctggctctcccaaagattatctgagttattctattattttacaaagtttgaaatagccattagatacccttacaaacttatcatttttgtgattgattttaagtctactgaaaatgtcaaaagaaatccaaaactgattgctagtaactaggccaggtgtggtggctcacacctgtaatcccagcactttggggccggggcaggcagattgcttgagctcaggagttcgagaccagcctgggcaacatggcaaaactccatatttacaaaaaatacaaaaaattagccggacatgatggtgtgtgcctgttgtccccgctactagaaggctcagaaagaaggatcacttgagcctgggaggcggaggttgcagtgagccaagactgtgccactgcactccaacctgggcaacagagaccccagctcaaaaaaataaaattagtgttaacttgtactgtttagccacattcattaagtttttaattttaactctactatcgcacaaccaggaatgtacaagagatctggagcctgatttg

SEQ ID NO: 146343 - DNA, 579 bp, Homo sapiens
caggaaggttctacccagactgtcagatggatatggccctgctgatgccctgattttggacatctagcctccagaacagtgaaaaaataaatttccattgttttaagccaccattctttgttacagcagccataagaaactaatacattgagttctgatattgagcattttgcattatttgacaacacttgttattacagaaacctacggcctgcacaaatcaaattgcaaactccttgacagccaaaagtgctttctttgtctttggccttcccactttaaaagtacatgtttactcacatacacatattttgattctttgtgtaacaagtcatttctttggtggttaaggatataccatgtataaggatagtgcctgcttatgcatgataacaaatcaataaataggttaggctcatatagtccaagtgacagtgtgttcaggaatattttttgtgtgtatttttaaagtagttggacacctaagcaaactagctagataagcctctgttcttgtctcttctttctctttctttctttctttctttctttctttctttctttctttctttctttttc

SEQ ID NO: 146344 - DNA, 379 bp, Homo sapiens
cagtaaagacgaccatacaaagtttaggggctttagtgggctatagttcaggtagctgtgctgtgataatgcgcaatagctgcacagttgggtatttgtattggcagagatttgttcgctcttgatacgtgctgggagtcaatgatggaggaccgctgaagggctatgctgttgagacgatgtgtgtgtgctgctaaacttggctttggtcattgtgatgcactaagctcagtctatattgcaacaatcttcccagttaagtgacccatgtgccatttatcaggacacatattagaaagatgctgtcctaatttcagttaatgctaagtgtagccaaagaaactcaaatgaatgccacagctctatttcactgcttttc

SEQ ID NO: 146345 - DNA, 267 bp, Homo sapiens
gccaccttaatattttgctgttgttacattttcagatgttttaatttactcattgatgcattcatatggatctcttaccatctgcaggatatgtttgctgttaaattataaagattgtaggccctctttcttaggcataaacctaacataggcacagtcacccagaaaaatgtaagcataaacctttttttttgaaaaagagtcttgctctgttgcccaagctgttgtacagtggtgcaatcatagcttactgcagtctcgacctcc

SEQ ID NO: 146346 - DNA, 546 bp, Homo sapiens
tgctgggattacaggcatgagccactgcacctggccaaaatatggtaattctaataggtcacattcaggtgtattttttttaatggtctaatataacattaaaagtatttgtgaaaaattccattttggtattttaagcataatctatccaaaaggaacattaaaaaataataataaaaggggaatgtgaggtttaggtttttaagatgttcagtatttttaggtaagagtgttgtagtagtttgctagggctgccatgacaaaataccacagacccagtggcttaaacagtactttcctcacaattctgaaggctagaaggtcaaggtgttggcagggttggttccttctgaagcctctttcttggcttgcagatggctctccttctctgtccacagtgatcttccctctgtgtgtgtctgtcctaatcttcttataagggcaccattcatattggattagggcccacctgtatactcagtttacctcagttacctctttaaggccctgtcttcaaatacagtcacattctgaggtaatgggggt

SEQ ID NO: 146347 - DNA, 191 bp, Homo sapiens
gactgtatttggagatggagcctttgaagaggtgatttaactgaggccgttagggtaggccctaatccagtctgattggtgtccttataagagaggagattgggacacacatcagggacatgcgtgcacagagagaagaccacatgaggacacagacagtggccacccacaagccaaggagagagtcctta

SEQ ID NO: 146348 - DNA, 700 bp, Homo sapiens
ctgcttctggccatatcatccactccctaatctaggcgatgctgggagtccccttaggccagtgtcagggtagcgtgggatagaggccatgctgaaaacgcagagcttcatgatggctaaaaggagctgtcactcaccaggcactaagaccagttgatggtggtaaaagctagcaaaacagaaagggaaatatttacctaaattgtccactaggtgccaagtacaaagtgctgtcccatatattacctttatcatcatgacaagcacttgagatggtaattaacaactccactttaagtctgagaataatgaagcaactgacccaaggctccaaagacagtgaatggcagagatgagattcaaacccaggtctccctgactcgaaagcccacgctttcccccaacaccatgttcttttccttccctgtcagaaagggaaataccaaaaacaaatgagggtatgtatgagggtttggctggagccccagtcagccaaagtctgattccaagtggactgcagggtccgtgttatctcccttgggcacaatctcaaaagcccagaattccgcgccttgctaaccttccatcccagtcttagtgagaagctaaactaacttctgggcctcaattacagcagattaaaaggcaacaaatggtgctgatatctctcctctagtattcccaataagccatgcaacag

SEQ ID NO: 146349 - DNA, 318 bp, Homo sapiens
aggcaacacatctgttggtttatcatcaaacatgaagcaataggaaggaatcaatagaatttggagaagagtaaaacatactcatttagtccttttagaatacaaaaaaatcactgtctagctttaagaaaagtttatttatgagttactttttgagacacagaaagcctttttcaaagagaggatattagaaatgatattcaagacctcaggccctaccgaaaatttatttttttgctcaagttaatagaaaccattctaaaagtaaacaccagtcttgtggtcctctgaggcccgaggatcctcagtgggaggaag

SEQ ID NO: 146350 - DNA, 389 bp, Homo sapiens
gtggggagaaatccccacacctttttctgtgttgcatggtttgtttgagactaggaaaaacattttcattttcctatctctactgtaactacagacagaactaaagccccctacatatggccctaatacacctttcccacccattccaactgttagagccatctcagctaaggtaccaagcattgtggagcaaagataagtcatcttcactgtgctctgcctgaattcttgcggtgcaaaattatgagcataataaaatggtggttgtttatgccaccatgtcttggggtcagaaatagataaatgaaacgcctggctagtgttctggcagtcttcagtggcaatctggtcaaaccccaggctcaattaagattgtgctccaatgccca

SEQ ID NO: 146351 - DNA, 405 bp, Homo sapiens
ttctaagccagcaaaattgtatctccgaccattcctctgtagtcactttgtccttggactctcctcttctgcctccttccttcacttttaagcacacttgtgactatcatgggcccacccagccaacccagaataatctctctatcttagggtcagctgattagcaaccttaattccagcttcaaccttatttctcctttgctgcataacctgacatattcagaggttctaggtatgaagacatggacatctttagggatggaggtgttattttgcttatcacatctggcttcaattcttccttagcatgtctgtgaccttaatcattctgttggttaattgtttgtcttacctgctaggatgtaagatcctgggaatcttcagcctgctatcataggtaaaatc

SEQ ID NO: 146352 - DNA, 768 bp, Homo sapiens
taaatgaggggctggactgcctatatattttctagaaaatgtagtcttaatgagtcactgttatggttggaaatgtatcctatccctcaagtatgctggggaagaaaagtggttaagacatactagattctatgatactccagaactgcactgctcaacacagtggctactggccacatgaggctatagagcacttgaaatttagctactcccaactgagaggtgctatgagtataaaattcatatcaggtttcaaagacttactcctccaaaaaagggtgtaaaataagtcattaataacttttgtaacgttgactacatgttgaaataatactttgtattaggtcaaataacatgccattaaaatggatttcacctcttcttactttcttagtatggtttctagaaaacttaaaattacatacatggtttgcatttgtggcacaccttatatttctattgcacagtgctgctctagagcagctctctagagcacttgttagaaatgcaaacccttgggccccagctcagacctactgagtcagaaactccagtagggcccagcaatctgtggcaaacaagttctccagctagtcctggctcacactgacattaagctctccaccaagaaggtaagctctaaagcactgaaaataagatccagagcataacgggatctcaataagttttgttaaatgatttaatcttgatggttcctgttaagctcaaaattattctgtccatcagtcagtcagtgagagagaaagt

SEQ ID NO: 146353 - DNA, 105 bp, Homo sapiens
ctgttaaaagaaaaccagaacccaggatgtagagctggcagtgcctgacggcgcgtctgacgcggagttgggtggggtagagagtagggggcggtagtcgggggt

SEQ ID NO: 146354 - DNA, 235 bp, Homo sapiens
cacagtgggcctgactgtgacaaattagcagggtgatgtggccttctaccttactgcttttatagttgtattttatatagcagataattttgtgaggggatatttgagaggttgggaggcagggaaggcgtttctcacttgagaaatgacaagagacccaaagagggggttaatgggcaagagctgggccttaggaaccctgcctcactaggccatacccaagctgtcctgcctg

SEQ ID NO: 146355 - DNA, 301 bp, Homo sapiens
aatgcataggctgaagattgaggactcctttcattattgtgaatttaagtgatggcttcaatgtttaaatttgagtgaggagtggttaattttagtgatttagagtgatgagttattattttccccaagtgtttattcttaggaaaaagcatatatttggagagcttggagaaagttacacattttttttcgagtagccacttatctaacaggaaagtgatgtatttctcagaactctcccttgctcacccctggaaatgtcaagtacttttttctttctgatttctcattgtcactgcct

SEQ ID NO: 146356 - DNA, 360 bp, Homo sapiens
aaaaagttaaaatgttgctattgctatcattaaaagctttttgtttgggtctgtagagatagcttctcactttctatctggagaagcgttcctggaccttcctcgagggcagcgaggagaggcgttaggccacgtggacttctgtgggcctgcctaggccgtgaactcccaggcccactccctctagggtgatgacttgtgtgtgaacacggatgtcagtttcatttagaatcaactcacatggaatctgtagctcacaagaaatgtggttacagaatatgcttagtaatgcttggcatgttcatttctttttttttaaggaaagactggaaaaatctgagcctgaaaggcttcatctgg

SEQ ID NO: 146357 - DNA, 646 bp, Homo sapiens
ggacgttcacgcccgcacctttccggcctgtggcggtttcagccccagaccgtctgcctccggaggatttctggccatccaagaacaaacttccgaatctccaaatttccaagccttggaattgtcaaacccactcaagttgagtcaacaatgacccacagcacctaccagaaatacttccctcaattgcaagacttggcatttaaaactggaagattcttaccacatgtgctcctgggctttgcggacttgattgtttccatctaggcttttgacctgtgtcacaaagaagtaggatctaggttttaggatatataacgaacatctacaaatccgaagaggacaaacaatacacttggcaatagacattgggtacaaataggtaattcacagcagaagaaacctaaaatggtcaatatgtataatatatgaaaagataacccaatctctttactgctcagggaaatgtaaaattaaaacaacagtgagatataataccattttacatctaccagatgttgtgcttcatatttttatcactggagcttagtagagggtggacactcaataaatgtctgtggtcattctaggttgtggtttctggggtgttttagatgagctctccataattaaagagatacaaatt

SEQ ID NO: 146358 - DNA, 289 bp, Homo sapiens
gcccagaatgacccagattatcagaatgacttttgagtaatattaatgcttattattttcagttcttgagttctgaggtggtttggatttagcagtagctaatacaagaggacataaagaactaaacctagtccctacccacaaggactgcacaatgacaacctattgaagtttaaaatcttcaacagatcaacctctgatcttaatagaatgtagagtcctaacagagggcaggcttgacatttttcacatgtctctctggtgccatcctcctctcttctctatcttg

SEQ ID NO: 146359 - DNA, 505 bp, Homo sapiens
ctattttaaagtgaaaaggtaagaataacccatatgaaacaattagaaaatataaagcagctggtgttgttagggatagcaggattttagaggagggagaaatcagcaggcctcatggtaatcatagaaaaaccatccgagaagtaagacctaagctgggactcaaagaattggtatgtggggaatagacataaacaagggagaaatatgatgaaatcatctgaatagaaatgaacatggtgttttgggggagtagtgaaatgactttactcggtgaaatggatggtttgagcaggaaaggagggagaagctggtaggatagtaaagcaaagctgttgtgtgaacccaagaatataaggattcatcagcatgttatagggggcatttattaattcatcctgaaagtatttattgagggcatattatgttccaggcacaaattaaacaaaacttttccccttatgaaatttatatttaatgaaggaaaatagacaccccccccaac

SEQ ID NO: 146360 - DNA, 446 bp, Homo sapiens
taagccctgctctctcctggacagacgccagtctcctgtctgcaaacgtccctgccattcagaactcagtccttcctggtgaatccccctcccagctcctcaccaactctgctgtccactgccacttctggtcccatgaggccccagccaaggctggccagtctccctggacccaccctatatccgttctccacagacaaggtccatcagggtaagtctattccagttttctccaatcttggcattttgcagtatctaattagcttcattcccttatttgtgcctcatctcctttctgtgacgttaagataatcccgtttccctaatcctatcactattctggcttattgccaggcatcctcatttgaaaagtgagagtgctgaagccagagcaaggctgtacgacgaggatatggcagaacctggacttccgtggccagacagga

SEQ ID NO: 146361 - DNA, 386 bp, Homo sapiens
gtgatggaaagtgtggaaatagaggggggataaagtaattcaatgacagagataagtggcaaatgattatcgtatgctaaactcagactccaaaatccctttgggaaaaactcctgtaatgtcaagtagaaagtttagccttggcttcctcagtgagatatattaagacttttaaggcactgagagcgcatgaagggtctcccttttagagaccaacatgaacatccaaatactcaaaggtacttcaaagcttaacagacctggttacgacttctgggcctctgaagtttttactccactcacaaagtaacaatgtatgtattaatactactaccattactataaagacaacaataattacaactatcactgccagtattgcccct

SEQ ID NO: 146362 - DNA, 692 bp, Homo sapiens
aagaaaaaggaaactatgagttccactcctgtttttttctttttttagacagggtctcactctgttgcccaggctgtagtgcagtggcatgatcacagcttacggcagcttcaacctcccaggctcaagtaatccccccacctcagtcttccaaatagctgggactacaggggcgtgcaccacacccagctaattaaaaaaagaaaaatttgtaaagataggatctcactatgttgtccaggctgatctcgaactcctgggctcaagtgatcctcccaccttggcctctcaaagcactgggattacaggcgcaagccacaatgcctggctgtgtttcacttctaattctaccctgatcattctgcccagggctaactgcaggaaaaggacccagaaactcccaggtggccaggaaagcattctttcttactcaattcttgtgcatgttcccagcttttccttatgcagctacaagcacatcaaaagaacatgcatcactcccccacctctcacccacattgttttatgttttgctcttttcacttaacaatatgttctggaatttttccaaccagtacctcattgttttatttggcttcataatattccattgtgcggctataccatagattatttagttggtctcccatcatttgactcttgggttattttgagccttttcctcttaacat

SEQ ID NO: 146363 - DNA, 291 bp, Homo sapiens
ctggaatggaaatagtcacaattttaagggaattgcaggtaagaggtccctgacaaggtagtcttcaaagtatacatgaaagccccttcatgaggaacatttgccatgtccagagagcattgatacttcattgtacagcaccaggtaacagagcacttttatactcccctcagttccaaccctggtggggtgaaaaacctctgttcctgggatagggagggggaaagagacccaacatgggccatttcacgctgagacttaaaaatcagtcttcctaaggcaaatctagtt

SEQ ID NO: 146364 - DNA, 751 bp, Homo sapiens
gagggatcgtgtgatgcagtcggtcgcacggctcttttccgtggctctgacattcgatcctgatttaatcattctggagtgttttcaactatttttggcagctgctccaagtaaggattttgacacttgttttgctttttggtttaaggaaaaaagaacaagcattatacctctcttaaataataacatgtatctaaaataatgtcctgttttgtgaatatcccctggatgcatgttgaaaacgtagatacctggcctgggaaataggatctctgtgaagggtcctgggcatctgcattttacagtccccctcctgctgctatttaggctcactaagttacaaaaccacagctttaatggctctgcctctgtagcagggaagatgctcttgaagatgcaaattttatacttggtcgttgtgaatttgtaacattattaaaaacttattttttatggaggggaagaggcagtattttaaatgatagcaaaagaaaattaaagtcaagtactaaattacccctaattttcctcattatcctttaattattaacgttcagggcacagcactgaggaagttttctgttagtgcctatacagttctcacttccaggatttacccaaatttgttcaaatggtactattatattaccctggccccttggagtaggtttgattttctaaggtgtagaatactctagatctctttgagtgtaaaaaggtactttgttttgtttgtcctttctctgtgttt

SEQ ID NO: 146365 - DNA, 177 bp, Homo sapiens
ttgtctttatccttcatggtgctgagctccgcacaagccagaattgggtcttcctcgacctctgacaagtagcagagactctggtgcttctggtcactgcctgcacgcccggtggtccagccaccccacctgccttctccctagagacttctcccagtctcgctctagctgtgtccc

SEQ ID NO: 146366 - DNA, 850 bp, Homo sapiens
ctaatgcaaagttctatattggcttaattttgagatcatttataattaaagaaccgggccttatagtaatacatcttaatattatcacacctttaaaaggctgatggttgtatatgcaaaaagttctcaattagcattgcctattgactctacattattaattaccataaagtttatctttctggccattttcattagaaaggtttatggtcagttgttgagactcttcagattgattttgtgtaaactcgtggatgtgatggttgaaaatacagtccttaaatatgtagctacttttatagtgaactttacaaaacttgtttaaactacgtacacacttaacagtctcctgtaaatgagaggaggtgcaaaatattactggcccttttggaaaaggaacacagtacagatcactttccatagatagccaaccaatgtgaactctgtaggccgcattccaggaactcttatgaatggctgcaattgtgagctgtcatctgtggccaaaagactgttgaaaacctgattctaaggatcctttggtggcagatatttctatgtcttgttaatggttttatttgtgtggtttgctaatgatcactgataaaatattatacattgtgaatgttaagtggtgtgtcctggtatgtgccataaatacacattttgtttgtacatttatatatattttaaaccaaattctgctgctttttttacttgaagtttaagtgagaggattaagtaaatgtataccaggaggcagaactgtctcagtcttcgacctctgttgtatgaaagtctcactgaattgaagtctctaaagatggaaatttcttacttgaatctctgt

SEQ ID NO: 146367 - DNA, 177 bp, Homo sapiens
cagaggggccagacactgcatagggtcggcgcccttcagccccagggccccggaaccccctgccttggaatagcctcctggagcctcctcctcagcctctcccctcctttccccttagccccagtgtgcagcagcccaggtcagggccctgagtgcctggatgccccctgcctccca

SEQ ID NO: 146368 - DNA, 95 bp, Homo sapiens
taaatttccaccggtgccgaggcctcagtggagcctggctggcggcttgttagagcctgcagcctacctgtcctgcataggaatgaagccgggag

SEQ ID NO: 146369 - DNA, 629 bp, Homo sapiens
tggcaagtcatcttcctttccccccacactggggaagccaggcccctccttggccccttgattcttctttcctttcctccctcctcttctcagtttgctctctcccttctgtctgctttctccccttccctctccccaccttgtccccagattagaggtctaaagatagagtctccaggcccacttcaggtgggtggttttgggtttgcttgaggccacctagaattagaaagtctagagtcttcctcataagaggctcactctggtgacttataatcaactgcttatgtttattggcttactgtgtgccaggccctgtgctaagcgctttacatgccttatgtcttttaatccttacaactaccaagtgaggcagagatgatgatccccgtcgtattacaggaggctaaataacttgcccaaggcctacgcagtcctcagccagcaagtggcacagctgggatttcaatctagatctgtccgaagcccaccggtactcttgagtctttcctatatggcctgtgacagagcctgcgggagcatttaggtgtccacagaggggcatgcatttgctcaaattcagagaacaaattcttgactctgaaagaagggcttccaatcgaggaatc

SEQ ID NO: 146370 - DNA, 391 bp, Homo sapiens
tagagatggggtttcaccatgttggccaggctggtctcgaactcctgacctcgtgatccaccctcctcggcctcccaaagtgctgggattacaggcgtgagccaccacacctggccgataatttctgtattttaaggtaaattgattagcagccttaactccatttgtaagcttaattctcacttgccatgtagcatgatatatttatagattcctgaaattaggacatggacaccttttggggcttatcattctgcctaccagttattctttacacctggtactaagttgttatcctggaatctccctttactgtcattctggggagattcccttccagtctctctagtagtagaaggcccattttctctatctcatgtcttctactttc

SEQ ID NO: 146371 - DNA, 276 bp, Homo sapiens
atcaccaacagtgccaccatcatcaaatcatgatcagcatcgaccaacacgatgattcccactaccactatcacattaatagcaccactaccatcctaccgtgcccagcgagacaactgccatcacggtcactatgaccaacaccatattaccaccgctgccactaatatgcctcattgctatgccaataatcactaacagcattaccaccacactccaactaaccaatgctgctgccatcattactgccatgatctgtactaccaccactgccac

SEQ ID NO: 146372 - DNA, 271 bp, Homo sapiens
taatcgtcagcctctagaatgcctggagtgagaaaacagaatattgttcttttctgtttatattatttcatactgagttaatacacttgccaagactccgaggcagcttctggcttgacaatgccttctttaactagcctagtttctagaataaagttcgggtccaccaggccctctgagtggggctcaggacactctgagatggaagagactggagaaagccaatctgtttctccctgaaaatcatcttacttttttaacgcttcgtacc

SEQ ID NO: 146373 - DNA, 206 bp, Homo sapiens
aagttcgttttgctcctgcataattctgaggcctccccagccatgtagaactgtaagtccaattaaacctttttttgttctctatatgtagttcttatttatggcttcctgttcctgtttcatggttgcattgcttttttgtctctgagaatattaattagcttctttgaagttttattctgcctcctgcattgtgtcttcctcca

SEQ ID NO: 146374 - DNA, 893 bp, Homo sapiens
gggtgcttgcctgagtttagaagtaaagtggacgctgagtgtcagatttccggtctaagtcatagccgtgccttggtttagtgagaggttaaatttagctaaatataaaatataaacctatttccttgaggacggcatagcttagtggttctgaccttatcagtggaaattcttttataaattttcctttcttgatgaatttatctgtgggcatcaatttgggaattatagtcgtgcaccaaataatgacgttttcatcaacaacagatcacatataggacagtggtctgataagactataatactgtgtttttactgtaccttttctatgttagttatagttagatgcacaaatatttcctgttgtgttgcaactgcctacagtattcagtacggtaacatgctggacaggtttgtggcccaggagcaataggctctaccatatggcctaggcgtgtagtaggctgtgccatctaggtttgtataagtgcactctatgacgttcacaccgtgacgaaatcagctagggatgcatttctcaggcagtatccccatctttaagtgatggatgactgtagttgcatgccttgtttttaattgcagtactggttgccgtagtccaaatagatgagaactgtatacgaatgaagtttggggggctccacgtgggcaattttaaacataaggttaatggccgtgtttgaaactgtgtttctctcgggtaacggttggccccctccttggcttttttaacacaatggctattctctcagagggcggaagaacaggcatttttccatgttttgtgtggttggtttcacccctctctagggcgaaatggctcgggcccatggtactcgtcccgtgaataacggcgcaagaacctccgccgc

SEQ ID NO: 146375 - DNA, 554 bp, Homo sapiens
cctttgcttctctttcttctctttatttctttgtagaggcagggttttctctttgttgctcaggctggtctctaattcctggcctcaagagatcctcctgcctcggcctcccaaagtgctgggattacaggtgtgaactcctgtgcctggcctcattgtttaataaatgaggaaaccaggcgaggttaagagtagaggctggagtgacaggaatgaatggcttcttgaaaggaagagatcttaatttgggttttggagagtggactgggcttaggtaggtcatgagaggaaggcaagagggtaaattgtattgagtaccttttactagacactgagaaaaccactttgcttggagcgtggagggcaggtgagactccatctttttacttctctggacttgtagagtgcttctagcctttccatttatttagttccttaattatatctttttgactggaaattggagtctacaaactcagtcttatgctttgctcctcaaactagacttggagtgattattgctttggtaacatagaagaacaccgagcagctgg

SEQ ID NO: 146376 - DNA, 507 bp, Homo sapiens
gtaacaggaactttcactaatgctgaaaatacaaaccagtacagcaagtttggaaggcagtttgacaattctacatcaagctaaacatagtcagatcatatattccatcaatcataattcctaggcatttggcttatttatttgaaaattcattttcacccaaaagcctgtacatgaatgtttatatcagctttctgcataattgccaaaaatcagaatcaacaaaatggccttcaacaagtaaatggaaaaaccaactgtgatatatttatacaacagaatattattctgcgattaaacaaaaatgagctatcaagccatgaaaagatagaataaatattaaatgcatgttctgaatgtaaaaatttagtctgaaagtctatatattcaatgaattcaatcatatgacatcctgtaaaggacaaaatgatagagacataaaaagatcaaaatggttgcttggagtctgaagtagggagttaggtttaataggtggagcacagggca

SEQ ID NO: 146377 - DNA, 325 bp, Homo sapiens
cctgattcccaatctaataatgaagagggaccagaacactctaaaaggagtgaggggacaaagatatgcaatattctctttccatttgctttaaacttgacttctgtgaggttctctgtcaatctgtgtcttgttctctgtgtctgtcgctggtacctagtgtagtccctgtggatagttgcccttcccctagctgcctccccagctctctgtagtgtaattctcctattccaacgtctgtctttagcacgttttccctttatatagtccttgtacagagttgcttcatcatattaatattgataataataataattaaaacatg

SEQ ID NO: 146378 - DNA, 211 bp, Homo sapiens
  misc_feature (42)..(42): n is a, c, g, or t
gcggccgcctactactactactactgctcgaattcaagcttntaacgatgtacggggacatgaaacaaattaaaactctaaagtctctaaacatctttacctctattgttggaaattatgcagagatgtaatacgctacacagtgaattgtaaaacatagtgccgataattttaaaaagtcaaaaaaaaattaaacaaaggaaaagcaaaa

SEQ ID NO: 146379 - DNA, 737 bp, Homo sapiens
taggggaactgacttggtcagggcagtgggagacaactgccctgtgtaagagttgattgagctcagatcagaaaaatgaatgggcattatcaagggggaaggacaaggaagcttattttgtgtgtctgggaggacagggcaggggtagagtttgagaagtggactgtggccaaccacatagggtctcacaggccacatgaaggagtttggactttattctaagaccatgcaaagtcttgaagaattttaagtagggggtgacaggacctaatttgtcagatgtgcattttgcaaatattagctacatgaaagggcaatgtggagagtgaattagagaagacaagcgtggatgaggaaagacctggtgggggcttaaagataatggggattggaagagggtggtagtggggtggaggtagggaaaaatagtggatttgagaaataagtaaggagtacaattggcagggcgcatgatggatcaacctgtacgcaggagtgtgatgtttttcttctgacaccaaattgtttggggtttttcccacactaaccactaattctccagcttgccaacaccaactgggtatcccgcaattcaattcaattctgaaatgtcagtcacgaggcccaggcccccaggctgccacatttctgtttgatttggctacaaattcgggggtgcccatgacaccccgagattcaatttgccagaatgactcacagaactcaggaaagcactt

SEQ ID NO: 146380 - DNA, 211 bp, Homo sapiens
cttaggtgatcctcctgccttagcctcctaagtacctaggactccaggcatgtaccaccatgcccggctaatttttaaagtttttccagtggtaatgtcttgctttgttgtctagtctggtcttaaactcctgaccccaagcaacccttccacctagacgtcgctttccacctagacgtcgctttccacctagacgtcgctttccacctag

SEQ ID NO: 146381 - DNA, 412 bp, Homo sapiens
gtgttccaatgcaagtgtcaggcctgaggatgaagagagataaattaaactggtgtggatgagaattccagtttcatcacccattagcaattggtacttcagggagtcatgcaactttataacccagtttcagagtgttcaaagtgtagcattcagcatagtgccagcacatagtaagtgcttattataagctagctgctttcattactgttattactgctgagaatgtgtcttctctcctaggggtatataaacagcggatagagaattccagatcctgaggtcatcacaaggtctcacaagatcaaggaaaatcaaggaaagcagatagaaagccccattaacagaaaggagggaaatgggtgaagactgaagcaacagatatgactgccaggacactttgcatccagag

SEQ ID NO: 146382 - DNA, 579 bp, Homo sapiens
cgtgacgcgtgggtcgacccacgcgatcggacccacgcgtgcggcgagattccaccgcgggtacgcggcggcccccgatgtgacaccgacggtgctgggggtaaggggggtgttgggggtgcagagtgtggcccaaaagtgtgccctaaaggcagatcagatatggtgcccaagttaaagactctagtctgacctttctaccacctgcatgcctacctaggtatggcctaaaggcgggagaaatgtgtgcctttgcagaacaggtggctctgagacctctgaaagaggtgacttacacttaagattttcacaactcgtgggcgtgaattttcattaaaaagcctcacttactagtgaaggatcgtatatatgtaataaaacaggtctaagaggtatacaattctaaggtaaaaataattacatatatattaaaataccccatttctttttaaaggtcttataaaaatttagtaagttaatgttctatatttcactcacgcaacaactacaatatttattgagcacttactatgtgccaggcactgagctaggcacaaaaaatacctgggtgacttcata

SEQ ID NO: 146383 - DNA, 575 bp, Homo sapiens
tgggggaagagaccacatccaggaaccatgaatatgtaatgatggatttgtgccacaggagggtggttcttggagccatcacccacacagggtcacgaaggtggctgaactgggaagaacctgcaccagggaagtcagcccgatagtcatactgtgaatagaactttagtttcagtgaagcatccacttgtcacattaagttaatgtgattcacttaaatggttattgtttgggggtaaatttgatttgtaaactttgggggaaggctgtaaaattatctaataagctatagctcaaatatattttaaaaccctcagtggcttctcattaccctttagaacagagtctaagccacttagtaggccaaaaagaccatacattatctgaccactgattagcttttcaagctcatcttctgtcggttcagttttttgttgttgttgttgcaggcatgaagacctctgtcctgttcctcacacaaaccaagtcaagcttgctcctgattcacagactttaacacttgctccctctgtcctccatcttcacagggctaactacttttgaagattcgtatc

SEQ ID NO: 146384 - DNA, 199 bp, Homo sapiens
gccaagtcattgctgagctgggataggagccaggagtctggggttcgaggcgcagctctgcccctcggctgctgtgggacctgagcaaggacactctctctctctctgagcttgaggtgcctcatttggaaaaggaatgggttggagggaatggtcctgtcgcctgttgcagttgtatgcagtgatgctaatggaagat

SEQ ID NO: 146385 - DNA, 336 bp, Homo sapiens
cagatccagtggagacaaggaacagaatacaatgcttgtcctgggggagactgctcttcctagtattccatctccagatacttttcctctgcctggccctcaggcattcgtttttgaatagattggcagtgtcttcccctagttccccttttttccttccatgcattctccttgggtgatctcatctactcctgcagctttaacttctgctgtgggtttcatactctctcgtcctttcctcacttccgggttcccactcttttcttggtcttcatctagaattggtcaagcttagaaatctttagctccaacgttccaccactggatgagggcatg

SEQ ID NO: 146386 - DNA, 396 bp, Homo sapiens
ataggggtcttacactgaaggagtatgggaaatagcaactcttgtaaaaataagctggtcagtgggtggtaggtaagctgagggaaaagatttatgagcaacatcctgttctgggatcactgctggggacggaagagggggagaaactgctatataaatcacgaaggcagctcaggaaataaagtctgccattggagggtctcagggggacccttcttggatatcttttgcataacacatgggtgaaggagaatcaacaggtgtcacttttctcagcccatgtggggggttggtgctgggttgggataattcatctttcataagggaaaaaaggagcagaagatgacagagtgagatggcacagtgggccccagagtcatctctagttttgtaatt

SEQ ID NO: 146387 - DNA, 394 bp, Homo sapiens
cagcggaacaagcaagtacaaaactagagatgactctggggcccactgtgccatctcactcatcatgacttgatatgcatgagaactaggagcttgtgttaggtagagtgaaggataagctatcagagaaggcttctgagaagagtgctatataaatcacgaaggcagctcaggaaataaagtctgccattggagggtctcagggggacccttcttggatatcttttgcataacacatgggtgaaggagaatcaacaggtgtcacttttctcagcccatgtggggggttggtgctgggttgggataattcatctttcataagggaaaaaaggagcagaagatgacagagtgagatggcacagtgggccccagagtcatctctagttttgtaatt

SEQ ID NO: 146388 - DNA, 272 bp, Homo sapiens
atgtgtaaaaggaaatcttagcagctgcaactgtagcagagttcttcacagttctctgcttcagaaattatcttttggctgcattggttttggctgcctttctgctcaaacaagcaaacactccccttgatccatccagcatcatgacttgatatgcatgagaactaggagcttgtgttaggtagagtgaaggataagctatcagagaaggcttctgagaagagctgcatttgttagagtttagataatggtaaggggtcttcagctggagc

SEQ ID NO: 146389 - DNA, 267 bp, Homo sapiens
catggctttattttgtgtgcttgtgttccccttaagaagttcccattagccctcttttgtgacagtaaatgtactgttctttgaacattcttttgtgcctcagattgtgaatgccaacttgttgctttgatcttaaacctctatatggtgaagagtatcattctgtaatatgagacttgttgcttttctgtccttccagatggaagaagataagggttcagtcagctcagcatatgaatttgctgaaagccagcacagaggggagga

SEQ ID NO: 146390 - DNA, 323 bp, Homo sapiens
  misc_feature (23)..(23): n is a, c, g, or t
tgagtggtaccgtacgaatactngggaaggtaggtcatgtttcctaagagtggatttgcattgataccaagaccccgtagaaagagcatgaaaatgttatttcacttgataaaaccttattgcaatttactgttatgaagtgtctgtttgaagttgaaacaagttctaggtaagccctttgttaagcaaccagaaaatagacagggagaaagcagttagactggaatgctgattagagtcattaattagtaccatgaaagtcccgcagagttaccttccattggaaacctagatgactgcagaattaaaggctttggtggggg

SEQ ID NO: 146391 - DNA, 350 bp, Homo sapiens
aaggctgggaggctgagaagcagggcggtgtgtgggggggtgttgcacacatatctatgataagaacacgattacaaagactctctgaagagctcttacccacccatgcctgtaagaagaacttttgtcaaagacttcccaaactgctacatgaatcacaatgatagctagccagatgtacaacaacacctgcctgacacactgtcttcactaatgaactggcttcaactcctgtgataagcccctgtaaccaatattctctgtttcaaggcaaattatgtgtccttctccctgttgcctttaaaagcttccccttgcctcagcctcttcagttatgcctatggtcccaa

SEQ ID NO: 146392 - DNA, 179 bp, Homo sapiens
agagccagaacgcagggcctggcaggctgtgcctgataaaaaaggctttgacttttattcctgggaaggtgaagagctgctggctctgagcagaggagtgacatgattatacctacctcttaacaggattctttgattcatagtgtgctgcttttggggtaagaaagggaaggatatat

SEQ ID NO: 146393 - DNA, 206 bp, Homo sapiens
ctcttctatgtatagcatgtgttttctatcagagtgcttttaagactttccctttatcacaggttttgaataatttgattgtgctgtgtgggtttgaaactttcatcaaacttgaaataattttagtcatcattttttcaaatattttctctgccccttcccactctcatccttctgagtgattctgattaaacataaataaatcc

SEQ ID NO: 146394 - DNA, 702 bp, Homo sapiens
ctttataccacccacaactagtatggtgtttgtgcgatcctgtaaggaagcatcaggggacagaggccaaacagaagacttctcttctttgcctctttgtacttacaatcttctcatcttccatccctctgcccatggactcctaagctactggcagaaaattatgtccacacccccaaaaaaaaataaaaaaagaaaaagaaaaagccaaaaaaaaaagaaaccacagaaaacacaaaacagaacataaacataaagaaacaaacaaaacaaagaaacaacaacaccagaacataatagataacaaacaaataagataggagaaagaataaataggagtaaggagggcggagcggcgaccgtaccagagccctcggctgatgaggcgtggttgtcacaagcatagcaactctctagttcaaactaaaagtggcccaccagaagcctcttaaatccccttagtaaatgtagactgtttagtccaaagaggaacagcgtctataaggacactaggaaaaaaccttgtagagagagtccacacatttagggagccatagtaggcctaaaagcagccaccaattaagaacagcgttcaagctcaactaccactacctagaaaatcccgagagacatataactgaactcctcacagccaagtggaccaactctatcacctatagaagaactaatgtaagttaagcg

SEQ ID NO: 146395 - DNA, 547 bp, Homo sapiens
tcaggctcggtacccagtcttacccttactgtgatcccattgtggaaaattcactcccgccatgaaaccagagctctagcggttgggggagctgtatctgctttgattctgtgtcctctttaatccccagcacagtgcttccttcctagtgaaagcttggcagaatttgagtggaactgagtataaaatgtggaaggaatcttggggcccagagggaggagtccaaataggagatggaatcagggtgcataaggatgcccagatgatgcatttgatgagatgtgggtgtcagacagaagatgagaggttcaggacctgagtaagaaccattgtggaccacacaggacccagatggggcagaggaagtgggatctggggctgagtggaactgtggctgggatctcagccagctgccaaagctgtagtctagtgcgggttggtgtagagtatccattgggtaggacaattttggggagtctttcctcctgcggggttggttggggcactgcttagcagcaggaaggaggccagacagatggggagctct

SEQ ID NO: 146396 - DNA, 661 bp, Homo sapiens
atactactgtatgccaggtactaactacatcagacaactggaatatagtatggaataaaatagtcaagtctctgctctcatagagtctctggggtaaggggagaggtgtggagagacaataaatataaagaatgtgtattatatcagatgaataaatgcattgaaggaaaatatagcaggataagagggtagagattgatgaaagaagttcaattttagataattaagaaaaatgaaaatattgacagttgaaatggaaactgtttaccaatataaaaaatagtgaagaaaattgttcattaaatgtgatttttctatgtgatagttcatgtaggagtattttgtatataaatttaaatttaaccatttaaagtacttaaattgtcttttctattattctaaatagttttagttaaagatgtttgttgatttgaagtatttcattggttctcccttattttgttatttatttatttattttgagacagaattttgctcttgttgcccaggcttcagtgtaatggcacgatatcggcttactgcaacctctgccttccaggagaatggcgtgaatgcgggaggcggagcttgcagtaagccgagatcgcgccactgcactccagcctgggcgacagagtgagactctgtctcacacaaaaag

SEQ ID NO: 146397 - DNA, 215 bp, Homo sapiens
gaaaagcaatgtaactagaatagccgaaactattgtgaagaataaagtggaaggaatcattctaaccgatgacaagacttactacataactacagtaacaaggacttgtgtagagtggtggacacatacatcatcacaacagaacagaaacctggagacagacacacaaatatgcccaaataattttttttaattacaaagatacaaaagcaatt

SEQ ID NO: 146398 - DNA, 468 bp, Homo sapiens
taagctagaacagtcttgttagaggcaatctggccctttctgtcaaaactacaaacccatatattctttgttccaacctttcaacctcagaaacttgcccttcagagaccctcacccacgtgcagaatgatggatatacgaggctatccacagcagcaacaggtaaaggtaacagagaaagattagaagcaacctttatgcccattggtgaaatgagtggggcaggcattaaacaggaggaggatgaggagggacaagacggggcgctgacctgggataaactttctaggtgacaggtggcttccataatagatccagcccagctccccgtcttgtccctcctcatcctccctccagccaggccagcccctctcagcccccaaactccaggcagcagcctcacctctgtttcccccatctggtccacgttctgtctgtgcaaatccaccaggcctccacggcccagcg

SEQ ID NO: 146399 - DNA, 280 bp, Homo sapiens
acggggtcgcggctgggcagaggcgctcttcacatctcagacagggcggcggggcagaggcgctccccacatcctagacgggatgacggctgggaagaggcgctactcacttcccagactgggcagccgggcagaggggctcctcacatcccagacgatgggcggccaggcagaggcgctcctcacttcctagacggggtggcagccgtgcagaggctgcaatctctgcactttgggaggccaaggcaggcggctgggaggtggaggttgtagcgagccg

SEQ ID NO: 146400 - DNA, 546 bp, Homo sapiens
aaagggggtggttctggcagggagactgttggggtgggagaatgcagaagacacctcactacttcagaacagagaggagctgatatctcagtccaggatcacagtactggaatcctcaggtaatcagttaacccagcaattgtgccccaggtgtataactaacaaataggggtgcacaggtcactagaagatttgcacaaaatggaaactactgaaatgcccatcaacagcagaattgtggtccactttcttagaatctaactgctctgccttgtctttcttttcagcatcttcctcagactccttcttgatcttcattccctgcgtgctcccactatttccagctgcaggggcaccgacctgcccagggtgcatgtaacttggagaataataaggatcatagctgtggtaatagggagaatgggactctttcagttgagatgattgtgctgcagttgaagaatgcccttttacaacactgtccttactagaaataatatctgatggggaactggcctttgatctcataccctccgacctgctgcc

SEQ ID NO: 146401 - DNA, 181 bp, Homo sapiens
aacaacttaatcactctagcctttaacatcccataaattgacaatatagaagaatcaatgaacccttccccaaaacatgcactaatttccccactcacaccctgctcagttgctatctgagtaagaggggacaaaaatcaaaccacaccaccagagaaacggcatgaaaaagagacaagaa

SEQ ID NO: 146402 - DNA, 497 bp, Homo sapiens
ggggtccgagaggatccggagaggacaggaggaagtcgatcctgctggggctgacagagcagccttcacaggggacacagagctacaacaaacagttctaaacatagctaatcaatcatgaaacaaagaacaggaagccagaggtttgtggcctgggcagctgactgaagcaaaaggggaaaggtctgtgcttggccttgtcaccaccaaacaagaactcacttctacaagcgccccaattccttgcaaagactaataacccgcctgtttctgctccagatcccatcctgtcacgcccacacttggtggccttcaattcaagccactcgctgcacccataaggcccaaatcagccacagtggcaccagtttacccagctgtgcaggagaggggcaggaaagccagcgtgccagagggtggggacaggcaggcttctccagcaggagggcttctcagagcaatccaggagctgttagcccaatctgcccctccctcgt

SEQ ID NO: 146403 - DNA, 425 bp, Homo sapiens
tttttttctcccagaaaacatatgtgattattttctgtaatggcagctgaatgggggtttagatcattgcatatccagtaggaggaaattaaaatttaattatcagaaggtttcctgaaataacatgccttttttcaagcattgaagtaaaaatgactataaacctcttttgattatatgataaattagatcttttaccattaaaaaaaattaacagattttattttttaagtcagttttaggtttacagcaaaatttgggaagtacggagttcctgcctatctcccctgtgccacacacacagtcttcctcttggtagcaatattgaacctggcccaggaaattgttgaagactttgtcgggggtcattccatctgtggcaccagtaaattctgtcattgttatctctttctgccaggattact

SEQ ID NO: 146404 - DNA, 669 bp, Homo sapiens
gataaaatcagaaagatacttacatttttagtactaaagcaaagaaataaggtaaagttaaaatgaattagttttctcattttaatataaacataattcctatattcaggacttctaggaacttttttccccactgctttctttttttttttttttttaaatagagactggggtctcaactatgttgcccaggctggtcttgaactcctggcctcaggcagtcctccctttttggcctcccaaagtgctggtattaccagcatgagccactgtgcctggcctccccactaccttcaatggaagtttcttcattttccttaactctagaccacaagatgggatcttcagtaacagggttagttagggggaggataaagagaagattgatactctttcctctttttccctgtgcagatggtacttagaggaactagtaagtcagcagataagctgacaggcctgatttttatgtgtttgatttcatctgctttattattatttttactcttgaaccaataatatacagtagtcactaattatgtcaccctctccagtggtgtgtcttggtcaatgatgtagttccatctagtggtgacaaggacaactacaagttacatatttgctgtaggaaaatttttcccctcaaaaggggactgaaaccaaaagtta

SEQ ID NO: 146405 - DNA, 129 bp, Homo sapiens
tattttaaagttccagttcttttttccccctattaaactctagactccttaaggataagatccatatctgatttccaacatgtattgaaatctccacctctagagacatctgagatcagtccagccaca

SEQ ID NO: 146406 - DNA, 568 bp, Homo sapiens
taattacagccatacaggcacaatcatacatatatacaatacagccaagcacacgtgatctcacacacaaccacacatgtgaccatgcacatgcatatacacacacaatcacaggcacacatgatcatacacagtcacacatatacaatcatgtttggatacaatacacatcatcatgcacatacacacgtacattaatacgcacgcccgcatcaccgtatgcacagataatcacatgcaaatatccatgtgaactcatgtccgtgtaagacgcatgatcgtgtgtgcacacatcgcatgcagatatccatgtgaactcgtgcccgggtaagacgcatgatcgtgtgtgcacacatcgcatgcagatatccatgtgaactcgtgcccgggtaagacgcatgatcgtgtgtgcacacatcgcatgcagatatccatgtgaactcgtgcccgggtaagacgcatgatcgtgtgtgcacacatcgcgtgcagatatccatgtgaactcgtgcccgtgtaagacgcatgatcgtgtgtgcacacatcgcgtgcagatatccatgtgaactcg

SEQ ID NO: 146407 - DNA, 428 bp, Homo sapiens
cagtcaagtgtacatttagagaatagcacataaaactgccagagcattttataagcagctgttttcttccttagtgtgtgtgcatgtgtgtgtgatgtatacaaagagagagataattgtatttttgtattttcttttaaataatttttaaaattgacccttttcctgagacaaattgccagaatagtttgtatttagagatggtacctctaagagtaaggttgctggttgctgagcaattgacttgaaaacttttaaaattcaaattttaattccactactcaaaagaattgccatgttttaaaaaagagaattggtgccataagttagttgtctatgtttgaaaatgaagaagatatgcaacgtcatggcctggtcacttacccgcagccctgagttgtaggcacatcatatgtgagaatgaggat

SEQ ID NO: 146408 - DNA, 1974 bp, Homo sapiens
  misc_feature (1248)..(1248): n is a, c, g, or t
aaagtgaatagaattgttttcttactcaaaacactgtttaacatgacacttggctcctttctttgcatctctgagctcttgtaagatttgagaaacaattacattcaagggcagtatgcttaacctactgacatttgaactacaaagcaaagatgttcagattttcctgaaggatcaagtctttcaggccacagaattttctgtcctagttttttaatacagtagtccccccatatctgcaattttcctttccacattcaattacgcatggtcagctgtagtctaaaaatattaaatggaaaattccagaaataaacaattcataagttttaaattacacactattctgagtagcatccatgatgtgaattcttgctttgtgcggcatattcatgcttaaattctccccacccattagtcacttagtagccatctcagttgtcacggactgtcactgtatctcagtgcttgttttcaagtaacctttatcttactaatggccccaaagcacaagtgtaatgatgctagcaattcagatatgccagagaagctgtaaagtgctttcttaaagcgaaaaggtaaaagttattaatttaagcaagggaataaaaatcatatgctaaggttgctaagatcgagggtgagaatgactcttcctgctgtacaagatgatcatccccagagcacatagccgtcagactttccaaggtcaatacaaaagaaagaatcttaaagacagctagagaaagggtcatataactcatcatgctaacagcagacttctcagcagaaactttacaagtcagaagagattgggggactgtttttagcattcttaaagaaaagaaaagaaatcctggctgggcacggcggctcacacctgtaatcccagcactttgggaggccaaggtaggcagattgcttgaactcaggagtttgagaccagtctgggcaacatgatgaaaccctgttcctacaaaaaatacaacaattagctagctgggtgtggtggtgtgcgcctgtagtcccagccactccggaggctgaggcaagagaatcgctttagtctgggaggcagaggttgcagtgatctgacatctcaccacggtattccaccttgggcaacagaacaagatcctgtttaaaacaaaaacaaacaaaaaaacaggccaggcgcggtggctcacacctgtaatcctagcactttgggaggctgaggtgagtggatcacctgaggtcaggagttcnagaccagcctggccaacatggtgaaaccccatctccactaaaaatacaaaaattagccgggcgtggtggcaggtgcctataatctcagctactcaggaggctgaggcaggagtattgctggaacccaggaggcagaggtttcagtgagccgagattgcaccattgcactccagcctgggcaacaacagcaagactctgtctcaaaacaaaaaaacaaaaaccaaaaaaccatagtgagacccagtctctttaagaaaaaaaataaaaaagaaaaatcctaaccaagaattccatatcctgccaaactaagctacatgagcaaagaagaaataaaatctttcccagacaagcaactgctaaaagaatttgttatcaccagactggccctacaagagagtcttgagagttctaaacatggaaatgaaagaatggtgacacctgctaccacaaaaatacacataagcacatagcccacagaccctgtaaagcaactacacaatccaaactacagagcaaccagctaatgacaccatgttaggaataaagcctcatgtctcaatattaaccttgaatgtaaacaacctaaacaccccacctaaaagacttggagtggcaaattggattaaaaacaagacccagccttctgctgtcttcaagagacctctctcacatgtaacaggactcataggttcaaagtaaagggatagggaaaaaaatctatcacac

SEQ ID NO: 146409 - DNA, 425 bp, Homo sapiens
ggggaaggaatggggaacggatgcttactgagagctactctgtgccaagtactgtcccatcctttttacctacatcctcacaagatgggtaatattagcctcatttaaatccaaggaaactgaggctcattgaggttaaccagcctgctgaaagttatcctgccagatgcaaatggaagtctaaatggataaatatgtatgttttccaccaaatccctcaatgccacactgacaagcatggtactaggatgtagagaaagtaagatgattatagagacatcctttccttaaggaggtcatcatataacacagaagttgcaataaatggacaattatagaacttctaataggtgggcaccctttcaataagtagctgaccacgcacagcctccctctgctgctatgacactgtccttatgcagagg

SEQ ID NO: 146410 - DNA, 124 bp, Homo sapiens
gtggagccctttgcatagctcactgaattggggcagcaaccctggggctggggactaccattatctccaccagcccagcaaagaggggaggagggtacagccgagacccagctgcagtatgtgg

SEQ ID NO: 146411 - DNA, 430 bp, Homo sapiens
tgagacaggagaatcgcttgaacccaggaggcagtggtttcagtgagccaagatcgtgccattgcaccacttcagcctgggccacagagtgagactttgtctcaaaaaaaaaaaaacaaaaaaaaaaacgcttagagcagagcccagcagggtaggcctcaggtaagcatccatcactctccttagcatcagctcatgggccggttgtgaatattagaggcagaaaggcatgcaaactgcagagctcggctcctgggggaaagttccctgtgaacgttagcatggttagtaaggagcaggtagaggaaagaaagaaccaaagaaagaacagaaacacgaccagagataatagaatctcacagaattgccatggcctcagtccctggttgggattctgattcgctaatggaccaccaggctcatcccatct

SEQ ID NO: 146412 - DNA, 406 bp, Homo sapiens
gcagggagggaaggaggggtcatgagggtctcagtaggtcccaaggggcttgaaggggccttggtggagggttcagaggatctcaggggctcatcttgttggggggactctcagggtctcagcaggtttggcatggtccggtgggggggcagtggggtcctgcagtcctcatgcgggtcccaggggtcctagagcttttctaggtttcagtgagggctcttaggtctgtggtgccctggcaatatcttgaacggggtcctcagggcatcccaggggcacagtgagtcctcagcatcccggaaaagaactcagtggggtctgaagggaaggctcccagggacctggggggctcagtggcattgtggttgttccctaaggtcccaggggttcagtgggtgctgggcgg

SEQ ID NO: 146413 - DNA, 415 bp, Homo sapiens
taacggcgatggttctagcatctctgttttctgcttttttatcccccctggcagagaagaaactttgaagctcatcactttgtgggcctaggctggaggcatcggggcacctcagtaggcccaggggctactgggcattcctccactgcaccatccctggcagggcaggcgggaatggggttctcctaatgtcaggattccccgcaggacgagggcgcatctggcctcccttggtctcgggggtgaacttcacagaaatggaaagtttatcgtgaatgaggaaagggcagtaaaacccaaccccatttactgggtggggagaaagctgccacccagggtgtccaaatcagctgggaaaggtcacgccctttgggtggtcactgggccttgggaacggggccagaacccagccagg

SEQ ID NO: 146414 - DNA, 479 bp, Homo sapiens
ttctgcaaacaccagattcatagacttactagcagcttgcaccctcattgtggaaaacctataggtattcaacatcagcccagcccatgaggacaactgtggaggttagaccctgcaacttcacaggtgcagagctgcccaaggccttgggagcccaggcctcatacccttgtgctctgaatgtgggatctggattcaaaaaaatggtttggaactgtaggattcaatgactggctgttggatttttgactcctatggggtttgtaagtcccatctgtgttttgttcttctttctggctaatttcttccttttggctgggaatacttacccaatgtgtgtacaatcactgtactttggtagtagttaacttactttgtatttcagaggctcaggggcagaagagaccccagccttgtctcagaagagactttgggctttggacatttcagtaaatgctggaatgagttaagagattggg

SEQ ID NO: 146415 - DNA, 514 bp, Homo sapiens
cataaaagggattgctatctgagaaacaggtacgtcaacagagacgctgactgataggcagataagtcaaaaccacccctgcagcgtctacccctctccctaagtgctaactgcatattctcatatgggaaaccctatatggaatacaaagtcttaaggctaatttatactctcccttgacgcagactagcccattaaaaactgacctgtcacctcacagcattacaaaaggggaggagccaaaacaatcaactgtggggatgacatgtcacacaccaaaggcccaaatcttctctacgagtgacctttgtcacacgagacacaaagaaaatacgtgactcacgacgaaaggggaaaagggaggtagccactaacgtggagagacatgggcacagcttgcagcaccctggggggtgtcaagtgggctcactgaggctaggatgcagggtgcaggaacactcctatcttctgcatggatgagctccttggaagacctccacagagagtgcctggg

SEQ ID NO: 146416 - DNA, 446 bp, Homo sapiens
acgcctgtaatcccagcactttgagaggccaaggcaggtggatcacctgaggttaggagtttgagaccagcctgacctcaggtgatctgcccacctcggatgctgcatgtttttaaacatgtttttctaaccctggcgcccttgaagaccaggttctgcataaacaggaggtcctgtcacaggcctttccgctcagctcagcatgaggaggagaatcaacctgttcctcccctggccacgcccaagacgaggcaggtgactcaatggaaagagccagaccgggtgacaggagctaccccgtccctccccagcctcccaggccggctgcagggccaagtcacttcccgcctgagcctccttcctcttcttttaaggggaagccacgcccccagtccgcttgtagtcgggaaatgacggggcagctcaggctggctggggctgtgttt

SEQ ID NO: 146417 - DNA, 271 bp, Homo sapiens
aagatatattcctaatttttaaagaagaatgtagagatacttaaacaagacaatgaaggtggtagaaagattattaccatccccaaagtgtttgctcattaaaacattttgtgattttctctgccaatatcatacctgtatggataattgttttcctatccacacagttatgagagtgagaagatggaatataaaagatggaacaagagggaatctgtgtggtgaccacagtaatcacaggctggttgggatcctaaactcggccacagca

SEQ ID NO: 146418 - DNA, 489 bp, Homo sapiens
cagtaaaaggaatttctaaaaattgcttcttagccacagactttgttaaaaagttcctgttttaactgctttaggcttctggctgtcttctttttaagaacattctagaattatcataataattccttattccagataaattacaatttaattactacttttaaaaatgcttgaattattggaatccatgggcaatacatcttcacatgtcccttattcatatgctaagcaagttttatttttgctttttttttgcatttaaataatatttctctgaacattctgtctcagaaattgatgtttaaattcttaaaaataatttgtattgtaagaagtggctatctagctcttgaacaagtcataaaaatcctttgatgtgtgaatattcttctacctaagacctgaaatgttggcgaagtaaatatgttgttccaattttggtcaaagtaagaaacagagaataaaaagttaataagaatagcttcttgt

SEQ ID NO: 146419 - DNA, 327 bp, Homo sapiens
acctgggtcccagattcagggatttcagtccagagtaatttcaaaaaagagtgccaggcacagcatgaagccggcaacaactacccccttgtatattaatagcaaaaaatgaatagtaagaatactttttaagaattttttaaatattgaaaaaaatgtagctttatacaaattttacttcaaggtcattgtttttctccttttgtcacggaaacggtcctggactgccccacctgcagactggctttttgcagcaactgacccgtgtagtcagccaagcagtccacaatatttcaccaccacggcaggagctccatgtgaacgtcc

SEQ ID NO: 146420 - DNA, 560 bp, Homo sapiens
ttgaatgatgatgtaaaggttttccggcttggctagttaggtgattgtgacctcccaaccaagacagggagtataagagaatgagaaggtttgagagaaaagattagaattattttgaccattctggggttgagatttctgtgggtggtgacatatgatagcaagtttactgggccaaggccccatccagaggcagtcacagacctgagggctcttaagtatagaaggggcactagaggcatgggtctggacaagctcacctgggaaccaaggcagaggcaggatgagaagaagaaaatatgggaaatgatagcatttaaggaatggctagaagaagataattcagcaaatgacacacaaaaaaaaatggccagagaagttagaacagaaacagatggctgtggtgtaatgcaagctctgagaggacagggccatatctcggcttacttcgtatcctcggttcctggcccagggcctaccatgctgataaaatgtgagctcagcatcaataaaaatgtgctgagtcccagtttatgagtttacagaaggaaatggcggtc

SEQ ID NO: 146421 - DNA, 274 bp, Homo sapiens
tttaatcgccgtccgctgggagagaatgatgactcgccccacgcaccctgtgggtaatggctgtgggaatcgtttctttattcataaaccaggcttctcctattgcagagacagtgagtgatgtggtgttgtaaacagcgaggggagaaacaggggtcatgaattcatctgatgccttgcagaatttgcattttattgatagttttttgtctgttcaagttcgaaatctgctgccttataatgggtccctttgcccaccagcggtcgacggacg

SEQ ID NO: 146422 - DNA, 219 bp, Homo sapiens
accccgccttcttttgcatagcactgatcagcagctggcgttttatttatgcatatctaattatctaaccacctccagctctcttgtgcaatgctgtatcctcagtgtaacagacagaaattattctataaacatctgtggaataaatgaataactggttctataaacatcatgctgatggccgggtgcagtggctcgcacctgtaatcatagcagttt

SEQ ID NO: 146423 - DNA, 400 bp, Homo sapiens
ggctttgcgcctgtccaagtggcacacgtccctggaagggacccgctgctgcagtactccccagaatggcttgggcttattctcaggcatccagatgctgtacttactaacaggtctagaatctgaaatgccatgaaaatgccaagaatgtggcaaggaggctctcccaggccaggcagcaggcccagcaggccatggtatctcaccctttgattcactcagcaggtcctctgtgctaaagcaccttgcctacactagctctctgactctccccaacaactcggcaaggtaattactatttattcccattttctacatgaggaaactgcagctcagagaggttaagacacttgccacaggttgtacagtactggcatccagggtctgcgttatgccaaat

SEQ ID NO: 146424 - DNA, 188 bp, Homo sapiens
tataaatgaccaacaacatagaaatggataaataaacagcaatgcttcccctctgtggactatcacaaccactaagaattgcagttaagaagcatttagaacaacatgatgaaatgtataaagacagggaaaaataagcaatgtgccaaatgggcgtatggcaatgatctctatgtgggacaaacacc

SEQ ID NO: 146425 - DNA, 747 bp, Homo sapiens
atgacagacgtggggaggaaaggctgagcgaggcaatgtcctgactcactctggcgcttccctctttcccatctgggctccagagtctctgccctcattccccttcaccaggttgctcaaccctccatcagactgttaggtcaagggtggacaaacagaccaaccgggatctggatggcccctgggcagtactgacttcccctaccgttcccatggcaagaaaagggagtgattccactagcagactcccctaccctgcagtgagacagcctgtaggaaggtgagactcagaccccaaggtttctgcttttgctttgttccttcgagatctccgttcccccatgggagagaaacctctctgtcccacctgccctcccctcccatcagctttcagattctccagctgctcctcttctgagactcacccagtctcatgcctccattagcctcaactcccgacccatggcctgtggtgagaggtgctaacaacatgacctgctttcatcttgaccttcccagcccacccagagaaaagggaatcttggctaaaaaaaggctggaagaggggagaaccctggcactgcgggtggggctgggaggagcccaggcaaccttactggtgagaatctcatggctcttcaaggtgaatatgatgatgatttccctggggtttctttcaatactcagaagccgccccgagttggaaagcacatgcatacttggggaggccaggggaggaaaaggggg

SEQ ID NO: 146426 - DNA, 680 bp, Homo sapiens
gtgggtaccggggaaggaaggaacacatatgcacaggccacacaggagagctccgagagcgaatgtgatgtgctggagcctggcaggaaatgtggtgggtaggaaagtcaagtggagggcactggatggagggcatggacaggataagaagattttattttatcctgctgatgtatctatttgggagcaaagatgtctgttctgaccactctggtagtggactgagtacattgtaggaagagagtaaaatgaacaaaccaaccaccaggctccacggaaaaaccgaggtttttcattccatgttttcattcaaatggttttgttcccagaggtggtccaggaaaagcctttgcattcacatcagctacattgtgaatttttttcaggtataactcacataccataaaatttgccattttaaagtgtacaattcacctggttttaaggatgttcaaaaaattgtgcacattgcactactaattccagaacatttccaccatccccaaagaaaccccacacccattagcactgcctcctcgttccctccccccacagccccactaatctactttctgtctatgggtttgccaattctggacgtgtcatataaatggaatcatacaacatgtggtcttcagtgactggcttctttcacttagcagaatgtctgcaagggtcac

SEQ ID NO: 146427 - DNA, 400 bp, Homo sapiens
tggatggctttctttcatttttcaagtaggaattgagtgcaaagataacaactgtcctcaagaagaaacaaacaacgcaaaggaagtcatcttaacattattctcttttcttcaccttttaaatctcttttgctctgccttctaactcttcctttcaccacccaattcctcttgtaacacgtaaaatgactacaaagtcatacactgttcaaaccacaaataagaaacaatccttttcttttatagctatcaatagaatggatgtattctcaattatattttccaggcttagtctctcccttttttctttctcttctgtttcacacaggactgttatccagttttccaacaaattcccaggttactttctttgttacacaactgtgtatgctcaaataat

SEQ ID NO: 146428 - DNA, 545 bp, Homo sapiens
cttagagaagtagttgcatgggaatggtatatttggttatggaaaccaaataaggttcaaaggttagatgacgatgccctaatagaacaatacaagattttcacctgctgttatgtaagaaaaagattttaaggtcaagtaaatttaggaaattctgacttaaacagattaaaagtatcttttactacagtatttcacagtctttcatatgataatatgcatgaaaaactccaagaagagatcatggtgtttagaatatcccaaatttagctggccgcataatttttttacagtaaattttatgggattcacatgctattatacactggataatgctgatcagaaaccaacattaaacttctcttgttcgtggtgaggcgcggtggctcatgcctgtaatcccaacactttgggagggcaaagcgcgtggatcacaaggtcaagagatcgagaccatcctggccaacatggtgaaaccctgtctctactaaaaatacaaaaattagctgcgctgggactacaggcatgtggtcgacgcggccgga

SEQ ID NO: 146429 - DNA, 287 bp, Homo sapiens
ttttctatatgatgtatgtaaagaatttggcaagagatgatgtttggaaaaaataaagaatggctattgtagagatcttaaggaaagaaactacagttaagtagtgctttgtaatcagaatatgaagtaagtactgaaagtggatggagtggctgttgtcagcatgttatactttatacatttcattcataaatttggactgtagataaaagtaaactttttttttatttactcttgaacaacagtttttttttttccacttagacttgcatctgctccactgaaca

SEQ ID NO: 146430 - DNA, 381 bp, Homo sapiens
gaagcatctgcagcatataaaaatataacattgctttcagcttctgaggcttctatgcctcaagccaaaaggtaatgagttccctcaaaaatatttccttctctttctttaaaaaaatgatttgggggacgggggcaaaacaaaagcaatttataccaccttacccagggatgaagagtaaccatgcatcatgcctgcttttaatggtctcactttcttttacctgtctttccctccaggaccaggattctattcctgtcccaactccacctccatccaacgtcattcccccaaaggcctgctcttcagctcactgggttaaaggcattctgagtacacaagcttttcattactgcttagatttcttttctgctgaccatg

SEQ ID NO: 146431 - DNA, 312 bp, Homo sapiens
gtaagctccaagaggacagggaccatgtttgttttgcttatcattgtaccctagcacccaacagtgatggcacatggtaggcactcaaatactggtttcttccactttctatggtttattctgttcctttttaaatgcaaaggctccatttcttttgttttgttttgttttgagacaggatctcactctgttgcccaggctggagtgcagtggcatgatcatggctcacctcagcctcaacctcctgggctcaggttgattctcccaccttggcctcctagggattacagtccctccttgggactacaggca

SEQ ID NO: 146432 - DNA, 555 bp, Homo sapiens
accccctcatgtatccagggaccaggctacttctccccagccagggagccccgtccctgtgggcatcactgaccacacgcagttctggaatcctgtgtttgccctcctagacgtggggtcctgccccctctggctctgccatttctctccatgctgcccctgcggccacaatcaaggcttggccatgacttgctcctccctgggctcactcctcagctgccagcgccttttttgatgaccaggtcagccactgctcctcccctgctcacacactatccatgactccccatcctggcactcaaggcctagcaggaacaaacaccaaagagcattctcttcttccaatgctttcccacctctagccctttgcacatgccagtccttccacaaggtgcatccttctgcctgcctggatgaaccctgaaacatccttctcagaaaaggttcatgatggactggatgaggaagcctttctcacacctcagagaagatgctgcatagctttccagaccctgctgatcccgcacagcacgaggatggtgaggagggagcatt

SEQ ID NO: 146433 - DNA, 190 bp, Homo sapiens
taccctgtggcagccagggctcagcactccagctcagatttcgagtctcgcccgccccagcctgacccctgccacccatcactgttggttgtcaccttggaccccggacagcttgcccattcaacaccaagcctgtggtttgggggcttcactgcagcctctgtgtgttaaagggatgccccaatacctt

SEQ ID NO: 146434 - DNA, 293 bp, Homo sapiens
cttgctatagtttcagtgtcccctccaaaactcatgttgagatttaattgccattgtgactatattaacaggcgagaccttggacaggtggttaagtcatgagagttctgccttcataaatggattaatgccattatcatgggagtgggctcctgataaaaggaggaagctcgaccccattccctgtctgtctcttgcactcatttgcccttccattatgggatgatgcgtcatgaaagccctcaccagatgccagcaccaggttcttggacttcgtggccttcagaactgtg

SEQ ID NO: 146435 - DNA, 322 bp, Homo sapiens
tacagtgtagggccattgactgactctagtagtggatgaggacaactcacagagagaaatctgacaatccatgtttagcagagggaaggaagccagaaatagttactaataagtgcaagacttcagttttgttggttttttgttttttactcccagcaagctaaatttgacaataatgtagctcaatttctccccatctcattttgttaatctctataatcttgccccagaaaagccatttgtaccccagctcagaaaattctgtattcatttgtcttcataagattgtaaaaatttcaaaactgtctgttcatgataatta

SEQ ID NO: 146436 - DNA, 793 bp, Homo sapiens
aaattataaagacatcaacatttttgatcatataataagtactggcttacagctaagtggttccaaatactggtaattaaaacaatgatgtatacgttaaagattgcaaaacttaaaagcagatttttatgggaacttttttcgaaaggatacatgaccaccttcttaaatagtatgactttacatagactctttttctggtccttactgctcctcccacaacagggaagcccgatcagttctgtcagtataaggttttcttctatttgcccttagtttagatctccatcatcaattccacttactattgtaataccttcagctggagcctgtgtctttctccattcctttttaatacattcgtatttcccagccccagaacccttgaaattaactcttccatgagttttcattgctgaagaaaaaccaaacattcttgtaaaaacatttaagaacttccatagtcttgttcatattgtttacctatcttctacacaaggcgtgtccttgggtaagttatttaacttcaatttaccttacctgtaaaatggaacaaataatatctccttaagattgctctacgaattaattgacacattatgtgtgatgtacttaaaggaataataaatgcataatatgaggtcagtggacgccattttctgttataatcatttttgttatctaatttggggaaactattcatctgtcatatactattgatcctttggcacttaaataaatgtgaaatcctccaggaattttcctgtgattctccttgtaagaattaaatgct

SEQ ID NO: 146437 - DNA, 358 bp, Homo sapiens
tcgctaagcccagaagagaaaagtctgtgcagatacaaaatatgtagcagcaactggtcttctaaaaagacagaaacagaaggggttcttgcctttttaaagtgatggatctttcccatctccttgcccacattctctcctacatatcagatgattactttctttgcttatttaattcagccatctcactctgacccatggacattatatcagccaggtcaactgaaggatcactctggattagtgtggtggtttcagtcttttagaggctatgcttcagaaagtttcacagatgcttacttaatattagttgtacttttagcgtctcttggttttggaaaactgctatgaatctgat

SEQ ID NO: 146438 - DNA, 605 bp, Homo sapiens
caaggcctgaacaaatatgttaaagtgcttattcccagttggcaagataatgggagttttttcttctttttatttctattttctaacttaccagcaatgagcacataaggcagttatgtcccatcagcccaggagtttgagaccagtctgggcaacatggcaaaaccctgtctctacaaaaatgagctgggcttggtgtcatgtgcctgtggtcccagctaaccaggaggctgagatgggaggattgccagaggctgcagtgagtcacgattgcaccactgcactccagcatgggagacagaggaagaccctgccccaaaaacaaaacaagaaacaaagaaataaaacaagaaaaaaattatttgaggatgctcctaattagcattaactagttcttagtgttacatggttctttaaaaggaacggtttcaaagtacagtgccctgaactatcaaccttaatatgattttgagagctgggttctcaggctgaaggtgcccctgatggattcagatgagatggaacgatggtccctccctcagtacagatcctgcttctaggccatcattcatattctgaatctgacaggcaggtatttcaaggaa

SEQ ID NO: 146439 - DNA, 288 bp, Homo sapiens
tctcagcctcctaaagtgctgtgattacaggcatgagccgtggtgcccggccatgacattggttttgattttataatgaataaataggaagaaaggaggagagctgcctttgagactggctctgaagacaaaattatttttgcaaaaacccaaagattggtgaacttcagagttcacataggctatggttttatatatattagctcattaaaactaaaccatgaagagtaatagaaatggaagcttacaggggttataacttttccaaggtctcctagctagtttttg

SEQ ID NO: 146440 - DNA, 277 bp, Homo sapiens
taaaaccaccgccatctgggaagtagccaaggaaagagaggtgtcttactggcaggccaaactgatggctggtatccacttggaatcaactttctgtgatgtggatggatagctggacaggggagggaactcctcagagattgctcaccctgggcaggaaatcggaaaagatgttctaataatgaggctgtgatcattagaaccatggccctgtaatcacacaattaattgtcttgcacacatttagccttatagcactgaaagcagcttaggcttt

SEQ ID NO: 146441 - DNA, 410 bp, Homo sapiens
tccattttctcccaacacttaaagcaagaggtataagaattctgtgggtttaggccgggcacagtggctcacacctgtaatcccagcactttgggaggccgaggcaggtggatcacctgaggtggggagttcgagaccagcctgaccaacatggagaaaccccatctatactaaaaaaaatacaaaattagctgggcgtggtggcacatgcctgtaaccccagctactcatggggctgaggcaggagaatcacttgaatctaggagacagagcttgctttgagccaaggtcgcgccattgcactgcagcctgggcaacaagagcgaaactctgtctcaaaaaaataaaaaaaattctgtgggtttttcctctagtgtcagcatagtagtcatggcctttcatgggtctgc

SEQ ID NO: 146442 - DNA, 485 bp, Homo sapiens
ccccacatgttagaggaaaggcatggggggaggtgactggatcatggcggtggatttctctcttgctgttctcatgatagtgagtaagttctcaaaagatctgatagttttaaggtgtggcaattccccccttgctcttttactctctcttgccaccatgtaagatgtgtcttgcttctccttcaccttctgccatgattgtaagtttccccagccctgcagaactgtgagtcaattaaacctctttttctttataaattacccattctcaagtagttctttatagcactgtgaagatacaataaccaacacttatacaatacaataaccaacacttaactagtattaatgatatacccctattaagcaaaaggatttcttgagtgaagtaaacccaataaccagtatttcttttcaaaaacatctataaaaatactaggtttctataaaattttccagataccacttgatagtcattcaattga

SEQ ID NO: 146443 - DNA, 395 bp, Homo sapiens
ctgttggggttggggaatggcaactgcccatctgcattgtctgaggaaggggatctgggggtctgtcttagtattgccttcacctgtctacattgccatcaaatcctgagtccttaggggattccacactgtaactcagcttgccaggttaggatttagcttaattcattctgtttttattttctaaaatttgttgctgttttctctgaattcataagaaagttttaaaaggtttgaaagaaaagcaatacagagaagcttaactctaacatgaaaaatttataactaatggcaacattgggaaaaagcaagattggcagcatatgaaagtaagaacattgcacaaatgggcatatttagtcagaattcttaggagatgaactgctaaacatcgg

SEQ ID NO: 146444 - DNA, 530 bp, Homo sapiens
gaaaagcaagaaatgaaacccaattctggccaacatttgggaaaagggaggtgagactttgaactaagagaagatgttgggattctgtgaggtagtctgtgtttgaatggaactatcatttactgatttgttgcttgatgatccttataatttcaattgcacctcacctttacaattagtttttcagtttctgtgagatcaggaattatacctcctaccactttttatgcagcctaattttccctccctagaacataagataaagtggattttgacagcgccaagacataggaagtacttgttgactttgctgcttcattgattcctgcatcatcattatcatcataagcatccttagcaagtcagtagccataataaggcccagcactgcgtgcagctcaggacaaagggaattaattcatggacaagcaccttgctctatggcagtaaaagcagacatatgaacataaggaaaaatcactgcttaaagagtaaggtcaagagtgcagcttgcaggctgctacactgcc

SEQ ID NO: 146445 - DNA, 180 bp, Homo sapiens
tggcaatcatgtttcaaatgtgaagtaaaatatttatcttctatggtcaattccctttaaaaggtatcaaagacagaggaatacaacaggtcagtggtagagactgtaattagtctccaattcacatgtatatcatatctttataattacacatttaagaaatatgaactcacatatctt

SEQ ID NO: 146446 - DNA, 165 bp, Homo sapiens
gctcccgctcacactttccctgaatacatgacctccagctctttaggccaataccctggggtcagtcttgcctctatcctttcctacagactctcatctgaatcatcagcaaactccactctttcagtgtcagaaataatgattctgtttttctcctttgaccca

SEQ ID NO: 146447 - DNA, 344 bp, Homo sapiens
cgccagggccaaccttggagaccttgcccagatggggccttcgccgagccagggctcgatggagaaactatgtattctgagctgtttatttaagcacagggtggttcctaatggagccatcagaccttgctcattggctaatagtttaattgggcccatctggaggacgctgtggcgagaactgtccctgctctgatattggcagggaggcaatttgtcattctgtggccagtgactggcactcccatccccaaagccacacagaagccgggccgtctgtctcacgaggggagagcggaacatctgaagcgttgtgtgttcaccttggcacagaaggagaaacg

SEQ ID NO: 146448 - DNA, 181 bp, Homo sapiens
ctggggaggacagtcatcaaagtcagagactgggccctgagcgatgagccctgggctttccattcttcatcccaaaaatgctgcctgtgctccatgatgtgtcaagctctccccaaggcactggagatacagcagggaatgaacggacaaaaattccactttcatggagcacaccatgtag

SEQ ID NO: 146449 - DNA, 191 bp, Homo sapiens
attttcatggttacacacacacacacacacacacacgcacaacactgattggtcctagaaaaagaaacaaaataattttttaattattattaccaatatgtaccatctacttgagaggctttccttcaatctaatgaatcaaaattgtaaaatattttaaagtgaaaggggtataaagaaaattatgttta

SEQ ID NO: 146450 - DNA, 307 bp, Homo sapiens
gagacaggaagttccggagggcagtttgggatgccgccagcagagtggctgccgctgacctgttcgctgtattgcgatgggttcaggacacactaccccaaaatacaccttggcgactgaatgtcttcagctggagaaacctgagaaggagcatgtgcaggaaggactttttgaccgtcccctgaagcaggtcggaagcccctggtgcgagaagcgccctgctggtacctggaggaaaggagcatcttatcgcgagaccatggagcggggttggaacgacatgcctggctcaggtccccgctcactc

SEQ ID NO: 146451 - DNA, 172 bp, Homo sapiens
ccagaattaagacagcattaaagaaactgaagacaagcagttgggatcctcaggatgggaaagcacgggtaaacgggcaggagacctctgggcgccatttctgaaccgggcagctgggtagatagatggcggtgtcttcccttggcctgatggaacagggagggggtggcag

SEQ ID NO: 146452 - DNA, 201 bp, Homo sapiens
acagattacacgtttatgtcttgatgtgtggttaaatttgtattataatcagtggaatataaaccagtattgtggaacagattatccataaataataaaactgtgctcagacacaaaattaattcctatatggattaaagatttaatgtgtaaaagtaaaaaatgtcaaatctttctagaaaaatataggaggatgtgttc

SEQ ID NO: 146453 - DNA, 633 bp, Homo sapiens
ttgacctctaatgatatttattgttttgtaaatccattttgtgtgattttattatagctcctcagctctcttctgattcctgtttgcatgatatattgttttccatcattcgaactggttaccatttgcatggtatactgttttccatcattttactttcaacttacttctttctgtaagtctaaaatgtgtcttatagacaacctgtacttggatgtaccttttttatccaggcaaataatccttgccttttgattggaatatttagttcatttacatttaacagaattaataatatggttggatttatttctgctattttactatttgttttccatatgtcttacatcttttttgttccactttctcctttattgccctcttctgtttcagcaagtatttttcagtgtgtcattttaattcctgttaattttttgctattaaaaaaattgtaattggttgctgtagggattgtatgcatcagtcttcttcaggttagtactgactcagttctggtaaaatagggcaactttgccccgctgtagctccattttcacttccttatgttataaatccaagaatacaaggaaataattattgctttccacaggtttgtcttttaaggacatatag

SEQ ID NO: 146454 - DNA, 591 bp, Homo sapiens
actgaaaaatgggccatcagaattacgggagatgagcaaaactggagtgcaataggaagtgtaagtttctcctgacctggttattttaaaggagccctgtggggagtccaatatatactttcccaaatatgaatcacaggagttccaccacacagactaagcaggaggcaaaggaggatggcaaggaagtgtggcaaatactgctggagagattcatggtgctagatgtgatgatggatgttgaattttggacttctgccaatgttcttgcctccattccttcacgcatgctgttgcctctatgttccctcccctctgttagctgcagtaattcctggtcagcctttaggtctcagctcaaatatcacctcttccaggagacttcttgccttcccagacctgcttgggtgacttgcctctgtgctctgcagtagtctggcatggcatgtgttgtccctgtttttctggccctttttattttttgagacggagcctggctctgtcgcccaggctggaatgcagtggcaccatctcagctcacttacctcactgcaatctctgcctcccaggttcaggtgattctcctgcctc

SEQ ID NO: 146455 - DNA, 541 bp, Homo sapiens
cctccatcagagatctctgctcaactccgagtagctgggatcatcacgtacaggagttgaaaaagatcatctagcaaagccttttttcccagctacatactaggaattacaagcacaaaatggagaaaaactagaatgcatcctgcggtggtttttgttgttgttgtttttcttgagatggagtttcgctcttgtcacccaggcaggagtgaaatggtgcaatctgggcccactgtaaccttcacctcctgggttcaagcgattctcctgcctcagcctcctgagtagctgggattacaggtgtgtgccatcacacccagctaatttttgtatttttagtagagaccaggtttcaccatattggccaggctgctctcgaactcctgacctcaagtgatccatccacctcggcctcccaaagtgctgggattacaggtgtgagccactgtgcccagcctattatattttgagcaagagtctcactctgtcacccaggctggatggagtgcagtggcacaatcttggctcactgcaacctttg

SEQ ID NO: 146456 - DNA, 427 bp, Homo sapiens
tgatacaatcaacgcacctagcccagcacaggtagactccaggtgctcaataaatggcagcgattagcatgattaggatttcctctctgctgtgtgaactggaccaaaagtttcccaggctttaattggtccctctcccaacctgagattgggacgggtggccacgtctacatgtcctcccaaataaatggccacccacagtggtggcaggtggaattagaatgttagccgggtgtgcctccccataatggagttcattttttatacaactgggaacttttttaataaagaggtgaaataatctcattgccgccactgccgagcacaggacgcattaggcggctccccagtgagctgtttaattttattaattttgccaaaaaggtacagctccccttcactagagatcctccagggagaaaggggg

SEQ ID NO: 146457 - DNA, 359 bp, Homo sapiens
tagaatggaatctttatagcagtcagaaggtgttttgggattagtgaggccttcaggtcattgccgtgtgtagcagcccttccgaaggactaggatcacggcagtagccacagacctgggcaagggttgattgtgtggagccttagacattaaaggcataggaaactgagttgaagccttagcagccttggaagtttctttgcttttcttcctccactaaaaccttgattttttttaaccttatatagttgttacttgttttcttgtaaagactgtggctcagtcaaatgtgtggttccatggcagtaaattatcaaataatagtgattaatatttactgaggctttactgtaggccag

SEQ ID NO: 146458 - DNA, 329 bp, Homo sapiens
tcccaattagatagtttttaattattttaccccatagcaaacacataagtagcaacaggtgccccttccaaaatcacctgcaaaacaacagagggaggctggagcagcagaatgggtcagggctttggactcaggtggagattttattattattttttgatacagtctcactctgtcgcccaggctgaagtgcagtggcacgatcttggctcactgcagcctctgcctctcgggttcaagcgattctcatgcctcagcctcctgagtagctaggattacaggtgtgtgtcaccacgcctggctaatttttatatttttagtagagatgg

SEQ ID NO: 146459 - DNA, 183 bp, Homo sapiens
tgcctgggagaggctgagaaaccttcttgcttgggggaggtggggcactgctagaattaatcgcttcacagaccagcccatccaggactcctcaaatttggcaaaaaagccattcattcattcattcatttatgtagagacgagggggatctggctatattgcctagattggtctcaaattcc

SEQ ID NO: 146460 - DNA, 243 bp, Homo sapiens
ctgcacacctggacaacctggttctgtaaaccacgcctttccctgttttgctattgccaaccagatttcaggttctgccactgagtcctcctacagcaacagcagaccacagccgcccacctccagacagcccccggtctcactggccacagacttgctccttagaggcaaggccactggcaggctctcagttcctctacggaatgtgaaacgtgcctcatctccccagccgggaaagaaact

SEQ ID NO: 146461 - DNA, 209 bp, Homo sapiens
ctggtgatttccaggaagtgacctcacaatgactcaagctaccacatactgttcattgtgaaatgccagttgaagcatatgtcctgtgagcttaggggtgctacaagttgaccactgcagcagtaaagatgattctgaagaatggcatgggatggatcctttcgaatgcacttgagcagcggtctccaaccacagggccacagagctgg

SEQ ID NO: 146462 - DNA, 1290 bp, Homo sapiens
cctgccggctctggactagccgctcagcaccagggcggaaggaagacgaggcgaggcaagcgccaagcttccatccggacttcaaggccagtggctgggtctggttttctcaacacggcctcctagtctccttcccgcttgggcatctgtttttcttatatagaccctgaagccgcccgtgatgttctgtaagcaggttccgcttcagaatcagaggtacttaagagggaacctggatgctagacctgcccttgctgctggcctcagtttctttacctgtaaaacagggattttggaactgttaaattaaatcaaacttaaaagaattacaacttaaagctgctggaactttacatgatcccgagccttgagaggaatgtggctatgcagcctgagtcatgtggcatgcagatgcaacctctgcctttttccgctgtaaataattaagaagaccaagtagcatccaagagtcacctaagctgaagattcccttgagaacaagtactgtcctgtggtttcatggcctttcttccatttgtggttcttgccaagcggaatttaaatgacatcttatcaagatggataaaccctagtttcccagtgctggaatatagaaaatggatggacaagtaaatcccactcagcacccatagcccaggcatggggacctcaacacatttgagccgcagagatcacctttcattgtgaatagctctgagatgatacttctggttgaatgtctttttgtcacttccggctggatctaccatgaaagatttctgaatccaggaagagagattgactgggcaacatgttattcagaaacaggaccttgccctgtcactcaggatggagttcagtggtccaatcatggctcattgtagcctcaaactcccaggctcaagcaatcctaccacgtcagtcttcccagtagctgacagggtctcactctgtcgcccaggctggagtgcagtggcatgatcttggctcactgtagtgtagacttcccagcctcaagggatcctcccaccccagactcccaagtagctggaattacaggtctcatgctctcactcaggctgcagtacagtggcacaacctctactcactgcagcctctacctgccaggctcaagcaattctcctgacttagcctcccgagtagctgggattacaggggtgctacaagttgaccactgcagcagtaaagatgattctgaagaatggcatgggatggatcctttcgaatgcacttgagcagcggtctccaaccacagggccacagagctgg

SEQ ID NO: 146463 - DNA, 2807 bp, Homo sapiens
  misc_feature (2683)..(2683): n is a, c, g, or t
  misc_feature (2800)..(2800): n is a, c, g, or t
cttggcctctgtttatttgcaaaaacgagtaaagtgttacctacctgcaagtggttcagtgcgtgccggggtgtcaggctgcaggtatgtgagcttgttcaaggcttgtcttacccacatggctgtttttctaggcctcgggccagtgctcctttaaaaagtgatgttcagcgtagagtcgctggagcgggcggagctgtgcgagagcctcctcacttggatccagacatttaatgtggatgcaccatgccagaccgtggaagatttaacgaatggggttgtgatggcccaggttcttcaaaagatagatcctgcatattttgatgaaaattggctaaacagaatcaaaactgaagtaggagataattggaggctaaagataagcaatttaaagaaaattttaaaaggaatcttggattataatcatgagattttaggacagcaaattaatgactttacccttcctgatgtgaaccttattggggagcattctgatgcagcagagcttggaaggatgcttcagctcatcttaggctgtgctgtgaactgtgaacagaagcaagagtacatccaagccattatgatgatggaggaatctgttcaacatgttgtcatgacagccattcaagagctgatgagtaaagaatctcctgtctctgctggaaatgatgcctatgttgaccttgatcgtcagctgaagaaaactacagaggaactaaatgaagctttgtcagcaaaggaagaaattgctcaaagatgccatgaactggatatgcaggttgcagcattgcaggaagagaaaagtagtttgttggcagagaatcaggtattaatggaaagactcaatcaatctgattctatagaagaccctaacagtccagcaggaagaaggcatttgcagctccagactcaattagaacagctccaagaagaaacattcagactagaagcagccaaagatgattatcgaatacgttgtgaagagttagaaaaggagatctctgaacttcggcaacagaatgatgaactgaccactttggcagatgaagctcagtctctgaaagatgagatcgacgtgctgagacattcttctgataaagtatctaaactagaaggtcaagtagaatcttataaaaagaagctagaagaccttggtgatttaaggcggcaggttaaactcttagaagagaagaataccatgtatatgcagaatactgtcagtctagaggaagagttaagaaaggccaacgcagcgcgaagtcaacttgaaacctacaagagacaggtagtagaactacaaaacagattatccgaagaatcaaagaaagcagataaactagattttgaatataagcggctaaaagaaaaagttgacagtcttcaaaaagaaaaggacaggctgagaacagaaagggattctctgaaggaaaccattgaagagcttcgttgtgtacaagctcaagaagggcagctcacaacacaagggttaatgcctcttggaagtcaggagtcttcagacagtctagctgcagagattgttacacctgaaatcagggagaaacttattcgtcttcagcatgagaataagatgttaaagcttaaccaagaaggttcggacaatgaaaaaatagccttattgcagagccttctagatgatgcaaatctacgcaagaatgaactggagacagagaataggctggtgaatcaaagacttctggaagtacagtcacaagttgaagaattacaaaaatctttacaggatcaaggctcaaaagcagaagattcagtccttctaaaaaagaagcttgaagaacatctagagaagctgcatgaggccaataatgaactacagaagaagagagccattattgaagatctcgagccaagatttaacaacagctccttaaaaattgaagaattacaagaagctttacgaaagaaagaggaagaaatgaagcaaatggaagaacgatacaaaaaatacttagagaaagccaaaagtgtcatccgtactttagatcctaaacagaatcaaggagcagcaccagaaatacaagctcttaaaaatcagctccaggaacgagaccgactgttccactcattagagaaagaatatgagaaaacaaagagtcagagagagatggaagagaaatatattgttagtgcctggtacaatatgggaatgaccctgcataaaaaggcagctgaagatagactggcaagcacaggctcagggcagtcatttctggcgaggcagaggcaagcgaccagcagcagaagatcatacccaggccacgtgcagccggccacagcaaggtagagaagttgtgccgctcaatcacagacacctgcacccacaacatacttctgttacacacaagaacatttcaggaaactcagccagcttattttttgtttctcttctatgtcaatacttagtgtttctcattttgaggactttttctctctcctgtatctttgttttagtttctttggtttttattttgtagtcctttcagttatttttaatgtgccaaaaatttgtacatgttcaattaaaaatgttgtataatagtgtaatacttttctttgtatgaaaatgtcctcttcttcaaaggtataggctttgtaatgaattagattttctgccaataattgatatacaatttatattctttattgngcctgtgtgttaccatgctaagaatgtctttgtttaaagggaattaatctttttatgatgtattaatctgtgttttcaattgttttccaagtacagttcaaataacttgcatatttnctataca

SEQ ID NO: 146464 - DNA, 676 bp, Homo sapiens
ttgaccacaaaactagccacacagctgatctgtatcaccttccactcattttaacatcagtgtacgtaacagaatcgtacattgttaccgctttgacttcctttgttcgacattctgtgagatctattcatgtggttgagtatatcattagttcatttttttattgataggtagtgttctatttgttaattcttatttttagaacttcatttttttgcaacaagattttgcatggtaaaacctttgcaaagttatctaaatattcctagaaaaaatgtataccctctctttatgcaggtctatctaaactaaatgactactttttcaaacagaggaatttttttgtctttattttttacttattttttaaatatattaaatttgtgttttgtcttttcatatatgtttcatatcacttgcatgcaatgcaagtgtaatccaaatataaggaactcagatctttaatttgaactggaaaaaattacagaagcagtagtaggtgatgtttacctgtttgttacagagagaagctgcatgaggccaataatgaactacagaagaagagagccattattgaagatctcgagccaagatttaacaacagctcctcttcgacgaattacacgaagcttaccaacgaatgggcacgctgatgcacctgcatgaccgattcacc

SEQ ID NO: 146465 - DNA, 377 bp, Homo sapiens
gctgggggtgacggtgcggagccgctgccagcgctgggcgagagtcggcggccggatccgaggagcaggcgggcctgaggccgagtcagctgcgcgggcccccggatcccccgacagagcggcggcggtgtctggccaggcggtaggcgctgcctggccgcggcggggaagatgttcagcgtagagtcgctggagcgggcggagctgtgcgagagcctcctcacttggatccagacatttaatgtggatgcaccatgccagaccgtggaagatttaacgaatggggttgtgatggcccaggttcttcaaaagatagatcctgctccctcacaattcacctgtcattttaatgataacagctgttctttttggggggg

SEQ ID NO: 146466 - DNA, 2010 bp, Homo sapiens
gctgggggtgacggtgcggagccgctgccagcgctgggcgagagtcggcggccggatccgaggagcaggcgggcctgaggccgagtcagctgcgcgggcccccggatcccccgacagagcggcggcggtgtctggccaggcggtaggcgctgcctggccgcggcggggaagatgttcagcgtagagtcgctggagcgggcggagctgtgcgagagcctcctcacttggatccagacatttaatgtggatgcaccatgccagaccgtggaagatttaacgaatggggttgtgatggcccaggttcttcaaaagatagatcctgcatattttgatgaaaattggctaaacagaatcaaaactgaagtaggagataattggaggctaaagataagcaatttaaagaaaattttaaaaggaatcttggattataatcatgagattttaggacagcaaattaatgactttacccttcctgatgtgaaccttattggggagcattctgatgcagcagagcttggaaggatgcttcagctcatcttaggctgtgctgtgaactgtgaacagaagcaagagtacatccaagccattatgatgatggaggaatctgttcaacatgttgtcatgacagccattcaagagctgatgagtaaagaatctcctgtctctgctggaaatgatgcctatgttgaccttgatcgtcagctgaagaaaactacagaggaactaaatgaagctttgtcagcaaaggaagaaattgctcaaagatgccatgaactggatatgcaggttgcagcattgcaggaagagaaaagtagtttgttggcagagaatcaggtattaatggaaagactcaatcaatctgattctatagaagaccctaacagtccagcaggaagaaggcatttgcagctccagactcaattagaacagctccaagaagaaacattcagactagaagcagccaaagatgattatcgaatacgttgtgaagagttagaaaaggagatctctgaacttcggcaacagaatgatgaactgaccactttggcagatgaagctcagtctctgaaagatgagatcgacgtgctgagacattcttctgataaagtatctaaactagaaggtcaagtagaatcttataaaaagaagctagaagaccttggtgatttaaggcggcaggttaaactcttagaagagaagaataccatgtatatgcagaatactgtcagtctagaggaagagttaagaaaggccaacgcagcgcgaagtcaacttgaaacctacaagagacaggtagtagaactacaaaacagattatccgaagaatcaaagaaagcagataaactagattttgaatataagcggctaaaagaaaaagttgacagtcttcaaaaagaaaaggacaggctgagaacagaaagggattctctgaaggaaaccattgaagagcttcgttgtgtacaagctcaagaagggcagctcacaacacaagggttaatgcctcttggaagtcaggagtcttcagacagtctagctgcagagattgttacacctgaaatcagggagaaacttattcgtcttcagcatgagaataagatgttaaagcttaaccaagaaggttcggacaatgaaaaaatagccttattgcagagccttctagatgatgcaaatctacgcaagaatgaactggagacagagaataggctggtgaatcaaagacttctggaagtacagtcacaagttgaagaattacaaaaatctttacaggatcaaggctcaaaagcagaagattcagtccttctaaaaaagaagcttgaagaacatctagagaagctgcatgaggccaataatgaactacagaagaagagagccattattgaagatctcgagccaagatttaacaacagctccttaaaaattgaagaattacaagaagctttacgaaagaaagaggaagaaatgaagcaaatggaagaacgatacaaaaaatacttagagaaagccaaaagt

SEQ ID NO: 146467 - DNA, 2874 bp, Homo sapiens
  misc_feature (2750)..(2750): n is a, c, g, or t
  misc_feature (2867)..(2867): n is a, c, g, or t
gctgggggtgacggtgcggagccgctgccagcgctgggcgagagtcggcggccggatccgaggagcaggcgggcctgaggccgagtcagctgcgcgggcccccggatcccccgacagagcggcggcggtgtctggccaggcggtaggcgctgcctggccgcggcggggaagatgttcagcgtagagtcgctggagcgggcggagctgtgcgagagcctcctcacttggatccagacatttaatgtggatgcaccatgccagaccgtggaagatttaacgaatggggttgtgatggcccaggttcttcaaaagatagatcctgcatattttgatgaaaattggctaaacagaatcaaaactgaagtaggagataattggaggctaaagataagcaatttaaagaaaattttaaaaggaatcttggattataatcatgagattttaggacagcaaattaatgactttacccttcctgatgtgaaccttattggggagcattctgatgcagcagagcttggaaggatgcttcagctcatcttaggctgtgctgtgaactgtgaacagaagcaagagtacatccaagccattatgatgatggaggaatctgttcaacatgttgtcatgacagccattcaagagctgatgagtaaagaatctcctgtctctgctggaaatgatgcctatgttgaccttgatcgtcagctgaagaaaactacagaggaactaaatgaagctttgtcagcaaaggaagaaattgctcaaagatgccatgaactggatatgcaggttgcagcattgcaggaagagaaaagtagtttgttggcagagaatcaggtattaatggaaagactcaatcaatctgattctatagaagaccctaacagtccagcaggaagaaggcatttgcagctccagactcaattagaacagctccaagaagaaacattcagactagaagcagccaaagatgattatcgaatacgttgtgaagagttagaaaaggagatctctgaacttcggcaacagaatgatgaactgaccactttggcagatgaagctcagtctctgaaagatgagatcgacgtgctgagacattcttctgataaagtatctaaactagaaggtcaagtagaatcttataaaaagaagctagaagaccttggtgatttaaggcggcaggttaaactcttagaagagaagaataccatgtatatgcagaatactgtcagtctagaggaagagttaagaaaggccaacgcagcgcgaagtcaacttgaaacctacaagagacaggtagtagaactacaaaacagattatccgaagaatcaaagaaagcagataaactagattttgaatataagcggctaaaagaaaaagttgacagtcttcaaaaagaaaaggacaggctgagaacagaaagggattctctgaaggaaaccattgaagagcttcgttgtgtacaagctcaagaagggcagctcacaacacaagggttaatgcctcttggaagtcaggagtcttcagacagtctagctgcagagattgttacacctgaaatcagggagaaacttattcgtcttcagcatgagaataagatgttaaagcttaaccaagaaggttcggacaatgaaaaaatagccttattgcagagccttctagatgatgcaaatctacgcaagaatgaactggagacagagaataggtacttgtgcccataaatttccctcttactacggcttttgctgtatcccatagatttcggctggtgaatcaaagacttctggaagtacagtcacaagttgaagaattacaaaaatctttacaggatcaaggctcaaaagcagaagattcagtccttctaaaaaagaagcttgaagaacatctagagaagctgcatgaggccaataatgaactacagaagaagagagccattattgaagatctcgagccaagatttaacaacagctccttaaaaattgaagaattacaagaagctttacgaaagaaagaggaagaaatgaagcaaatggaagaacgatacaaaaaatacttagagaaagccaaaagtgtcatccgtactttagatcctaaacagaatcaaggagcagcaccagaaatacaagctcttaaaaatcagctccaggaacgagaccgactgttccactcattagagaaagaatatgagaaaacaaagagtcagagagagatggaagagaaatatattgttagtgcctggtacaatatgggaatgaccctgcataaaaaggcagctgaagatagactggcaagcacaggctcagggcagtcatttctggcgaggcagaggcaagcgaccagcagcagaagatcatacccaggccacgtgcagccggccacagcaaggtagagaagttgtgccgctcaatcacagacacctgcacccacaacatacttctgttacacacaagaacatttcaggaaactcagccagcttattttttgtttctcttctatgtcaatacttagtgtttctcattttgaggactttttctctctcctgtatctttgttttagtttctttggtttttattttgtagtcctttcagttatttttaatgtgccaaaaatttgtacatgttcaattaaaaatgttgtataatagtgtaatacttttctttgtatgaaaatgtcctcttcttcaaaggtataggctttgtaatgaattagattttctgccaataattgatatacaatttatattctttattgngcctgtgtgttaccatgctaagaatgtctttgtttaaagggaattaatctttttatgatgtattaatctgtgttttcaattgttttccaagtacagttcaaataacttgcatatttnctataca

SEQ ID NO: 146468 - DNA, 2393 bp, Homo sapiens
  misc_feature (2269)..(2269): n is a, c, g, or t
  misc_feature (2386)..(2386): n is a, c, g, or t
gctgggggtgacggtgcggagccgctgccagcgctgggcgagagtcggcggccggatccgaggagcaggcgggcctgaggccgagtcagctgcgcgggcccccggatcccccgacagagcggcggcggtgtctggccaggcggtaggcgctgcctggccgcggcggggaagatgttcagcgtagagtcgctggagcgggcggagctgtgcgagagcctcctcacttggatccagacatttaatgtggatgcaccatgccagaccgtggaagatttaacgaatggggttgtgatggcccaggttcttcaaaagatagatcctgcatattttgatgaaaattggctaaacagaatcaaaactgaagtaggagataattggaggctaaagataagcaatttaaagaaaattttaaaaggaatcttggattataatcatgagattttaggacagcaaattaatgactttacccttcctgatgtgaaccttattggggagcattctgatgcagcagagcttggaaggatgcttcagctcatcttaggctgtgctgtgaactgtgaacagaagcaagagtacatccaagccattatgatgatggaggaatctgttcaacatgttgtcatgacagccattcaagagctgatgagtaaagaatctcctgtctctgctggaaatgatgcctatgttgaccttgatcgtcagctgaagaaaactacagaggaactaaatgaagctttgtcagcaaaggaagaaattgctcaaagatgccatgaactggatatgcaggttgcagcattgcaggaagagaaaagtagtttgttggcagagaatcaggtattaatggaaagactcaatcaatctgattctatagaagaccctaacagtccagcaggaagaaggcatttgcagctccagactcaattagaacagctccaagaagaaacattcagactagaagcagccaaagatgattatcgaatacgttgtgaagagttagaaaaggagatctctgaacttcggcaacagaatgatgaactgaccactttggcagatgaagctcagtctctgaaagatgagatcgacgtgctgagacattcttctgataaagtatctaaactagaaggtcaagtagaatcttataaaaagaagctagaagaccttggtgatttaaggcggcaggttaaactcttagaagagaagaataccatgtatatgcagaatactgtcagtctagaggaagagttaagaaaggccaacgcagcgcgaagtcaacttgaaacctacaagagacaggtagtagaactacaaaacagattatccgaagaatcaaagaaagcagataaactagattttgaatataagcggctaaaagaaaaagttgacagtcttcaaaaagaaaaggacagagaagctgcatgaggccaataatgaactacagaagaagagagccattattgaagatctcgagccaagatttaacaacagctccttaaaaattgaagaattacaagaagctttacgaaagaaagaggaagaaatgaagcaaatggaagaacgatacaaaaaatacttagagaaagccaaaagtgtcatccgtactttagatcctaaacagaatcaaggagcagcaccagaaatacaagctcttaaaaatcagctccaggaacgagaccgactgttccactcattagagaaagaatatgagaaaacaaagagtcagagagagatggaagagaaatatattgttagtgcctggtacaatatgggaatgaccctgcataaaaaggcagctgaagatagactggcaagcacaggctcagggcagtcatttctggcgaggcagaggcaagcgaccagcagcagaagatcatacccaggccacgtgcagccggccacagcaaggtagagaagttgtgccgctcaatcacagacacctgcacccacaacatacttctgttacacacaagaacatttcaggaaactcagccagcttattttttgtttctcttctatgtcaatacttagtgtttctcattttgaggactttttctctctcctgtatctttgttttagtttctttggtttttattttgtagtcctttcagttatttttaatgtgccaaaaatttgtacatgttcaattaaaaatgttgtataatagtgtaatacttttctttgtatgaaaatgtcctcttcttcaaaggtataggctttgtaatgaattagattttctgccaataattgatatacaatttatattctttattgngcctgtgtgttaccatgctaagaatgtctttgtttaaagggaattaatctttttatgatgtattaatctgtgttttcaattgttttccaagtacagttcaaataacttgcatatttnctataca

SEQ ID NO: 146469 - DNA, 2025 bp, Homo sapiens
  misc_feature (1901)..(1901): n is a, c, g, or t
  misc_feature (2018)..(2018): n is a, c, g, or t
gctgggggtgacggtgcggagccgctgccagcgctgggcgagagtcggcggccggatccgaggagcaggcgggcctgaggccgagtcagctgcgcgggcccccggatcccccgacagagcggcggcggtgtctggccaggcggtaggcgctgcctggccgcggcggggaagatgttcagcgtagagtcgctggagcgggcggagctgtgcgagagcctcctcacttggatccagacatttaatgtggatgcaccatgccagaccgtggaagatttaacgaatggggttgtgatggcccaggttcttcaaaagatagatcctgcatattttgatgaaaattggctaaacagaatcaaaactgaagtaggagataattggaggctaaagataagcaatttaaagaaaattttaaaaggaatcttggattataatcatgagattttaggacagcaaattaatgactttacccttcctgatgtgaaccttattggggagcattctgatgcagcagagcttggaaggatgcttcagctcatcttaggctgtgctgtgaactgtgaacagaagcaagagtacatccaagccattatgatgatggaggaatctgttcaacatgttgtcatgacagccattcaagagctgatgagtaaagaatctcctgtctctgctggaaatgatgcctatgttgaccttgatcgtcagctgaagaaaactacagaggaactaaatgaagctttgtcagcaaaggaagaaattgctcaaagatgccatgaactggatatgcaggttgcagcattgcaggaagagaaaagtagtttgttggcagagaatcaggtattaatggaaagactcaatcaatctgattctatagaagaccctaacagtccagcaggaagaaggcatttgcagctccagactcaattagaacagctccaagaagaaacattcagactagaagcagccaaagatgattatcgaatacgttgtgaagagttagaaaaggagatctctgaacttcggcaacagaatgatgaactgaccactttggcagatgaagctcagtctctgaaagatgagatcgacgtgctgagacattcttctgataaagtatctaaactagaaggtcaagtagaatcttataaaaagaagctagaagaccttggtgatttaaggcggcaggttaaactcttagaagagaagaataccatgtatatgcagaatactgtcagtctagaggaagagttaagaaaggccaacgcagcgcgaagtcaacttgaaacctacaagagacaggtagtagaactacaaaacagattatccgaagaatcaaagaaagcagataaactagattttgaatataagcggctaaaagaaaaagttgacagtcttcaaaaagaaaaggacaggctgagaacagaaagggattctctgaaggaaaccattgaagagcttcgttgtgtacaagctcaagaagggcagctcacaacacaagggttaatgcctcttggaagtcaggagtcttcagacagtctagctgcagagattgttacacctgaaatcagggagaaacttattcgtcttcagcatgagaataagatgttaaagcttaaccaagaaggttcggacaatgaaaaaatagccttattgcagagccttctagatgatgcaaatctacgcaagaatgaactggagacagagaataggctggtgaatcaaagacttctggaagtacagtcacaagttgaagaattacaaaaatctttacaggatcaattaaaaatgttgtataatagtgtaatacttttctttgtatgaaaatgtcctcttcttcaaaggtataggctttgtaatgaattagattttctgccaataattgatatacaatttatattctttattgngcctgtgtgttaccatgctaagaatgtctttgtttaaagggaattaatctttttatgatgtattaatctgtgttttcaattgttttccaagtacagttcaaataacttgcatatttnctataca

SEQ ID NO: 146470 - DNA, 666 bp, Homo sapiens
cagaatctctcccccccccctctttttttcccttcagatccagacatttaatgtggatgcaccatgccagaccgtggaagatttaacgaatggggttgtgatggcccaggttcttcaaaagatgtaagaataaattgcttatctttatgtgtattcttatgcatggatatttgttaggttgaaaacatggattaaaaaagtacttacatgaaacgtgtgtagagtaagagttgtaggcggcagcagcactagttttaatggaatgtacttattaggtatagattgggttgcaagtttaataagggctgtgattgtgttagtactctaatggttttagcagaattattcttgtattttttggcatatgcttggcagaaattttcttgttagtggccagattttgctgttacaggggtatctaagatgcttactccatttttctttaggattttgctgaaatatcatctcatcagtggcacctgccctgagtacccatataaaatagcaacgacaattcccttatactttctatcccacttaagcttttgtgttcttctttcaagtttgtgacaccatctgatataccatatatttggttgttcattcatctgccccaacatccccaaacacatatacacagaatgtaaactccacatggagccaggg

SEQ ID NO: 146471 - DNA, 2166 bp, Homo sapiens
gctgggggtgacggtgcggagccgctgccagcgctgggcgagagtcggcggccggatccgaggagcaggcgggcctgaggccgagtcagctgcgcgggcccccggatcccccgacagagcggcggcggtgtctggccaggcggtaggcgctgcctggccgcggcggggaagatgttcagcgtagagtcgctggagcgggcggagctgtgcgagagcctcctcacttggatccagacatttaatgtggatgcaccatgccagaccgtggaagatttaacgaatggggttgtgatggcccaggttcttcaaaagatagatcctgcatattttgatgaaaattggctaaacagaatcaaaactgaagtaggagataattggaggctaaagataagcaatttaaagaaaattttaaaaggaatcttggattataatcatgagattttaggacagcaaattaatgactttacccttcctgatgtgaaccttattggggagcattctgatgcagcagagcttggaaggatgcttcagctcatcttaggctgtgctgtgaactgtgaacagaagcaagagtacatccaagccattatgatgatggaggaatctgttcaacatgttgtcatgacagccattcaagagctgatgagtaaagaatctcctgtctctgctggaaatgatgcctatgttgaccttgatcgtcagctgaagaaaactacagaggaactaaatgaagctttgtcagcaaaggaagaaattgctcaaagatgccatgaactggatatgcaggttgcagcattgcaggaagagaaaagtagtttgttggcagagaatcaggtattaatggaaagactcaatcaatctgattctatagaagaccctaacagtccagcaggaagaaggcatttgcagctccagactcaattagaacagctccaagaagaaacattcagactagaagcagccaaagatgattatcgaatacgttgtgaagagttagaaaaggagatctctgaacttcggcaacagaatgatgaactgaccactttggcagatgaagctcagtctctgaaagatgagatcgacgtgctgagacattcttctgataaagtatctaaactagaaggtcaagtagaatcttataaaaagaagctagaagaccttggtgatttaaggcggcaggttaaactcttagaagagaagaataccatgtatatgcagaatactgtcagtctagaggaagagttaagaaaggccaacgcagcgcgaagtcaacttgaaacctacaagagacaggtagtagaactacaaaacagattatccgaagaatcaaagaaagcagataaactagattttgaatataagcggctaaaagaaaaagttgacagtcttcaaaaagaaaaggacaggctgagaacagaaagggattctctgaaggaaaccattgaagagcttcgttgtgtacaagctcaagaagggcagctcacaacacaagggttaatgcctcttggaagtcaggagtcttcagacagtctagctgcagagattgttacacctgaaatcagggagaaacttattcgtcttcagcatgagaataagatgttaaagcttaaccaagaaggttcggacaatgaaaaaatagccttattgcagagccttctagatgatgcaaatctacgcaagaatgaactggagacagagaataggctggtgaatcaaagacttctggaagtacagtcacaagttgaagaattacaaaaatctttacaggatcaaggctcaaaagcagaagattcagtccttctaaaaaagaagcttgaagaacatctagagaagctgcatgaggccaataatgaactacagaagaagagagccattattgaagatctcgagccaagatttaacaacagctccttaaaaattgaagaattacaagaagctttacgaaagaaagaggaagaaatgaagcaaatggaagaacgatacaaaaaatacttagagaaagccaaaagtgtcatccgtactttagatcctaaacagaatcaaggagcagcaccagaaatacaagctcttaaaaatcagctccaggaacgagaccgactgttccactcattagaggtagtttactatactgtacaataaaataattgtgttttgattttaatgttt

SEQ ID NO: 146472 - DNA, 1106 bp, Homo sapiens
  misc_feature (982)..(982): n is a, c, g, or t
  misc_feature (1099)..(1099): n is a, c, g, or t
tcgatctgaggatccctacgccaggtcacaagttgaagaattacaaaaatctttacaggatcaaggctcaaaagcagaagattcagtccttctaaaaaagaagcttgaagaacatctagagaagctgcatgaggccaataatgaactacagaagaagagagccattattgaagatctcgagccaagatttaacaacagctccttaaaaattgaagaattacaagaagctttacgaaagaaagaggaagaaatgaagcaaatggaagaacgatacaaaaaatacttagagaaagccaaaagtgtcatccgtactttagatcctaaacagaatcaaggagcagcaccagaaatacaagctcttaaaaatcagctccaggaacgagaccgactgttccactcattagagaaagaatatgagaaaacaaagagtcagagagagatggaagagaaatatattgttagtgcctggtacaatatgggaatgaccctgcataaaaaggcagctgaagatagactggcaagcacaggctcagggcagtcatttctggcgaggcagaggcaagcgaccagcagcagaagatcatacccaggccacgtgcagccggccacagcaaggtagagaagttgtgccgctcaatcacagacacctgcacccacaacatacttctgttacacacaagaacatttcaggaaactcagccagcttattttttgtttctcttctatgtcaatacttagtgtttctcattttgaggactttttctctctcctgtatctttgttttagtttctttggtttttattttgtagtcctttcagttatttttaatgtgccaaaaatttgtacatgttcaattaaaaatgttgtataatagtgtaatacttttctttgtatgaaaatgtcctcttcttcaaaggtataggctttgtaatgaattagattttctgccaataattgatatacaatttatattctttattgngcctgtgtgttaccatgctaagaatgtctttgtttaaagggaattaatctttttatgatgtattaatctgtgttttcaattgttttccaagtacagttcaaataacttgcatatttnctataca

SEQ ID NO: 146473 - DNA, 312 bp, Homo sapiens
tcaggagggcagccaggtacgagcgcattgcagacattagagtaagtgctcttgagaggctggaagcactttgttgcccaaggcttctaagaccagagagatgctaagtgcttctatattgaaaagagtgagcattcctaatttgttaggtccctgctatcttttaaattctccaaccctaagagaagaaaagccctattctcctccagaggtcaggttgggtatcatcccagggaagccgagcttttatgctgtgtgcgcccatgtgttagtgtgtatttatctagcgggaggagctggaagctgtaggtg

SEQ ID NO: 146474 - DNA, 319 bp, Homo sapiens
atgggacataaagcaaccagatccaacaaacaggataatccatatccacgaaatagagaaaatagataaatctgaataagactttttaaaaggaggattagaaccctcagagaaaagaacagactaataaccatgataagaattgaaagaatcagcagttaggaaattagaataagcaaataagaaaaatgcaaaacgtgaaacacaaataaatatgctctaatatgtttcataggtattttaaaaattgttagagcataaaagaataggcaagcaaacaagataagatttttaaaaataaaatatggctattggaata

SEQ ID NO: 146475 - DNA, 531 bp, Homo sapiens
agattctattccagagcaaatttaaaatcataaagattatctaatctggccaagtgtggtggctcatgcctgtaatcccagcactttgggaggctgaggcaggtggatcacttaaggccaggagttcaaggtcaccctgggcagcatggtgagaccccacctctgacaaaaaaataaaaaccttaaccaggtttggtagcatgtgcctatagccctagctattcgggaagctgaagcaggaggatcacttgagctcaggagctccaggctgcaatgagctatgatcgcaccactgtcctccagcctgggcaacaaagtgagaccctctctctatttttttctcccaaagagctgggattataggtgtgtgccaccatgcccaactaaagttactttttttttttttttttgaggtagggtcttactctgtttctcaggctggaatgcagtggtatgatcacagctcactacaaccttgacctcctgggctcaagcaatcctcccgcctcagcctcccgagtagctgagacc

SEQ ID NO: 146476 - DNA, 580 bp, Homo sapiens
gaagggcactttggaggtaattcactatgcctatcagtgaacctgtgcaagcaggtttctttgtgagtgggtgtttggggcacaaattatagtcagattttgttagaagtgaaagagggaaagccctactgattgagggatacacgttttggggtgccccaaggtcttctggccatcttatatacagccagcaaaggttgcagatgtacttggtggcagcagtcaccccatctatcagcctcacactgacgtggccttcaatgttgagggtgaacagtgagacagaggcctactggggagcagaatgtgctaggcttgtggttaattatgtgaactcacctttatggcaagtgttggttcatgacgtagaagataatagtcaaagactctgaaactatggataagggcaggagtactcagctatccaagaaatgacctctcttatgtttgaaacaatatgtaggccagaatgctccagacattcagcctgtctgtaggggattctcgaagtgatatactttcagatacatctgtgccaaaaatactatttctgaggcttgagatctgagcagctaaaggg

SEQ ID NO: 146477 - DNA, 360 bp, Homo sapiens
atttttagtagagatagggtttcaccatgttggtcaggctggttttgaactcgaccttatgatccacctgcctccgcctcccaatgttctgggattacaggtgtgagccaccgcccccggcctgttcaagatgttataacaaaatgccttagactgggtaatttgtgaacaacagaaatttatttcttacagtcctagaggctgggaagtccaagagtcagcttgccagcagattgtgtgtctggtgagggcctcttccttataagtggcaccttctatgtgtcctcacgtggcagaagggacaaacaagctcctttggacctcttttgtaatggcacaatgccattcatgagggcagag

SEQ ID NO: 146478 - DNA, 627 bp, Homo sapiens
tttctttttaaagatgagtatatatgtactaagtaatgctctcattacatgagtcccttctaactacaggctgatacatctttcaggaaaactgagaacctaatatttaagtgaggcctattttaaatgagctatactgtgggtggtagtgtttgttaccttatgtaagacttaggtttgtcttagactgaaaaactcttattcttaatatttaaaatatccatgatggtagaaattttgtgggaaattttcttttttaatcaatagttacagttcttcagtaaacacaggtatgtatgcttttgtggtgtcagtgtcagtctaaatctatgggtgaagcagttagtccataagacaaaaaattatttgcctagtggattccctttacctctttttaagaagctcagagatctgtaatcattaatttactaaggattttttaaaatattattttagtcacttttaaacctgaaaatttctcttttgatttagatttttgaagtgaggcttgagcatacacaagtaaagctgggagtttcattcttcatatgggatttatgactaaatatttctagcattttgaagaagataaacattttgaactgaagtatataacaaaaaaaggaa

SEQ ID NO: 146479 - DNA, 404 bp, Homo sapiens
gccagaaagaatttggtacattcagaactgaaaggcggccaatgaggttagaacatagaaaccaagaggtaaagtggtaacaggttgaagagggaagcagaaactcgattttattgtaggtcatcttagagtttagattttaacttcagtggccaatcactgaagagtattaggcaggggattaataagatctaaaccatgttttttaaaagactggggtgtaggcgtggtaagtagaagcagagggaccagttaaggagggaattgtaatgatccatgaaagagacaacagtgtcttgattgaaacagagccagctaaatgcaggcagttgcatggaatctcaaggaaattaagaggaggaattgactagacttggtaatagagagaatgtgtgaaatgtgag

SEQ ID NO: 146480 - DNA, 409 bp, Homo sapiens
ctcttctcttgtcctttagggccccggcaatctcaatagacccatattctctaagtgctgctttgaagtcttaaccagcagctggagagcaagtccctgggatgtgagtggcctccccattctttcctcctctcacgtgaccctaggagagtgggttgagagaactcagcagctccaggacatcagttcgatgctttggactaacatggctatctcttcagtagcagaattcagacgcacggattcccaactccaggggcaggtgctgttccggcacctggcaggcctagcagagctgctcccagagtcccggcggcaggagtacatgcagaactgtgagcagctgctgcttgggagcagccaggccttccagcatgtgggccagacacttggggacatggctggtcag

SEQ ID NO: 146481 - DNA, 467 bp, Homo sapiens
atcagccatgagttggtgattattgaagctgggtaatcaacgcgtggaagttcattatgttagtctgtctagtccctctactttaggtacgcttggaactttccataataaaaagttcaaaaagacaaaagaagcaatgataggcctacagctacttcagatctagatgaagctccactagagatggctagcaaggatcttagcccgttgctggtgcaggtggggcctgcctgagggtgcatcaggccctaggaaatatttcctccacagaattttcactgttgccaaacgtctgaatcaaccaatcttagcctgcagtggcagccaatggtgcccatgctttgcagcatctactgggacctcaggaccacctgctcttgtcctctaaagaggcagtacccaggagcctcctgaggccatgattgcttgcacaggttagcacagaaggcttgagtccagctctgagc

SEQ ID NO: 146482 - DNA, 821 bp, Homo sapiens
cttctgtttggatgggtgcacagccagagcagaatcttatggcattttggctctgccattggctctaaagaacgctaagtattcacaagcatactccacaggtggaagagcaaatcagagggcagctctggccagacagcaagtcaaatacctgagggcagcagctcccagttgcttatggattcactaagaaccaaatatagattacaattattcataacaataccactggtaaaagtaaaacttaatcccagcaaacaacccattaaaatgtggagctgcaaattttgatctggggaaactgttagacatgttgctcaccagtgaaacttagaaagggagaagctgttatcaggaaatttaatatagaccaaaaaatagtcagtgagccaaatccttgctgttatataggagagaatggattcaattaaaataattccagtaaaatgaaaatacaaagtaatcaggaacaatgtcactgtttagtgtagaagattaatcaaagaattggccgggtgtggtggcttgcacctgtaatcccagcaccttgggaggctgaggcgggcggatcacaaggtcaggagattgagaccatcctggccaacatggtgaaaccccatctctactaaaaatacaaaaaattagctgggcgtgtggcgagcacctataatccaagctactcgggaggctgaagcaggaaaatcgcttgaacccaggaggcagaggttgcagcaagccgagattacaccacaccactgcactccagcctgggcgacagagcaagactctgtctaaaaaaaacaaaaaacaaaacaaaacaa

SEQ ID NO: 146483 - DNA, 186 bp, Homo sapiens
tccacctcggcctcccaaagtgctgggattacagtatgagccatcctgcctggcctgttttaatttttagagataaggtcttgctgtgttgccaggctaccttggttgaatttttaatgttaaggcaacctggcatttctgagataagtatcatttgataatgctgcacaatcttttttatatgtt

SEQ ID NO: 146484 - DNA, 459 bp, Homo sapiens
ccttctttcaaaaagcagctcttaaaattggacttcatgaattcactaacaacttgtcatggattagtctattccattgctttcctttagcaatttcctccagcagtttcacttcctgcaagagcaaagttcctgcccagcacagggcttcagactcagcatcgatgcctgccttccaccggcaccctgagccacagcaccctgtccattcctcctggactcccctcctgccctctgcattgaagaaagtcctgacctcattctgggaccctacagaagaccctggcattctccaccctggccacacttggaatttcctgggggagctttgtaaaaaatgcagctgccctggcctcactgtagaacttggagccaatcatgagagcagggtccaagcaggaggctctcgggaacctcccctgtgactctgaggcacagccctgctgggcaacagctcag

SEQ ID NO: 146485 - DNA, 742 bp, Homo sapiens
aaatgcaacagcagtggtaataagttctatgaaggacaaatgcagaggaaatgaggaacttacatgggtgggggtaggaggaaggtgtcagggaagcctctctgaagaatgacctagagggcaggtgggagctacccaagcagattccaggcaccttgggtggaccaggatggccacccaggatggccttttcccaggctgtgcccagcaagttccatcagttcaggaagcaaacagctggaggcacctgtgcagacccatcctgacctcatgaaaccatgcctactcctggcatttgtgaatgtccatctctacaaactcaactgatgccagtatgggctatagagagggtcacatcagtctcagtttgcccaggatagcctcagtttgcccctgttttggtgctttattaacagcacccttttggatagtagtaaataatgtagtcacctggctcagagacttgtccacaagctcactgcatccaaacatcacaggaccatcctagagatggtcaagaaggagggtcactttcatacctgtcagaaaagcccagatggcttaaaaaatttccccaggtactccaagaaggggcccagtatttgaagtttctatgcactgaccaaatcaactgatctttcacaaatacacacccaacctcaagctagtatttcctttctaacattttccacccccatcaattattagttacctgtctcttgctctggcctatggtatctat

SEQ ID NO: 146486 - DNA, 451 bp, Homo sapiens
taagggctcagtatagagcagaagctgaggctcagaaagattaagtaacttgttgagggccacccatgtaataagtggccaaatgggacctgtgtctagtctggtccagccctcccacctcaccaccagccttcttttgttggtggtcacctccttctctagcttcctgctctgagcacactcacaggcgcaaccagatacttgggaacacagatgccctcaagtgcagatttgccaggtacagccttgcatcatagtcgctaatcacattgtgattagcaatcttgaaactgggaaggttgagtcaagcaggcttaagagaggaagtgagtctcataaaaaaatctgcatcagagaaggcagggcttgagttttggaaagagcgggcaggaagggtatttcaggtatgtaatatgacgtgaaggtgggggagagaaagccaaactaactt

SEQ ID NO: 146487 - DNA, 214 bp, Homo sapiens
ccctgccagaggctcgcctggcccagcctcggaatctctgagaggcaaccaccattccagacgtgcctcccagagcagctgagaggccttctgcctgcaggacaaacagacatagcgatgtccaccttctttgcattcaagctgctgcctgaaagttcttcctggagtctcattttattccctcctgctgcagccagaaccacaaatatcggcc

SEQ ID NO: 146488 - DNA, 315 bp, Homo sapiens
acacaaccaccaagagttgtcagtttgcaaacctagaaaagtataccattgtaatatcagttcatctcccgcttttccagagctactcagaagcgtggtggatgcttagtgaaatgaccagaggtgtgaagctgccagacctttacccagatcaacttctttgactcagggtacaaatgaacaacgtagtctgacagctcacctaaaagttatttggaatgattttatattgagagatttttttaaagcctaaatttagattcatcagagcatatcaaggttgagatatgtgaaaggcagtgctatatgggaggg

SEQ ID NO: 146489 - DNA, 328 bp, Homo sapiens
gtttggggttcggctgccgggaagaggcgcgggtagaagcgggggctctcctcagagctcgacgcatttttactttccctctcatttctctgaccgaagctgggtgtcgggctttcgcctctagcgactggtggaattgcctgcatccgggccccgggcttcccggcggcggcggcggcggcggcggcgcagggacaagggatggggatctggcctcttccttgctttcccgccctcagtacccgagctgtctccttcccggggacccgctgggagcgctgccgctgcgggctcgagaaaagggagcctcgggtactgagaggcctcg

SEQ ID NO: 146490 - DNA, 212 bp, Homo sapiens
aaggtaataggcagcctggtcatcaatcctagttgtgggaaggtttagagaagagagaagcagcaacttggccttagaagaacatgtatataaaatgcttagtaaagggcaaattattgaagttattctacatatagtcactaaataagactgaatatagtcactctgctgggcatgggggaaggttctccagagttggcgtttttcttcat

SEQ ID NO: 146491 - DNA, 115 bp, Homo sapiens
tgtcttgattatgaggaggtctcatgcgaggtagctttgcttagccctctcatactctttatttacaatgaaaaatctttaaattgaatttgtggttctgatatttataaatgat

SEQ ID NO: 146492 - DNA, 180 bp, Homo sapiens
ccaccttggcctctcaaagtgctaggattacaagtgtgaaccactgcacctggctacttcccccaatttctatataaatttgtatattcctagtccagattcttgttttatttatatttcattgaatttattgtaaacgacttcagattctctagaaaactgaagtttaaaatgttagat

SEQ ID NO: 146493 - DNA, 389 bp, Homo sapiens
aacatcccacacctgaagtatcaacatctagaatgtgcaaagaatgtatgttaatcaaccacaacaaggggcagaacctcgtagaaaaaatattcaaagcacaggaacaatccatggaaggagaaaatctaaagacttaaagtagatgaagagctgctcaacctaacttgaagtcaaagaaatacaaattaaaatacaaagatgtcacttcactcccatctctactaaaaatacaaaaattagctgggtgtggtggtggctgcctgtaatccaggtattcaggagactgagacaggagaatcttttgaacccgggaggtgaaggttgcagtgagccgagatcgcaccactgcactccagtctgggtgacaagagcaaaactccatctaa

SEQ ID NO: 146494 - DNA, 588 bp, Homo sapiens
  misc_feature (46)..(46): n is a, c, g, or t
tagctgattcctgagggtccaccgacgtcgcagccgggtctggatngtggcaaaaggtaaatccctactaggcaaacaccacagtattaatcgtttccaaaaagatccactgatgcatactaaaaataataggtgaaagtttgaggaaaaatagggtatctgcatattcaaatatcagacgcatctttgcccttggtgactgtattgccttgaagaaaccattagctttcttgatcctaggttgcctatctgtaaatgagtgggttgcactatgtgactcccagggtctcttctagctctcatactcccatgggagtgactgtactttccatgtaattatcaggagtgtaacttcttccttttccttatctttgcctccccttccttcttttctttccattctcttccataacaggattccctaggaagagaatttaaggatgctctctatgagaaaaaaagatggagaaagaagtgaaggaaaaagagaaaatgcaattcctagtattaactggtgtctgggttgttaggcagtagaaaagagagaaagacagccgggtgcggtggctcatgcctgtaatcccagca

SEQ ID NO: 146495 - DNA, 399 bp, Homo sapiens
tgccaccctgactgtacctgttgagttgacgtaggtggtgaacaccctgggagcatggcagatatttggcaggatacttgcccatggctggaattcccagtggtgacattggtgttaagtgggccatttctgttgattcagcaggaggacgtggcagcccaagatgtcaatagctgatgggaggcagatagtaatggggagaggacatggctgtgggatgggacagcactttgttcccaagtctactctgaaattgcccacagctagctaaaccatgttggacttaggacatttctcagtttcaattttaggttgtagtccctaaattcaaaaagtggactactgtatcttgacaggaattcttttacagaatttgatacccagaaaggggtgtgagcc

SEQ ID NO: 146496 - DNA, 224 bp, Homo sapiens
caacagttcaacatctaatgagtaaataaagacagtatggtatatacacacaataaaatactatttatttttaaaaaagaaaattctattatgttcaattacatggattaacttggagaacattatatttcttgaaataagccaggcacagaaagattaaaatttcatacttttgcctacacatggattctataaaacttaatttcattgaagcagagagtaaa

SEQ ID NO: 146497 - DNA, 255 bp, Homo sapiens
attaaatgaaagtcatttatggaaaggagctagaaacagtgctgggcacaaaggagggctgacaaatggcagtgaccgctaattaatcccggccagtgttcttcaccccctctgccttgcctgttgtctttcctcttccaagagaggctaagcacctggccagggcagagtgcggatttgaacccagggccgtctgactgcacagagaccaaggctgactgctgccaccacgtggaggctgcagagctggtggcc

SEQ ID NO: 146498 - DNA, 413 bp, Homo sapiens
gttccagctggctcgcccaatgtgcagagtcaaccactgaggcccagaagaggcaaggatgcgtctgggccccagcaaggcccaggtggaggtgagactggggcccgggtctttcattctctccatggtgccctcttggctgactgagccacggcccgtttctacctccttccctggagcagagggcgtgcaggggaccctcgtggggagccagtgctcccctgcactccatatccaatcctccctccagacacttggctcagctatcaccctcttctcctttatcctggcccctcccctccaccaaacacagtggttgctcctgtcccaaaggatatgctgcccttaacttgaagaaaggggggaagttaaacatcaacacaacccaaacaacccacatgctgcgtctcctc

SEQ ID NO: 146499 - DNA, 558 bp, Homo sapiens
aatgaggataacactttcatttattgtctctaacacttatttatttatttttgagacagggtcttgctgtgtcactcaggctggagtgcagtggcatggacgtggctcactgcagcctcaacttcctgggctcaagcagttctcccacctcagcctctgaagtagttgggactacaggacgcactaccagatccagctaatttttaatttttgtgtagagatggggtctcactatattgcccaggttggtctctaacattttaatcctgtgacactggacattccagggtgctcttggaggtactcaagaattgtcttcagggacgagcgaggtggctcacgcctgtaatcccaactttgggagactgaggtgggcaaattacttgaggtcaggagttcgagactagcctggccaacatggtgaaacctcatctctactaaaatacaaaaattagccgggcatggtggcgggcacctataatcccagctactcgggaggctgagacacgagaatcacttgaacgtgggagacggaggttgcagtgagctgagattatg

SEQ ID NO: 146500 - DNA, 206 bp, Homo sapiens
tgacacctgggaacttccccttctttccctggagctcagtgtcgtacttctaaaaaatgctgtattttaaccagcatttatatgtgtgtatggaggggtccctgtctgttcagtctaccatctcgaccagaagatcccttctggccagtcctcacacgtttgtctttactgcccctaccccaagaagccgccccttggggaccgtg

SEQ ID NO: 146501 - DNA, 694 bp, Homo sapiens
ccgggggaatgaaaagctaaacttaaagcatctctgccccccattccctttttataagacagagtcttgttctattgcccaagcttgggtgcagtggtgtgatcatagctcactgcagccttgaactcctgggttcaagcaatcatctcacctcagtctcctgagtagctgggactacaggcacaagctatcacacctggctaattttctttcttttttttttttttttggtagaaatggggtctcactttgttgcctgggatagttttgaactccagggctcaagcaagcctcccaccttggcctcccaaagatgggattacaggtgtgagccactgcacctgatctttttattccaattttttgcaaagctaaaaaactttactgtcctggaatcttccagcttcaacttttcctaaagtatacactactttgttttagttagacttgtgggaacccttgggaacaaatttattaaaaatcctatgtttataaagaaaacatagttttaaaaagtgcattataaactacaaataattttggtatgaatattattattcccttctagttagaatgaaactttggggaatggacttcaaaatttctgcaatatttgtagcctgatatccaaataaaaatcaatgattagttaactactagtgttcctcaacccatcctgtccttcttaaccaac

SEQ ID NO: 146502 - DNA, 300 bp, Homo sapiens
ttcctggcacagagtaaatgtctgttcaatggatgcttctctcatgaatcctctccccaaccacatgatcctgctttttctcctcaaacattaatttctttgctcttccatggagccctctttttagtccctcctgttcctttcctctgagccaaaacttgtccaactttaagtccttgccaaatatcacctccatcatgatctcacagcaggctgaagactcactgtcttctctgagctcccggattgctgatttcctgaatcacttttgtagccttcattctttgccagttatcttcc

SEQ ID NO: 146503 - DNA, 355 bp, Homo sapiens
gagcaagcacagtgggagcaggaaggaagagggagagggtgcttcgcccttagagcagggtttctcagcttggcactgtgatgtttctgctggtgttgtagaggcctgtcccatgcattggaggatgtttatcagcatccttggcttctgccctctagataccagtagccagtgtggcaaccaaaaatgtctctgggcattggcagatgtcctatggggtaccaaagccgtctctgtttgagaaccagttgcagtggagtgggaggggtggttcttgggaggaaggctttccagaggagtatctgtgcatgttctgaaaggtgattaggcccaagcaaaggtgtgaggtgtctag

SEQ ID NO: 146504 - DNA, 598 bp, Homo sapiens
taagaacaactgctaggctggtttttattgaacatggtttggaaatctctcgaacaaatgattcctgagacccaccccaattccaatgctatcattttgtgagttttattattcatctgaattcttacaactggtgtttggtaaccagaagaaacctgcaaggtgatgctcatttggacccaagcagtggtgaaattgctgactgaatcaaatagtgtaaatagatccacagaagaagaagtataatgaacctgaaattgctaaaccccttttaaggaaaattttcctagcataatatatgaagatggtccctctctttgttgcccaggctggagtgcagtggtgcgatcttgactcactgcaacctctacctcctggattcaagtgattctcctgcctcctgtagtcccaagtagctgggactacaggcacccgccaccaagtccagctaatttttgtatttttagtagagatggggtttcaccgtattggccaagctagtcttgaagtcctgacctcaagtgatctgcccccctcggcctctcaaagtgctgggattacaggcgtgagccactccactgagcctggccttttaatc

SEQ ID NO: 146505 - DNA, 784 bp, Homo sapiens
gacagtgactcgggagagaggatagaaggtggagagacatggagattgtcaggaaaacaactcagaaagccaccatatcaacctatgtgagaattggcaaaggcctgagagtagcagaccctgcaggtgcataagaacatggctttgtttgacaagacagaaagataaaagataaagagcaacaaggataactggcatttctagtagaacattcaaagagatgttaatgtcattaaccatgttaaggaataaaagagaaacagtgtttgtgttttaatcactttttcccccggagtgagagggaggctgaaagtcctagttttaaaaataatttctggctttaagttatctgtggaataccatgtttatgctccaggaggtcctctgaaatctgagactggtcttcaaaaggcatgtgaatgacagttacagatataagatttgagatgctttctaaaagtaggtaatttcacagccagaaaggcaaagatggaatccaaattcagtttccaaataaaatcagcctaggagggatagaggaatgagataagcagcaaaaagatgatgtcaacaaacccaaaattagaattctaaatctaataccaatagtggtgtctacacacactcacaaatcacgaaacctgtcaaatgatcagtgtaccaatgggcatgctcaacagcatacccatgaaaaacaggaggaaaaggaagggcagccaaggagcaagtcggtgccaatgacgactacatgtgacgtgactgtaaaggccagaccacaacctcc

SEQ ID NO: 146506 - DNA, 255 bp, Homo sapiens
ataaagtctagtcttaacagtattgcaccaatgtcaatttccctggtgttgatattggactacaattatatgacatttttaaatagttgttccatatttcgaattacatgattatattgagtctaaaccatggtcttttgaaattttttacaattcttagtgacgttggatttctcaggtttgtttggtgtaatacagtctataaagtgaatccctgggatctcctcctgtcgggcagtgtaatgtgaggtattt

SEQ ID NO: 146507 - DNA, 277 bp, Homo sapiens
aaagaattgttcagagtgccacagtgtgaaaccgaaaccccacatcagggagcccttggcttctagcagaacccgaacagacatcctcggggagcaaggtcaattgccaccttgttgtgacctgcttggggaactgcctgtcatcggctggcagcccagccacagatcactagccaaaaatggcacaactgttgaccgaatcagagagaaacattcaggtcagcaccaggaaaggtttcgaagcagggcgaggcacagagctccacatgccgggtgt

SEQ ID NO: 146508 - DNA, 293 bp, Homo sapiens
aaatccaagactaatattataaagttcacatcctttccaactcccctcaatgcacctgagcagtaagagtgcaatggttacacaaacaatagtacattcaatgtattatgtagccactatagtatttataagaaaaatgcttatgttaaataaaaatacagaatcgtatatagaccaaaacatttacagaaaaaagaaatgaaccaaaatgttagcgatgactttctctggaagtgggactataaataaaaagtaaggaggagtggggattactctagtctgaaatttccatg

SEQ ID NO: 146509 - DNA, 245 bp, Homo sapiens
gtactcccttctgtggggcagagctctctcctcctcctctggacccatctctccccagcgtcactcctgagtcttccaaatctctggctatccccattacttctcctcctcacatggatgtactcatccttaaaaagtacccctcccggagccccttcctttttgatctacatccaaactgctcaaagagttgttctcacgcatcttcatgtcttcatctccccatcagtcctcagcccactgca

SEQ ID NO: 146510 - DNA, 711 bp, Homo sapiens
ttttcttgtgtttttgccaggtattggtatcaggatgatagaggtttcatagaatgagttaggaaggaatatctcttcttcgattttgaaaaaattgtttcaataggattggtaccagctctttgcagagcttatttaaaaggctgtttattgggctgcatctctaggggtcctgcttcattaggtctctggtggattcagggatctgtaactttaatacagagaattctaatgcaagtgaatcacagctcatcctttgagaaatacatcccaagaatgtaatagtaaaactacagtggcatttgttgagcaatatttcattgaatcctcacaacaaaactgtgtggaggagctgctattttacatatgaggaagctgaggcccacaacaattaagtaacttgcttaagatcatgatgaggctgggcacggtggctcatgcctgtaattccagcattttgggaagctgtggcaggcagatcacttgaggtcaggagtttgagaccagtctggccaacatggtgaaaccccatctctactataaattcaaaatttagctgggtgtgttggcacatgcctgtagtcctagctacttgggagcctgaggcaggagaatcgctttaacctgggagacagaggttgcagtcagccaagaccacgccccgccactgcactccagcctgggtgagagagtaagcctctgtctcaaaaa

SEQ ID NO: 146511 - DNA, 322 bp, Homo sapiens
ctgaagtcatttttcaggtctaggaatcttttggtggaatatttagggttttctttgtatagaatcatattgtcagtgaaggaagataatttgacttcctcttttcctcttttgatgtcttttctttctttctcttgcctgattgctctggctaagatttccaatactatgttgaataggagtggtgagagtacacattcttgtcttgttcccattgcaggagaatcgctttaacctgggagacagaggttgcagtcagccaagaccacgccccgccactgcactccagcctgggtgagagagtaagcctctgtctcaaaaa

SEQ ID NO: 146512 - DNA, 396 bp, Homo sapiens
aatcgctccctccatctttttcctctctcccagagcactgaccccttctcagtgcggcacccaagacccaccccagcgtcctggccggctcatgctaccacgcccaccctggccccactgcttggaatctagcctggcaaaactgcgtcctctcctctgaaaaacccgctttcctgtctgtccggctatgtcttccccaggctgggggctccttagggtcccagcagctcccagcaccggactggcatagagggtgtgtttggcaaattgagtcggggcgtctgacatgctctgtctgtgtgtggcgggaaaggccatcagccctgcctcagttaggaagcagccacctgattgaactccagcctcagtctcctcaactgtgaaattggaggaaaa

SEQ ID NO: 146513 - DNA, 540 bp, Homo sapiens
gagtatgtcggggagctgatctctgatgctgaggctgatgtgagagaggatgattcttacctcttcgacttagacacaaaggatggagaggcgtactgcatagatgcccgttactatggcaacatcagccgcttcatcaaccacctgtgtgaccgcaacatcattcctctctcccagagcactgaccccttctcagtgcggcacccaagacccaccccagcgtcctggccggctcatgctaccacgcccaccctggccccactgcttggaatctagcctggcaaaactgcgtcctctcctctgaaaaacccgctttcctgtctgtccggctatgtcttccccaggctgggggctccttagggtcccagcagctcccagcaccggactggcatagagggtgtgtttggcaaattgagtcggggcgtctgacatgctctgtctgtgtgtggcgggaaaggccatcagccctgcctcagttaggaagcagccacctgattgaactccagcctcagtctcctcaactgtgaaattggaggaaaa

SEQ ID NO: 146514 - DNA, 561 bp, Homo sapiens
aaatataagcgtgaactcatttgttgttcttttaccgtagacacattttctacctctgccccagtagcagtagacacatcaagcacctagaaagtggtctctaatacatgaaaaccatgaattcatagtgatggtttcaaagccaaaaccaaccaacaaacacatgtaattggtcactcttggaggtacctagggcactaactcctaacactgggaatggacacttgaaggaagatcagtaattatcctgtcttttctctacaaattgcaattcagggaaaccttgttgattagggaaagttctttacataagaattcctgcaagtaagtgagtaaagaatgacagtttaagaattgtcccagcctggccaacatagtgaaaccccatctctaaaaatacaaaaaattagccaggcatgatgatgggtgcctgtaatcccagctactcaggaggctgaggcaggagagttgcttgaacctgggagacggaggttgcagtgagccgagagtgcgccactgcactccagcctgggcaacaagagtgagactctgtctcaaaaa

SEQ ID NO: 146515 - DNA, 327 bp, Homo sapiens
cctaactgagacaacactagtgaaatgaccccacccacctacacctccagagaggaggaggatgagcatgtacagcaggggggacacccacaaagaacaaacaattcatttacctgttcgttctcatctccctaattataaattaaattgatcctccagacagtgttttatatgaaggaagaagccaccttttttacagaggacctgaaaccgtcaaccatcttcacacattctttttctttcttttaaagtataattaggtatttccatcttccttgcttttttctccaaatgaaatgctaatgggagccttattttacccacttc

SEQ ID NO: 146516 - DNA, 718 bp, Homo sapiens
gttagatttttttttttaagcagaattgtgttctgatagttcaaacagtgctgctataatgaataaccatgcttatgtacagtgtatatctgagataaattccttagaggtgggtttattgattcaaagaatagataaatttataattcttataattacaaattgttcctcaatagcgtgtatcaatttttgctctccatgtgtagtatatatgaatgccttttttttttgccacatatggtggttcacatgtataatcccaatgctttgggagactgaggcaggaggatcacttgagtccaggagattgagaccagcctggacaacatagtgagactctgtctccctatacacacagaaaaagagtgcctttttttctgatcacttttgaacaaggctaaaggattacctctatgtatggggctaataagtactaaaatactaaatttgatttcagttaggttgcatttgataggacaaaagtaaaatagtactagagagcagaagtatgaaactgtaaattgctgagaaatcagctctagagttgtataaattattagaattgagccaggtgcagtggtgtgtgtgtgcctgtagtcccagttactcaggtgcttgaggcaggaggatcgtttggggctaggagtttgtatccagcctgggcaatgtggcaagaccctgtctctaaaaaaacaggaagattaaaaaaaaaaaaaag

SEQ ID NO: 146517 - DNA, 375 bp, Homo sapiens
cagaatccccagaccctgcttggagaacaagcctagcttgttgagggcctagctgcacgttccctggcccacttatggagttgggggactcaaatgcattggtattaaaatcaatggagacagcaattctggaccacagccttgacactagaggattgttttctcccaaacagatagtagtcatatattcatttcaaacagcacagtggagcggagaaagacttgttaccagttaagatcagattcatcttaaccatgaaaatgaattatagatgtatccctgcattcaggtgtttaaaaacatttaagtgttttttcataacttcttttggttttcccacacttctgagtttatgtgccaggactagtaactag

SEQ ID NO: 146518 - DNA, 325 bp, Homo sapiens
actcttgagggtaaaatgtctgcctgccagatgcctgaccttgggcaactgatttaatctttgtgtctcattttctcatctgcaaagtgggtctaatcattgtacctacctcatagtgttttcgtgagcattaggtaaatgaattaatgtatgcaaagtcattagaacggtgcctggcacataacaggctcctatttggaatgtcagctgttaataatagcaataataataattacgtcatttcagataggagaccctgttatattttgccataatgggtcacattcagttgcagggtgtttgttcagaggggatggtggggggt

SEQ ID NO: 146519 - DNA, 120 bp, Homo sapiens
gaccctattattgcaccaaggaactagtgatctgcttgttgctgccacagcacatatcagtctgtgtactctgtgaagaggcatagacccctgggacatgaccccatcatatgggctggt

SEQ ID NO: 146520 - DNA, 454 bp, Homo sapiens
tgccgtcctggaatggagccctctgcagctgccttcaatctgggcctgttaggggagcgctggctttgatgtgtgagcgcaacattctgcttctatactcagaaaggagccggccttgaatccgttccaatgtgggcaagtgattacaaacgccctgtcttcagcacagagaggagcacatggtcctggtctccccgtgggtctgtggtcctggcaggtggtggctgcgggggacggcagtcgtgtcagtgttccctggggtagttgctgtccctgaggagagggaagaatatctcgcggcacacagtgtggctgcctgccggaagcctcactatggtgttttaatcctcgagagagcctgtgagcccattttagagataaagagagcagatccaaagagaaatcaaaagctagtaactggccagggaccctggtagccttctggcgtacactg

SEQ ID NO: 146521 - DNA, 287 bp, Homo sapiens
gcagctgaccacataccctttccccagtctcctttgtcttcacctttcaaggatcctgagctgggatgggggagaagtttcaactttaaagcaagaagttatgggactgaataatttagttactaaatgcgtactatgtggtttaaagtgaccggaagattgctgatattactaagtgtgaccagaaagtcatagacttgctctaaatttcatctggggcagaggaagatctggcttccccgggcagatgaaaaagaacagtgggaaatcaaataaatttgcttgtg

SEQ ID NO: 146522 - DNA, 2993 bp, Homo sapiens
  misc_feature (128)..(128): n is a, c, g, or t
  misc_feature (134)..(135): n is a, c, g, or t
  misc_feature (140)..(140): n is a, c, g, or t
  misc_feature (157)..(158): n is a, c, g, or t
  misc_feature (163)..(164): n is a, c, g, or t
tcgtcgcgcgctcgctcgctcgctcctcgcctcgctctcccctttaaacgcccacttcgtatggggaaagaggacaacttgaagtcaagttgcaattaacttccgcggcagcgcagctccggcgccgncggcgnnacggnataggcagaagccgccnntctgnnaagtccgacgccggcgcgcccgcccggggagccgttcttggtttcaggcccgcactcgacagccaccgccgcccccaacgtccatgcctgagtgatctttagacagtgactgagtatggatcatttgaacgaggcaactcaggggaaagaacattcagaaatgtctaacaatgtgagtgatccgaagggtccaccagccaagattgcccgcctggagcagaacgggagcccgctaggaagaggaaggcttgggagtacaggtgcaaaaatgcagggagtgcctttaaaacactcgggccatctgatgaaaaccaaccttaggaaaggaaccatgctgccagttttctgtgtggtggaacattatgaaaacgccattgaatatgattgcaaggaggagcatgcagaatttgtgctggtgagaaaggatatgcttttcaaccagctgatcgaaatggcattgctgtctctaggttattcacatagctctgctgcccaggccaaagggctaatccaggttggaaagtggaatccagttccactgtcttacgtgacagatgcccctgatgctacagtagcagatatgcttcaagatgtgtatcatgtggtcacattgaaaattcagttacacagttgccccaaactagaagacttgcctcccgaacaatggtcgcacaccacagtgaggaatgctctgaaggacttactgaaagatatgaatcagagttcattggccaaggagtgccccctttcacagagtatgatttcttccattgtgaacagtacttactatgcaaatgtctcagcagcaaaatgtcaagaatttggaaggtggtacaaacatttcaagaagacaaaagatatgatggttgaaatggatagtctttctgagctatcccagcaaggcgccaatcatgtcaattttggccagcaaccagttccagggaacacagccgagcagcctccatcccctgcgcagctctcccatggcagccagccctctgtccggacacctcttccaaacctgcaccctgggctcgtatcaacacctatcagtcctcaattggtcaaccagcagctggtgatggctcagctgctgaaccagcagtatgcagtgaatagacttttagcccagcagtccttaaaccaacaatacttgaaccaccctccccctgtcagtagatctatgaataagcctttggagcaacaggtttcgaccaacacagaggtgtcttccgaaatctaccagtgggtacgcgatgaactgaaacgagcaggaatctcccaggcggtatttgcacgtgtggcttttaacagaactcagggcttgctttcagaaatcctccgaaaggaagaggaccccaagactgcatcccagtctttgctggtaaaccttcgggctatgcagaatttcttgcagttaccggaagctgaaagagaccgaatataccaggacgaaagggaaaggagcttgaatgctgcctcggccatgggtcctgcccccctcatcagcacaccacccagccgtcctccccaggtgaaaacagctactattgccactgaaaggaatgggaaaccagagaacaataccatgaacattaatgcttccatttatgatgagattcagcaggaaatgaagcgtgctaaagtgtctcaagcactgtttgcaaaggttgcagcaaccaaaagccagggatggttgtgcgagctgttacgctggaaagaagatccttctccagaaaacagaaccctgtgggagaacctctccatgatccgaaggttcctcagtcttcctcagccagaacgtgatgccatttatgaacaggagagcaacgcggtgcatcaccatggcgacaggccgccccacattatccatgttccagcagagcagattcagcaacagcagcagcaacagcaacagcagcagcagcagcagcaggcaccgccgcctccacagccacagcagcagccacagacaggccctcggctccccccacggcaacccacggtggcctctccagcagagtcagatgaggaaaaccgacagaagacccggccacgaacaaaaatttcagtggaagccttgggaatcctccagagtttcatacaagacgtgggcctgtaccctgacgaagaggccatccagactctgtctgcccagctcgaccttcccaagtacaccatcatcaagttctttcagaaccagcggtactatctcaagcaccacggcaaactgaaggacaattccggtttagaggtcgatgtggcagaatataaagaagaggagctgctgaaggatttggaagagagtgtccaagataaaaatactaacacccttttttcagtgaaactagaagaagagctgtcagtggaaggaaacacagacattaatactgatttgaaagactgagataaaagtatttgtttcgttcaacagtgccactggtatttactaacaaaatgaaaagtccaccttgtcttctctcagaaaacctttgttgttcattgtttggccaatgaatcttcaaaaacttgcacaaacagaaaagttggaaaaggataatacagactgcactaaatgttttcctctgttttacaaactgcttggcagccccaggtgaagcatcaaggattgtttggtattaaaatttgtgttcacgggatgcaccaaagtgtgtaccccgtaagcatgaaaccagtgttttttgttttttttttagttcttattccggagcctcaaacaagcattataccttctgtgattatgatttcctctcctataattatttctgtagcactccacactgatctttggaaacttgccccttattt

SEQ ID NO: 146523 - DNA, 2923 bp, Homo sapiens
tacggctaggtacgaggctggggtaaatcggccgaggaggcaactggtaaccacctcatttggggatgtttctgccttgctagcagtgccagagagaacttcatcattgtcacctcatcaaagactactttttcagacatctcctgtagggctagattcagagagcagcttctgatatttggagggtgatctttagacagtgactgagtatggatcatttgaacgaggcaactcaggggaaagaacattcagaaatgtctaacaatgtgagtgatccgaagggtccaccagccaagattgcccgcctggagcagaacgggagcccgctaggaagaggaaggcttgggagtacaggtgcaaaaatgcagggagtgcctttaaaacactcgggccatctgatgaaaaccaaccttaggaaaggaaccatgctgccagttttctgtgtggtggaacattatgaaaacgccattgaatatgattgcaaggaggagcatgcagaatttgtgctggtgagaaaggatatgcttttcaaccagctgatcgaaatggcattgctgtctctaggttattcacatagctctgctgcccaggccaaagggctaatccaggttggaaagtggaatccagttccactgtcttacgtgacagatgcccctgatgctacagtagcagatatgcttcaagatgtgtatcatgtggtcacattgaaaattcagttacacagttgccccaaactagaagacttgcctcccgaacaatggtcgcacaccacagtgaggaatgctctgaaggacttactgaaagatatgaatcagagttcattggccaaggagtgccccctttcacagagtatgatttcttccattgtgaacagtacttactatgcaaatgtctcagcagcaaaatgtcaagaatttggaaggtggtacaaacatttcaagaagacaaaagatatgatggttgaaatggatagtctttctgagctatcccagcaaggcgccaatcatgtcaattttggccagcaaccagttccagggaacacagccgagcagcctccatcccctgcgcagctctcccatggcagccagccctctgtccggacacctcttccaaacctgcaccctgggctcgtatcaacacctatcagtcctcaattggtcaaccagcagctggtgatggctcagctgctgaaccagcagtatgcagtgaatagacttttagcccagcagtccttaaaccaacaatacttgaaccaccctccccctgtcagtagatctatgaataagcctttggagcaacaggtttcgaccaacacagaggtgtcttccgaaatctaccagtgggtacgcgatgaactgaaacgagcaggaatctcccaggcggtatttgcacgtgtggcttttaacagaactcagggcttgctttcagaaatcctccgaaaggaagaggaccccaagactgcatcccagtctttgctggtaaaccttcgggctatgcagaatttcttgcagttaccggaagctgaaagagaccgaatataccaggacgaaagggaaaggagcttgaatgctgcctcggccatgggtcctgcccccctcatcagcacaccacccagccgtcctccccaggtgaaaacagctactattgccactgaaaggaatgggaaaccagagaacaataccatgaacattaatgcttccatttatgatgagattcagcaggaaatgaagcgtgctaaagtgtctcaagcactgtttgcaaaggttgcagcaaccaaaagccagggatggttgtgcgagctgttacgctggaaagaagatccttctccagaaaacagaaccctgtgggagaacctctccatgatccgaaggttcctcagtcttcctcagccagaacgtgatgccatttatgaacaggagagcaacgcggtgcatcaccatggcgacaggccgccccacattatccatgttccagcagagcagattcagcaacagcagcagcaacagcaacagcagcagcagcagcagcaggcaccgccgcctccacagccacagcagcagccacagacaggccctcggctccccccacggcaacccacggtggcctctccagcagagtcagatgaggaaaaccgacagaagacccggccacgaacaaaaatttcagtggaagccttgggaatcctccagagtttcatacaagacgtgggcctgtaccctgacgaagaggccatccagactctgtctgcccagctcgaccttcccaagtacaccatcatcaagttctttcagaaccagcggtactatctcaagcaccacggcaaactgaaggacaattccggtttagaggtcgatgtggcagaatataaagaagaggagctgctgaaggatttggaagagagtgtccaagataaaaatactaacacccttttttcagtgaaactagaagaagagctgtcagtggaaggaaacacagacattaatactgatttgaaagactgagataaaagtatttgtttcgttcaacagtgccactggtatttactaacaaaatgaaaagtccaccttgtcttctctcagaaaacctttgttgttcattgtttggccaatgaatcttcaaaaacttgcacaaacagaaaagttggaaaaggataatacagactgcactaaatgttttcctctgttttacaaactgcttggcagccccaggtgaagcatcaaggattgtttggtattaaaatttgtgttcacgggatgcaccaaagtgtgtaccccgtaagcatgaaaccagtgttttttgttttttttttagttcttattccggagcctcaaacaagcattataccttctgtgattatgatttcctctcctataattatttctgtagcactccacactgatctttggaaacttgccccttattt

SEQ ID NO: 146524 - DNA, 1259 bp, Homo sapiens
ggagttttgcttgtttttacgatttccccccaacgaatcacttgtcagatcaattttatcttcttcctcctccctgcttcccactctcccctcctccccatcgcaaaccccgttctctgaggttagacattttacaaacccctatatgttggttttcgaattgtgattttttttttaaacccctttctcatggctactcttctagacgtttatttctgcccttcccccgcttaggggggcgggggtaggggaaaggaaaataatacaatttcaggggaagtcgccttcaggtctgctgcttttttattttttttttttaattaaaaaaaaaaaggacatagaaaacatcagtcttgaacttctcttcaagaacccgggctgcaaaggaaatctcctttgtttttgttatttatgtgctgtcaagttttgaagtggtgatctttagacagtgactgagtatggatcatttgaacgaggcaactcaggggaaagaacattcagaaatgtctaacaatgtgagtgatccgaagggtccaccagccaagattgcccgcctggagcagaacgggagcccgctaggaagaggaaggcttgggagtacaggtgcaaaaatgcagggagtgcctttaaaacactcgggccatctgatgaaaaccaaccttaggaaaggaaccatgctgccagttttctgtgtggtggaacattatgaaaacgccattgaatatgattgcaaggaggagcatgcagaatttgtgctggtgagaaaggatatgcttttcaaccagctgatcgaaatggcattgctgtctctaggttattcacatagctctgctgcccaggccaaagggctaatccaggttggaaagtggaatccagttccactgtcttacgtgacagatgcccctgatgctacagtagcagatatgcttcaagatgtgtatcatgtggtcacattgaaaattcagttacacagttgccccaaactagaagacttgcctcccgaacaatggtcgcacaccacagtgaggaatgctctgaaggacttactgaaagatatgaatcagagttcattggccaaggagtgccccctttcacaggtacttagcatagaatgtaataaataataagacatcatgggcaaccctgatttgaggtttgatggagctccctggtttaaagcaactggtatctgaagcaagaatctgccaaaaatgcaaagtgacttgaccactggtgaccttttaaaatatgcctgattc

SEQ ID NO: 146525 - DNA, 3172 bp, Homo sapiens
ggagttttgcttgtttttacgatttccccccaacgaatcacttgtcagatcaattttatcttcttcctcctccctgcttcccactctcccctcctccccatcgcaaaccccgttctctgaggttagacattttacaaacccctatatgttggttttcgaattgtgattttttttttaaacccctttctcatggctactcttctagacgtttatttctgcccttcccccgcttaggggggcgggggtaggggaaaggaaaataatacaatttcaggggaagtcgccttcaggtctgctgcttttttattttttttttttaattaaaaaaaaaaaggacatagaaaacatcagtcttgaacttctcttcaagaacccgggctgcaaaggaaatctcctttgtttttgttatttatgtgctgtcaagttttgaagtggtgatctttagacagtgactgagtatggatcatttgaacgaggcaactcaggggaaagaacattcagaaatgtctaacaatgtgagtgatccgaagggtccaccagccaagattgcccgcctggagcagaacgggagcccgctaggaagaggaaggcttgggagtacaggtgcaaaaatgcagggagtgcctttaaaacactcgggccatctgatgaaaaccaaccttaggaaaggaaccatgctgccagttttctgtgtggtggaacattatgaaaacgccattgaatatgattgcaaggaggagcatgcagaatttgtgctggtgagaaaggatatgcttttcaaccagctgatcgaaatggcattgctgtctctaggttattcacatagctctgctgcccaggccaaagggctaatccaggttggaaagtggaatccagttccactgtcttacgtgacagatgcccctgatgctacagtagcagatatgcttcaagatgtgtatcatgtggtcacattgaaaattcagttacacagttgccccaaactagaagacttgcctcccgaacaatggtcgcacaccacagtgaggaatgctctgaaggacttactgaaagatatgaatcagagttcattggccaaggagtgccccctttcacagagtatgatttcttccattgtgaacagtacttactatgcaaatgtctcagcagcaaaatgtcaagaatttggaaggtggtacaaacatttcaagaagacaaaagatatgatggttgaaatggatagtctttctgagctatcccagcaaggcgccaatcatgtcaattttggccagcaaccagttccagggaacacagccgagcagcctccatcccctgcgcagctctcccatggcagccagccctctgtccggacacctcttccaaacctgcaccctgggctcgtatcaacacctatcagtcctcaattggtcaaccagcagctggtgatggctcagctgctgaaccagcagtatgcagtgaatagacttttagcccagcagtccttaaaccaacaatacttgaaccaccctccccctgtcagtagatctatgaataagcctttggagcaacaggtttcgaccaacacagaggtgtcttccgaaatctaccagtgggtacgcgatgaactgaaacgagcaggaatctcccaggcggtatttgcacgtgtggcttttaacagaactcagggcttgctttcagaaatcctccgaaaggaagaggaccccaagactgcatcccagtctttgctggtaaaccttcgggctatgcagaatttcttgcagttaccggaagctgaaagagaccgaatataccaggacgaaagggaaaggagcttgaatgctgcctcggccatgggtcctgcccccctcatcagcacaccacccagccgtcctccccaggtgaaaacagctactattgccactgaaaggaatgggaaaccagagaacaataccatgaacattaatgcttccatttatgatgagattcagcaggaaatgaagcgtgctaaagtgtctcaagcactgtttgcaaaggttgcagcaaccaaaagccagggatggttgtgcgagctgttacgctggaaagaagatccttctccagaaaacagaaccctgtgggagaacctctccatgatccgaaggttcctcagtcttcctcagccagaacgtgatgccatttatgaacaggagagcaacgcggtgcatcaccatggcgacaggccgccccacattatccatgttccagcagagcagattcagcaacagcagcagcaacagcaacagcagcagcagcagcagcaggcaccgccgcctccacagccacagcagcagccacagacaggccctcggctccccccacggcaacccacggtggcctctccagcagagtcagatgaggaaaaccgacagaagacccggccacgaacaaaaatttcagtggaagccttgggaatcctccagagtttcatacaagacgtgggcctgtaccctgacgaagaggccatccagactctgtctgcccagctcgaccttcccaagtacaccatcatcaagttctttcagaaccagcggtactatctcaagcaccacggcaaactgaaggacaattccggtttagaggtcgatgtggcagaatataaagaagaggagctgctgaaggatttggaagagagtgtccaagataaaaatactaacacccttttttcagtgaaactagaagaagagctgtcagtggaaggaaacacagacattaatactgatttgaaagactgagataaaagtatttgtttcgttcaacagtgccactggtatttactaacaaaatgaaaagtccaccttgtcttctctcagaaaacctttgttgttcattgtttggccaatgaatcttcaaaaacttgcacaaacagaaaagttggaaaaggataatacagactgcactaaatgttttcctctgttttacaaactgcttggcagccccaggtgaagcatcaaggattgtttggtattaaaatttgtgttcacgggatgcaccaaagtgtgtaccccgtaagcatgaaaccagtgttttttgttttttttttagttcttattccggagcctcaaacaagcattataccttctgtgattatgatttcctctcctataattatttctgtagcactccacactgatctttggaaacttgccccttattt

SEQ ID NO: 146526 - DNA, 1362 bp, Homo sapiens
ggagttttgcttgtttttacgatttccccccaacgaatcacttgtcagatcaattttatcttcttcctcctccctgcttcccactctcccctcctccccatcgcaaaccccgttctctgaggttagacattttacaaacccctatatgttggttttcgaattgtgattttttttttaaacccctttctcatggctactcttctagacgtttatttctgcccttcccccgcttaggggggcgggggtaggggaaaggaaaataatacaatttcaggggaagtcgccttcaggtctgctgcttttttattttttttttttaattaaaaaaaaaaaggacatagaaaacatcagtcttgaacttctcttcaagaacccgggctgcaaaggaaatctcctttgtttttgttatttatgtgctgtcaagttttgaagtggtgatctttagacagtgactgagtatggatcatttgaacgaggcaactcaggggaaagaacattcagaaatgtctaacaatgtgagtgatccgaagggtccaccagccaagattgcccgcctggagcagaacgggagcccgctaggaagaggaaggcttgggagtacaggtgcaaaaatgcagggagtgcctttaaaacactcgggccatctgatgaaaaccaaccttaggaaaggaaccatgctgccagttttctgtgtggtggaacattatgaaaacgccattgaatatgattgcaaggaggagcatgcagaatttgtgctggtgagaaaggatatgcttttcaaccagctgatcgaaatggcattgctgtctctaggttattcacatagctctgctgcccaggccaaagggctaatccaggttggaaagtggaatccagttccactgtcttacgtgacagatgcccctgatgctacagtagcagatatgcttcaagatgtgtatcatgtggtcacattgaaaattcagttacacagttgccccaaactagaagacttgcctcccgaacaatggtcgcacaccacagtgaggaatgctctgaaggacttactgaaagatatgaatcagagttcattggccaaggagtgccccctttcacagcatcctgggatctcaaatatgttggacaatttatttattaatggaaaaataaattttaaaaagaaactacctcgtgctcctgaagcttagcttcagtactgctctcctgaaacatgacagtcatttccgtaggaattaaatacacttaggtgtttagttgatgttcagtctgtattataaatgatattggagcaacaattacaaatctatcatgttatacaaatgtgtttttaataaactgtactttatttcacagtttttggac

SEQ ID NO: 146527 - DNA, 393 bp, Homo sapiens
aagaatcgagctcggtaccgacgggatactgatctgcccaaggaaaagcagcaatggtggcagagtctagactagaactaaggacttaatccaatggtagtcccactacagtagactgtcttggttcttgagctacaggaagaattagagacctggcctcagaggagttcaccaacaagtaaactctaagcagtcaggaagcccttttgcatgtggatctgggcttttctctttatctgagactctgtcaaacattatctagactggctgaaataaatctatttcttttcccaaagtctaatgtggttttgcccaactcactgaacctcaaggcatacagtcaaagataaaaatgtctcctggatcagtatcccatcggtatccaacagtatc

SEQ ID NO: 146528 - DNA, 150 bp, Homo sapiens
gttactttgtccccatgcctatttaagtgtgtggagatttttccccccatttacaaagatgaaatagactccatgggctgcttggaacacatttaacttatctataggtttcaaaagcacagcaggtccagggcatgaaaaaggcaggca

SEQ ID NO: 146529 - DNA, 449 bp, Homo sapiens
atctttgagaggttgagaactgtcattcctggatagaactcccttgattgtcagctgtcctcacaaaagcagaacattgtacaaagtactgaacagggtaacctggaaacagacctctgtctccctcaattactcagccaaggtaagcccagcctgctgggtaagacactgaagtgacctggctcttaagtaggcaagagaggcctcatgtataagaggatggactttggagtcagagacacccaagtttattctcagctttgccacacactataagcctggtggtctcaggcaggctgcttagctctgtaagcctcagtttcctcatatgtaatatggtggtaatgataggacctacctggggcttttgtgaaagcaaaattgaagagagtatatatatcacttgatataatgatgtaaagaagcctctcagtaaatagtagcttttg

SEQ ID NO: 146530 - DNA, 155 bp, Homo sapiens
aacaacaacaactacaacaaacagttcggtgaaagctaagattttggctgttttgttcatttttgtatccccagtgcctgtaagcatgttttgcacataatgggggctcaaacgtttgttgcagaagtgcctcttacaacacgtgccacttacaa

SEQ ID NO: 146531 - DNA, 203 bp, Homo sapiens
ctgcacttcctaggtgtctatatatccaaaccaggaggggaagggaataaacaaacagatggaaagggaaggagatcagtcatggttttccattttttaccttactagctgatctcacccctacaacccaccctttaacatgctctctttccacaactcccatcttaaagaatggatagctgtcgacatttgcttttgcatat

SEQ ID NO: 146532 - DNA, 350 bp, Homo sapiens
gcttggggtgatgaggaagctggggggaggcaagagaggaccctgcctctcctgaggagtgagcagagccagggcagtccctggggtccagggccaagatttcctgctgacccctgcaggagctgggagggcagagcctcagcctccactatgttgggggaagggctcccgggcccccggcacctggacacccacctgtccagagcctacagagaccctgcgtccccacacagcagctcctcacaccagagttctggtgcccagcactcctcagcagcagtgaggccacaggcagggcacaggcctctgtccctacgccaggtcctcccctaaaagggcagtggcagcag

SEQ ID NO: 146533 - DNA, 193 bp, Homo sapiens
ttatttgtccttggcccaatctctcccccatcaatgacactcttgaacacagcagcccgagttcccagtatagaaccctgaacactaactctagagacagcagatcagaccttatttgcaaattattgccttgcattttccaatctgtataagcactatccaaaggtctgaaacaaggctgcttttttttttt

SEQ ID NO: 146534 - DNA, 318 bp, Homo sapiens
gccattccggataagcaagtgctctgaatcacagagtttgcttcaatcttttgatcaaaatcatctttgaatgtactattttccaccctttctaaattaccacaatcccatgcagaccaccttagaaatgccagttaaacagtgtgggattgacatactgctgaaggcaatgaaggccgctccatatcatgaaccatctgtgtgggctggtgcatcttcctcagcatcatggcacagagcaggcagtagaagttactgatggttattgttgctcccttttgtacatcctgatcccagagtcattctctcagctttttt

SEQ ID NO: 146535 - DNA, 155 bp, Homo sapiens
ccgagatcacgccactgcactccagcctgggcgacaaagcgagactccgtctcaagaaaaaaaaaaaaaagttaattaataggattattacactttgctggtgactttttcccactgggcagcccccgccagcccctgttgctgtggcttcatct

SEQ ID NO: 146536 - DNA, 167 bp, Homo sapiens
agcagccatgttttattatattacacagtgttaataatgaattgtcagaatgcaaattactgtatactagccaaaagaatatcacaactatcacattttaaacttgtgtttcttagcatgtatgaggtttagaattatttaacaatgtaactcagtgcatttaaatg

SEQ ID NO: 146537 - DNA, 516 bp, Homo sapiens
tgaaagagcccacccaagatcagcagaactctccagctgagcctagctcaagttgccagcacatagaatcatgagttattttaattttaagatattaaaatctgggagctttttgttattattttttatagctaaatctaacagacacggtcccttaataatacatcatatacatcaaatatttactatatttggggcgctgtcttaagtgctttgcctacattacttcacagaatttttaccatactctatgagggaattattaatatccctacttcatagaagaggaaactgagtttcaaagtggttaattaatgtatacacctggacaacggcaggtgtcaagccacaatctctctgatgtcacaaaacacactgttaaccactacccaatccagaaagacaaaatcaatgaatggggaactcaaaaccacatggactgaaggatgggggcaagaattaggttggcttaacccggggaaagtagacactcagaggccatgaaataaactctca

SEQ ID NO: 146538 - DNA, 266 bp, Homo sapiens
catgttcaaatttgggaggagttaatatgaagcatgtggtggcaattcaggctgtgatgacgctccttcagagtgaactctagttggctatattggttgcaactgatttcagccagttttgttatcttacaagcagaaggagtttcagtgtttcagaaagttgtttcttatctgctatcttgcaaactcaagactttctgttagttactggtttaagtttttggggcatggttttactaacaacttcagtccctgggcaacagcat

SEQ ID NO: 146539 - DNA, 575 bp, Homo sapiens
gatcccaggaggtgtctggcactacacaaagtgatatgagcatgagagtgcagaacataatgtttgggaacatagtgttcctctggggactaaaaaattaatgcagatccaaaactgttaaaaaaaaaaaaacacaagggttggttgtaataaattacaggaagacaaagtgaaaagcgtaggggcaaaaaccccaagcatcatggtaaactagggagcacaaaagcagaatatgataagccaattaaccttaggagagtacagactctcagtaagggcagaatacaagagacttagcctttgaaggcaattttgcagactcagttacttgtacacatagacaatcaatagatgtttctgatggcccactggcaaatatatacatatatttgtttgctgtagatgaagcccaagccatcctgcatataataaagtatttaggaagaaaataagtgggttggcaaacttttaatgtacataactggagacctagttctggaaagcagctctaatggaaataggagcaattgggtttatagttgctgatttttatcagcaaccagaaagtgtgctaa

SEQ ID NO: 146540 - DNA, 153 bp, Homo sapiens
ctcattctttaactcactgaatctggcatctgccagcacaactttactgaagctgcttattattcactggctgttttattgttttttattcagatatcatagctggcattgctgaagactacatagatcatggaaatgacatttttgtatgtt

SEQ ID NO: 146541 - DNA, 277 bp, Homo sapiens
caagcaggagagggatctctggaaggataaagggaacaaatttcttccagaaacagtcatatggtatgggcccaatgatacactgatctatcccttaggcttcaattacccttttacagtacttcataagctgactcattggaattcagacaaaatgttggcatggggaaagcaatggtattgaaaatcattgcctatgattgcagaaaatgtttagtcttgccatactgtctgtcccaaacataatcctggaaaaccccttcatgggtcacaggga

SEQ ID NO: 146542 - DNA, 379 bp, Homo sapiens
agatcaaaaagcttagagaagtgaacatgttaggatggatttattacatgagagaagaagaccgaccagttgactatgttcattggaggggcccagagtatagttcacttaccaaaacaataaggaatgtgatagtgaagggacaccagcattattgaaaagcttcagctgggcgtggtggctcacgcctgtaatcccagcactttggaaggccaaggagggcagattatttgaagtcaggagttcgagaccagcctggccaacatggtgaaaccctgtctctacaacaaatacaaaaattagccgggcatggtggcacatgcctatagtcccagctacttgtgaggctgaggcacgagaatcacttgaatctgggagg

SEQ ID NO: 146543 - DNA, 494 bp, Homo sapiens
ctgttcttgctgcaatatgccagccgcatttccttttacacgggcgtctccttttgtctcctgtctgtgggtactgcagtagcaaaaggggcaatctgtggtcttttctccataacccctcctgcagagaacaactttcaggctgggggtttcctgaaacatagattgcactggacagaaggacttaacatgtctttgttgcaccctaaaacatgacctttagtttctctctgcttagaatctatatgctgtgccacgatttttctaccatgattttatcttgtagaattcactttacctctctgggttccaagtcctcatttattaaatgaagatcccattctaagattgtgccaattttcctatttccaaattcatcagcaccgagagtgcctgtccttactgtggaggtctggcgatagagagcaggttctccctgcaatattgacacaggcccgcctctgctgtgggggcctgaacactggcatccctag

SEQ ID NO: 146544 - DNA, 335 bp, Homo sapiens
agcaggggttatcactggtcctgtttcagagctaaggaaacatgctgggacttgccccagatttaacaggaaagcccaactgttcaaaagttaaacaacaaaaagtgaagaacattgcttttttaaaaattccaaatttaaaaaaatgtagtagaagacacaaagcataaaatttgccattttacagtggccagttcatggcattaactacatttacagtgtgtgcagccatcaccagcgtgcatctccagaactttctcatcctcccaaactgaaactctgtccccattacacacgaactccccatccccttccccagcccccgacacccacca

SEQ ID NO: 146545 - DNA, 955 bp, Homo sapiens
atgatgcagactttctaacggatgcaggtgttcggaagagttgtggatcgaaacgccttcatgatggcttggaggtgtaggtagcaaactgacgtcacaggaaggaacacaatcttgggtacctactggcaacgttggagggagaaagtgagcatcaggtgccatcattttatagttgatctatgtgatgaggttggtatcggagcataattggtacaaaggaaaaatgacttaggcagatgcagactcacgggccaggctattttattagggcagaatgatttggtcctttgtggaagaattggtggagtgaagcgtgaatctttcccagcacaacccaacaacagtcctggccctaagaagtggagcatgggagttgggtgtggttcgtgcctgtagtcccagctacttgggatgctgaggctggaggatcgtttgagggtgcagtgagctataatataatataatcacaccactgcactccagcctgggtgacagagtgaaaccctgtctgaaaaaaaaaaaaaagaaaaaaaaaaaaaaaaaagggggggggggttaaaaaaatatccccgggggggcccaaatttacggggtcaccccgttttttgaaaaaagggggcccctatgggggaggccgtataaaaaagactagacgaggagcgcgatataacaacgccgtggagggggaaaaacgggcacggggagactgggggagaggacccctcaatcctggggggggacaactgggcacaccccccgaggagatattacgcccagggacatcatacgtcgcggcataggggtaaccacggcaagccggggcgagaattggcacggactgattcgacaatttcggggcgcgaacaacccaagcacaccggagaaagagagaacacgacgacaccaagcacagacaatcaatcagcagaccacgagacacatcagcgaataa

SEQ ID NO: 146546 - DNA, 675 bp, Homo sapiens
gcttgaagacaagctatgcacagaggagacaaaaggaaacaataagaaagaatgaagcacacctgcaagatatagatttgccctcaaaaggacaaatttaagaattattggctcttgactacctcaagacatttaaaaatgaaactcccaatgatcagagataaagtaagaaacataaaagcagcaagagaaaagaaacaaatattaataacacagcacagctccagtatgtctccagcagactttttagtggaaacctaacagctcaggagagagtggcatgacatatttaaagtgctgaaggaaaaaaaacttttagcctagaatagtatatccagtgaaaatatccttcaaatgcgaagggaagaaaagacattcctggccggcgtggtggctcatgcctgtaatcacaggattttgggaggccgaagcaggcagattacctgaggtcaggagttcaagaccagcctggccaagatggcaaaaccccgtctccactaaaaatacaaaaattagctgggcatggtggtgcatgcctgtagtcccagctactcaggaggctgaggcaggagaattgcttgaaccctggaggtggaggctgcagtgagccgagatcatgccatctgaaggtacaaaactcactggtaatagtactacacagaaaaacaaaggata

SEQ ID NO: 146547 - DNA, 286 bp, Homo sapiens
caccatgccactacaggttgaaggagccacaggctgcaaacagcaatgttttcccaaactgcttatccagccatgaaccacccacagcatttttgcaatatctccctacctcctatgaaattacttacttaatttttttaatcaatgcactttttgctgcctaaataaatttagggactattagtctaaacactagcaactcagaaatcacaggttttataacaccatcatgtttattttgtgtaatatatttttaaatggccaggcacaatagctcacgcctgta

SEQ ID NO: 146548 - DNA, 499 bp, Homo sapiens
ggaaacttacaatcatggtggaagacaaagagtaactggacatatcacatggtaagagacggcaagcgtgaggtgaaggagtcagtttctttaaatgaaccagttctcatttgaattaatggagtgaaaactttctcatgaccaggatagcacaaaggcattcatgaagaatttgtccccatgacccaaacacctcccaccaggtttcacatctaacattgaggattacactgcagcatgaggtttgcaggacatagacatccaaaccataccacagaccaactaggcttaacagataggtacaaaacttttcagttaaaagcaagaaacaacacaatgttcttatttgcacctgatgtattctgttaggacacataacaagtcttattaaatactggctggatgtgtggttggtacctacaatcccaataatttggaagatgaaggtgggaggatcacttgggatcagaagattgacaccagcctgagtaacacagtg

SEQ ID NO: 146549 - DNA, 6147 bp, Homo sapiens
gcgggcgccggcaatcgagtggcttcctggccatggagaggagatctggacccgaggacgccagggactcctctccgtctccctggaccgctgtgtaggcacctgagttaacggacgctaagcggggtaggggaagtaacagtgtatcatgtatgccactgattccaggggacactcccctgctttcctccaacctcagaatggaaatagtcgtcacccatctggctatgttccagggaaggttgtcccattgcgtccccctcctcctccaaagagtcaagcttcagccaaatttacctccatcagacgagaagaccgggcaaccttcgcattctcacctgaagaacagcaagcccagagagaaagtcaaaagcaaaagagacacaaaaatactttcatttgttttgctattactagtttctcattttttattgcacttgcaatcattttaggaatatcctcaaaatatgctccagatgaaaattgcccagatcaaaatcctcgtctcaggaattgggatccaggacaagattctgcaaagcaagttgttatcaaggagggagatatgctccgtctgacctcagacgccaccgtgcattctatagtcattcaggatggaggactgcttgtatttggggacaataaagatggatccagaaatattactttgaggactcattacatcctgatccaggatggtggggcgcttcatattggagcagaaaaatgccgctataaatccaaagcgacaattaccttgtatggcaagtcagatgaaggtgaaagtatgccaacatttggcaaaaagtttattggtgtggaagctggcgggacactggagttacatggggcacggaaggcatcgtggacgttgttggcaaggaccctgaattcctcaggcttgccctttgggtcctatacctttgaaaaggacttttcccggggcctcaatgtgagggtcattgaccaagacacggccaaaattttggaaagtgagagatttgatacccatgaataccgcaatgagagcaggcggcttcaggagtttctgagattccaggatccaggtcggattgttgccatagctgtcggggattcagccgctaaaagtctcttacaaggaaccatccagatgatccaggaacggttgggaagtgaactgatccaaggactgggctacaggcaagcttgggctttagttggtgtcattgatggtggaagcacttcttgcaatgaatccgtgagaaactatgaaaatcatagcagtggcgggaaggctcttgcccaaagagaattttatactgtggatggccagaagttctctgtgacagcttatagtgaatggattgaaggcgtttctctttcaggattccgggtagaggttgtagatggagtgaagctaaatttgctagatgatgttagtagttggaaacctggagaccagattgtggtcgcaagcacagactattccatgtaccaagcagaggagttcactcttcttccctgttctgaatgcagccattttcaggtcaaagtcaaagaaacccctcagttcctgcacatgggtgagatcatagacggtgtagacatgagagctgaggttggaattcttacccggaatattgtgatccaaggagaagtggaggactcatgctacgcagaaaatcagtgccaattttttgattatgatacctttgggggacacattatgataatgaaaaattttacttcagtccatctttcttatgtggaattgaaacacatgggtcagcagcagatggggcgataccctgttcattttcacctgtgtggtgacgtggattataaaggaggatacagacatgcaacatttgtggacggcctgtctattcatcacagcttctcaaggtgcatcactgtgcatgggacaaatggcttgctaataaaagacaccattgggtttgacacactaggtcattgtttctttttggaagatggtattgaacagaggaatactttgttccacaatctgggactcctcaccaagccgggtactctcctgcccaccgataggaacaactccatgtgtaccaccatgcgagataaagtgtttggaaattacattcctgtgcctgctactgactgtatggctgtttcaactttctggattgctcatcccaacaataatctgattaataatgcagctgcaggctcacaggatgctggaatatggtatttattccacaaggaaccaactggggaatccagtggattgcagctcttggcaaaaccagaactcactccattgggtatattttataacaacagggtccattcaaattttaaggctggcttatttattgacaaaggtgtcaaaacaaccaactctagtgctgctgacccaagggaatacctctgtttggacaatagtgcaagatttcgacctcatcaggatgcaaaccccgaaaaaccacgtgttgctgctctaattgacaggctcattgcttttaaaaataatgataatggagcttgggtcagaggaggagatattatcgttcaaaattcagcatttgcagataatggaataggactgacctttgccagtgatggaagcttcccaagtgatgaaggttccagccaagaggtatctgaatctctctttgttggggagagcaggaattacggctttcagggtggtcagaacaagtatgtaggcactggaggaatagaccagaagcctcgaacattacccaggaacaggacgttcccaattagaggctttcagatttatgatgggcccattcatctcacaaggagcactttcaaaaaatatgtgccaactccagataggtacagcagtgcaattggcttcctcatgaagaattcctggcagataacccccaggaataatatctccctcgtgaagtttggtccacatgtctctctgaatgtcttttttggaaagcctggtccctggtttgaagattgtgagatggatggtgataagaactccatattccatgacattgatggctctgtgacaggatacaaggatgcttatgtgggaagaatggacaactacctgatccgccatccaagctgtgtaaatgtgtctaagtggaatgcagtgatctgcagtgggacctatgcacaggtctatgtacagacatggagcactcagaatctttctatgaccattacacgagatgagtatccgtccaaccctatggtgctccgaggtattaatcagaaggctgcctttccacagtaccagcctgtcgtcatgctggagaagggttataccatccactggaatgggccggcaccacggactacatttctatacctcgtcaacttcaacaagaatgactggattcgagttggcctttgctatccatcaaacacaagttttcaagttacctttggctatttgcagcggcagaatggctcattatccaaaatcgaagaatatgagcctgtgcattcactggaagaactgcaaagaaagcaatccgagaggaaattctattttgactccagcacggggttactgtttttgtatctcaaagccaaaagccacaggcatggccacagttactgttcatctcagggatgtgaaagagtcaagatccaagcagccacagactcaaaggacatcagtaactgcatggccaaagcatacccacagtactacagaaagccgtcagtggtcaagcggatgccggccatgctcactggactctgtcaaggctgtggcactcggcaggtggtgtttactagtgatcctcataaaagttacctccctgtgcaattccagtcacctgataaagcagaaacccagcgtggagacccgtctgttatttctgtcaatggcactgactttaccttccgaagtgcaggcgtcctcctccttgttgtggatccgtgcagcgttccattccgcttgacggaaaaaacggtttttcctcttgctgatgtcagtcgcattgaagagtatttaaaaacaggcatccctccaaggtccattgttctgttgagcacaagaggagaaataaagcagttaaacatttcacacttactagtacctctgggattagccaaaccagctcatctttatgacaaagggagtaccatatttttgggattcagtggaaactttaaaccatcatggactaagctatttaccagtcctgctggacagggccttggggtgcttgaacaattcatacctttgcagctggacgaatatggttgtcccagagccaccactgtccgcagaagagacctggaactgctaaagcaagcttcaaaagcacattagagactaactgtaacttaagtgctgggggaaaaaaaatgtgaactaacttatttaatttatggcattttaaaatgacactgttaacccaacggaaccattttccagtttgatacagaatggggagaaaagaaagcgtttgaaattattgcttggataccagcttcatgcaccttctagttgtacaaaatgttaaagacgttgtttgtatttgtaaggctggtgtattcagagagcagatctcttattcctcactttccacccccgtattttgtaatgaccatgagcaatgtttttactttttgtataatggggtggggtggagtgggggcttctgagagtcagcctgaggtctttagaggaccagctattgtagcaccttggatacttgaagtttaatgctcagttgggtcgggtggcagttgacttggtggctggcatgttcagcagtgcctggggccctgtttctgggcagcctttgaggattttctatgatattgaatgacagttttaagtggcaactcaggcccagctcatgcccttttttgcctggacatgtgctatttttattcacttatatatcaattacttgtaagggttaaactttcaaacaggaagtatattgggacaaaagggctcttggggattagatatccctttaatctgtgaccatggggcaaaaaattttcctgcagcaaaagtctgaggctgttgggaccatttttgcagctttaatccttagcctcttttgactgtatatttgtgtttaaaatgcagagctcaactgaatatttccttttttgttttgttttgttttgttttaagaagtaggttgttttcctgaaccgtaaacttgtatcattttaacttgcacaaaggaagtctgttcttggtattgctcttgcacttgggttttttgttattgttttgtgtggattttttaaagcttttctgttcaccctcctgccaggaaaatcccagaaagcttaatgataccccaaaatgattacacccagggaggaaaaaaaggagcgctttctagggtcagaatcgtggagagaatactcagaacatgaacctctttaaagccttgcaggaatgagtcactcttacttaatgaaatgttaaagccaattaaaaagcatgctgtgatgcccagcttccctttccacagggtgcatgcgtctcctgctggtgaatcacatgcggcaagaggcaactggctccacagcctgggatgctgccgtaccaagaggaaagaagcagcaaaatgcctttacgttgttctaaacccccgacgcataaagtgtagaggagggatggccaagggtgggtggtagaaagtgtgttcaggctgacactggcaatgagtacagataatttcactttcctcttccaggggcaaaggctgatggcctctacctttgtatccaggagaaactgcagagcagccctgtgactttacaaaatatgctacctcaaagtgctaccgataaacctttctaattgtaagtgcccttactaagggcacatgtcttaatcaaagttagttttttgttttctggtttgttttttttttttttgtatattgatgaatgagatcttacctattaaatatattattggaaaaaaaaaaaaaaaaaaaattaaagtttgagtgtgtgtgtgtgtgtgtgtgtgtgtgtgtgtgtgtgtgttttatgacttaaatatctttacgtgtgttttttagagcttggttctttaaagatttggagaagatatgtaaattaccaaggcacttggtttttctgttttatatactaataatcagggcctaagttaaataaaaatatgtgtgcatgtatttt

SEQ ID NO: 146550 - DNA, 1224 bp, Homo sapiens
gcgggcgccggcaatcgagtggcttcctggccatggagaggagatctggacccgaggacgccagggactcctctccgtctccctggaccgctgtgtaggcacctgagttaacggacgctaagcggggtaggggaagtaacagtgtatcatgtatgccactgattccaggggacactcccctgctttcctccaacctcagaatggaaatagtcgtcacccatctggctatgttccagggaaggttgtcccattgcgtccccctcctcctccaaagagtcaagcttcagccaaatttacctccatcagacgagaagaccgggcaaccttcgcattctcacctgaagaacagcaagcccagagagaaagtcaaaagcaaaagagacacaaaaatactttcatttgttttgctattactagtttctcattttttattgcacttgcaatcattttaggaatatcctcaaaatatgctccagatgaaaattgcccagatcaaaatcctcgtctcaggaattgggatccaggacaagattctgcaaagcaagttgttatcaaggagggagatatgctccgtctgacctcagacgccaccgtgcattctatagtcattcaggatggaggactgcttgtatttggggacaataaagatggatccagaaatattactttgaggactcattacatcctgatccaggatggtggggcgcttcatattggagcagaaaaatgccgctataaatccaaagcgacaattaccttgtatggcaagtcagatgaaggtgaaagtatgccaacatttggcaaaaagtttattggtgtggaagctggcgggactttacaaaatatgctacctcaaagtgctaccgataaacctttctaattgtaagtgcccttactaagggcacatgtcttaatcaaagttagttttttgttttctggtttgttttttttttttttgtatattgatgaatgagatcttacctattaaatatattattggaaaaaaaaaaaaaaaaaaaattaaagtttgagtgtgtgtgtgtgtgtgtgtgtgtgtgtgtgtgtgtgtgttttatgacttaaatatctttacgtgtgttttttagagcttggttctttaaagatttggagaagatatgtaaattaccaaggcacttggtttttctgttttatatactaataatcagggcctaagttaaataaaaatatgtgtgcatgtatttt

SEQ ID NO: 146551 - DNA, 346 bp, Homo sapiens
agaatcacttgaacccgggaggggaggtggaagctgcagtgagtcgagatcacgacactgaactccagcctgggcgacagagtgagactccatccccaaaaaaaaaaaagcttgcagtatctcccacaagcttctactcacttatcccacaaatatctaccacctactaggtgcacacactgttttggaaactggcaatgcagcagggaacaaaacaatgtcctgccttcacggaccttctagtcggggataaagccaaatgccttagcagggcccatcatgaaatgcatgcctgcctccctagccttgtgtccttcttctccttgtccgtgccccctagtcatat

SEQ ID NO: 146552 - DNA, 580 bp, Homo sapiens
tccaccaataacccctcatggatgagtgattgttactgtgtaggaagaacttggggctcagtgaggttgagccacttttccaagaggccacttagagctggagctcattataagtaggggtctctaggaactgtttctaaacaacccccgaacccagctggtggctcccagaagggtctctggaagcaaggcgactgtctcattgtttcattagtttgagccctacggggccttaggacacagccagcttggagaagtcactctaataacccatcttgccggtgatgcccaggcctcggcagactggctgtccgagggtgtctgggcctgggcagccgaggtcttgttaaccccaaatcccacaggactcgcatagagtgcagaatcccggttttctgaattggtgctaaaggctcagtggcctggccctgctgtgaagccacagggcttgtgctctgggagccttggccgacacaggtgccccgccgcctcctctgctgctgcagcctcaagggctacaaagaaagctccttctgcccgtgcagcgtgggctcctgggtcccctgcaggccaccatggc

SEQ ID NO: 146553 - DNA, 286 bp, Homo sapiens
cctgaaagatcatgctatgtgctgacgtctgaaatcaggtacctgagggatcccatttttgctttgctactagagaagtaaaattcaaatgtcctaaagaagcaattcatgtgttggttgataatattgaattgtagtcaacttaataattagagtgagaaaacactcatcagatcctttgtggcttgaattattgagaaaagggcattaagagtgtactgaatcaaaaaacaggtgatgaggtgtgagaataatatgagagcatgataaccagctaagtttaact

SEQ ID NO: 146554 - DNA, 410 bp, Homo sapiens
agacaagacacttcacagagaagctgtcactgcagccggctggccagctcagtggggaacagagtttgccagacggacaatcaagggtccctcacccaccaccttggtaggcttccaactgccacaaccaacagaggcccaggcatcaaagggcagtaacaaacggccccctgcaccccaccctgcgaggccacagaatcgatccacgcaagagtgcggctgtcactgatgccaccagctgtggagtacgttgttccacaacaaatgaacctgcgagcggctgaaatctcatcctacaggcaaagagcaccaccgtatcacctgcagccatggccacatgaccagattccaacagcagctggatggagaacctggggatgaacagtgaagtgctcaacaacgaagaccgc

SEQ ID NO: 146555 - DNA, 211 bp, Homo sapiens
ttgcaaagacagaaaggggacagaaaggagactgcaagagaagccctctatggagcaccttcaatggactctggccacatccctactctgtttctataagagacctttttatgcttaaaataatttcatcttttacaaggtagtgcatgataagttttttatttataacctaaagagtgttaattaattcagtcccactatcgtctgtgaa

SEQ ID NO: 146556 - DNA, 142 bp, Homo sapiens
cacactcaaataccgacccaagaaagaaaagcttccttgccactttccttttctcattagctgatacttttcctcttacccaccataatttatcctttaaagtttccagctttatgcaggatcaatagagtcttacttccaa

SEQ ID NO: 146557 - DNA, 136 bp, Homo sapiens
agaattaccgaaacgtctgtatgcccctggtgagaaacactgctcatgttcaaccaggtatttgagtcattattcctccctctagacctctccctcctccctaacttccttccttcgccgcttcctctcatcttcc

SEQ ID NO: 146558 - DNA, 242 bp, Homo sapiens
ctcagaaggaacccaagtagcaatttcaccatagtctcatccctccaaatttctcctaaaaaatattccctcaatccaggatttttactacttccctctgtggagagaaaccccatgtctaacatctgtctcacccaagagcatgctggaaaattctttggcttcaaagtccaaagattgattctggatattgaatgtccagctaagggaaaccaagaaaagacttttctgttttctccttc

SEQ ID NO: 146559 - DNA, 123 bp, Homo sapiens
tcatgcatatgcacataaatttctccctatcaatggaatttctgagtcctgtaggttatacataagtttcactgtggttgatactgccagttagttttccaaagctaattgtaccagttgaca

SEQ ID NO: 146560 - DNA, 588 bp, Homo sapiens
aggcaccatgggtggatcagcgcgccctcttttgctggaatcagagcttccgtcacgggaagcgaccagcttgctgtcctccagcatgagacagtggaccagggaactaacgaggcagacacacctgtgcaccctcccacactggaatcagagcttttgcccagggaagccactgtcacactggtccctgagcccacgcagcaaccctgaccaccagcaccggacaccagaccagggaactcggcaggcaccacaggtggagcagtgtgccctctcccgctggaatcggagcttgcatctgggaaagctgccagcctcctgtcctccagcaccagacagtggaccagcaaactaaccaggtggagccgacgcaccagcgtgccctcccccactgggatcagagctttggcccagggaagccactgccacaccagtccctgagcccgtgcagcaaccctgaccaccagcaccagacaccagaccactgaaggaggtaggcagggcgaacggaccagtgcgccctccccagctggaataggaacttctgttatgggtgaaaaatcgagctagagggaatacttccaaaca

SEQ ID NO: 146561 - DNA, 762 bp, Homo sapiens
catgggctctgaattaggaggatctggtggacctttccttgtgcctttaccccagaaagttaaagggagggatgagatcaccagttccaccttggtttttcccattcttgggtcttgagttaatctccctgctcctctgagcactctttctgcctgagggcttggaggtaagagacagccccagtaaacactggttgagccagcatccaccacgtgccaggcactgtgctctgtgcccaggagggtaggacatgggagggaagagatctctgcaagaagctcagccttcaggtgtcagatggacctggaatggaattcttggctcagcttctcccaagtccttagactgggcaagttaggtgaaccctgagcctcagtttctcaatctttaacattctctactccatacagtggttgtgaagattgggtgagctaatacctagagagtgttgggttctgtatctagtacaggaatgctcaaaatagaaaagctgtaattacaaaatggttcttgccttctagttcaggaaataagatcgtccaatttctggtgacgaagatgaccctgatggtcatctagtccaagcatccagagtccactgatagtgttgatgtctacctacactcggacacagcataggaagaaatgccaagggccagtgagctttgcagaatcctgtgagtcacaggcactcagaccagggagtcaactcggggagtcaaattaggaaaggcttcgaaggatgggcaggacgtaagaat

SEQ ID NO: 146562 - DNA, 554 bp, Homo sapiens
catgggctctgaattaggaggatctggtggacctttccttgtgcctttaccccagaaagttaaagggagggatgagatcaccagttccaccttggtttttcccattcttgggtcttgagttaatctccctgctcctctgagcactctttctgcctgagggcttggaggtaagagacagccccagtaaacactggttgagccagcatccaccacgtgccaggcactgtgctctgtgcccaggagggtaggacatgggagggaagagatctctgcaagaagctcagccttcaggtgtcagatggacctggaatggaattcttggctcagcttctcccaagtccttagactgggcaagttaggtgaaccctgagcctcagtttctcaatctttaacattctctactccatacagtggttgtgaagattgggtgagctaatacctagagagtgttggtagacatcaacactatcagtggactctggatgcttggactagatgaccatcagggtcctcttcgtcaccagaaattggacgatcttatttcctgtgcagag

SEQ ID NO: 146563 - DNA, 367 bp, Homo sapiens
gtcttatatctgtgtatttttggattagaacatatatcaaatggcatcccaaatttctctgggaaacttattgaaaattaaagtgtttgagattaaacctcaacctttcccccaatttttcatctctgatattgctaatattatctgctgccaagattaccatctactgatctatgctcttctctttacttaaaacaaacagaacaatgttggggtgcttttatatcatttaaaatttgtatgctattatctctatatcctttggcatgtttagtcataattataatgctgctgatgataaataagaatacttgccattttaaagtacttcatagattacaaaatgtttttatacattatttttggt

SEQ ID NO: 146564 - DNA, 285 bp, Homo sapiens
attgtccatcctggctcctagagccatctcttgagttgctgatcctcatctacccttggatttataataggccttaaactttaaatgtgcaaacaggactcctagttcctatctcctatcctcaaatctacttctcttttaacctttaaaattcctccttctatcctcctgttctctcctactctcactattttgtagacacattggcctttctattccttgtctatgccttcctagtctcctcttctcccttacctggttctttttgacactcagatctcagtt

SEQ ID NO: 146565 - DNA, 401 bp, Homo sapiens
cagcacacgtagaaaatgacagaattgtaactaaggcagatttatgagttcagctaaaaggggtggattcctgagtttttcagaaagaaatgggatatggcaaagggaatttgtgacccagggtacaggtgtaagaacctatggatagaacattactgaacttgtggaaatccaaaacacaattttagcttctctcttcattgagtccattcttttattgtttaccaaggaaccaaatgaattgccatcttccttgtttcattctctcaaggaaaggaataaagcagggaaattagcagcttcttcgcttccttgttttttgtttgaatttgtgggcagacatggaggaggtgagaggaaataagaaaggagggaggaatctggtgatttcccaacgtgga

SEQ ID NO: 146566 - DNA, 399 bp, Homo sapiens
gttgcttccttcccatgatgcctggtaccattcatgccaggggcgtagagaacaaacacttcccatttcagaagaccccaatgtccacctgaggtcccctctgcccaagcctttgctgacctcaggtcctgattgctgttgttggcctgagagtcaatggaggatggggtcataataacatgatttcttcagcactgaactatgggcttttttttttttttttccttttttgagacagagtcttgctctgtcacccaggctggagtatagtagcacgatctcagctcactgcaacctccacctcccaggttcaagtgattctcctgccttagcctccctagtggctgggattacagacacctgccaccccgcctgcctaatttttgtatttttagtaga

SEQ ID NO: 146567 - DNA, 511 bp, Homo sapiens
agactaattatacaccagccacactatgcataattcagctcctcaaatagacctaagttgattcccaccctaaagtctttgaacttgctgttccctatgctagagtgctcttcccctaattatggaatagctcagctctcaatttacatgttctcacctcaaaaaggcacttccttaacacccaatatcactacaagaagcaggtgccttgtctttttaccatcctataaccaacatctagaactactgtgcctgggctccattacaggcactcaatgaacaaataaatccccacagtagcctataatcgtaatttgccaagtgacacaacagcaacattagaaataaatctttctcaaggacacacagctggtaaatggtgagtctatttccttgattcaaaaggatcttccatgatttaagggacacactagtgatcacaaattacagctgtattatacatgtatgaagtagtaaacagtttggtaggaaatgaaacataagacacatt

SEQ ID NO: 146568 - DNA, 398 bp, Homo sapiens
cgagctcggtaccgaataagagaagaagaaggcagtgtttcctctataaacctcacactcctgagatactgagctaccaaaagcctccaaggtgctgcaccagttcacacttctgtgctcgacattaatatggctttacctgtagtttcagacactccatcatctctgcacacttgataagcttgtacttatccttcaagacttagctcaagtgtcctccagtctttgaagctcactgatcacatctcttttcctctttctatgatagcttactactcttattcttgtctccctattttgaatttatatgatgatatgccttacctccctgcacctcaaaatgagctccttgaagtcaggaaccacattttattcatttatatatcctcagtgcctag

SEQ ID NO: 146569 - DNA, 487 bp, Homo sapiens
ggctggagcccagaactggatatggtcatatctgagaaatcagacactcaagagtaggagtcacctctctgggtctgagtcagcaggcacctcccgcctctgacaggcctaaccacttatcatgagccaggcatgcactcagggtagcctaaatgctaagtactgccagcaatgctcagactcttagccagccgtggaggtcttctctggggccacccaactatcctttcagacctcattctgatatctctgcctgaaaaagcacgcggggcagcaatagtccccaatcactgtcccttttaaggtgtaaggaggacagggcaggggagtgggctgtcctagtccctttcaggggctatactccaagccacaagtctggtttctattacaattttccaaattgatatgtgatcctggtgacaacagtcactctctgcactggagtgtgttagcaccatctgtaaaatgggccacttgcctttctttt

SEQ ID NO: 146570 - DNA, 121 bp, Homo sapiens
tcaccccattgcaataactaatttttctttagtttacaaactagagattgcagagggtaataccaatactaatgtaaacagaataactctttttttaatgtggcgtgtttctgggtatgaa

SEQ ID NO: 146571 - DNA, 248 bp, Homo sapiens
aactgcacaccccacttatgcataatcatcagatataaagagggtacattcctgtaatttattgttgctctagtgatcttaaagaattaagtccacattcataaagtccaaacttgtctccaaggatttgctttgactttgggagtatctggatcattaagtaatttccggaggtcagagtaaaagctttttatctctaaatattacttccctggaaaattagatgtagcagaagtcagtaacggagt

SEQ ID NO: 146572 - DNA, 226 bp, Homo sapiens
ttagctattcaaatagctcatgtctgtttctctaggaatattcaatttaggctattgttttaggtggcttcaactgtctagataattcatgtttttatgcaggcagcttataggtattcatttccacaaaagtttttactggtctcttcatattttacagttgctttagtcttagtcaataactgtggtctatatagcagcttattatgggttattgtagtaactc

SEQ ID NO: 146573 - DNA, 481 bp, Homo sapiens
gtgtggagacgcctgcacaatttcagcccaagcttctagagagtggtgatgacttgcatatgagggcagcaatgcaagtcggtgtgctccccattctgtgggacatgacctggttgcttcacagctccgagatgacacagacttgcttaaaggaagtgactattgtgacttgggcatcacttgactgatggtaatcagttgtctaaagaagtgcacagattacatgtccgtgtgctcattgggtctatctggccgcgttgaacaccaccaggctttgtattcagaaacaggagggaggtcctgcactttcccaggaggggtggccctttcagatgcaatcgagattgttaggctctgggagagtagttgcctggttgtggcagttggtaaatttctattcaaacagttgccatgcaccagttgttcacaacaagggtacgtaatctgtctggcattacttctacttttgtacaaaggatca

SEQ ID NO: 146574 - DNA, 456 bp, Homo sapiens
gctgtcccctgcacaggagcagaagggcatggcctgagggtcagggtgcctcagctggcttcctgcactgccgcacaccttgtcctgtgccccccgccccccgcgtgctaggacctcaccgtcctaacatgcccagaactctggctactgctggagctgggcctccttcctggagagcctatcccctgggtcacctgatgaatgtttcaccctgttccagaagctttccaaatctctcgccagaatgcctctccagcccttggctcctgttgcacaatctgcatccttctgtgcccacgcctggtgcaggcctcttctcaggctctgggaggctggcctctgtgaacgctgggctgagccagcttctgacccaggaggggcccagggctgcaacattctcaccctgctccaggtttgagaaggtatttccatgggaagcttgtgtcaaatgcgtac

SEQ ID NO: 146575 - DNA, 308 bp, Homo sapiens
ggtcagttgtggggaatgggcagtggagaggatcttcttgggctctgagttactctagtcccctgctccatcccagggatcagcatctttcagaacttcagagtggagagactctggtctctgaatgtccactactacgttctcacaaagtggttgaccaacatatgcttgaatgcctcccacctctcattgaggcccattctacctttggtagaataattagctttaattattagaaagtccttcctcataaaggatctacatccactctctggtctttggtctttgctctcaagatatgcagaatc

SEQ ID NO: 146576 - DNA, 431 bp, Homo sapiens
cagtacggaaggttgagcttgacagcgtgccatgcacacggtgcttactcctgaagcgtgcctgcctggccccattgctctttcctgcatccaatccctgaccgctgagaacacagaggagccactgagctccttcggtaggtgctagggaatggttcagaactggaccattttactcttaaatgcctcttaggaagcatttttataactgcagatagacttggatatataaagcattattaaaagggaacttgaccttcagtgagattgcagcggtgctgaagctaatacaaaccagagcacagcgatacccttgggccgaggtcaggaacgttccttcttttgacagttactgatttgcccaactgtaatttactcacttcaagtcttttccatcttgagtatatcattaaaccatttccgaagctcag

SEQ ID NO: 146577 - DNA, 333 bp, Homo sapiens
ctttcccaggagagtagcaaatacttatatatggaataccatagtccagatgacaataggatgaatagaaatcgccttttacatattaacctgggtatccattctcctagtagctatcacccaggagatggagcccaacttaatggtggtcgaacactggtacatagctcaagtgatggacatattgatcctcagcatgcagcaggtaaacagctgatatgtttagttcaagaaccacactcagctccagctgttgttgctgctactcccaactacaatccattttttatgaacgaacagaacagaagtgcagctactcctccttcacaacca

SEQ ID NO: 146578 - DNA, 232 bp, Homo sapiens
agttcacctacaggctgtctaattcctttaacctgggctggactgaagggctgagaagaacattctcattagggtatgaaatggatcatttccagtggccagatggttccccataaatacattaatgactttataggcatgtctgcttggaaaaggaacaatttaactaccacaacgtaggaagtgctccttttggattctgggtaaactaaatcaaagaccaagaaattac

SEQ ID NO: 146579 - DNA, 390 bp, Homo sapiens
gtgtatacaatcaatccctcctttgagctcccacgtgtgacttgtactcattttgtacaagctttatacaacagtggctttgtaaatgaatcttaagattgtagggcaaggccaggcacgatggcttactcctgtaatcctagcaccttggtaggctgaagcaggaggattgcttgaagccaggagttcgagaccagcctcagtaacatgatgaaactccatttctactaaaaaatacaaaaattagccaggtgtggttgcatacacctgtggtcccagctactctggaggctgaggtgagaggatcactttagcctgagagacggaggttgcagtgaactgagatcacagcactgcactgcagcctgggtgacagtgagaccctgtatc

SEQ ID NO: 146580 - DNA, 234 bp, Homo sapiens
cgagatcaggaaagcgtctgttgggacagcggtggccgcgtggtgcctgcgtggtgctctaggcagctgcctagcctctgaccctctaagtttgctgaggcctggtcccaggccccaaggatatgggcactcagaaccctcttcacaagtctggcctgtcctgtctcaggacaactttgcccagctggggactcttggctctgtaaccaccaccttgaccctttgcactctgaa

SEQ ID NO: 146581 - DNA, 99 bp, Homo sapiens
catggttgtgcaagtctgtgagtcagtgtgtgacatttatttccattcaggttatgaggatgaaagaggagaatatgtagatgggcttaggccaggcga

SEQ ID NO: 146582 - DNA, 196 bp, Homo sapiens
gatcctcccgcctcagcctcccaaagtgctgggattatagatgtgagacactgtgctcagggtaatatgtttagcctttatgaagtcttggaaactagattatggtggatatttggctttgccattagaagtagtttaggtatatcataaattttgtaatagctttatattaggaaaggatgtatggtggattaaa

SEQ ID NO: 146583 - DNA, 755 bp, Homo sapiens
ccagagatactaagaaaaatgttatatagcttgaattaataatagcttgaagtctacttaattttgtattcatttcctggtcataatatgagatctctgagtaaatgtccgagtttggaaagaatgaatagaaaagtcctcattagttaataaataatactaggcggctcacacacaaggtttgccatggggactagtgaaatatgtgaaagcatgtagtcctcagagactaattccacaataacaacatcccgcttccagactctgagttgagtgcccagatttagacaagctcgacagtgctctaatagaaatgaaatcatttgattggcgtcattgaaaagaatagtggtttctcctctcttccattaagtttaaagagaacaggaaaaattccctattttcatattcagcttcttccttcattcatttagttctataaatttgcatcagcatatttttctataatactatcaacccatgttaaagtaattgaagaattggggcaatgttttggctgaaacaggtaaatatgaagaagtgatttggttcataatcttacttccaattaagttctctccaaaagagggcagaataatcactgtggccaaaagcaacttagttaagaatgcattatattatttaaaaaaccgttaagtcctttccttgtatacagaaagacttatttagtaataatatgctgggaggagtctacattgacagtgtctaagtctcattttcattcagtcataaat

SEQ ID NO: 146584 - DNA, 576 bp, Homo sapiens
ctccacacttcgatcgcggagaaagccctgcaataattaacaacattttcgtttccaaaaccttatttaagtgactgtcataaaaccgtatgaaccactataaatgtgttcctgggctttctcccgttcccttaacagatttaacagatttcatttgtgctctttcaattgtatcatgctgcttagattaatgactcattttagcaatttatattaaaattttgttttaggcattaattgtggcaactatatttccatgattcataggtcagcatggtcgttgcagctcatgggtctacctgtggttacctaggggctgcccttgaatgtgtgagggcccacgcctcacttcatcctttatgaaacaattcacttgttcaccttagccagtttgtaagaatttggccaaatatggtgccaagataatagtaaaaaaaatcagaaagtttcaaaattccattgttaaagatggtcacactggtgactacactccttgatttgccttggttccaagaagggctaaaagggagggattatttttcgaggaatactatttccaaccattcggttctccat

SEQ ID NO: 146585 - DNA, 421 bp, Homo sapiens
aaccaacttgtacttggggagatgtctgagggacagcccaggcaggcagctcagagtggtagaaaaccactacagggggtattaaaaatgtacagaaacacttcagtgcatctctgaagcagcttcagaattcagcaaaaatcatgtgaaggaaactgcccagatctcaggtctccagctttgtcgctctagaccaccccaggtgactgctcctgtctttgctggtttgtcttttctcctgcagacttctgtatgaatcaagccccagccctcttgtagtttctccattaactgaattatttgtctttttaaaatattgatttatacacaatagcaaagaagtaaaaacaacctaagtgtttattcatggataaatgaataaatgtgatacagtggattattactcagacatctccagtaa

SEQ ID NO: 146586 - DNA, 245 bp, Homo sapiens
cctgattccgtaaggaaaatgtctgcagagaataataaatatgagtaaggctatgtagctaattataggttacattctctctgactcgtctcagcaaacttacaaagaccaataagaacttgaggagtattattccttgtctgtctttgtccttccccttacaattctactttgactctgttactttcatatacagttgacccttgaacaacatgggcttgaactgcgtgggtccacttataggt

SEQ ID NO: 146587 - DNA, 496 bp, Homo sapiens
ccttacccctttctgtaactcacttggcaagctctctgctgtctggcctgtgcttgctgtgctggggccacagataagaatctgacacggcctgagaagcaaggacacaaggcattacaaaaaagtgggaagatgccgtgggaatacaaaagtgggagcattatgggggcagggggcagtgctggccatgacattggagttcggctctgaaggatcaacaggggtcctcaggcagataaagaaggacatttcaggcagaaggagcaggctgtgtgagggctggagcaggaaggaatatagcaagtggagaagctccgaggtgcccaacatgagaacatggggcgaaggcttgggagcacctggagttggggccaggtcatggagggctttgactgtcaggccaaagggcttggcctttgtctggcaaacagaggagggtcattcagaagactgaaggggtctgagcagggcaaggaacagatgagtgaggaaggat

SEQ ID NO: 146588 - DNA, 338 bp, Homo sapiens
tttttgcggttttacaaaatatctgccaacaatgttggcctcccagactttcaatcattaaaaaaaatgatgtgggcttggcaaggttactgcccttttaatgaaaccattgcagtgatggccaaacatagcctgggtttttcagtccttgaatacggaggtttgtgtgtgaactcctaagagaactctttctctggtcaccatcttcagcagtacttcactccatctctcttttgggaaccagaaggaaccaaaggcctgtaggcttcaccaacctctcagagagtttccaggatctccttgaactttctagacctgtgctgtctaacatggtagcc

SEQ ID NO: 146589 - DNA, 330 bp, Homo sapiens
aaactcaaacatattgcaagataattccactcctgtcttaattacctggagtcaacaaaagcattctgttatagacattcactataaaaaactgacagacataaactcccagattcatttaaagtaatttcatagtataagaagctttataggaatcataacccactaaaacacactgtatctcacctagcatggggacattcaaaagcccgaggacctcaatcaaaagccttttaaagatttcaaagctctagccaccaacatgtcattctcaggaacactaggagaaacccagtagttaaagtggatttttcaaacaatggacatagt

SEQ ID NO: 146590 - DNA, 354 bp, Homo sapiens
agagaggatgacagctctcaggaagaagagaccacagaacacctacaatggggcggtgcaaaggatgagaatctggaggaggaggatgagaagaaacaggatgacctgcaattgctcttctgcttgtatttactagcttggttagcgggtacccgtatcttctcagtcacttacatgatgaatctgggcgttaccctagattcattcatctgcctttcccgtgtcatccagctggtctcctggcattatctatcctgtccttattcatttctgaacacctcccttccttgcctcattgcctgtcttactccagtccccatcatcttcctgatcaaccacagagcaacagactcc

SEQ ID NO: 146591 - DNA, 317 bp, Homo sapiens
tgtaagttggcaaagaccaaaatagtgccaacatatgaagcactgaaaaagaaaaagttaaaatatcttagcctcaacactcgaaatatagcaagcccacatatttgaagaccaaacacatcaagactcatctttcccttaaaagaattttcagctgggcacagtggctcgtgcctgtaatcccagcactttgggaggctgaggcgggtggattactttagaccaggagtttgggaccagcctggccaaaatgtgaaacccccgtctctactaaaaatgtcgacgcggccgcgaatttagtagtagtaggcggccgc

SEQ ID NO: 146592 - DNA, 253 bp, Homo sapiens
tttaaaatattaggactagtatccttcatgtaaaggcatttttgagctttttaaaaatattttttattctcgatgggcaaccccaacaccagacattttgactaaacatcatataagtgtttcaggaacagacaaaatacattagctgatacacatcgcgtgtgttagaaatggcatactccgaagtgcattgagcactggaaagttcatgctgcttagaggcgtgtcgttgtgtcagtaccggggaattttt

SEQ ID NO: 146593 - DNA, 257 bp, Homo sapiens
aaagaaataaaatcaactgttaagcttcttttttctaactaccaaagtgggagatccagaccttgaaaagaataattttttcctgtggcaagattttacaaaaccagagtggaatctcataagaacaaagtgacaggttaaaataaaaagagattacttttttaaaaaaattagctcaatcagcatttttaaaataaaggtactgtgtgatatttgacttctaattaattttagctatctttatgtgtgaaagaaga

SEQ ID NO: 146594 - DNA, 382 bp, Homo sapiens
attagggtgggccctaacccaaggactgctgtccttataagaggaaactcggacacacacagagacatgagagttgtgagtgcacagaggaaagaccatgtgaggaggcggagaaggcggccaactgcaagccagcgagacagggcttaggaggacccgaacctgcggacaccctgaacttggccctccagtctgcagaactctgggaaaagaaacgtctgttgctgaaggtgcccggtctgtggtgttttgttatagcagccctggcaaatgaatacatcatgtttctgatgaaagtcaatcaatttcatggaaacagtgaattgagacaggcagctggcgtcaccctggctggtccccagggcaggctgggctgagccca

SEQ ID NO: 146595 - DNA, 488 bp, Homo sapiens
aggacggagggtgtcctggggctgctgacagtacagagaagaggaggtatgcattctggcctttctgacctccacccggtgcctgccccaaccacgctgctgcaggcttgggagccagggctttgcggggcctcagggaaggaagaagccagttcccgggccaggaacaggaaggcagggggagcgcagcagaggccaggatgacagtgcttcctgctgcgggaagggaaggacagcagagacagacaacagccaggcaggaaggatgcgccttcttcagggctgcaggtgggggctgggcagtcacagagcctctggacgtggcaggctgcaggcctgaatctgcccagggagcccatcctataaaacaggaagcatcttttccagtggaacaacagggtctgacaagagtctctgaggtttcagaggtctgttgagccatccatccatctactttccatccatccaaccatctaaccatccaccca

SEQ ID NO: 146596 - DNA, 450 bp, Homo sapiens
cttccaaagtgctgggattataggcacaagccactgggccaggcctcaaatgttctttctgcatcatttgatatgaccatatgatttttcttctttagtctgttaagtatgatggattacactgactaattttcaaatattgaaccagctttctatccctgaaataaatctcacttggtcatggcatataattcttttcatatatattactgagttctatgtgctgatattttcttgagtaattttgtgtctatattcatgaaagatattggcctgtagttttcttttttgttgttgtctttggttttagtatcaaggtaatacaagctcttcataaaatgaattgggaagtgcttctcctattctgttttctggaaaagattgtgtataattggtattaattattctgtaaacatttgatagaattcctgagtgaaactatctggttct

SEQ ID NO: 146597 - DNA, 195 bp, Homo sapiens
gcttgtcagagagtaggcatccaaaaatgttagttatctcccctttgctttattcacatcacctttaagaagtccaagtccatgggcctactctttaagttagtcctagatattggtgtaagtttcaggggtattgcccctaagcccatcactgatgctctgacatgttctccaatcttctgggaattcctggtg

SEQ ID NO: 146598 - DNA, 268 bp, Homo sapiens
tgctcctgaagcgtggtaaccctgaacatatgttcatatgacccacattgaacctaagacccacaattaagcttagcagctggaagaaaaggtctttaatatgcaacagagacatctgcctgcattctaaataattacatttccacccatccccccatcaacattctaatagcttagatgcttagatttcttaagaaaacaagttctagaaagtcattttaatatagaagactaactgaagaggtttggggagcagcagggaaagaca

SEQ ID NO: 146599 - DNA, 290 bp, Homo sapiens
aaaatcaaattggctgcgacctctacagaacccaggaatttggaattcactgaatccagggttgctgcgctggaggcaaagctgggctgctattgggttggctggccctaagggaaaactcttctgacttttgaactcagcaggtacatttctattcttcctttcttcttcttaagcaacacttttcccgagaaaaacaaacaaaactttgctaaccaaaagctttgtgttgaaactgccaggaggagatgataagccaagcattgccttggctcctcaggacttttgca

SEQ ID NO: 146600 - DNA, 438 bp, Homo sapiens
tcccacccagcagggacaaaatcagaccaccgccatcccatccagcagggacaagatcagaccaccaccatctcacccaagagggaccactgccatcccacccagcagggatgagatcggaccattgccatctcacccaactttctgcagggagcgaagggtcagatccagaaacccgggaaggggaagtggagaggtcctagagcacgccctatttcatcttatctcattgtctgaggcacactagagcaactgatgcatatcctccccaaggccgggctctccaaaacgaaaagaaaaaaaacactgatttctagagggccaaaaaagagacctattttatttgataatataggaaagattcttgcagccagcctactcccattaagtcagagaaactcaccagggctgaaagctaaatgctgagccaacaaaact

SEQ ID NO: 146601 - DNA, 352 bp, Homo sapiens
ctctgggatcagtttcactgatccttcaaccagcttatgtgccctgttagcccagatacccctccagagtgcttcgcactgggctgcaggtcactgtggccccacagtcttcgcctgatatcaggcgaagactgtggggttgctatgctctgtgtccatgacctgaggattattgtgaccctcaggccggggttcagaggaggccgaagagttgttggggttctcctggcccccaattatcaccattacaggagggtcagtagaacatgcgttctggtgggcgaggaattcagttgggtcagtgaattgtgcgcagcactttgccacagtcttcgcctgatgggtaccgagc

SEQ ID NO: 146602 - DNA, 434 bp, Homo sapiens
aagactttttcagccacagtcttctctaccagctgatctgtgtggtgttagacatttcagtacttactgagagggagttttctgtgccccaccttcagctgggttaatccccaaagaaccagtgtttcctagaaagagcagttcattccataccttgctcttgtagtcctaatggccatgtcgacatacccagctgtgacaagatgaaggaccacgatttgggactcttcagggacagacttggccacctggtgatgtgccaccttcagcagctctgtcttcacacgtccagcctgcgcctgcttcatgtagtacacaagactgctctggtacaccacgaccatgaccttcacatgaggccagtctccccgcccctcacctgggccatagaaaaaggtaagagcctgagaagcagctcctggcctctcctccca

SEQ ID NO: 146603 - DNA, 606 bp, Homo sapiens
cttgctgcccatcttcccatttatttcttcactttaagcatttcagtttgttcaatgattaaacattcctggattcatctgtatgtaatggcttctgccatgtcctcttcacctatcttttttttttttcaaagatggagtcttactctctcacttaggctagagtgcagttccgcaatcataaagcccactgcagcttcaaactcctgcgttcaagtgaatctcccacctagtatgtgtgattataggcatgagccactgtgcctggcatttctgtaaggcctaaataatgtctcatcaatcctttcctactccccagctccggtgatggtcctcttctctcaattcctgtagcacataccatcattgacacttagcatacgctacttttcacacattactgtactccttttgtaaaaaattaggccctcttcctcagttcagtcgaaaaagctgattctaaacaatgacaatataacatatgaagagattagtaaaagtctttagcagctataaagggctcaaataactcagcctagttatttctttttatgcatacatcttgtctcacatctagactgtagacacttcatcttataccaactt

SEQ ID NO: 146604 - DNA, 230 bp, Homo sapiens
ctctcttcttcatcctgggtaatatcctccaatctgcttttcttctaattcactagttctctcttcagctgtactagtttattgtttaatccatctattgattgttttatttctaatatttttatttcattctttttcaaattttcctattcttgtcttccatttgattctattatgtctagttcttggagaacaacatcttaccattagtgtttttgctgattctctct

SEQ ID NO: 146605 - DNA, 501 bp, Homo sapiens
ccacccactgtgactatagatttgtctaattctcttttccattctatcagattttaatttatgtgttttgaagctcttttattaggtatgtaagagttaaaattcttatttcctcatgatgagttaatgagattgccaacatgaaatgtcctccattattcctggtaatatttgttgatcttgaattatatttcatggaactaatatagccccctccagcattctttggattaatgttggcatataattaggtattccttttttatccaatctgataatatctaccttttgtgatgtttagaccattttcagaaatataaataaggttggattaaaatcttacctgcttcatagttgatctcatgaactttgttctttccttttcttactatttttggagtcattaagttctgtctttttaaaattattcctggccgggcgtggtggctcacgcctgtaatcccagcactttgagaggccgaggggggcagatcacgaggt

SEQ ID NO: 146606 - DNA, 768 bp, Homo sapiens
gtctcgctctgttgcccaggctggagtgcagtggcgcgatctcggctcactgcaagctctgcctcccaggttcacaccattctcctgcctcagcctgccgagtagctgggactacaggcacctgccaccacactcggcaaattttttgtatttttagtagaaacggggtttcaccatgttagccaggatggtcttatctcctgacctcgtgatccgcctgcctcggcctcccaaagtgctgggattacaggcgtgagccaccacgcctggccagttcccccattttcttcagctacatgattttctttgtagaagaaagagccagtggttgagcaaggaaggatgccgtgggcagctcagggggagagatgacctgttagttcctccctttctctgcattgcccaagagcaacagccaaatagcggttcggcccttattttgtactgggcaccgtgtgaaacagcctgcctgcggatttcactcagtcttcaccatacctcgcagggtagagactgagactcagagatgtggcagcttgcccagggccatgcagcctgttcggtatctctgattctaaaacctgagcttttaagttttagctcactacttctccaaatgtcatgagacctttgaccttgaacctggggaggtggaaagccagcctgatggaggctgactcactggctaagacctgtgagttgtgcagggctggctgttcaagtctttgcgcttcaggttctggagatgacaaaacagaagggctcatt

SEQ ID NO: 146607 - DNA, 436 bp, Homo sapiens
attcattcatattcagacacaaatttttattccataatatcatcttgacagaaagtatcagatttcatttgtaataagcggttgattaaaaaataataaattgtaatacacaagtgcaaaccagttaagaataaagaataaaaaagtaacttctggccgggcgcggtggctcacgcctgtaatcccagcactttgggaggccgaggcgggcggatcacgaggtcaggagatccagaccatcctggagaacacggtgaaacccggtctctactgaaaatacaaaaaaattaggcgggcgtggtggcaggcgcgtgtagtcccagctactcgggaggctgaggcaggagaatggcgtgaacccgggaggcggagcttgcagtgagccgagatcgcaccactgcactccagcctgggtgacagagcgagactctgtctc

SEQ ID NO: 146608 - DNA, 331 bp, Homo sapiens
cattcaccagcccacccttacttcttgctctgtctcccttgctgctgttgccagggaagaggctgtactggtcagccatggagcctgatatctgaggatgaggcttgggcatctgactgagcctctgcctgggtgaggggtctgttttaaacactgaatatacctcatgagacccactcacagggccctgctcagccctggcactcataaaaatatgaaagagtcaagaatgctttaagaacttttttcttccctgagatggggtctcactctcacccaggctggagtgccacctggtacgatcttggctgactgcaacctccgcctccca

SEQ ID NO: 146609 - DNA, 422 bp, Homo sapiens
taccaatttaccctactcagtatgattaaatttttttaaatggtgatgacatcaactctgaaaggcatatggagcaattaaaacacttaaactgctagtaggctgtaaattggtaaaaaatgtttttaaaagcaatttagaaatacctgttgtggttgaagacaaaagtaaccaataccccaatatttccacctgttgcagcattatatgtaatagggaaaaattgaaagtaatatacccatttggaatacatatagtcactatactgaagtgagaataaattaaccagagctgtacaaataaaatagtaaacctatgttcttgtactttgttgcctttcttttgatgtttaacaataggcaaatcaatgctgtatgttgtttaaataattgtgaatatgaaataaaaactataccaaaaat

SEQ ID NO: 146610 - DNA, 352 bp, Homo sapiens
aacaaagatacaaatgagtactttacagaagaagaaacatgattgtctaataaatgtactaaaaatgctcagtaaatatacttaatatgctcattagtaatcaagaaaatgaaaatgagaaccacaatgagacaataccatttcaaactcgatgaaatgaaaaatacaaataattctaacaatacccttatcatcctttcatgcaggaatttgggtcttgacataaaataaagcacaaagtccagatttgctgcttatcggcagtgtaatcttcgacaagtcatttaaactctagcttcagtttgctcacctaccaaatgcaaaacataatttctctgcagagttatgagaa

SEQ ID NO: 146611 - DNA, 294 bp, Homo sapiens
gttgttatgaggcatcacatgatgagatactgctggggagggaagaagtgaggagattcctaggaatcttatgagaatttccagagacaacaagttttgagcttttttttaatttagaaaatttaccttatttttaaaagaatatgtaacatatcccatgctataaaattctagacatagtagatttaaaacagcataatggaaaatataaatatctattttcttttcctatttatgtattctgtgccagtaggaatgtagccaaaaagagagaaaaggggtctctgcagacat

SEQ ID NO: 146612 - DNA, 258 bp, Homo sapiens
cattcagcttcagtgtgctaccttttctggcatctttctgggacaaattcgtatttgttctatgctggtgagcaagggctctttatacagagctgctgagtgtagcgacctaaatttttttgctcaaacaaggctgttttaataagaaataaattatataaagtcacgtgatccatttagtaaaatattgggctgtgaaccaggagactggtatttagtcacactgattaggtcttacccaataacctttgatcagtt

SEQ ID NO: 146613 - DNA, 199 bp, Homo sapiens
gacgagaggacacggcacatgggacacagcgcatggagggggcagcagagggctggacgagaggacacggcacgctggacgcagcacgtggagggggcagcagagggctggacaagaggacacagcacagaggacgcagcgcgtggagggggcagcagagggctggacgaggggacgtggcatgccggacgcagcacgt

SEQ ID NO: 146614 - DNA, 208 bp, Homo sapiens
catgactggagccaccaagagctggaagaggcgggaaagatcctcccctagagcttccagggggagctcagcccagccctcaccttgatctcagattccttgtttccagtactggaaaagaataaacacctgttactttaagccaccccaattatggttatttgctacagcatccataggaatttaaaacctaagaggtatgaattct

SEQ ID NO: 146615 - DNA, 778 bp, Homo sapiens
gtgcatgtttttgtttgtttgtttgttttgagacagagtctcgccctgttgcctaggctggagtgcagtggcatgatctcggctcactgcaacctctgcctcccaggttcaagcaattcccgtgcctcagcctcccaagcagctgtgattacaggcacatgccaccatgcctggctaatttttgtatttttttagtagagaccaggtttcgctatgttgaccaggctggtcttgaactcctgacctcaagtgatcgacctgccttggtctctcaaagtgctgggattacaggcgtgagccaccgtgcccggccacatgttttatgtatataaaacatatgtacaaaaatacaaatatgtattttcccctaaccattagaccaccagggagcatgttagatattttgaatacctggtaaaatatatttatttggatcacacctaatcaagtttgaaaaatgctggtacaggggaaagagctctgggtccagacaaaggatagacacatggattctgtccagggctgtgcctctgtgaatgctcacctgctgtgggacagtgcccaactccccagggccctagtttcttcttctaaaaaatgggaatgctcatttctgccctgcctacttcttagctgtatcataaggagagaatgtctctatctcgtgttagatactggggaggcagcagagtatgacgggatggatgtgggtttgggaacctgaaaggcctggattcaattctagattttgtccctactagctgtgtgagtttgggca

SEQ ID NO: 146616 - DNA, 660 bp, Homo sapiens
aactcctgacctcaggtgatccacccgccacagcctcccaaagtgctgggattactttagtgactagtcttaccttagtctgaatgctggatagagtgttagaactagacttagagtaattggcttttttttaattgagtaacaagagactggatacaagatcatccattagggagaaaatgttagaacttccatctctattcagtatttcctatcttcccttcacatttctattaatattttcatttttgcaattaaatgtttaacagctgaaacagctaaaaatcttcatgtagtgtattattttagtagtatgtgtatatgccttataaagaaatacccatttttggggggggtgcatattcaaactcttttgttgataagggtatgcaattgaaagggtttgatactcaaagtgtggtccagcagcattggcattcaccttgggaactcattaaagattcagtatctcagaccccacctattgaatcaaaacctgcatttctacaatattcccaggggaattcaatgcagccaaaagcttaaggaggactggcctggaggacagaacagtagctgtcttgtaccatggttctaccatctactgctctgtgacctaagagaggctcttttgagtcttagagtcatctgtaaaatctg

SEQ ID NO: 146617 - DNA, 372 bp, Homo sapiens
ccccattcaaaccacgccaggcctgcctgtttacacgatgagcgcaccacgtccttccctttacagcacacacagagtggcaacctgacacgcactagtttgattgtttccttcctttctgccctccctactgctctgcatctgaattttctgctgctcaccattatatcctagagaccaagacctggtgtgtaggaggtacccaacagcgctctgtgacccaatgaatgcacaaggatctccgtgtaagttcatgctattattggctgctgacaatgctggcacaaacttagcttgcaataagagaaccctagcgacagagttaatacagttgatcattgtaaacttaattcaggtgttttaaaaccaggt

SEQ ID NO: 146618 - DNA, 202 bp, Homo sapiens
agccggtccactagatcacggttggctcctcatcgctcaggtctcagcttaaatgtcacctcctccaggaggcccttcctgactgcctcccccacttattctataacaacgatgttaccccacataacacgactaagtgttcaactaatgtgccaggacctcttccgagcccaatacatacgttatctaacctagtcctgaa

SEQ ID NO: 146619 - DNA, 885 bp, Homo sapiens
  misc_feature (506)..(506): n is a, c, g, or t
  misc_feature (533)..(533): n is a, c, g, or t
gcagacattttgctgccctaatgttttctataagcgtaagctctaaaatacttccgacttgaattaagcagtttggtgtttgtttgctcctttgcttacttatgtctaagtatgatttggatagatcccagtttaactctgcccctttttaacacttaaaattgccgagtccttgatttataatatcttctccgaagttaaggcccagaagatccagatgttcagggtgtgcaaatcatccaaaacttgggtttgatgtataaagggaggcaatataataagtctttttccccccgattctaaaaatcccttcttttactcaagtattgtagtgaaatatttggcatattctccccctcttctcaggaaagataagagtcagtagggatgttttcctgaaaatcttttaatcaaggcctttgacctcttgcctcctctctcttcctgatttaccccatataatgactttttattagagacattatgttctaataccttaaagcagnaagggacctatttagacttttcctttntagaccgtaaataaactttataagcagggtgattttttttatagcctaagtgaaagaaaacttattgcctgggtttctgaaaagtgggtgtctttattacatgaaaccatgtgactagtttctgttgaaagggatacgtagcttgcttaggttgtcatcttgagaatctagtcaagtttagattttagaaaatgttttccagtgaagtttttaagggtctcaggtttatttttctttatgtattagttttaagatggggctttacatttttagtaacataatggttctcttcttaaaatatgtaggttaacttgtattacattgatcacaattcgcatagatacaaaaacac

SEQ ID NO: 146620 - DNA, 619 bp, Homo sapiens
tctgggaagggtttccaaaggagctgtctgacaagaatattgaaagatgccatcctttaaatccattttaacaaaagtaagctagataaagaagacagaacagttctatcttggagaggaagctcctgagagactggtgtcttagagagcaggggtagaaaagtgtttcaggaagacaaaaaaacaaatatgaagacacaaaggcaagaaaaagcagaggtgccctcttcaaagaactctaggaagttcaataagaccggaagatagtgtgaatgagaagagcagagtggcgtaagaatgcagagggaggttgggaccagggcatagaaggtctcacatttgctatgaggaagcagcacaattcagtggctggaagcacaggtgaggaaagaagactccccaggttcaaatcccaggtctattcttactacttagatggctataggcaagttagttaacgtcgagatgtcccagtctcctcatgtgtaaaaatgaggcttacataaattcgtatctcatttgagaatgaagtgaaataatacatataaaatgctggctgggcacagtggctcacacctgtaatcccagcactttgggaggctaaggcaggtagaccacc

SEQ ID NO: 146621 - DNA, 361 bp, Homo sapiens
agacagtggaggacagtgcttacagtttgataatgtttgcttactgagcatgaaatgaaatttaactgtggcatgtctgcatttgtaaatttattgtggttgtttagacttcttgcaaaatgaaatgtcaggcagtcattctgagactgcaaatatattaggcttcaaagggctcagataactgaggttattgagttttcaaagatttttttctactttttttctaccatatagaatatgttcattcaataagtgtagaatgagcataaaagagcaaaagcataaaaataatttctgaatggtaaaatgctaagtgtgccgttctgactattataaggatttcaaaaaatggtcattggat

SEQ ID NO: 146622 - DNA, 207 bp, Homo sapiens
aggacaactcctggggattttagatggattttgattcctctggattagagctgagctagagagagtgggttactattatggtgatctgaccatatctccaggctggtatgtttcataaattgcttttgatagaaattccagggcaagaatttaaaattttttttgagcaaaggaataactgtatagccttctgaggtgactatttgg

SEQ ID NO: 146623 - DNA, 411 bp, Homo sapiens
tctgaaagaatttggaggctaggagaagcaggagttggatggataacttaggcactaaagggaagctagtttaatattttaaagtcacccagaagataaaacaagtagttgcaagaaagacacttgagaaaaacaaaacaaaacaaaacaaaacaacactgactaggtaattattcaacagttctgacagaagtagttctgaggaaacatcagtagatggtgaaaaaacttagggcctcagagaaatgttagcactgatgtctaagagatggaattatgctcagcacataattggaatggtcactctgatggttttggcttcaaaatgagattcttcttttttttttgttttttttttggggggggatttcacctttgcgcttgtttaaaggggcccaatcggcgggaggg

SEQ ID NO: 146624 - DNA, 1562 bp, Homo sapiens
gtttatcttccaggctccctgtctttgggtcttgatcaccacagaggggaaggggagaatccagagataaaatgtgagactgaaactgttttaaagaagcatacaagaaagaagcacacactttattagggagatgttgatgagatgcttacaacccgcccgccaccccccagccccagctaggccatctggcaggtaccgcccgtgcgccaggcatcgttttcaaattgcaagaccgaaatccaatcaaccgaaataatttcttaggaagataagcttgcaacacgtgcaataatgaaaaaatttaactagcattaaaaatattcaggaatgtcgagcaattaccacctggccgcagtcacaggacagaagacggaataaatgggcacgcaccaaaggtttatattaaagtgtaagtttcagcccctcagtatatttaagggaggctgctctgcagaggaaacctctgccttctcggcgagggagtttccgagctaccttaactggggcgcaacgcagccttccgccaccagaggcagcgggcgtctgcggcctgtcaaaaactggcgcttttttcctcccctttccgtggagagactatcaactccatctgtcacaaaaattaaggctaaatctcctctccagaagcagagggagccggggctccgacgcgctcagcgtcgggctgtctgcctctccctagaggccaagtgaatttgaaatggcaaaagtcacagccggaggcccagcactaggagattcctccggctgcgggaaatcttcctgtacctgctgaagctgctgcgttcctcagaggcgcttggtctgccgtgggaagctgcacctctgcagtccccaaaaccaaaatcaaaccttaaaagagccagactgagaagccagtcaccacgtaagacatctggaccaccttcagactcgcatgctgtgaggaagcccatgcttactatgtgtagaggatacatggagaaggaaagagatgcctggccagctccctgctgtttcagccatgtgagtgaagaaggcaccagacttgtgagtggagacactaacttggatgtccagcccagctgaaccttcaggtgactccagctctagctgccatcctactgaagacacatgagagagaccccaagccagggtcaagatcagcgtgaagcaagtgaggcattttggtgcaaaatgtaaggaggcattgaccttcataattgggctccaagactccaagagtgagtgcctccttaaattttgtactttagacactacactcacctttctctagttctggtcttgcctcaagcaagaagagcagagcttagctcagtcaacccaaagaatcctgagaaataacaaaaaaatattcttttaagccactcagttttgagatggtttgttatgcaacaatagagcattagaacttttcttcctgtccaattgcttaggtgaaagatgctagtatctgcctgaattctttccttttcttcacattctacattcaattaatggctcatcataggtgtcaataaaatatttgataagttgaatga

SEQ ID NO: 146625 - DNA, 343 bp, Homo sapiens
gcttttttcctcccctttccgtggagagactatcaactccatctgtcacaaaaattaaggctaaatctcctctccagaagcagagggagccggggctccgacgcgctcagcgtcgggctgtctgcctctccctagaggccaagtgaatttgaaatggcaaaagtcacagccggaggcccagcactaggagattcctccggctgcgggaaatcttcctgtacctgctgaagctgctgcgttcctcagaggcgcttggtctgccgtgggaagctgcacctctgcagtccccaaaaccaaaatcaaaccttaaaagagccagactgaggtaaggcggaccgtcttg

SEQ ID NO: 146626 - DNA, 229 bp, Homo sapiens
tgaggcagatggaggagaaggaacaatcagttaaatagtgacacaggctccctgaactgaggatagattatcaggtcaaagcagctcgccgcatttgaggtaaaattaatgagtattagctcatagttgacactgttgaatttcaaattttaagaagaaaaaaagtctcatatccatcctgaggaaagtatgttatcaacacaagaagaaaaatcatgtaggcatctga

SEQ ID NO: 146627 - DNA, 197 bp, Homo sapiens
ttttttccaccatgaagatttagtccatatttagacaagcactagcaaaagtcccaaccattttggagataatgtcaagaatgattaaaattcatacaaggccttgcatagccttactatgaaatattaagtaggttgcagttgggactcaatggtccagaacctctcaagggctcaagttttgcgtatcaagaacc

SEQ ID NO: 146628 - DNA, 374 bp, Homo sapiens
ggttacttcacctagttggtcagctgggttaaaaaattaagtgtctaaattacaaagccatcacagttacagtgaatacagattgtagtaatctgaaaataatttcattatactttcaccccaaattctaaatacaacctccgtagaataaaaagtgtattctgacactttcccaatgacatacaatgatctttaaaagctttataatgactcatcacagtattctaatttctaggtattacctttttttcaattaaaagctaatttgaggcagtatttcacaccactatttccatatttaatagctaaaactcctgtcggctacaacctagtctggccatatcccttcatgtaagtaagcactttcatcagga

SEQ ID NO: 146629 - DNA, 121 bp, Homo sapiens
acccacatctcgcacaggaatattcctggcaaccttgttcacaacagcaacagatagaaatagccccagtgtactctactgagtgctggtcgaacacactctggtaaaacccaaccgtggg

SEQ ID NO: 146630 - DNA, 401 bp, Homo sapiens
gctctgctcctccccctccccctctccccaactgtctttgatctgtgaagcttgtctcatccttagccaagtctgctggaactttatccagagcaggaaaaggggaaatagttttcctttcttgggtggatttgtatttatataaacccttagcgagcggcagtgtgtggagacggtggtcaacatgggctactcgtacgagtgtgtcctcagagccatgaagaagaaaggagagaatattgagcaggtgagcggttggtcagccaggagggcaggctcagacctgtggagctggagtagtgtcctcccctgtcctagagcccctcagacttgtagcaccaacctcctttcctgtgggtttgtgaggacacggggcatgttttggggaaagggatggatcg

SEQ ID NO: 146631 - DNA, 354 bp, Homo sapiens
ctcgctacaacactaagtccagagatcggacagagtcaacgtttcttcctttcttactacaaaggacagacttggtcagcaaggagaaataggatcagtgttaatatctggacaccagcaagaggccagacgacttgtggcttcatacaaaatgttttcatttaaaactttacttgtaaaatgtccttactgctgaaactaaaaccattaacaggttctactgcttaagacttagaaatcttcaaagatttccctaaatcaaatcaacttaagtattaatattaacatttctcccctaatgccttgagttttactgggataacagaacaactgatgccctaagtcagaagtcag

SEQ ID NO: 146632 - DNA, 267 bp, Homo sapiens
cagcttactagatcttagagatcaacttcatcatttacagcaaaacatgccaaggttcaccaaaaatgtataggcttgtctatggtcataagacttagtgatagaaaagggatagatcccagatttctctttttttcattgatttatctatgtaactttttatgtatttcattgatttatctatttcattttttctttactttcaagaaggtaatatattctcatggcccaaaattcaaaatttatatccacaaaaactgctttacc

SEQ ID NO: 146633 - DNA, 253 bp, Homo sapiens
tccatttagccagcggttcgctcggcttttaggagggggctggcggtgaacccatccccgttacaatgcactcagggaccctgacaactaatttaatttaaaacagccttgcaataaaagctcagaacggaaaaccgccggtcttgggggttatttaacaaattgcctcacagataaatacattaaaatgattctcaaaccggagccgggcgaagttgaagtaaaattaagaaagttgaatcaaaatgtaaat

SEQ ID NO: 146634 - DNA, 267 bp, Homo sapiens
gctgctagaggatcccagcggccgcctttttgttatagtaagcagttcatttactatctgatcacactgagcttgtataggctgggttttacaatttgcttgagtgaatcagtagaaaacctcaggtatctaagacagtgtaacttgtctccaaactctgtctccaccatgggtgctgtcagggcttgctccaaggctttgttaggtcttagaataagagcaagccttcttctaggtcatgattcttactcctaaggcctattcttt

SEQ ID NO: 146635 - DNA, 494 bp, Homo sapiens
atgcccagctaattttttttgtattttttagtagagacagggtttcaccatgttggccaggctggtctcgaactcctgagctcaagcaatcctccctccactgcctctgaaagtgctgggattacaggcatgagccactgtgcctggcctagccttctttttgaaaagaactgggcagcaccacgtgagctgatttaagggaaataaaaatggtttccgtttttataattgctaacatgagattttgaggataattggtgatttgtgtgcttgaaaactgtaatggcaacattcacaaaatcgttataagtttttaaagatatgtgtatgggcatatgctttctggaaaagagggcactgataaaagtagtttgagaatcatgaagagttaagttacctcattggagcaaaatacgaggtatagttagttttctcctctcctcccaaattccactgtgccctccaaaaaaggtggagcagattacaaaggacag

SEQ ID NO: 146636 - DNA, 197 bp, Homo sapiens
tgccatcctcggcctccttattgccagcagatgagcgctcccagccctaacatgctgcggccagttcccagggcctttcttcctccctactcagggatgatctttgctgcggcctttcctcactcttgatgcctctctccatctcagaaacatatccaggaactgcagcctgacccatctggttccccaccaggccc

SEQ ID NO: 146637 - DNA, 278 bp, Homo sapiens
acgcacacacacacacacacacacacagaaatgcaaccaaatatgaaaggtcatcaactatactcagtgctactggatctctccatgaaacctgactgcccaacagttactgaagggctatggaaacttgaagcttgaagaatttttctctttcaaatgtcagagtcatattaggatttaaattttaaactggtttattttaggttaatgtagcccagtcttttagagacgggaatcatccagaaacttccatttagcagaatgtgattaagccaccc

SEQ ID NO: 146638 - DNA, 364 bp, Homo sapiens
ggcagggcatgaggggccagatgacgtggggccggcctttaggccctcctctaacttcggctttgattccaagtgcagtaggcatagggcagcaacaggaggtgtggcagcagcctttgcttctgccttctaaagggtctttggggaaggttagagacgggacaataaaccagcgactaaggataacagagccacatggaaatacgacgagcagctgtaaaacacacacgtgttgagcactttctacacctaggcccttgctgtgtgttttacaagcatcaccacattcaatcctcataaccatcctaggaggtagattatgcagaagggaaatggaaacacacagagatgaagtcactttccc

SEQ ID NO: 146639 - DNA, 457 bp, Homo sapiens
gtctcaggatacagaggtcaattgaatatagcaaattttgtcagtgttgtaaaaaatctggagaggaatgtaaacggctcatcttgtgtctggcctctaattgaatcagtcagctatggtggggttaggggacagatccgtgtatttacttgcataggacaaaaattagtcatttgtgagtgttcacatacttccacctctcccaacccaccaaagagaattgtaatttgacagtacaataatcccttcccctactcttaaaaaagttgatcttacaaggtcagtcctatgtttttatgaaaaagaattagagaatgagtagaaaggaactagtcaagaaaagcagaagatttgggttgatagacataaagtgctgggaatgagaggaagagagagagatcgtgaaattcctgggctgggaataaagactgtgtgtaggtaggacagcctttggtga

SEQ ID NO: 146640 - DNA, 309 bp, Homo sapiens
ataggtgagggggtgtcatcactggaaaccagcagcctgggctggaaaccctctgtttaaactgttaattgcacaatgccagatttgcagacgtgctcccctgctgcattttgggattggtcatgaatgacagtgtacaaggagatcacccagagattacagtgccccagagaacagcagaccaggatgtttctcccagagaactttccagaagcctcggtgatagaaacacaactactctgtcgggtgatgacatctgtgtaaactcgtggttgctgttaacactattgcatgactcctgaccatagg

SEQ ID NO: 146641 - DNA, 411 bp, Homo sapiens
ccacagtgggctgtgctacaacataccacagggtgctcagccccaagaccacacctgcgcacttcacaccacacggaaagcagagatcatgattccaaaaatgcatattcttcaccaagcagacactcagccaaaggcgaccccaagcagataccatctatgaagtcacaggtcagactgctctgagccacgggacacacactggggttatacaggcaatctgtgatgtccacattgagaaatgacatctcactgtctacacatggtgaggtcacgatcacggcttaaacaaggacaaagtacaggactttggaattgtatctatatcatggtcccttgttaaggaggaaaagaggagagaacagaaggtagaaacaagagaatgagagagctctttgtaagcagccacac

SEQ ID NO: 146642 - DNA, 393 bp, Homo sapiens
caagttggatcgcggagaaagagggagagaaaagagagaccaaagttagaagtgaggaatcactgggcattcagtggtcagaactgactcccagaatgaaaaaatcggtaagggtgtggaaagggcccaaaacacatgatttctaacttcacagcaaccactattctgagtcttctacgaacattgttgcaaaaaaggggaagaacaagatacggagaagtaacctaacagaagggttcttgtcttcctaagaaagtaacagcagaaagaaaaaatagcacattgatagcaattattaccaatctcaaaaaagggcaggaactctccctacaattgatctgacagaaaagaaaatgccctcctaacaggcctccggcaggcacacttctccaa

SEQ ID NO: 146643 - DNA, 254 bp, Homo sapiens
tgcggtcgatctagagttccccactactggcctacagtgggcactcagctgtcaaatggacaatggaggcagggatggagcgaaagagcttggaggaaacggaggctatagcctcaggaacatgacacctgaccctgggaaggggagggagtcttgccttctaaaacccacagccctctcccttcctggctctcagcctctccatctagcagagacaacccagaggttcaccagcccaaggtgaaggagtgggt

SEQ ID NO: 146644 - DNA, 487 bp, Homo sapiens
agtagagatgaggtttcaccatgttgaccaggctggtcttgaactcttgatctcaggcgatccgcccacgttggcctcccaaagtgctgggattacaggcgtgttccactgtgtccgctcagaggaatttgtttctcctactcaattttgctgtgaacctaaaagtgctctttaaaaaaaaagtctactaaaattaaaaacaaacaaacaaaactatcttgtcagtgacttctgccagaaagatcgatctaagattgtgagtactagggtagggttcttctctaaataaaaataaaaaaaaaagaaagaaaagaagaaagagagagaaagaaagaaagagaaaagaaaacaaagaaagaaagaaagaaagaaagaaagaaagaaagaaagaaagaaagagaaaagaaagaaaaccaaaataagactgccaaagaaaacctaaggataaattcatatatttgattaaatcacagtcccttacctgtgg

SEQ ID NO: 146645 - DNA, 458 bp, Homo sapiens
agataataatgtatctgttttaagcagattggggcatttgtgggatttattatagagggcaggaaagactggtgggaggagataaaactttcttttgtcgtctttcacatttttctcattgcatacctttttttacctatacttatcccacttgcagcttttcaacacctttacttaagatttttttgttttgttttttgtagagcctgtgttgcccaggctggtctcaaactccaggcctcaatctatccttattccttggcctcccaaaacactgggattacaagtgtgagcctctgcacctggccttctacttttctgcgagcctcctgaagtttccacacataaaagaggtcttggaatactctgtagcacaatacaattctcatttttttttagatagaacctgtctctactaaaaatacaaaaattagtgccaggcgcggtggctcacgcct

SEQ ID NO: 146646 - DNA, 248 bp, Homo sapiens
gctttttgattaattttccagaggaggaaaaggagtataggtataattttaaactattaatatgatgactggcaaacttgaattatgtgactgtgggtctggcttggtataatatgatttacttttgtcattatctacttttgtatatacaagcaggcttttaattaattttagtttatttcaaatctgtgagcttttatgaattgagccagttcctagaggctacttttatggtacactggaaagtg

SEQ ID NO: 146647 - DNA, 847 bp, Homo sapiens
ggcgtgatctcggctcactgcaacctccgcctttccaccttccgggttcaagcaactctcctgcctcagcctcccaagtagctgggactataggcgcccgccaccacacccagctaaatttttgtatttttagtagagacagggtttcaccatgtcagccaggatggtcttgatctcctgactttgtgatccgcccgcgtcggcctctcaaagtgctgggattacaggcgtgagccaccgcgcccggctgccttcacctcttaaggagctctgagactccacttctgagagtccctgcggcctcccacctccctgcctttcaaagctctctcccccatgacccaggataaccctatgtctcctcccccagaatccttcagtggctctcatcaccttcaggaaaagcccaaactccttccaccctccaggttcctccctccccacgaggctttgttctcctggggttgcttcctggaccctgaacaagttgtgctctcattggccgggcctggccagcagtgcacagtgcctggcaggttgactctaccatccccggggctggccccgctctcctccgagacccaggctgagcccagtcccctcacccttccttgacttacctccccacctgaggctgactttggggttcccagacaccctacccacacacatgccttgatcatagcacttgcctgcgcttcttcagagtcattaatttgcttctcggcttccccactggactgtgagctgcctgaggtcagggattgcgctttggatggtttccagcctgagcctggtgcttgaacagacgtgtgcaataaatgctcgttaaatgatgaaaaagcac

SEQ ID NO: 146648 - DNA, 925 bp, Homo sapiens
gaatggtgccattgcagatcaacacgcactttaaataatcaaaacccctatctttcccctgggaaggaggaagccgaggaaggctgtgtttctgactcacacgggggagtcgggggagtcgtaaacaaccctgaagagaacagccaggcctggcgctctgggcttggtcctgggacacccgtttgacactgtaaaggtgaggctgcagacccagaccacctaccggggcatcgttgattgcatggtcaagatttaccgccatgagtccctcctgggcttcttcaagggaatgagcttccccattgccagcatagctgtggtcaactctgtcctgtttggggtctatagcaacaccctgctggtgctcacggccacctcccaccaggagcggcgggcccagccgcccagctacatgcacatcttcctagcgggctgcaccggggggttcctgcaggcctactgtctggctccttttgacctcatcaaagtccggctacaaaaccagacagagccaagggcccagccagggagccccccaccccggtaccaggggcccgtgcactgtgcagcctccatcttccgggaggaggggccccgggggctgttccgaggagcctgggccctgacgctgagggacacccccacggtggggatctacttcatcacctatgaagggctctgtcgccagtacacaccagaaggccagaatcccagctcagccacggtgctggtggcagggggctttgcaggcattgcttcctgggtggcagccacgcccttagacgtgatcaagtcccggatgcagatggatggactgagacgcagagtgtaccaggggatgctggactgcatggtgagcagcatccggcaggaaggactgggagtcttcttccggggggtcaccatcaacagtgcccgcgccttt

SEQ ID NO: 146649 - DNA, 1404 bp, Homo sapiens
gaatggtgccattgcagatcaacacgcactttaaataatcaaaacccctatctttcccctgggaaggaggaagccgaggaaggctgtgtttctgactcacacgggggagtcgggggagtcgtaaacaaccctgaagagaacagccaggcctggtgagtcactcctgggagtggctcctccccaccctgccacgcagcggcaactgcgggctgggcctaccccctggtggccacgctccctccgcacccggcctctctctgtggcatgggggcggccatgccccttggtggagatgaatgggagtggagctgggctggctgggcaggcaggggcttgcctcttgctgactaaggcagccctggaggggcccgaccatggggcaggaacccagttgccatcctcagagcgaggatcattggccgggctcggggatcagggcctctgtggtcccggcacgcctggcccgtgagactgtactctgcacgactcctccaggtggccagggtcaccggaactggctcgctctcctctgccagttgccggaggtctgggcaccaggccaattctcaccttcccgccagggttaaacattagtgggaggttatcagcgtgggccaggggagggagaggggggaattcaactctgtctcctctgctggagccaccagttcccgcaagcccagacaatgccggtggaggaatttgtggctggctggatctctggcgctctgggcttggtcctgggacacccgtttgacactgtaaagctcctgggcttcttcaagggaatgagcttccccattgccagcatagctgtggtcaactctgtcctgtttggggtctatagcaacaccctgctggtgctcacggccacctcccaccaggagcggcgggcccagccgcccagctacatgcacatcttcctagcgggctgcaccggggggttcctgcaggcctactgtctggctccttttgacctcatcaaagtccggctacaaaaccagacagagccaagggcccagccagggagccccccaccccggtaccaggggcccgtgcactgtgcagcctccatcttccgggaggaggggccccgggggctgttccgaggagcctgggccctgacgctgagggacacccccacggtggggatctacttcatcacctatgaagggctctgtcgccagtacacaccagaaggccagaatcccaaccctacccacacacatgccttgatcatagcacttgcctgcgcttcttcagagtcattaatttgcttctcggcttccccactggactgtgagctgcctgaggtcagggattgcgctttggatggtttccagcctgagcctggtgcttgaacagacgtgtgcaataaatgctcgttaaatgatgaaaaagcac

SEQ ID NO: 146650 - DNA, 505 bp, Homo sapiens
tgggcaccaggccaattctcaccttcccgccagggttaaacattagtgggaggttatcagcgtgggccaggggagggagaggggggaattcaactctgtctcctctgctggagccaccagttcccgcaagcccagacaatgccggtggaggaatttgtggctggctggatctctggtgagacatttttcttccttctgtcacatcacacccaatggtaggtcacttcctcgggaagatgggtgacatgggaggagcagagaccaaagtctgagttccggcctggcgggaggatcacttgagcccaggagtttgagaccagtctgggcaacatagggaggcccctgtctctacaaaaaaatcaaaataattagctgggcatggtggctcacacctgtagtcccagctacttaggaggattgcttgagctcaggagttcaaggctgcagtgagctatgactgcaccactgcactccagcctgggtgacagaatgagaccctgccaca

SEQ ID NO: 146651 - DNA, 1496 bp, Homo sapiens
gaatggtgccattgcagatcaacacgcactttaaataatcaaaacccctatctttcccctgggaaggaggaagccgaggaaggctgtgtttctgactcacacgggggagtcgggggagtcgtaaacaaccctgaagagaacagccaggcctggtgagtcactcctgggagtggctcctccccaccctgccacgcagcggcaactgcgggctgggcctaccccctggtggccacgctccctccgcacccggcctctctctgtggcatgggggcggccatgccccttggtggagatgaatgggagtggagctgggctggctgggcaggcaggggcttgcctcttgctgactaaggcagccctggaggggcccgaccatggggcaggaacccagttgccatcctcagagcgaggatcattggccgggctcggggatcagggcctctgtggtcccggcacgcctggcccgtgagactgtactctgcacgactcctccaggtggccagggtcaccggaactggctcgctctcctctgccagttgccggaggtctgggcaccaggccaattctcaccttcccgccagggttaaacattagtgggaggttatcagcgtgggccaggggagggagaggggggaattcaactctgtctcctctgctggagccaccagttcccgcaagcccagacaatgccggtggaggaatttgtggctggctggatctctggcgctctgggcttggtcctgggacacccgtttgacactgtaaaggtgaggctgcagacccagaccacctaccggggcatcgttgattgcatggtcaagatttaccgccatgagtccctcctgggcttcttcaagggaatgagcttccccattgccagcatagctgtggtcaactctgtcctgtttggggtctatagcaacaccctgctggtgctcacggccacctcccaccaggagcggcgggcccagccgcccagctacatgcacatcttcctagcgggctgcaccggggggttcctgcaggcctactgtctggctccttttgacctcatcaaagtccggctacaaaaccagacagagccaagggcccagccagggagccccccaccccggtaccaggggcccgtgcactgtgcagcctccatcttccgggaggaggggccccgggggctgttccgaggagcctgggccctgacgctgagggacacccccacggtggggatctacttcatcacctatgaagggctctgtcgccagtacacaccagaaggccagaatcccagctcagccacggtgctggtggcagggggctttgcaggcattgcttcctgggtggcagccacgcccttagacgtgatcaagtcccggatgcagatggatggactgagacgcagagtgtaccaggggatgctggactgcatggtgagcagcatccggcaggaaggactgggagtcttcttccggggggtcaccatcaacagtgcccgcgccttt

SEQ ID NO: 146652 - DNA, 535 bp, Homo sapiens
gttctcaccaactttgaaaagatccaaagctaataaaattgaaacaatcaataaacatccatatctatcttcaacaaatactagttttgtcaagtttttatgtacacacatacatgctttctatgcactatttagaaacatgcatgctcataacttcaagcctaaatgcatcttctagaacatgctcctagataaccaccgtataagaaatttaaaattaactgaatatcacttaacacacactacatattctaatttccagttggccccaaaatgtcctctttagccattttttgttcccatgatctaatcaagatccatgctgcactttagtttacttccttggtctccttcaatctagtggtttccccacttgtctgtcgtaacattaacattttagagtttggactacctgtcgtatgcatcaatgtctgggttttcctttgtcattagatacaagctaaacagtttctcaagaatactgcataggaatatgttgtatgccagtgcacatcaatcagcagccctatttatg

SEQ ID NO: 146653 - DNA, 336 bp, Homo sapiens
ttcatggtgttgaagtcccccagcctgtggtattttgttatggcagcccaagcagactaaggaggggaaacggcaaaggacagaatttggagaatgacttctcttggggtaggaagatgataaggaactagtggaagacatagaggtcagaaaagttgaagggaatgtattcattttctctggctgttgtaacaaatgactgcaaacttggtggcttctaataacaagatctatttattctttcacatttctggagaccagaagtccaaaatcaggatcgctgggctgaagtgaagggtcagcagggctgtgctcctgcagaggtgtagggaagaa

SEQ ID NO: 146654 - DNA, 705 bp, Homo sapiens
cgttagggagagagttcaccgagacatcatctaatataagcattacctcacacattatctacactaaattttaattatttatacggcatgccagttcttggtattctttggcaatgaatgaaaatgtgtatgtggttagtattggcatataggtctaaggtaaatatttagccctgttggtaataaacaaagtgggtccatctcttgaagctatttattccagagaagtaccttcagtttaagagttctgttcaaaacctgccctctgtgctaaatttgggagaaaaaaatctgaaaagcatggaatgaaagagatccaggaatcctttttcagaatacaataagatttctgttctggttggtgaagactggtctaggcaaggaaggtccccgtttgcattggcacacagcagcgctgcgctgcccgggcaggctcagcctcaggtgcctgcagctttatctttgcaaacttgaccatcaaagtcccaggggctttggggccatggacaacaccacacccatgcgacagccactttacctacctgctggcctggcttctgggttagaatttctgaatttctgccccgccctttctcctggaggtacgctgccaagtgaatcacgcctggcagctttcagacggcgtgtacctatgccttcccacatcagcagggatcgaggatgcctttgctgtgaactcacact

SEQ ID NO: 146655 - DNA, 405 bp, Homo sapiens
atacatatatagtttcgtagttacatatatgtataaatagatatatagttacatatgtatgaaactatatatgtagttccaatgacatatatatacacgtatatatatacgtatacatgtacacgtatacatatatatgtatatatacgtatacaagtatacgtatatgtgtacgtatgtatacgtatatgtgtacgtatatatacatatatacatatatatatctcatatatatatatttcatatatgagattgaggttgctttctttgccaagtgactagaagggtgtggtgggaaacctctaagacagcgccgattatctctacattcttctgtaaacacccccaccccttgtgtgggccaaagctaataacgtttctgttgaattaaacatggctaaagtg

SEQ ID NO: 146656 - DNA, 685 bp, Homo sapiens
ttttatgtgctaaagctggcaacattactacaaggttaacttctcactttcatcctggaacttgttttgtcattatctttgagggtcatggtgctatggggccaaagggacttcatgcccttttggatagccatgggtctgacattcatcctgccctcccctgctgctctctgcctcctgcctctggtccctcaggcctcaaagcccctatgccagcagacacagggcagcatgttgagggagaagattctgcacactcatttgaggcccgcctgaccctgtctccctcacatgttcaatagcactcggccccaccctcaccttctggaatgttgtgcctccaagtctctaagcaccacaatgtgtgtgtaaatctagcaaaatagacagattttgagactaaatggggactctgggtatggatttacacatgggcaaaatttttcttgctgagcagtttgtgttaaatgggatttagtttgctccttgatgatcagtctgggagggtagttggaaatctacccctgtacaggcttcttctgaagttgctctttcagattttacagcatcatggatccttttttagtggccaagttttggagctagcaaagcagataaagctacacggaatattcacattttcattgtggaaggagaaaacaaaatctgtgtctccaagatttct

SEQ ID NO: 146657 - DNA, 394 bp, Homo sapiens
cagggccaggccagtgatgtggataatggtgcaggctgatggggagagagcacgatgttcaatggcaaaggatgccaggcttacatgtcgaggagacaaaagggagaggggagagcaggggatgggataaacaggagagtccacgcctagctgctcctcaattccagctgtgtgcctgacatatgggattggagccacagagtctgatatttcaagaggagccaactgaaattatcttcagcacacctgatggctgggtacctctcgtggcatgccagtttgaagggaggctgaacagtgagaaaaaaagagcatgatctttttaatcggatgatgtagattccatcttaattccactacttccctaactgtgcaatcatgggccattttctta

SEQ ID NO: 146658 - DNA, 408 bp, Homo sapiens
acaagttctcatagacaacaacggcactctcggatatagacagcagacacacactcacaaccactctcagacatcgatgcccttcagcaacaaccttcagggcctcagactcacagacaacaaccacacttttggatgcatccctcacggacagcattcacagatgcacactatcctacaccattctcagacatgcgttcttccagacagccttcagaaacacactcacagacattacttgcctgctcagatatagagcccctcatagacagcgttccagaacataccattgcacacttgcttacacacacacacacacacacatccccctctgctgttggtgctcccagtcctgggactgtcaggatggctgatcagtgaagactgtcctagtggctggccacctcc

SEQ ID NO: 146659 - DNA, 240 bp, Homo sapiens
tcaaagccacccctccccaagatgctgcctctgaagctcaaacagtccatctccctgacagttgtgtcctctccttctctcgtatgtggtagtatcactgtcctccccctaaagcagtgggcaccttgagggcagaaccttgccacgggcatctctggcccctggggtccgagcactgagtgggaatcctgatgataagtgttgcatgagctgggcacagtggctcacgcctgtaatccc

SEQ ID NO: 146660 - DNA, 393 bp, Homo sapiens
gagtggctcaagctggagaagtcttggaaacctgatcccaactaccaggtgtttaaagggtacctgtggggaagtgggtttagattcttctctgattgcagagagcagatccggaaataataggtggaaatgttaggagggcagattgggtttaaattttaaaaaatctttttttaatgaaatttttgatttgtaatttttgtgggtacatagtaggtatatataagaaccttattttctgttgtttcccttgctattataaatttattactgccagtcatggtggctcatgcctgtaatcctaacactttgggaagctgaggagagtggattgcttgaggccagaagtttgagaccagcctggataacatagtgagaccccatctctacaca

SEQ ID NO: 146661 - DNA, 733 bp, Homo sapiens
ctgaattatataaggcgaaaagtgaacgtctcctgtaatctagaaaaatggcattataatgagtaaattttaaattttaatgtaattttccagaattttttttttttgagacgggacggagtctcactctgttgcccaggctggagtgcagtgacgcgatcctggctcaccgcaacctctgcctcccacgttcaagcgattctcctgcctcagcctcccaagtagctgggactacagccgcccaccactgcgcccgactaatttttgtatttttaatagagacggggtttcgccatatcggccaggctggtctggaactcctgaccttgtgatctgcccgccttggcctcctaaagtgctgggattataagcgtgagccaccgtgcccggccttttttttttttcgacaaggtctctccctgtcacccaggatggggtgcagtggcgcaatcacagctcactgcagcctcaacctcttgggctcaagtgatcttcccacgtcagtgtcccaggtagctgggactacagacgcgtaccaccacacagggctaattttttgtattttttatagagactgagttttgccacgttgcccgagctggtctcaaattcctgggcttaagcggtctgcccaccttggcctcccaaagtgctgggattacaggcatgagccacttcacctggccatccagaaacttaaatgcttataatcacatgcacacatagttttttt

SEQ ID NO: 146662 - DNA, 523 bp, Homo sapiens
tacgcaatatatgaaaataaatggaagtgagagcagaaaatagggagtcaagtgacagttttagaaaaatggaaagaaacaagagaattaaaagtttgagttcgaagaggagactgcggtttctaccatgggtaagaggaaggatgcagcctgcactctgctcccttgggatcattactgaggaatggctgaacaagcaaataaaggggcaacaaactgtacaaggtgcagaatgaggcccagcttactgctcttcagtccccaggccattcgtcagaaatcaaagaattgttttatttatttatacctttcctcatctgggaaacatttgaaaaggtcagcaaataaccactgttgtgttacttgctgttggccaagcacaatagaagtatttacactccctggaaatttagctgctgtgataaagacatggctctccttacaaattatatgatagatgcaattctgaaagatttgtaaatgaaattataactctggtcatatgctgaatgtactaggtaag

SEQ ID NO: 146663 - DNA, 349 bp, Homo sapiens
actgctgcctgtaatgaaccttccttcactattccacaaaccaccttgccaagtcaaaagactcctccttggtgaagctccccaggatctttcccattcccgtggcaccctttacttaccatgccagatgccaccgctgccccacggtgtcccccgctgcattgggacctctttgagagcaaggatgtgcctgatccttctgctctctctgcaggcttggagcagagggagagcaagaatttaccgaacaaggctgggtgcagtggctcacgcctgtaatcccagcactgtgggaggcccagatgggtggatcacttgaggccaggagttcgagaccagcctggccaac

SEQ ID NO: 146664 - DNA, 375 bp, Homo sapiens
aggctccatggggagtgggggttgcatgactccatgaagaaatactccctacagacctgggtgcaagtcctggtgctgtcattttatatttgtagggtcctgcccagatttctgaacttctctgagcgtccttttccttgactgtgcaggatgatgccgcctgccgtcctggagcagtgtggagattctggtgacaggaaatgttgtggacagcacccgacctgttacagacacttgtccgttccctgtgtccaaggtggagagggagtggaggagggagtgtccgtcctgggtctccactgagcttggcctagacccccagtggtctcagttagagtctggtctccacttgctgctggctgactgcagggaaat

SEQ ID NO: 146665 - DNA, 775 bp, Homo sapiens
tgctctgcaccgtgttttatagggaatgaaaaagaaccccaccaaacttaggatgcatctttccagccgggcccttcctcaagcccctcactgtcacctctggccccagggcaggcctggggctcaccccttggacaacactgaggcccagcccagagaagggacttgtaccctacgccatacccacagctcacagccactcagcccagcatgggttgccccagccagatctccttccaaaacagttagaagagtattgatgaagagtccttcagaattttgattcttcttcctctcctggtttatcttctggtggaaagaaaaacacgtttggaatgtttaagactgagaggtgatgggatttctttttgaggtagaaaatgtggtatgagaatgggagggagaaatagaaaagtattgaagcttttaaaactgtaaggtggccgggcgtggtggctcaggcctgtcatctcagcactgtaaggtggccgggcgtggtggctcagacccgtaatctcagcactgtaaggtggccgggcgtggtggctcaggcccgtaatctcagcactgtaaggtggccgggcgtggtggctcagacccctaatctcagcactgtaaggtggccgggcgtggtggctcaggccgtaatctcagcactgtaaggtggccgggcgtggtggctcagacctgtaatctcagcactgtaaggtggctgggcgtggtggctcaggcctgtagtctcaacactttgggaagctgatgcgggaggatcagt

SEQ ID NO: 146666 - DNA, 298 bp, Homo sapiens
gcggccgcctactactactactactactattgctcgaattcaagcttctaacgatgtacggggacatgtgaaagctttattcaaaactgctaagcattaaaattcaaaaggatgattttatctaagaagaatatttaaaatagtcaaattagtgttttttattattagaactgcctctatattgaggttagagcaagtactttggcatttagttttcttggtttatgtgtaattttaattaacaagatattaattatgagtctgaggatttcagaatttattattaaacccaaaagaa

SEQ ID NO: 146667 - DNA, 632 bp, Homo sapiens
atcacttctgctatgtaattctaagaattctcatttctagagtacctgagccaaacaaatacacaacggaagctgcagctgtatcatcactagcaatttgctcatcattatttactacctttgaacctaaggtttcctgcctatgcttttgaaagcaaaaatcagtctcctttgcatgaaaaagagccttagatttttaaacatgttagttaccagaatgctaaaataccagttgattacccaaattattttggaaatctatccataatggaagtctacaacaaacacataaaacagattacactaagagctgagaaattcaaaggaactgaagattctgagagataaactgttcaagtcttagcaatgatactgcacttctctttgacaggttctgggcttaagttagaggccctactggttccaaaccatattccactgactttgcaagtaaaataaatttgattctgaaataggaaacaaaaaaaggagaaataaccgaatagtagaagaaaaactgtttgtaggaagacgatgcagatggaatgatgtggacattgagtaaccatgtcaataaaatatataaaccaaacttaaatttgtgaaataaggaagttggtacctttgttgtt

SEQ ID NO: 146668 - DNA, 451 bp, Homo sapiens
tgggaagcaacagctctctctagaaggatggctggagggcaactgttcctccctggtcccagcaaaaaatgacaagagattttgtctctagagaggataagcagtctctgaccttgaggacagcaaggatgaggatgagatagtagtaaatgtttacacactgaatgctccaacacctctcctccgtcccccactcctacccagccctcttcccacactcagctccctgccacgcctacatttcccaggtaaaatatgtgacgattcttttttgggaactgagacctgacaggaaaaataaagactaaagacattgggaggccgggcgcggtggctcacgcctgtaatcccagcactttgggaggccaaggcgggtggatcacctgaggtcaggagtttgagaccagcctgaccaatatggcaaaaccccacctctactaaaaacacaaaa

SEQ ID NO: 146669 - DNA, 137 bp, Homo sapiens
tcccacactcccagccactcagggacagtgtgaagataaaaccgggaggtgggtaacagtgaacttgagagagagccagagaactgactgagggacagtggcttcgaccccagaattcacccctgtattgtctctac

SEQ ID NO: 146670 - DNA, 273 bp, Homo sapiens
tttctgtgaatcactcactcatccagcttcagaattctttattctaagttcatcagtgtttattagtggaacctaaatgccctttcatgttagtatgattttaatggagtactttttatctcaataaagtcgtgtacatataatgaagcaaattctataagcattaaaatatagattctttaaggtttaagagaaaaaaataatagtgtatccaaaaaagggaattccccaccttcacattcagagtcttaccaagtaaaaacatgatcagta

SEQ ID NO: 146671 - DNA, 236 bp, Homo sapiens
tcaagagtagctttttgatcaatactacagaaatatcacatatcggaaaaacatatatgatttgttcatatacaagtcagaaaattacactaatgatttaatttacattcaaccccagccgtctattttacaggcagaaaatttgtgcttcctgtaattgcacaagcaattaggcatttacactctaaaaattaagagaaaatgtctgattgtgtatgcaatatctgtgcccacaa

SEQ ID NO: 146672 - DNA, 297 bp, Homo sapiens
ctctgtttacaacaaaagtaaccacccacacccctgccagaaaaccagcctcgactcccaaccagcgcatttccactcattcagttcctctctcctgaccattgctcagcaaccaggaataaccaagtcccagatcaggctctgcctcctcctggagcccagcctctgttctaggtcatgctgaagagctgcctgtgtgctcaaccaagctgctaccctgtcacagatcccccttttgctcctccttgggtgtccacaggctcggtggggccaaggtggtcaatggccatggggaca

SEQ ID NO: 146673 - DNA, 390 bp, Homo sapiens
  misc_feature (14)..(14): n is a, c, g, or t
  misc_feature (20)..(20): n is a, c, g, or t
gtgacacagatggnagctancgcctgctccagaggctggcatcctcactgaccagatcccagcttttggctgtgaactgcttgcttcccaggggggaaatcatcaggtgggatgtctttgaggcacaggaaggaggtgtgttcctcccaggggcacttccagagtctaagcttgagatttctggcccttccaccccaggtgatgggaatgaatttgggctagagtcacatgaaggctggccagtggctggagctccttaagggctgttttccttcttcccctgctctgctcagcaccaaaacaactttccttgaagtcttgtgggtggcaggatgggatttcctctggcttttagcttgagtgtgtagccttttggggtctcagcatcat

SEQ ID NO: 146674 - DNA, 336 bp, Homo sapiens
aagaaaacagaggggctccgttacaggcttcaaacagagagaaagccagagccacctacagccgagtcaatgtggggattcctgcaatgcctcggccaactgaagggtagagcatgaaacacacagtcatttgatggtaattatcttgaaaagatcagaccagtgatatttctgcaaggagaccaattctaccacaattccttccatctattagtcaccatctcacaattattttgccttttctaatcagcagctaggcatttgaagccctttcttgaacacatttatcatctccaattttgtggacagaatcaattttatttacccatgctaagc

SEQ ID NO: 146675 - DNA, 401 bp, Homo sapiens
gacactgaatcctataggtaaaatcatttttctgaagtgttccagtaattaattgtaaaatcatcatctccatcatcatcttggagaggcaacaatttccaaagacaatcaatacaaatgcctctcaccttctttctccctatgcacaaaattttatcaagtccccactggtatcttctatacctcaagctgaattgggaaaaaattccacttgggcattcctaatagagcccagggacaggactcattcccttccctgctgctcacacctctagggaatctcaaaacaaaactaaaaactgttctaaatattccatgcaaacatgggtaatatcataactaacttgctcagcctctttatctaacatttagaactagcttgtccaacctgtggcctgtgg

SEQ ID NO: 146676 - DNA, 213 bp, Homo sapiens
acctactttttaaaggatttaattaaggtagcttaaatatttaaaacgtaacaattaagaataaaagtaggtattagttgtagagggaatacatataagtagggccctaagataagttaattactaagttcgaataccaaatttgaattttgcagctaaggctaaaaaaggaaaaagatctttttttaaaagaaaaaaaaatcttaacatcca

SEQ ID NO: 146677 - DNA, 393 bp, Homo sapiens
acagtcaggtcgtacccccgctggcaatggacccgctggccccaatggcaaatccgtctctactaaaaatacaaaaattagctagatgttgtggcgtgtgcctgtggtcccatgctgctcgggaagctgaggcaggagaattgcttgaacccgggaggtggaggttgcagtgagccaagaccgtaccattgcactccagcctggacaacggattgagactccatctcaaaaaaaaacaaaaacaaaatgtttgggccagcggggactccaggttcataagcccaccaacagctcacaccctcagtacagaaaagctacaggcactcgacaccaacccagcccatgagagcagccatgggggctacaccctgcaaagccacaggtgcactgtcc

SEQ ID NO: 146678 - DNA, 209 bp, Homo sapiens
atctttgtcaccaagcagcgttgagccagagctgtctaatgctgagcccagctcaggaaggagagaggagtccttcagtgtgtcttggagatgcgaagtgcgtcctcgtaaaggtcagctgtcagttttgctggccgctccggcgctggctctcctgtccgggaccacaacgagaaacagcgacagattcgacgcagagctccggaagt

SEQ ID NO: 146679 - DNA, 851 bp, Homo sapiens
atgtgagtgttgtacatatgctgtgtatgtgtgtgcatgcatgtgagtgtgcatgggtgtgtgtctgtatgtctcagcagctgtcactgggcttcccagtccctgtcagcaggcgaaggaggccccttcatttccttgggtcctgcttatgcagcacaggccacagcaaaggctccctgggttgggtcagccctcactctaactcaacatgccctggaagtcaccacagggtcatggaaagagtcctggtgatgagatggagtgtctgctctgccacaagggctgtgggaccagggtcggggcatacctctctgggtctcagtttcctcactggtaagatgtggcaacagaatctcatctgtgagccccctctagccttgaacaactctggatccaggtagaccagcataatgaaagcctatgaagcttctgagatgtgcgaggcatacattgtcccaggtactcaagtaactcaagtctggaagctgcgagccacagagatcaagccttctccaaaaattggactgcaaggcatgccgtacaaacagagtgctaggagaccttggggaggtggggaagaggaagaggaatcatggacagcttcatggggaggtggctttggagctgggatgggtgaggacagctggaatgtgggcagcacgtgaccaagtgctttgcagacatggcatggcccccagccaggccctgaggaaaggagagtctcaggacagcagctatgtcactgtaagcaggacccttgaaagcaggtgccacctgcaaaagggggagccctgaggcccaggcaggcctgtcacagtgtggggcacctgtctagacagccccatggccag

SEQ ID NO: 146680 - DNA, 438 bp, Homo sapiens
ctatcggctcggtcctatctgtgtcggggtgggacggcccggcactcagaaccccgtctccaccaaaaccagtcaggcgtggtggcgcgtgcctgcaatcgcaggcactcggcaggctgaggcaggcggctgggaggtgtaggttgtagtgagccgagatcacgccactgcactccagcctgggcaccatcgagcactgagtgaacgagactccgtctgcaatcccagcacctcgggaggccgaggctggcggatcactcgcggttaggggctggagaccggcccggccaacacagcgaaaccccgtctccaccaaaaccagtcaggctgtggctgtggacttcagcactaccaacagtgctgaaaacactatgatttacatccattccaagttgcaagtccatcttttcttcctgcaacaaaagaccattagcttaa

SEQ ID NO: 146681 - DNA, 437 bp, Homo sapiens
tttgttttacctttttttgagacagggtcttgctctgtcactcaggttggaatgcagtggcgtgaacacggctctctgcagcctccacctcccgggctcaagcgattctcctgcctcagccccgagtgggactacaggcacacaccaccgcatctggctaatttttgtatttttttgtagagatggggttttgccatgttgctaggctggtctcaaactcctggactcaagcagtctgcccaccttggtctccctaaatgctcggattaaaggccagagtcaccacgcctggccataactgtaatattttggacaaattagttaacctctgttagtctcactgtacgcatgtgtcgctaacaaaccttgcagggttgatgtgaaaataagatatatgtaaaaggcctagcatatactatatgctcaataaggaacag

SEQ ID NO: 146682 - DNA, 178 bp, Homo sapiens
cgacagagccagaccctaactcaaaaaataaaaataaaaaataaaacaaatcaggtgtgtatgcacatacacacacacaaaatgacttcaaagtattttcaaagatcttattgacgctccttgggccaaaaacagaaaggcttccttggcctgaaccctgttgtctcccttcccctga

SEQ ID NO: 146683 - DNA, 293 bp, Homo sapiens
caattacttttctcctgccagagtgggaggtgcacacactctggagcctgtttgaaatccgagtctccgtgcctgcctgggtcctgcgaccgtcagcaagttgagccccaggtgctctgtccctccagtagcacaagtggagtgtcccttccctgctaatcacctgggcgggaaagctggctgtgtgagagctgcagggccctgggtatttgctgctgaggctggatgctctgatatgtcgggtggcagacctgcgggagctctttgccagtttgggggtgaaacagaatgca

SEQ ID NO: 146684 - DNA, 163 bp, Homo sapiens
aagcagggtggttttcgctcctctcctagactgtctgccatctgggggcaatggcagcttggaaaatttctttgcacagataactacactacgtaaaagtttgctgcctttgcaaactttgaaacgcctacaggaagaaatgggataaaaacgactttggccg

SEQ ID NO: 146685 - DNA, 319 bp, Homo sapiens
atttgaacaacatgatcaactgtgtgaaaggcaagtacagaagtgtatctagaatatattactcttcatggcgttgttttacagttaacttttttttaataagtagaaggagtacactctagaataatgataaaaagtatagtatagtaaatacataaactagtaacatagtcacttattattatgtactgtacataattgtatgtgctatacttttacatagctgacagtgcagtaggtttgtctgcatcgcatcactataatcctgtgagcaatacgctgtgttaccaggttatgaaagctaccatgtcactacatg

SEQ ID NO: 146686 - DNA, 181 bp, Homo sapiens
catatgcatgcatgtgtctttatggcagaatgatttatattcctttgggtatataccaatatatccaaataataatgggattgctgggtcaggtggtcattctgttttacgattttctgtgagaaattgtcaaaccgcttttcacatagctgaactaatttatattcccaccagcagtgta

SEQ ID NO: 146687 - DNA, 532 bp, Homo sapiens
ttcttactctataatttaaagtcacgggtataacaagcgagcctttaaaaactgttttccgaattaaaaaatggagcaaattcattctttgttgttgaattcaatatacttagaagtaatttatcactttggtaaagaataatgtcctactatgccttaatatctgacacgatggagatattcttgctatctacactgtgatcaccagataccagacacttcaaaaatgttgccaaaagctgttaggcatactgattgtatgaaaggtgtttgggtaatgtggactcctttcagacatttgtgatttttctgccttaattgaaagttttgacaggtttgtaaaagcataaatgtcaggttattagtagaaactctaaaataacctgggaaataaatacatatactggtttcaaccactttggctaaagctgaatgtctctaaaaattgaatcagctgatgctctaatatgttaaatatatcaagagacaggatgtttcctgatcacatccagataatttttttaattaatag

SEQ ID NO: 146688 - DNA, 641 bp, Homo sapiens
caggctggtctcgaactcctgacctcaagtgatctgcctgcctaggcctcccaaagtgctgggattacaggcatgagccaccgcacctggccaacagtggtttttctaaaaggcgaccctgatgtcactcatttgcttaaaatttctcagtagctcttcgtctatttcagtgtaaagttcagtttcctccttaatgtagtatacaagccacttcacaatcttggttctacttagcttaccagcctcagcatttgttgctctacaattgcacttgaaaaccatagtaaccttaacttacactctctcccaactattctcatgcttggaatacctcctcttaccaatattttccttgttaatacgtccctactttccaggacagagctaatatatttatgggaatctattaatgatctcatcctatttgaggtttacagcaaccttgaggtaggtaacattacagtaggtaacacaatgagaaaccctataactgatattttaacccaactttcattccttcaaagcctggcacgctgcctggaccaacaatatcatattctactccctgccagggaatttctgaaccatctgagtctcagtttcctcttctgtaaaatgaatttcataagacctgcgtcaca

SEQ ID NO: 146689 - DNA, 126 bp, Homo sapiens
ctgcctcggcctcccaaagtgctgggattatgggggtgagccactgcattcggcccatactattctcttatccttttctgtaaggtaattagtaatgtctttattaaattggcttttaagtagagc

SEQ ID NO: 146690 - DNA, 803 bp, Homo sapiens
gcttttagatacaaatcagacttcctctccagcttatgtacattacagcttgtgtaaattttaaacattgattttataacatctgtatacatttctaaaaattgtattatgctttttagttagctttgactaatacaagttatttaatactaaaattatcctcagtttactaagattttaatctatttttaatagaatattcactgtaaaagttttgaacattatagaaaattaatcaggtatttttaagtttccctgttaccacttcccagaggtgactattgttaacatttcgtatgactactttcaaatgcttttcagtgcttactaaagtgtttgtgtacatagctatgcacacacaacccctcagaattaggttttttttctcccatggaatcatactgttatatcattatgcaagttgacatttatttatttatttattgagagggagtctcactctatcacccaggctggaatgcagtcacgcgatctcagctcactgcaacctccacctcctgggttcaagtgatcctaacacctcagcctcccgagtagctgggactacatgcatgtgccttatgtttttagtagagacaagttttcactgtgttggccaggctggtctcgaactcctgacctctgatgatccacccgcctcggcctcccaaagtgtagggattacaggcgtgagctactacacccagccatcatttttattcaacccatagtaggcatcttaccatatttcaggtggaaatacttcactaattttaacagctacataatactttatggcatgg

SEQ ID NO: 146691 - DNA, 404 bp, Homo sapiens
ctttttcgtattgatgtatcatggaggctataagcaataaaacttatcaacaaagatgaaaatccctatggaacataaacactttcctattaaactcttaagttttatggcaataccatcacactgtaatttttgtaatagtcccaagtttgatcagaaaaactaaacaatatataatgcatatggcacatgtattttaggattttggcacaagatcattaaaaggcctcaaaagtgtgtggcaaattggtactcttttccacacacccattaaatttgctgcatgactaatcagatgaagcatgtcataatcatcactagtgtaaaaggtgacatataggctgaagtcacactgccataaacatcttatgattcaaacaaaaaataattgtgcaaaagagcaa

SEQ ID NO: 146692 - DNA, 492 bp, Homo sapiens
tgcgtccggcctaatttttgtatttttagtagagacagggtttttgccatgtcacccaggctggtcttgaactcctgacctcaggtgattggcccgcctcggcctcccgaagtgctgtgattgcagccgcgagccaccacgcccagccaggttgagcgtctttaatctgaaaatcccaaatttgaaacgctccaaaatctgaaactttttgaacaccgaagtaacaccataagtggataattacactcgaccttatgtgatgggttggagtcaaaatgcaggtgcacaacatacagtttattcagtgtccccaaagggaaaaaacatcctcccggtgcttttcagctgagatacatcttttctatatatgcccagattgccccaagcaagtgtgccctcaaagcgtaataagatggcatgtgtgcagaccagatgtgtcagtggcaggatccccatgatgccccatgatgggaccaagacctctgtgtgtca

SEQ ID NO: 146693 - DNA, 388 bp, Homo sapiens
gtagagaggagctgagtcagaaagcattgatatgtcgagggccattcataactctgagttctaataaaagttgatatccatccctcttgcttctgagtaccagccagagatgactggttgattcacaggaataagcagagtcagtctcaatagcagaaaaaacctcaaaaacaactgatgagacaggtgtaccatagttctctctccagtcctcatttttactaaagataaatcatggtaagactgctttgctttattatacttggcctagttatttgtataaagtgcagcaagaataattatttttcacacaggctttcttaattggctttaatgggattttctttcatagaaggaatctcaggttagacttttttaaaaagttgag

SEQ ID NO: 146694 - DNA, 169 bp, Homo sapiens
ctgccttggtctactaatgtgctgcgattacaggcatgagccaccgtgcctagctctagtggacttgaaatgttgccttgcccagggcccttatgttgaatggcccaggtccacttgtatggttctgtaccaaggttaaccccatcccataatgcctgggacagttgat

SEQ ID NO: 146695 - DNA, 180 bp, Homo sapiens
ctctctctctctctctctctctctctctttccttccctctttctctctttctgactagtcctatctccagaactcaacaagaaccactagagctacctctcattcttgctggaagccactaaagttgtccacaccaggcccaccagctacaccagaactataaggttatgagattgtgga

SEQ ID NO: 146696 - DNA, 225 bp, Homo sapiens
ccagcctgggcaacaggataatataaacctattgtgggtggctgtactgagaatatcattaaatgaggtaatgtgtgtgaggccccaagaagagtatgaggcaaattgtgaggactccagagtggtcaacttatttatggtttcttttaatttttttttgagacggaatttctctcttgttacccaggctggaatgcagtggcatcgatcccggctcactgcaac

SEQ ID NO: 146697 - DNA, 249 bp, Homo sapiens
taggagatgaagtgaccagggtatgacctgctgactggaatgttcctggagaaagtttgacctgtcttaaaataggaatggaggactggaggactgtgctcagtctacaaagtggggattggggaacattagattgggagcatgtcagtgtatgtatccagccctgctcagaatctctgcactgggcgtcggttctttagaaagccatctctatggagaagggctgtgagtgtatctaatgaggcttct

SEQ ID NO: 146698 - DNA, 441 bp, Homo sapiens
ctttcactacagaaagccctaatgggcagtgctgaacgaaaacctttgaaacccagacaatccagaacaaacagttccatgctttaaattcatactagcttcaaatgctaaagagcaccttccttcctggcttttccatcaaagtacatatacgtaaatctcatagatctttctgttgaacattgataaaacacacagaactaagtgagattgcctacacaagactattctggaaaattttatctttatgacacagacttatttctaacccaattctaacataaaagccattttattaaaaatgagcagtgcaactcaattaggctatctatatgttttaatccacggtttgatgaatcaaaaggattcatgttcttgagaggttccttgtaagctgaagttgcaagtaaaccatgagaaagtgtaaaaaacacttgtgac

SEQ ID NO: 146699 - DNA, 588 bp, Homo sapiens
cactcctgaataaagtgatttcagaagctaaaatttaacatacctggaaattttgtgatgtgttagccaagtgaagacattagtgtgttccatcttttgctaatggttcatggttgatttcttcattgtttcccatgaaattagcatagtcaagtggtacccttgacgcttgactgctggtcagtttgaccctgtttttaacaactaatgtagtcatgccgcttgattattccatgaagtcccagcaaaataataatgaggaattaactaacattatgttatctatctaatttgtctgtgtccctaaatgcccatgcctaacttgcttctctagtttattccttctgtggagggattaaaacgtgggtgttgcaagttgccctaagctaaacatagttttcttacatctttttgggaaaaaaaatggaatgggaagtatgcaagattaagcaagagtgatttttttttttttttgacaaatcaggtggccttcctaaacatactaagaattatgttctttcatgtgtggagacacatttgtttgcagcactttaaaaaatatatatggaataaaagtttacatgttgg

SEQ ID NO: 146700 - DNA, 395 bp, Homo sapiens
gagttacagtcttttacccttattacgtttacacttcgtgctacttttacaaccctgagacgggaataaacatatacactctatactctcctgattacgataaaacggatcaatccttcataaatttttgccaggactgagaatgcagaaaacaacaatgagcaacagcattgactacagtacatcctcaagagagtataaatcccacctttccaattgataatatacctcatggactgttgtttccactaagtgtcaaaaagaaagcatctcacctccattatgggatccttgaggataagacttggtctcactcatggaacaacaatatgattccataaagaaatggtgctaatctcttggaaagatttgtagctggccaggaacaccacccg

SEQ ID NO: 146701 - DNA, 285 bp, Homo sapiens
ccagatgtaaacacagatgcagtatcatgtggaattatattgttagctactcttaactacctgtattgaattgcagcagaggaggagaaaaatcatgcagatgttggaagaagatatgcattagtgtgcaagagtacagcgagaggttagaaaacttgaagctgtagaaataggattgaaaaaggtttctttgcagtacagtcactaatttatgtggaaatgcatgctctttatttctaattgagatataagctaaaataaaagtccattgttgaaagaaaactc

SEQ ID NO: 146702 - DNA, 308 bp, Homo sapiens
tggcttcagaccctggctctcccagaagctgctcctaatttggccatggtgaggttgctgaggagaagatggctgggtggctttggtgggaaagttcccattgctccaggagtgagtcctcgaatgggacaggggtacgaaacacccactgatgagtgaagcgttgtgctgacaccaggagtcctggcagctgcagagaccatccgaggcctgtcctgcctccagccccttacatggatgtgccaggcagcccaggctggggcgtgctgccgacctccatcctgtctgtaggcaaggcctgcctaggt

SEQ ID NO: 146703 - DNA, 378 bp, Homo sapiens
ttctttcccactcttcctttgcttaaccagctctttttctttcttttggtttccaattcaatgtctctacttcactggctactaatgtatactctgttattctctcacagcacctcattcccctccttcatggagcttattataagttttttattattttattgttcatttgcttttaaacaatcagtttcttccattaaaatgtaggttgtttgaggacagagacttttacttgtcttattctcttttgtattcagtgccccagtgccctgattgcaattagggtcacagtaactggatggataggtgggtgaagagatggccaagtgactgcctcaagtaacacagtaactggatggataggtgggtgaagagatg

SEQ ID NO: 146704 - DNA, 203 bp, Homo sapiens
gcacactaatgacatgaaacctgttgaggcagaatgctcagtggttatttaccatagttatgacctgcaaaggctcaaccaaaacatacacactctccttttacaccctacaggatgactaatcagtcacacctcttcaaaggctcttattaagtctttagcggtctcagactgttgctgctataagcctcctagaagtattt

SEQ ID NO: 146705 - DNA, 300 bp, Homo sapiens
ggctatagagattttaaaaaacaatgatgaaataaagcaaaagttggcagttataaagaatctcagtgataaaatactgaaatactcctccctgctggggcagtgggtcctatacacaccccttcccttgttgatatgtcactgagaatgcgacgtgatcaatgaccaatgagatttagaaaagtcgggtgatattattccttccttattgagtgtgtaatagtgatcactaatttatgcaacttgtttctcttgggtgtgcattaactactctactagtgatttgtaaaagtgaatagg

SEQ ID NO: 146706 - DNA, 428 bp, Homo sapiens
ttactatgcaggtatcaaaataagtaacttattaatgactgaaattgagagatcccaagaacatctttaaagctgcagaacaacatgcatgagttggggtggggtagatcacaaaatgatcaccccatcagtatgtacagtatgatattatttttgcaaactaaaacactatatattcctatgggtacaaatacttgtaaataaacgcagaaaaagtatacattccattcaggaggagggcacctgtgtactcaagtacgtggtcatagggaactgtagttttgtatgtattgtttgaagttctaaaaataggacatgtatcactgttgacttgtacaattttaaaaacagcataaaacagagtagaaaaaaatagataatccacacttcaagtcccatcctctcccctgagcgccagattcttagtt

SEQ ID NO: 146707 - DNA, 462 bp, Homo sapiens
gcaggattggaagttgctctgggtgagtcagtgagtgggtggtgagcgaatgtgaaggcctaggacattactgtacactactgcagactttataaacactgtatacacttaggctgcaccaaatttatttttgaaatttctttcttcaataataaattaaacttagcttactgtaacttttttactttataaacacattatttaaaacttttcgactcttgtaataatacttagcttaaaacatcatccactttaaagttgtacgaaaatattttcttcttttatatctttattcaataaacatttttctattttcatttttaaaaaattttaaacttttttttttaaaacaatactaaggcaggagcagtggtgcacacctgtaatcccagcactttgggaggccgaggcgggtggattgcttgaggccaggagtttgagaccagcctgaccaacagagta

SEQ ID NO: 146708 - DNA, 754 bp, Homo sapiens
ctgctccgcccctctctgggactgccaggcagagagaaaagaaggctctcttccgcactcagatgatgccggggattacgaacagctcttctcatcaactcagggagagatctcagagccgtcccaaataacaagtgagcccgaggaacaaagtggcgctgtcagggaaagggggctggaggtttctcatcgcctggctccctggcaggcatctccaccgcacccgtgccgcttcctattggggcctccccagggcgggagtccccgcgggtctcatcacacaagtgggtcgtccctgtcaacaccccggtcccgtggcggaacttcccaggtgggctccccaaccttgctgtctccagctgtgccatcaaagcagagaaaggcgagcagggtagcgatcctcacgctgtctaaagagccagggcaccagaaaggcaaagagcgtcggtccgtgctggagtgcagaaataagggggtcctgatgttcccagaaaaatctccgtctattgacctaacccagtcaaatcctgaccattcgagctccagatctcagaaatcttcatccaaactgaacgaagaagatgaggtcatcctcttactggactcggatgaggagctggagctagaacaaaccaaaatgaagtccatttctagtgatcctctggaagaaaagaaagctctagaaattagccctaggtcctgtgagctgttttccatcattgatgttgatgcagatcaggaaccttcccagagc

SEQ ID NO: 146709 - DNA, 296 bp, Homo sapiens
gcctacctctcccaccaatctcacaaatgcacctttcccagccatgtgtaattccttgtagtacctttaacatactagcctccatgcttttgcacttgctagtccctgggtctgacacgctccttcctttcttctctcatatagctaaatcctagctcaaataacaagtttccaggaaactattcctaacactgtgatttataaggctaacctatttttgtgtagtaccttctgtagaatatcaccatctaatactgtaattgtgagtttacccatttcactagttcacaagatcc

SEQ ID NO: 146710 - DNA, 387 bp, Homo sapiens
aaccttctgtatttggattctttcacttaccattatgcatgtgagattgaaacatgttgggtttggctgtgattcattcacggtcattgctgtattctgttgcctgaatgtaccacaacttattaattaattctaccactgatggacactgggttgtttccagggttggactgttatgaacaattgtgctatgaacattcttacacatctcctcgtgtgcaagggcaggcatttaggttagatgcttacctaggagtgggagagagtatgcatatacatctgttcgactttagcagataagccaaactggtttccaaagtatctgtacaatttggattctttttttttttaaggttttcatgaccacatcataccttctttactgct

SEQ ID NO: 146711 - DNA, 309 bp, Homo sapiens
atcacagcttactgcagcctcaacctcccaggctcaagcgatcctcccacctcagcctgctgagtagctggaattactggcgtggtggcgggtgcctgtaatcccagctacttgggaggctgaggcaggagaatcgcttgaacccggaaggtggttttattgttttgaggcatggccctgggggcttgtggcaagggctgaggtgtttggggagcagcagtgcaggaaaggccttactcagctgggcttgcaggtatgctcactcctgtctgagcgctgcttccttgtttctagcctccgtttagaata

SEQ ID NO: 146712 - DNA, 152 bp, Homo sapiens
aattaggtagccacgctgggatgtgcctttatcccagctattcagaaggctgacgtgggacaatcgctttagccccagaggtggaggctgcagtcagccatgattgggacactgcacgattcagcctggccaacagagtaaatccctgtttc

SEQ ID NO: 146713 - DNA, 341 bp, Homo sapiens
acttcatctcaagaacaatgggatgctgctggagagtttaaggagggagactttgttttaaaaagaccaccactgaatgaagggaacaagattggagccagggagtctggagccagggagtctggagccagggagtctgatttggctgcttcaacagctcaggccagagctagtgacagcatgaattaggacagggactgggatagtgacagtagggtttgagagaagtgagtaggttcaaggagtatataaggagattgggtgcggtggaatgccttcatttttggcttgggcaagtgggtgtcattcagcaaagtaggcaatgctggaagaggattgga

SEQ ID NO: 146714 - DNA, 562 bp, Homo sapiens
atgccttaaggtctaaatttaactgtggaatatgacaaaaatcacattaactgttcaaccatgaatattttaatttttcttaaatatttaaaatggaatcttctgttactctgtgtcctcttatcctgcttttcttaaaagcacttgtaataccttacatgtatacatatttcatatctgtttactaattgtgtttccttcacttcagatgccgtgagagcaggggcttgttttaccgcttgctgtttcctaagtctctagtacagtgcgtgacatccattctggagctgggaagtccaagataaagatgccagcagattagtgtctggtgagggccagctatctctgctttcaagatggcaccttgttgatgtgtcctcaatggcagaaggtggaagggcaaaaaaagggaccattaggaccctttcttcagcctcttttataagagcactaatccattcatgaaggcggagccctcatgtcttcatcacttccccaaaggccccacctcttcatactgtgacaatggagatcaagtttcaacatgaattttggagagaca

SEQ ID NO: 146715 - DNA, 465 bp, Homo sapiens
  misc_feature (52)..(52): n is a, c, g, or t
gcgtccgctcccgcgctcatcgggcatttgcagtcgccgcctgcgaggacgngcagggatgaagatgactgtggatttcgaggagtgtctgaaggactcgccccgcttcagatgccgtgagagcaggggcttgttttaccgcttgctgtttcctaagtctctagtacagtgcgtgacatccattctggagctgggaagtccaagataaagatgccagcagattagtgtctggtgagggccagctatctctgctttcaagatggcaccttgttgatgtgtcctcaatggcagaaggtggaagggcaaaaaaagggaccattaggaccctttcttcagcctcttttataagagcactaatccattcatgaaggcggagccctcatgtcttcatcacttccccaaaggccccacctcttcatactgtgacaatggagatcaagtttcaacatgaattttggagagaca

SEQ ID NO: 146716 - DNA, 635 bp, Homo sapiens
atggctcactgcagcctcaacctcctgggctcaagcgatcctcccacctcagccccccaggtagctgggactataggcacgcaccaccacacccgactaatttattttttatagagacagtgtctccctatgttacccaggagttctcatgaacagtggaagttgattttaaacaatgaagagtcatggtcagattagcactttaagatcacctgctatatgttgggaaatggtttgagaaagaggactaagagtagatgcagagggaccagttatgaagttcttggagaggaaagataacactagcttgacctagagtagtagctctggaaatggcgtgatatttggaggtgactgacttttatggcgggcgggggtgtcaagtgtgaatcctaggtttctggcacagtgaagtgggttgtcatgctatttgttaagctcagaaactgtggcagagaatcaggttaggtcattttgagtttatcagaaaagagttgttcaatatgctgtcaccaaatactggatgtattggtcttaaactcagtgtgggaaggtctggactagagatacatatttgagcttcatcagcatacaataattatatttgaagccatagataagatttctgagggata

SEQ ID NO: 146717 - DNA, 312 bp, Homo sapiens
aggcatgagccaccacgcccggcgggaccagacacttctgacaactgctaaccacctgcacccccaaacccccatacacccagccgggcaccctatggtggtgctctccatgcccgcatcccatcaggcaacttctgaagagatagattgaaccctaaaggatcccaacactggctgaacggccttggccagccctgaagcgctagatccccactctcaaactggcttctctgggaacaccactaccctcacccaggagccaaggagccccaaactctgtttttctttcctgggtgttgagtgcctttctgt

SEQ ID NO: 146718 - DNA, 225 bp, Homo sapiens
ctgtctgccagcaccccccaccccaatccctggtggggagagaggactgtaactttggtctggatgaaggttaaataagacttcagatatcctctcctagtaaacaagctgcaacaacttgaaggcagaaaaggggaaagagattcggtttggcaaatccttaatgaacaccaccttctttcttagtgaggaagacggtgggcaggggacactgtggcagggtgg

SEQ ID NO: 146719 - DNA, 337 bp, Homo sapiens
atgcttttctgtgtgtctattgttcaatttttctgaatgttccaagggaactaaagcccatctcaagtactatttctacatggtcaaatggctcatttccttttcttttatgtactttctccttgaagtctcactctaggattccagctgtcccagcctgctctgggcattaatctgagacctgcattctttcagctctcttctgtgaaggccactgttccttggattccccatctttctatttgtcatttattccgctgtttgaaggaagacataatcacacagctttccaagaaagggtgcacaaaaggtaaattttcggaaatgctacatcagt

SEQ ID NO: 146720 - DNA, 980 bp, Homo sapiens
ccaatattagacaaagtaggctctttggtaaacgcaaggcttgaattttctcggggccttatgatgctggttcttgagaagttagccactgatattccttgtctgctatatgatgacaatctcttctgtcatttggtggatgaagtactcttgtttgaaagggagctacacagtgttcatggctatcctggcacttttgctagttgtatgcatattctatcagaggaaacctgttttcagagatggttgacggtggagagaaaatttgctcttcaaaaaatggactcaatgctttcctcagaagctgcctgggtatcgcaatataaggatatcactgacgtggatgaaatgaaagttccagattgtgcagaaacttttatgactctactcttggttataactgacaggtataaaaatcttcccacagcttcccgaaagcttcagttcctggagttacagaaggacttagtagatgattttaggatacgattaacacaagtgatgaaagaagagactagagcttcccttggctttcgatactgtgcaattcttaatgctgtgaactacatctcaacagtactagcagattgggctgacaatgttttctttctacaacttcaaacaggctgcactggaggtgttgcagagaataatactctgagtaaattgcagctaggaccagctagcctctatggagagctctgtctttgatgacatgattaacctcttagaacgtttaaagcatgatatggtttgacccgtcaagtagaccacgtttttagagaaagtttaaagatgcttgcaaaatctgtttcacaagagacaagaatggttgtccttggccatctcagtcaagagcaggccagggatgtctctgtccagttcgggctgccccgtgctggtgaaggtacgagaccattacttcaggtgggcccagcagtttgttctccttatttaaatttctggaatgctggtgacag

SEQ ID NO: 146721 - DNA, 344 bp, Homo sapiens
caatgacaccctgtgctgtgaaagtggcctcagagatgagtctcctgccctgttccctcccaggcctcccctgcctccctaccccagccggctaccagaggggaggtctttggtggcatctgattggtagaaatgcatccttggttgggagccaagttaagctacagtgagagagaaaaagaagcccgaggcaatgctgatgtggagaggtgtgactggagaaactccaggacccttcaccagaggaagccagcttgaactttcattcctggtttgatcaagatagtgtaaaaatggaccccaaaggtcttcagatggaaaactaggttttaggtttcacttat

SEQ ID NO: 146722 - DNA, 229 bp, Homo sapiens
gataatgaggcccctcctatacatgagaacacggaggatgggagatgttaaataacttggttaagatctacagctcataaatagaagttgaccctagggctattagatgccaaagtccacactgataaaccgggcagaaagaaagaggcttttagacaaagaaaaaataaaataacatgtaatagttgattagtgctctaagttgtattacacaaaatgtgctgatagt

SEQ ID NO: 146723 - DNA, 240 bp, Homo sapiens
atacgacaatgataacgccaacacgttctattcactacggtccatctttctgaatctaaagagctccccttcattgctccctcatcaacccatcatctaaactcgaacagccatcgtccgagcatagaactggtcttcttcctactatctcgttactcacatgctcctgacaatgcccttccgggcagacacagatctccccttgcccccacccaagcccgcctgccaagggggctacag

SEQ ID NO: 146724 - DNA, 476 bp, Homo sapiens
tggtagtcatttcatttttcaagctaacaaagagagagaagtaacttacctcaagaaaagattcgttttactaaaaaataacagagagacacatttcatatgattaaaaaaaatgctgagacataatcacaggaacattgcctcatatgcagaactagaaagactgttttagctataaaatgtgatgtttcattaaccagatttctaaagcaaatgtttatacattttataacccttgtgttctgtctcttcatagagctgtttgtctgctcagttgtacagtcctgtgggctctcactcagaagtccctcccagcctagcctgccttcctcttcccactgctgtctctctctccatgggaccctcctctctcacgggactaatgaagcagctgctttgttctctgcctgccacctgtcgctttttataacaagctgtgtatcttctactctgccaccgtcatttccttcctcaaa

SEQ ID NO: 146725 - DNA, 383 bp, Homo sapiens
agtaggatcccagtcagcgagcattagtattctgtccacacagtactgagtacaggcacggcgtggagggagtccctggagggttaaagagtattttgtgagtaaagtcaggggaaatggagagtgtgcctttccctttttgagttcttctgggcttaggaaggagatgaaccagataagcctactgtttgttgagtgcttccttttcatggctagtagagtcctcacaacagccttccagggtaagtactgtattattattagccgcatgttccagaggaagaagcaaaaactgagcacctaagtaaacctgcctgggaccacccagctaagaactggtggcgtcagtcggtctccagtgtagagcgagataacagatgagt

SEQ ID NO: 146726 - DNA, 375 bp, Homo sapiens
agattctgttcttaccccattttgctgaaaaaacattgaaagaggttaagcgatttacaccaaatcacaaaaccagttaattttagatcaggacaatcggactcaacaatctataaaatatcaacattcagtttaaattgtatatcttacacagctttaatctcctaaaaaaaatgaaatgtccctttgtctgaaactgaaatgtcatcaatccatatacactaaggagagggacaatggcaggatgggggtgcacctgctcggaagaggtatccacaactcaccactcactttaaaactctgtggataacttcattcagaaacaaagttaaggagagaaattgttaatgtggggtgagagctcaaaaatttgcc

SEQ ID NO: 146727 - DNA, 355 bp, Homo sapiens
cccagtgccctgcacctggagtcctgtgcttagatctccagcttccctggataggaggccccattcattcattcattcattcattcaacagttcttcactgatgaccttattagcaagccgtgctctaggcactgagggcaaagcagtgtacaaaagagaaagtcctccctcatggagctgatttgagtgagggagacagatgattgcccccctcccctgccctaccaaaaaaataaataaatagcaacaaagttctaatgataccaagtcctgcggtggaaattagaaagggtaaaatatggttgatacagtggctcacacctgtaatcccagtgctttgagacgccgaggcag

SEQ ID NO: 146728 - DNA, 384 bp, Homo sapiens
ccccaggtaatcttgtttgagatgcagaaagccatagtcattcagtcattagatgacttaaggagctggcgggtgcatttgggcatttgtctctccttttggaagatgtggaattggagttttcttttggagaaagctctctctcaggagagagctacagtgagagagctgcaggtgagatgcaaagatctttccaagacagcaggcgagggtagagttagggctgccatgggagcagtggtgcaggggctggttcgaggttcctgacctttgcttggctctagttcctggcactggcaggcccttagatggtaagttcctggcaggcctggctccagggcaacagtttgagtaatcctgtgattactcagctccttctcccca

SEQ ID NO: 146729 - DNA, 456 bp, Homo sapiens
tttcttccaggatggctcccttgaatccatttcgtatactgctatagagcatgctttctaaaatgtaaatctgctcctgtctctttggtttaatatctctgcagggcttcccttaactttcaggataaagtaaatcaattctttctttttttttctttctttctttctttcctttctttctctttctctctctttctttctttttcttgactaagtctcacttggtcacgcaggcctgagtacagtggctgactgcaacctccacttcctgttctcaggcaatcctcctgcctcagcctccttagtagctgggactacaggagtgtgcaaccatgcccagctaatttttgtatttttaatagagacagggtttcaccatgttgatcaggttggtctccaactcctgacctcaggtgatccacctgtcccagcctcccaaagtgctgggattacagg

SEQ ID NO: 146730 - DNA, 504 bp, Homo sapiens
accagacctttttttttgttgagcattatattataaaagacgtgaatcataacttcaaatgtgtttctgagagttgtagtgtatccactctcaaagtgtcgtttggttttgctttctgtttatgctatttggtttgtgctgatgttatttggtttagcttatgtttattatgtaaaacagctcagcccaacttcttccaaggaggaaggatgctttctgtctacacggagatccatttccctcatgttttaattttgtccgagaagtaagttccatctttgggtctttgatgtttgaggtgtctgaaatatgcacagcctgcagcacacgttagtctcaggttctctgaaacctgcacactttggttgtgcatgacattgtatataccaactatgttttgagaggctttctaagaggaggaataggaataaacataaagaacttccatctcagtgtggagtcattactgctgagtggctggttatgcttgaaaacatcagtgct

SEQ ID NO: 146731 - DNA, 235 bp, Homo sapiens
cctgcctcagcctcccaaagtgctgggattacaggcgtgagacactgtgcccagcctgaagtgccagttttataggggctcgttaataatcgggtgccactggttaccactggacaacctctcaacatgatgtggaatagacccttcgtatgcgtgcctccagccccctttcccagagaacctctcaggactgcctgcttactcctatttaaaggcatcaaagattatcccactc

SEQ ID NO: 146732 - DNA, 758 bp, Homo sapiens
ttgtatttttagtagagatggggtttcactgtgttagccaggatggtctcgatctcctgacctcgtgatccgcctgcctcggcctcccaaagtgcggggattacaggcgtgagccaccgcacccggcctgttcaaatctaatttaatattcagttcatgcttagatttttcctccatgtgggcttctagtcactagccattatacgaactgacctaagaaatctaaaatacagtataattgtggaaatagctattaatatatagtaggtttataactgactctttctttgatcaggagttttttgcattcttcattagctgtctcagtattaggtctatcaatattttggtgggcatttgaaaaaatggattatgtatagctactcacaaccacataaaattgcttcagagaatttaagcaaacctttttagaagattttatggtacaataacttctgtgtagccaggttatcctttgtataaaatcttatctctaaaattctagttgctattctccatacttccatagttttttaatttttagctgtagatacttggacttaatttcagagagtacaaaggaatgctgtacacaaaaggggcaaatctttgtaattttggattttaagaaatttataagagcatgtattttcttacctttttgagacagggtctcactctgttgcccaggctggaatgcagtaatgtaatcatggcctactgcagccttgacctgcacaggctcaggtgatcctccc

SEQ ID NO: 146733 - DNA, 263 bp, Homo sapiens
caactcctcctcccaggttcaatgcaattctcctgcctcagtctcccaagtagctagacactacagttgtgtgccaccaaacctgggtaatttttaggtagttcatagtagagactgggtttcaccgtgttagccagaatggtctctatcttctgactttatgatccacccgactccacctcagcttcgaaaagtattgggattacagtagttagccatcgtgcctgaccttttaaattttggaactttaggtttacctgaaa

SEQ ID NO: 146734 - DNA, 302 bp, Homo sapiens
ggcccgaattaagagaaagaaggaaggcttcagaacgtttacataatgtcttccttggaattctaacaagggccacagaatctaaaggctctctcttcattccttccttccttcctttttttcttttttctttctttcttttctcttcccctctctccttcctcccttcttcctccctccttcttccttccttccttccttcctttctttctttctctttctttctttcttttttctttctttctctctctctccttctttcccttccttccttccttctttctctttctttctctttcttt

SEQ ID NO: 146735 - DNA, 457 bp, Homo sapiens
ggcccgaattaagagaaagaaggaaggcttcagaacgtttacataatgtcttccttggaattctaacaagggccacagaatctaaaggctctctcttcattccttccttccttcctttttttcttttttctttctttcttttctcttcccctctctccttcctcccttcttcctccctccttcttccttccttccttccttcctttctttcaaagaaagagaaagaaggaaggaacaggaagaaggaacagcaagtacttattgcactcttctttgactgtaatataattgaacagatagatgaatagattttaaaggtgttttggagctttaaacctatatgtatgttgtttatgtatattttttatgatgcttcatgaattaaggccatttaatgaaaggagcaccatgtttctgatatctgactattgctactcttttctttactctgggtgat

SEQ ID NO: 146736 - DNA, 219 bp, Homo sapiens
ggcccgaattaagagaaagaaggaaggcttcagaacgtttacataatgtcttccttggaattctaacaagggccacagaatctaaaggctctctcttcattccttccttccttcctttttctttcgctcaataaatgttcactatataaatgaattttgaaacttctctttggcagtaagtagccttttgtttgtgcctccttctttctctaatcgggc

SEQ ID NO: 146737 - DNA, 153 bp, Homo sapiens
cgcatatgccactctgccctgcagcacaaaagcagccatggacaatgtgtcaatgagtgagggtggctatgttccaaatttgggtttcatgtgattttcacatgtcaagaaatattacttatgctctttttttttttggagacggagtcttgc

SEQ ID NO: 146738 - DNA, 377 bp, Homo sapiens
agtgtattcctgagaagctgggagtactttaagtattggcaaatttgataagatttttattgtatattatggagctttatgtttatagggtaaatattcctaaaaaaatcattatttggcttgctaagcaagtcatgtcagaatctgagctggtggcaaaaacgccatgaaaaatgcccttccccacttcatgtgaagaattgtgttatcatggaagaagccctgaatcacatgttagaagacatagattgcattgctgaaatctaaacatgctctatatcaggggttagcagactaaatctggcccactgcctgtttttgtgcagcttatgatctaagagtggcttttacattttgaaatgattgaaaaaataaaa

SEQ ID NO: 146739 - DNA, 328 bp, Homo sapiens
gtggagatctaaatggcctccaggggtcattaggaaccctcactttttttctgcccaaatttcaagaccatccgtgggggatccttaccctacctctccaataggagtcgcaccctaacccagcaagtccccttcgttctggctgtacatttgggctttccctatttgtgaatggattctcctcttcctccaagacccagctgagatctcatctctgcaaagacttctcagttccctcctgttcaccttctttccctcaacactcaaaacccacccctcattgtccagtgcttgataatgaggctacccccttggtttcatgaattgc

SEQ ID NO: 146740 - DNA, 201 bp, Homo sapiens
agtagatactttataaaatctctaacatggtgtgcatagtaggtgcttcatatcaccatcaattatcactaagtttctgggacacaacttaagctacaaaccaaagctatagcaggtctttgaaaccaaaaaaggagactccataggaaaacacactccaccctgaatttcagtgatgccttttgtaggaaaagcttcagt

SEQ ID NO: 146741 - DNA, 507 bp, Homo sapiens
gaggatcacgatgtccgtagttcagcaggctggtccaggctggtcttgaactactgacctcaggtgatctgccctcctcagcctcctaaaatgctgggattacaggcttgagccatcgtgcctggccgagaattctaaaattaaatagtgcatttttttctcaattaaaaaatcttagggggattggaaatacattttaggtccctctcttttgaatttttctgccctcccctcctttctaggccatatcattagcctctggggagttatcccaaacctaagcacttggcattaacaaacctcaagtgtgggagaggtgatgaataaagctgttaagagtaccggggaagaaattaagagaaactagcctgtgatgtcagtaaatcagagcattatcttgctactagcagaggcatctcaggacctttgatccctgtcctctcgaacatagtagatgcactctgatcttgttttattgttattggaatggactcaactcacttgaca

SEQ ID NO: 146742 - DNA, 247 bp, Homo sapiens
tgcaccggcctccatcccgtttccaccttcccaccctccattcccatcccctaggaacaaagtgtggaggttgatcaggtaagtatgtatcgagcactagcatgaagcttcactccactcattggcatgaaggcactcgacatgattatgtcgagtgccttcatgcctagtcccgggagttccctcttcctcagaaagcagccacgtgttacacactttcccgtggatactggctaccaagagaaaa

SEQ ID NO: 146743 - DNA, 576 bp, Homo sapiens
aggggaattggagatatcaacaaaactaattaagtggattgactgtgtcagtagtgagtacagagatgtcagaaaagctagttgtagcaagtatttaaacacagcctcaagttcattttcagtggtgttgccatcatccacaaacttcaaagaaagtttagccagattaatccaggaaaattcattctcctgggaacatcacattctaaattacttattcattgttaatatcttcatttaaaattttgacttgaacttttttattctttacttgtcctttaagatcacacagacccaagatttgataaggttatcatcttttcagatctcagaaaagtgggaaaatgaattcccttttgaccagaataaagggaagaagaatttaaaattataaaccaggtttactttactcatagatggtcatatattcaacattgcctttttttttattttaaaaaactgcccaagtcataaataaatgcattcttgctttaagaaattcagctaaagcaatagactttcttgaccctctatccccaatcctgctcatctccccagaaggagagcccatttctc

SEQ ID NO: 146744 - DNA, 407 bp, Homo sapiens
gagtagctaattcttctctggatctgagggcattagacttaacctgcgctccacggctcatcccttctggccatactaaacagagaagccatgctacaaccccgggagagagtcgtctcctttggagaagaaggaaaattacagttaatctctacattcccacagcctggcatcgtacttggcacgatatggtgggcagtacatgttgccatgactagagcaaactagccccaactctgtagctaagtccttttatgatcctggatgagttgctgaagctgccttttcttcactttatagcgcaagtcacgctgagttaaacgagtgctgcctgtgtgagtttgggccctctgagaaactgctgctgagacaagattaagcacacaaggattttcacagtggaaact

SEQ ID NO: 146745 - DNA, 178 bp, Homo sapiens
ctctttctccttcattagctgtttggttcataaccccgataggctgttccaagccattatcttgccttttaaaattctctttccctttcctcacaactatttcagcaggtgaggttgaagtcttggagtttaccagctatatgcacttctcttgccttacaccttccttttcatacta

SEQ ID NO: 146746 - DNA, 341 bp, Homo sapiens
acactctagctttgggaacagggcctggtgtgcctgagacgctctagctatgggaacgaggcctggtgtccctgaaacgctctagctataggaacatggcctggtatgcctgagacgctctggctatgggaacagggcctggtgtccctgagacgctctggctatgggaacgtggcctggtgtccctgagacactctggctatgggaacatggcctggtgtgcctgagacactctagctttgggaacagggcctggtgtccctgagacgctctagctatgggaatgggacctggtgtgcctgagacactctacctttgggaacagggcctggtgtccctga

SEQ ID NO: 146747 - DNA, 186 bp, Homo sapiens
caataccaagtctgagtgcttattacaggttaggtagtgtgcttaagatgttgacactcattagctcattcacaaccctataaaataggtattgctataatctctctctgctttccctcttcaccttcctctgcttcctcctccgccgccgccggccgctcctgctgctcctcagacatctccagt

SEQ ID NO: 146748 - DNA, 614 bp, Homo sapiens
aggacttcaaaattcatatgaagtcctaacctccagtaccttagaatatgactttacttaggaataggattatttcaaatgtaattagctaaatgtagtaggatgggcccctaatccaatatgactggtattcttatacaaaaaaggaaatttgggccaggtgcggtggctcacacctgtaatcccagcactttggaaggccgaggtgggaggatcacttgaggccaggagtttgaggctagcctgggcaatgataagaaacctcatctctacaaaaatttttaaaaaattaactaggcatggtggtggtcacctgtggtcccagctactcggggcagctgaggtgagaggattgcatgagcccagaaggttgaggctgcagtaagctgtaatcacaccaccacactccggccagggtgtcatagccagaccctgtctcaaaaaaaaaaaaaaaaaaaagaaaagaaaaaaaggccagggtgaaggggagactgggtgggggtgggaatttgaacccaggcatgggcccaagggaattttgacccacatgaacatgaacatgaaaatagagattagggtgatgcttctacaagccaaggaatgccaaagattgc

SEQ ID NO: 146749 - DNA, 179 bp, Homo sapiens
aatggtcacatgtcgccagaagctgccctattggataggacagctctaaagcaccgacttcgggcaggcctgggccctgctgttccctgccccacaagatgcccagccagggcaggagacggtcacaacacacagggtggaagtcactgccagtgggcactgagagccttgaaagccag

SEQ ID NO: 146750 - DNA, 429 bp, Homo sapiens
gtagaactacaattatattaataaatgcttactgtgccccaggcactgggctaagcacttacaatcattagcacatttaattctcaggacagtcttgggggtaggaattcctggaaatgagctccttgtccaaagctatagagttaccaagcggtgggtggagttgggcttcatgccccaagcctgcgttctaaaccacctcactgtgtgtggagttagcagtgtagggactgtccctccaatacaatctgatggagggaccatccagtgatgttgtcttcttcagggtacaggctaggccgctgtcataaagtaacccagataagatgccttcctcaggacgaagctcatctcttacatgcaagtccacgaggacatccaggctgggatggctgctccgtgatcatccaggccccttctccctcattg

SEQ ID NO: 146751 - DNA, 550 bp, Homo sapiens
ccactgctctgtctttgcagttggagagtctgatgccattctgattcttaaatcttttatacaaaacatgtttttgcttttggcaggaagctttaccttttctttctttcaagtgtcctgaaacttcactgagatgtatcatggtataggtccactttgatccactgtcctggacacttgctaggccttttcagtctcgaagctcatgactttcaggtaagagaaatttacgtctaagacctctttttttttttttaaagcatcccttctctcttaactgagttttttcccggcttctcggagatactatcctcgaattctcgggtaatatgtgactctgctcaaacttcaagactagggaactaaagacggacaggtgtttggaattctggggtaggactggttgaccttcattgtagggtgatcaaactgagatccttttggggggaatcccagattccctcagataggagtcttttactaaaaattacagagagtgctggtgcctctatttccttagtgagtctccgtcgaactggggatcctctag

SEQ ID NO: 146752 - DNA, 615 bp, Homo sapiens
tcggtacactacaggcacataataaatgttagaatgaggataagtgaatagatggatggatgaaagaatcactaagcctctggtctgttctcacatttacttcccagaggccttgctctcagaatcgctatgtcatttacaccaaactttaaaaccaaatgaatcctatgattataataatatcaataaagatcaaaatgagacttagatattgttgatggtgatggtaacgataaaaatcaataatcttctcatgagaatgctgtattcttgcctctcagtaacattgttctctatcagttcccaaacattttggtaagaaagctgttttcttgtttttcatgtgtttttccctataaattcagtaagtttctagatgcccaagctccttctcccaaaggtgtcctagagaccaaacctgaactttgaagccaggggccaaaaactttctctataaaaggccagagaataaatattttaggcactgcaggacgcacagtctctgtcgcacccactcatctctgctgaaagcagccatagacagaaaaacaagttcacaatggctgtattccaataaagctatagttgtggacactgaaatctgaatttcatata

SEQ ID NO: 146753 - DNA, 147 bp, Homo sapiens
ggatgcaccactgttctccagcctgggtgacagctgagactccgtctcaaaaaattaaaaaaaaaaaagattattgcaattcattactccatgtggaaggaggagaggtgtctgagaacagatcaaatgaggaacagatgattaaac

SEQ ID NO: 146754 - DNA, 316 bp, Homo sapiens
ttaagaacagcttgtagggggtgaacaaaaatgaaagaaaaaagaaacaccacatgtagtgtaccgactaattgtaagacacatcctgatttcagaataattaaaatttgaacaattgtgtgccttggaattgaggaaatacactatttctacaggtcggggttggcttcctttttcattgctgctgaggaagctgagatgcaggctccaagcaagaagtcaggagactggggtgctgggcaggtgtttgatctcaaaaagaagtcattgaagtagcatgtggtcaagccaagattattctgggaggtaccgatat

SEQ ID NO: 146755 - DNA, 395 bp, Homo sapiens
ttaagaacagcttgtagggggtgaacaaaaatgaaagaaaaaagaaacaccacatgtagtgtaccgactaattgtaagacacatcctgatttcagaataattaaaatttgaacaattgtgtgccttggaattgaggaaatacactatttctacaggtcggggttggcttcctttttcattgctgctgaggaagctgagatgcaggctccaagcaagaagtcaggagactggggtgctgggcaggtgtttgatctcaaaaagaagtcattgaagtagcatgtggtcaagcctgtgccaggttaggaggtgctggggtgaagcttgccctgcctttaccctctagtgtgtggctgtttatcctgtcaagaggtaacgtgtctcctacagcttcccag

SEQ ID NO: 146756 - DNA, 437 bp, Homo sapiens
gagagtggtaatcctaatttgcaagcccatcttgcacagtaggggtgatgtatataaggcagctggtgcagtgtctaagttaaagttgatgctcaagaaaggctagtggctgaatgccattatgagtggaaactgagcaagtgtggcaaggactgggcaaagaacaggacagagcctgggaagccctaagccactgcttctgggtttaaccaatcactttaagggtgccctgtgggttcagcacctcccagtccacatcttacagcttagtgcctactcagccccttctatctgagttccctggtcatgattaaaccacctgcaaatacgtcctgacaaccttctagatgtcaggccaggactgggcactttaggagaggctgatgtaaaagtgccaactctgcatccagggctggccatgggacttgtcatcacca

SEQ ID NO: 146757 - DNA, 436 bp, Homo sapiens
agagaatctgaaccctttgcctgtgtctatcaatacctttctgttaatcacagtccttcttgtgaaaatgatgtcatggactagcctagaaatgtaaccacctataatattttcattttttggaaaatagttcaaaataattgactttcaaatctgaagactgtacacacttacatgacataaaataaaattacactaaattgttcccagttccaactacccagtacaaccagaaagttttatacttattttacatgaaatttgtttcaaaaaattgtgtctgtttaggcaaatatggtatttccaacaaggtagaaacaaaaagcatctattgtaccatgcaacattatatttgtgttttttacttcaaaaatcaaaactactataagaaatcatcccatatttattcttattttttatattaaaaggaaagatc

SEQ ID NO: 146758 - DNA, 411 bp, Homo sapiens
ccccaagacagcctctgcagggggtgatgcacacccacccatctgtctccccatgcctctgctcccaggactgacctcggcctcctctactggacctcggccagcctctcccatggtggtggcttctcactatttgaccacaacttcctacttttccagccctctcaaactcccacaaaatcagaactattctttgaccgcattgctacttcccgtccccggcctcctccattctcttctcactcctccggcctgccggcctcccttcactccctctgccattggacccacagcttggcctcttcaaccaccctctcattgagaccttaaccacctcgactcctgtccttccatggcacctgccctaatcctcaaccctgagtctgagaaaagcctccattccctgtatcc

SEQ ID NO: 146759 - DNA, 345 bp, Homo sapiens
tattctgaattaagaaatcaatttggagagatgtcatcttgcttcctcaccagccttcctgggtgctctccaggaccgtagtatgaacatacatgcaggtcatcttctatgtccatcagcaaagtttaatatttattttttatttttatttttttgagacaagagtttcattcttgtcgcccaggctggagtgcagtggtgcgatctcggctcactgcaacctctgcctcctgggttcaagcaattctcctgcctcagcctccctagtggctgggactacaggtgcctgccaccacgcccgggtaacttttttgtaattttagtagagatgggtttcaccatatt

SEQ ID NO: 146760 - DNA, 224 bp, Homo sapiens
cttattgaaagattctgtttagcacccctcctttgataccacactggtgggtccaggttccccattcagctgttgacacctgcagggcagagaggtgggatggggtgaagggggtacctcattattgctggcccaggttagaagttcaggcttcccagtagatctctgctgataccaccctggtgccatgtcattccttgagtccaaaagtccctcccaattct

SEQ ID NO: 146761 - DNA, 220 bp, Homo sapiens
ctttgtaaagagactgccatagaaggaggattattatggcaagcatctataccagctcatccctattttttagtttttgttgaagataggataagaaaaaaaagagaagcaaatgcagcaagcaggaattaggttagacatcagaaattttctgataggctgagttgagtgattagaataggttatgaagggaggctgtgcaaattcctatcacgttatt

SEQ ID NO: 146762 - DNA, 149 bp, Homo sapiens
gccaaacatctcctggaggtcaaagttgccctgactcagaaccactgcttcaagctgttcctacaagaagaatattacttatttgttaagattctggccacaatctatgtcagtggaacagaaaccaaaaaaactaacaaacatgaggt

SEQ ID NO: 146763 - DNA, 511 bp, Homo sapiens
tgtggcagccctaaccccttactgggaaggaagggaattccaggcccagaccagatctcactgccctggagtgaggattcctaggttggagctttcatttccccttaattgcaacatgatcctgagccaggtactgtgcttttctgggcctcagtttcttcatctgagatgtggcaggggttggagagatgatcttcaaagagccctcaccatggatgactttgcccctagaaggaaggggggtcagtggttcccttccttgagtcggggcctggggcagcaaggagattccgcttatctcagatccctgggatcagagagagctggaccagcctcttatctggaagcccggggctcccacaagcaagtcacccaagcagttgatcacaagtctccccacaagaaaggggacgagacatggggggaatggaggagggagccttgtccagctgtggaacctaccaaagaccccagactccaagaagttaaacctccaggtctacaggcaggg

SEQ ID NO: 146764 - DNA, 502 bp, Homo sapiens
ccccgccagccggtaggaagtttcccctgagttctcagttttttcttctgaaaaatgaggggttgtatgcaaggttctcctcctggcctgtggtccccagagaagggcaggaaggaaccttagataattctcatatgcatttaacagacgaggaaactgagacccagagccgtcacatcaatacctcatttgatcttcataagagcacctggaggaggggggtggggtgtttgtgtttgtttaaatttttttttgtgaaaaaaatgaagataggcattttgtagacaatctggaagttctggaccggaatccatgatgtagtcagggaagaaatgacccgtgtccagtaaccccaggcctcgagtgtgtggtgtatttttctacataattgtaatcattctatacatacaaattcatgtcttgaccatcatattaatatttggtaagtttctctctctttagagactccacaataaagttttcaacatggtaaggttttcca

SEQ ID NO: 146765 - DNA, 651 bp, Homo sapiens
gaaggtagaaggccacagactttcagatgtagatgtggagatcatttagtcccgacccatcactaacatgaggagactgagactgatgtggtaattaagggaagaggctaaagtaatatttcattcacagccatgaccaagatgctgttcagattaacctgaataatctgatgtttgattctttaaaaatattactggtaccaggctggtcgtggtggttcacgcctgtaatccttgcactttgtgaggccgaggtgggcggatcatgaggtcaagagattgagaccatcctggcaacatggtgaaaccccatctctactaaaaaaaaaaagtacaaaaattagctgggtgtggtggcacgtgcctgtagtcccagctacttgggaggctgaggcaggagaatcgcttgaactcggaaggtggaggttgcagtgagccaagaacatgacactgtactctagcctggtgacagagcgagactccatctcaaaaacaaaaaaattactggtacctggctgggtacggtggcttatgcctgtaatcccagtacttggggaggctgaggcaggtggataacctgaggtcaggagttcgagaccagcctaaccaatatggtgaaaccctgtctctactaaaaaaaaaaaaaaaaaa

SEQ ID NO: 146766 - DNA, 365 bp, Homo sapiens
tgccccgcggctaaggccttcggagaccatagtctccgcggacccctggctggagcccaaagccggccggacctcctccctgcgtctccccttccgcggctcggagaggaaggcaggagagcccccaaatattcccctcccgccccctagggaaactgaagctgaaagagccagcgaaagaaaaaaaaagtctcggagtggggcggcccgagcgacctaagggacggggcagcgccagcgaccgagggaaattagtcggggtgggggaacagggagacaagcccccagaatttaggaaactcctaaattctactaaaaatacaaaaattacctgggcatggtggcgggtgcctgtaatcctagct

SEQ ID NO: 146767 - DNA, 573 bp, Homo sapiens
tgcagtttgaaaaacactgcaataaatattggtaggaggtagaagttttacccttagcccaggctgccagtcctggcttccttccctttgcctctcagctgtgccctgagcctgcttgtgactaagccagacccaggccagctcagctctagctggacagaggagccaccatgtagctgagagcccttttgtagcgcgccgagagctcagccttctctgtgtctctcaggctttccctgcaggagtcatcaggcagcaatgatgtggattctgtctctactgcaaccctcagcccagctatgagaaaggcattcttcccattgctcagatgagaagcctgaggccgatcagggtgaagtgactatggcataaggacaaacaggactggtccgcctgtgaaattcagaatgtgaattaggcaggaaaattggctctctagaaaatactgtggaagtgctgaataggattgataggtggctgtggaaaagaaagtgctagagacacagaaaaccgatacaaaaatgggcagggcggccaggcgcggtggctcacgcctgttatcccagcactttg

SEQ ID NO: 146768 - DNA, 325 bp, Homo sapiens
cagctcactcctctcccccagatttgccaagtcaccaaatgcataaagcatatttctccctcattcacacagggagaggggttgggacgctaggtggaagaccaccaatcaaacacgctaagagtgtgaccttctagcacctccctgacgactttacattggtagttgaaagcctccattggtgaaaactcacctaaaaggaggtttttccatcaagccgtcttgaagccctgcattgacggagctacaacccacaattttatacacaatctagtgggattttgacttcaaagtaaggatcagggtgtctttaaagttttctggg

SEQ ID NO: 146769 - DNA, 98 bp, Homo sapiens
aaggttttctgacttcaaatctaacattatatctattatatcagattacttctcatatggtttgtaattaactttaaaggaaaaaaaaaaggacacag

SEQ ID NO: 146770 - DNA, 107 bp, Homo sapiens
gttttacattgaagatctatgatctattttgaattacacgccaaggggcttttaaaaaaaatctagaaccatttgtttaaaagataacaaaaacaaagtcgacattt

SEQ ID NO: 146771 - DNA, 751 bp, Homo sapiens
ggcaatgatgacacccaaaagagcaagaagcaccaagacagaaatacagactccagcacagattcctttagtggtgttgaccatctgtggactatatgctggggacagttgagtttgattgttattccaaaggccatctgaagactctgtcatggtgtcattcccatctgttgtgaaagagtgcaatggtgagctggtgggttgtgtccttatttctccctgaagtgtcatagggtgggtttctgctggctgaggtgaagatggtgaagtggctactgattgatggttctgcgtgggcaatggcgttggaggaacaaaggtagagaccattgttgtcattggaacacttgttttcattgaaatgctcgttgttgttggaacagtctttgtcgttggaacagttgttgtcgttggaacgcttgttgtcattggaacagtgatgctcgttcaaacagtagtggcggttggaacagttgtgacaattggtgtagtcgtgaccctgggtggcacaatctccaatgatagagtgattttcatgtcattgaaccacccactgtgctcaacatggcaacaatataagccactgtcagacacagctgtattttctatagtcaaagggacatcccttcttgaaaggtcccccaataccttatagtgtgtgtccttccgataggtgacgtgggttccattggtccagacaatgctatttcagcatgtgaataaagaacgtgcgcctctattccagcacatg

SEQ ID NO: 146772 - DNA, 264 bp, Homo sapiens
cacggcacctttgctggccatttctttttaaacgcttgtctctctgaaagctttctcaagttatcctaccgttggagcattccctcctacactggtcatgggtccctccctccaatcccaatagaaggctcacagcagacacagaatgcaaggtgatctgtggatcttacaaaatagtgagaaaaatcatcggtaaataggcaagcgaataagtcagcgtgtaattgtaaattgtgaattgtatcccaagacaagaatcacttt

SEQ ID NO: 146773 - DNA, 691 bp, Homo sapiens
tgtcattgggaatatgccataataaacccttagttatttttgtaattgttgtattaatgtaaagtagctagaacatggcaaactgtagatcagacactagtctcatttcctgaaaaagcaagattaacaatgagcattatattatagcaaagagtattcatgctgttgacaggtattgggctgcattgttaccccaattaagttctctgaaaacactttaaataggatttgacctctggggaaaaaaggaatcaaacaacatgttttggcaaagataacagaatcagttgcctagtctcccaaaatttagtgctgtgctctgcgtggtctttactaagattaagatagtattggattacagaactccctaagagcaggcataaaacaaggatgtccattctcaccgcttctattcattattgtactagagcgcctagccagtacattcaggcaagaaaaataaaaggtttacagattggcaagaaataatactgtctttatttgcagagtatatgatcatctatgtaaaaagccccatagaatctaggaaaaggcaactagaatagtgagttcagcaggggagtaaagtacaagttctatatatgtaatcaatagtatttctaaatgccagcaaaaagctattagaaacatttttttaaaaatactatttactgttatatcaaaaaacaaa

SEQ ID NO: 146774 - DNA, 952 bp, Homo sapiens
ctagacacattcaccctgtcagcgcgtgcagagcagctgtgatggctgcatcgtgttgctggaagcaggccagtgttaccatgttcctgggcgtgcagctgctgagcaggcagcatggaggccgccctggctgcaggggacccttagcctgaggatcctgccccaagttgctgatgccaacagccagcccttgccagatgtcttatgtctgactcttgggtgtttaggcagcataacagtgaaattgataataactatggatatcaattttgagtgtgtaattttaaccagagcaaacctttattgatctcttactctgttctcaggccttctcatgcatcttacttaattctctcagttccccaggaggcagggactaacattatcttctgtgtagaccagtggggagcaactctgtgtgtgtgagtgtatgtgtgtgtgtgtgtgtgtgtgtgtgtgtaggtcattcaggacaagttaaaacacttatgggtgtgtgtgtaggccattcaggacaagttaaaacacttatgggatgtgtttttcactttcagggtgaatacatttttattgacttcttttagggggataaaagtggtattcttgcagatagctgctttctgagtagaatactaatgagacagcataccctgctttgtaggtgtttatacgcaactatctagacattttagagaaccagccaaatggaagcagcttctgatgtctttcacaatggaactagaccatggctatttttcagaggtaggagggcttctgattgtcgtgggatggcacagacattgacaacggggaatgtgaggcttaacctcagtgactgtcctctatacgcttttaacaattctagaataaatcagttcggaaaagatttgcatctctatcaaaatccgggggatgacattgcaccaactggatcagactgggggagaaaggt

SEQ ID NO: 146775 - DNA, 922 bp, Homo sapiens
  misc_feature (892)..(892): n is a, c, g, or t
ctagacacattcaccctgtcagcgcgtgcagagcagctgtgatggctgcatcgtgttgctggaagcaggccagtgttaccatgttcctgggcgtgcagctgctgagcaggcagcatggaggccgccctggctgcaggggacccttagcctgaggatcctgccccaagttgctgatgccaacagccagcccttgccagatgtcttatgtctgactcttgggtgtttaggcagcataacagtgaaattgataataactatggatatcaattttgagtgtgtaattttaaccagagcaaacctttattgatctcttactctgttctcaggccttctcatgcatcttacttaattctctcagttccccaggaggcagggactaacattatcttctgtgtagaccagtggggagcaactctgtgtgtgtgagtgtatgtgtgtgtgtgtgtgtgtgtgtgtgtgtaggtcattcaggacaagttaaaacacttatgggtgtgtgtgtaggccattcaggacaagttaaaacacttatgggatgtgtttttcactttcagggtgaatacatttttattgacttcttttagggggataaaagtggtattcttgcagatagctgctttctgagtagaatactaatgagacagcataccctgctttgtaggtgtttatacgcaactatctagacattttagagaaccagccaaatggaagcagcttctgatgtctttcacaatggaactagaccatggctatttttcagaggtaggagggcttctgattgtcgtgggatggcacagacattgacaacggggaatgtgaggcttaacctcagtgactgtcctctatacgcttttaacaattctagaataaatcagatgtcggccgaaattgntcttttcttttttcttttgaaacaacgtta

SEQ ID NO: 146776 - DNA, 872 bp, Homo sapiens
  misc_feature (842)..(842): n is a, c, g, or t
ctagacacattcaccctgtcagcgcgtgcagagcagctgtgatggctgcatcgtgttgctggaagcaggccagtgttaccatgttcctgggcgtgcagctgctgagcaggcagcatggaggccgccctggctgcaggggacccttagcctgaggatcctgccccaagttgctgatgccaacagccagcccttgccagatgtcttatgtctgactcttgggtgtttaggcagcataacagtgaaattgataataactatggatatcaattttgagtgtgtaattttaaccagagcaaacctttattgatctcttactctgttctcaggccttctcatgcatcttacttaattctctcagttccccaggaggcagggactaacattatcttctgtgtagaccagtggggagcaactctgtgtgtgtgagtgtatgtgtgtgtgtgtgtgtgtgtaggccattcaggacaagttaaaacacttatgggatgtgtttttcactttcagggtgaatacatttttattgacttcttttagggggataaaagtggtattcttgcagatagctgctttctgagtagaatactaatgagacagcataccctgctttgtaggtgtttatacgcaactatctagacattttagagaaccagccaaatggaagcagcttctgatgtctttcacaatggaactagaccatggctatttttcagaggtaggagggcttctgattgtcgtgggatggcacagacattgacaacggggaatgtgaggcttaacctcagtgactgtcctctatacgcttttaacaattctagaataaatcagatgtcggccgaaattgntcttttcttttttcttttgaaacaacgtta

SEQ ID NO: 146777 - DNA, 311 bp, Homo sapiens
gcgtttgttcctgaatctgcccttcaccttccacctaagctcctctctttcctctggtcttttcactgtctctaaattttctccagttcttccttcctgatttcccatcttctgcccctcatccatgcgttcattattgcaaggcatatttacctgtggcctgctgtgtgcccggcactgttctgagcactggggatatggcagagaaggaaacagacagaagtcccagccctcgtggaggttatgctcaagtgtgcagagacagaagataacagacatgtatgtagtgtgttaggcgtggtgagtgcttt

SEQ ID NO: 146778 - DNA, 483 bp, Homo sapiens
caatgatgtagtgttttgttgttggttatcacttttaacagctttcttagtggaccactgtgctcagtaatgtgggatgacttgtaagaagtgacttagtcttattgggggaagaggaaaacaaacgtgattgatttggcaaatgaggattaagcatcctgaggtcaaatactacacaggttgccaaccagcccctattaaacgttgaatgttccatataccataacagctctgaacttaacagaggtgggagaattcacttgtgatcataatgatagttttggataggagtagttttgagtagaactaagaacagtttagataggtagagaagagggggtaaaaacacaggtaagtagagaagtcaggaatagtgattgttttggagcataattattatgtaggagaatagtgaaaactcacagcctaccacttcagaaatgagacttttgtccatgtagtttaatgtctcataaattcttt

SEQ ID NO: 146779 - DNA, 439 bp, Homo sapiens
tatatttatactaagtaggaactttggggtgggttttcccccccaatcaaaagcactattttttcaaagtcctcgtatacatgtaatttttttttcccccttttagttacatgaagaaacctctaggtccaccacctccatcttacacgtgtttccgttgtggtaaacctggacattatattaagaattgcccaacaaatggggtaagttcaaagcagaaactatggtatatcttactttttttcctttggaattgttccttagctatcttatttttcttgggtaatactgccttctgtagacaatggcaaatgagcatggtctctggagccaaatttgccaggcttcaaatcttggttctggcacttggctgagtttgggcaagttacttgatctctataagcctgttttttcttctctaaaatggagataaaatagt

SEQ ID NO: 146780 - DNA, 519 bp, Homo sapiens
tctcccttatattcaaactagatttttattatctaattgaaaaaagaaaaagaaaaactgaagaaaaaggcgtagataaagattttgagtcttcttcaatgaaaatctcgaaactagaagtgactgaaatagtgaaaccatcaccaaagcgcaaaatggaacctgatactgaaaaaatggataggacccctgaaaaggacaaaatttctttaagtgcgccagccaaaaaaatcaaactcaacagagaaactgggaagaaaattggaagtacagaaaatatatcaagaaaaagtcgatggagaacgtgagagatctcctcgatctgaacctccaattaaaaaagccaacgaggagactccgaagactgacaatactaaatcatcatcttcctctcagaaggatgaaaaaatcactggaacccccagaaaagctcattctagatcagcaaaagagcaccaggaaacaacaccagtctaggaaggaaaaggtgaagaaggcttttccaaagatgtcaaatca

SEQ ID NO: 146781 - DNA, 4735 bp, Homo sapiens
cccacgcgtccgcggacgcgtgggtccgaaaacagttacctcctccaccacccccaataccacctccgagaccactgattcagaggaacctacaacctctgatgagatctccgatatcaagacaacaagatcctcttatgattccagtgacatcttcatcaactcacccagctccgtctatatcttcattaacttctaatcagtcttccttggcccctcctgtgtctggaaatccgtcttctgctccagctcctgtacctgatataactgcaacagtatccatatcagttcattcagaaaaatcagatggaccttttcgggattctgataataaaatattgccagctgcagctcttgcatcagagcactcaaagggaacctcctcaattgcaattaccgctcttatggaagagaagggttaccaggtgcctgttcttggaaccccatctttgcttggacagtcattattgcatggacagttgatccccacaactggtccagtaagaataaatactgctcgtccaggtggtggtcgaccaggctgggaacattccaacaaacttggctatctggtttctccaccacaacaaattagaagaggggagaggagctgctacagaagtataaaccgtgggcgacaccacagcgaaagatcacagaggactcaaggcccgtcactaccagcaactccagtctttgtacctgttccaccacctcctttgtatccgcctcctccccatacacttcctctccctccgggtgttcctcctccacagttttctcctcagtttcctcctggccagccaccacccgctgggtatagtgtccctcctccagggtttcctccagctcctgccaatttatcaacaccttgggtatcatcaggagtgcagacagctcattcaaataccatcccaacaacacaagcaccacctttgtccagggaagaattctatagagagcagcgacgactaaaagaagagtctaaatctccctatagtggttcttcgtattcaagaagttcatatacttattctaaatcaagatctggttcaacacgttcacgctcttattctcgatcattcagccgctcacattctcgttcctattcacggtcacctccataccccagaagaggcagaggcaagagccgcaattaccgttcacggtctagatctcatggatatcatcgatctaggtcaaggtcacccccttacagacgctatcattcacgatcaagatctcctcaagcgtttaggggacagtctcctaataaacgtaatgtacctcaaggggaaacagaacgtgaatattttaatagatacagagaagttccaccaccatatgacatgaaagcatattatgggagaagtgttgactttagagacccatttgaaaaagaacgctaccgagaatgggagagaaaatatagagagtggtatgaaaaatattataaaggttatgctgctggagcacagcctagaccctcagcaaatagagagaacttttctccagagagatttttgccacttaacatcaggaattctcccttcacaagaggccgcagagaagactatgttggtgggcaaagtcatagaagtcgaaacataggtagcaactatccagaaaagctttcagcaagagatggtcacaatcagaaggataatacaaagtcaaaagagaaggagagtgaaaacgctccaggagatggtaaaggaaataagcataagaaacacagaaaaagaagaaaaggggaggaaagtgagggttttctgaacccagagttattagagacttctaggaaatcaagagaacctacaggtgttgaagaaaataaaacagactcattgtttgttctcccaagtagagatgatgccacacctgttagagatgaaccaatggatgcagaatcaatcacttttaaatcagtgtctgaaaaagacaagagagaaagggataaaccaaaagcaaagggtgataaaaccaaacggaagaatgatggatctgctgtgtccaaaaaagaaaatattgtaaaacctgctaaaggaccccaagaaaaagtagatggagaacgtgagagatctcctcgatctgaacctccaattaaaaaagccaaagaggagactccgaagactgacaatactaaatcatcatcttcctctcagaaggatgaaaaaatcactggaacccccagaaaagctcactctaaatcagcaaaagaacaccaagaaacaaaaccagtcaaagaggaaaaagtgaagaaggactattccaaagatgtcaaatcagaaaagctaacaactaaggaagaaaaggccaagaagcctaatgagaaaaacaaaccacttgataataagggagaaaaaagaaaaagaaaaactgaagaaaaaggcgtagataaagattttgagtcttcttcaatgaaaatctcgaaactagaagtgactgaaatagtgaaaccatcaccaaagcgcaaaatggaacctgatactgaaaaaatggataggacccctgaaaaggacaaaatttctttaagtgcgccagccaaaaaaatcaaactcaacagagaaactgggaagaaaattggaagtacagaaaatatatcaaacacaaaagaaccctctgaaaaattggagtcaacatctagcaaagttaaacaagaaaaagtcaaaggaaaggtcagacgaaaagtgactggaactgaaggatccagctcaactctggtggattacaccagtacgagctcaactggaggcagtcctgtgcggaaatctgaagaaaaaacagatacaaagcgaactgtgattaaaacgatggaagaatataataatgacaataccgcgccagctgaagatgttatcattatgattcaggttcctcaatccaaatgggataaagatgactttgaatctgaagaagaagatgttaaatccacacagcctatatcaagtgtaggaaaacctgctagtgttataaaaaatgttagtacaaagccatcaaatatagtcaagtatcctgagaaagaaagtgagccatccgagaaaattcagaaattcaccaaggacgtgagccatgaaatcatacaacatgaggttaaaagttcaaaaaactctgcatctagtgaaaaagggaaaaccaaagatcgagattattcagtgttggaaaaggagaaccctgaaaagaggaagaacagcactcagccagagaaagagagtaatttggaccgtctgaatgaacaaggaaattttaaaagtctgtctcaatcttccaaagaggctagaacgtcagataaacatgattccactcgtgcttcctcaaataaagacttcactcccaatagagacaaaaaaactgactatgacaccagagagtattcaagttccaaacgtagagatgaaaagaatgaattaacaagacgaaaagactctccttctcggaataaagattctgcatctggacagaaaaataaaccaagggaagagagagatttgcctaaaaaaggaacaggagattccaaaaaaagtaattctagtccctcaagagacagaaaacctcatgatcacaaagccacttatgatactaaacggccaaatgaagagacaaaatctgtagataaaaatccttgtaaggatcgtgagaagcatgtattagaagcaaggaacaataaagagtcaagtggcaataaactactttatatacttaacccaccagagacacaggttgaaaaagagcaaattactgggcaaattgacaagagtactgtcaagcctaaaccccagttaagtcattcctctagactttcctctgacttaactagagaaactgatgaagctgcttttgaaccagactataatgaaagtgacagtgaaagtaatgtttctgtaaaagaagaggaatcttcaggaaacatttctaaggacctgaaagataaaatagtggagaaagcgaaagagagcctggacacagcagcagttgtccaggtgggcataagcaggaatcagagccacagcagccccagcgtcagccccagcagaagccacagtccttctggaagccagacccgaagccacagtagcagtgccagctcagcagaaagtcaggacagcaagaagaagaagaaaaagaaggaaaagaaaaaacacaagaaacataaaaagcataagaagcataagaaacatgcaggcactgaagtggaattggaaaaaagccaaaaacacaaacacaagaaaaagaagtcaaagaagaacaaagataaagagaaggagaaggagaaagatgaccaaaaagtgaaatctgtcactgtgtaaaaagacagattttttaaattgacttaattactaagtcatctgtattaaattttgttataatgtaaagagattcaagccttgtaaataatgacatggaagaccctgtgctgcacttaaaatattgctgcttgattatttgatttttacatcagagctttataacacgaacttttgtacagaattgtgagttgtgaccatgtaacatgagaggttttgctagggcctattatttttaaccaccattaattagttggggtggagtttactgtaatgtgaaattttcacatttgaattttttaattgcctggcaaaagctgatataagttctaaaatatcagcagaatgatttgctgaattcattacaaccctgttatgtcactttttgattacaataaaagttttcagtaaacttttcaaaaaaaaaaaat

SEQ ID NO: 146782 - DNA, 3079 bp, Homo sapiens
  misc_feature (50)..(50): n is a, c, g, or t
  misc_feature (70)..(70): n is a, c, g, or t
catttgggaaagtctgctatgtagctaaggtcactgtgaccacagaacancagatgaaaaggaaaaagcnctgaacagcaagaaaaagaagaaaaggggaggaaagtgagggttttctgaacccagagttattagagacttctaggaaatcaagagaacctacaggtgttgaagaaaataaaacagactcattgtttgttctcccaagtagagatgatgccacacctgttagagatgaaccaatggatgcagaatcaatcacttttaaatcagtgtctgaaaaagacaagagagaaagggataaaccaaaagcaaagggtgataaaaccaaacggaagaatgatggatctgctgtgtccaaaaaagaaaatattgtaaaacctgctaaaggaccccaagaaaaagtagatggagaacgtgagagatctcctcgatctgaacctccaattaaaaaagccaaagaggagactccgaagactgacaatactaaatcatcatcttcctctcagaaggatgaaaaaatcactggaacccccagaaaagctcactctaaatcagcaaaagaacaccaagaaacaaaaccagtcaaagaggaaaaagtgaagaaggactattccaaagatgtcaaatcagaaaagctaacaactaaggaagaaaaggccaagaagcctaatgagaaaaacaaaccacttgataataagggagaaaaaagaaaaagaaaaactgaagaaaaaggcgtagataaagattttgagtcttcttcaatgaaaatctcgaaactagaagtgactgaaatagtgaaaccatcaccaaagcgcaaaatggaacctgatactgaaaaaatggataggacccctgaaaaggacaaaatttctttaagtgcgccagccaaaaaaatcaaactcaacagagaaactgggaagaaaattggaagtacagaaaatatatcaaacacaaaagaaccctctgaaaaattggagtcaacatctagcaaagttaaacaagaaaaagtcaaaggaaaggtcagacgaaaagtgactggaactgaaggatccagctcaactctggtggattacaccagtacgagctcaactggaggcagtcctgtgcggaaatctgaagaaaaaacagatacaaagcgaactgtgattaaaacgatggaagaatataataatgacaataccgcgccagctgaagatgttatcattatgattcaggttcctcaatccaaatgggataaagatgactttgaatctgaagaagaagatgttaaatccacacagcctatatcaagtgtaggaaaacctgctagtgttataaaaaatgttagtacaaagccatcaaatatagtcaagtatcctgagaaagaaagtgagccatccgagaaaattcagaaattcaccaaggacgtgagccatgaaatcatacaacatgaggttaaaagttcaaaaaactctgcatctagtgaaaaagggaaaaccaaagatcgagattattcagtgttggaaaaggagaaccctgaaaagaggaagaacagcactcagccagagaaagagagtaatttggaccgtctgaatgaacaaggaaattttaaaagtctgtctcaatcttccaaagaggctagaacgtcagataaacatgattccactcgtgcttcctcaaataaagacttcactcccaatagagacaaaaaaactgactatgacaccagagagtattcaagttccaaacgtagagatgaaaagaatgaattaacaagacgaaaagactctccttctcggaataaagattctgcatctggacagaaaaataaaccaagggaagagagagatttgcctaaaaaaggaacaggagattccaaaaaaagtaattctagtccctcaagagacagaaaacctcatgatcacaaagccacttatgatactaaacggccaaatgaagagacaaaatctgtagataaaaatccttgtaaggatcgtgagaagcatgtattagaagcaaggaacaataaagagtcaagtggcaataaactactttatatacttaacccaccagagacacaggttgaaaaagagcaaattactgggcaaattgacaagagtactgtcaagcctaaaccccagttaagtcattcctctagactttcctctgacttaactagagaaactgatgaagctgcttttgaaccagactataatgaaagtgacagtgaaagtaatgtttctgtaaaagaagaggaatcttcaggaaacatttctaaggacctgaaagataaaatagtggagaaagcgaaagagagcctggacacagcagcagttgtccaggtgggcataagcaggaatcagagccacagcagccccagcgtcagccccagcagaagccacagtccttctggaagccagacccgaagccacagtagcagtgccagctcagcagaaagtcaggacagcaagaagaagaagaaaaagaaggaaaagaaaaaacacaagaaacataaaaagcataagaagcataagaaacatgcaggcactgaagtggaattggaaaaaagccaaaaacacaaacacaagaaaaagaagtcaaagaagaacaaagataaagagaaggagaaggagaaagatgaccaaaaagtgaaatctgtcactgtgtaaaaagacagattttttaaattgacttaattactaagtcatctgtattaaattttgttataatgtaaagagattcaagccttgtaaataatgacatggaagaccctgtgctgcacttaaaatattgctgcttgattatttgatttttacatcagagctttataacacgaacttttgtacagaattgtgagttgtgaccatgtaacatgagaggttttgctagggcctattatttttaaccaccattaattagttggggtggagtttactgtaatgtgaaattttcacatttgaattttttaattgcctggcaaaagctgatataagttctaaaatatcagcagaatgatttgctgaattcattacaaccctgttatgtcactttttgattacaataaaagttttcagtaaacttttcaaaaaaaaaaaat

SEQ ID NO: 146783 - DNA, 2690 bp, Homo sapiens
tgaaatagtgaaaccatcaccaaagcgcaaaatggaacctgatactgaaaaaatggataggacccctgaaaaggacaaaatttctttaagtgcgccagccaaaaaaatcaaactcaacagagaaactgggaagaaaattggaagtacagaaaagctcactctaaatcagcaaaagaacaccaagaaacaaaaccagtcaaagaggaaaaagtgaagaaggactattccaaagatgtcaaatcagaaaagctaacaactaaggaagaaaaggccaagaagcctaatgagaaaaacaaaccacttgataataagggagaaaaaagaaaaagaaaaactgaagaaaaaggcgtagataaagattttgagtcttcttcaatgaaaatctcgaaactagaagtgactgaaatagtgaaaccatcaccaaagcgcaaaatggaacctgatactgaaaaaatggataggacccctgaaaaggacaaaatttctttaagtgcgccagccaaaaaaatcaaactcaacagagaaactgggaagaaaattggaagtacagaaaatatatcaaacacaaaagaaccctctgaaaaattggagtcaacatctagcaaagttaaacaagaaaaagtcaaaggaaaggtcagacgaaaagtgactggaactgaaggatccagctcaactctggtggattacaccagtacgagctcaactggaggcagtcctgtgcggaaatctgaagaaaaaacagatacaaagcgaactgtgattaaaacgatggaagaatataataatgacaataccgcgccagctgaagatgttatcattatgattcaggttcctcaatccaaatgggataaagatgactttgaatctgaagaagaagatgttaaatccacacagcctatatcaagtgtaggaaaacctgctagtgttataaaaaatgttagtacaaagccatcaaatatagtcaagtatcctgagaaagaaagtgagccatccgagaaaattcagaaattcaccaaggacgtgagccatgaaatcatacaacatgaggttaaaagttcaaaaaactctgcatctagtgaaaaagggaaaaccaaagatcgagattattcagtgttggaaaaggagaaccctgaaaagaggaagaacagcactcagccagagaaagagagtaatttggaccgtctgaatgaacaaggaaattttaaaagtctgtctcaatcttccaaagaggctagaacgtcagataaacatgattccactcgtgcttcctcaaataaagacttcactcccaatagagacaaaaaaactgactatgacaccagagagtattcaagttccaaacgtagagatgaaaagaatgaattaacaagacgaaaagactctccttctcggaataaagattctgcatctggacagaaaaataaaccaagggaagagagagatttgcctaaaaaaggaacaggagattccaaaaaaagtaattctagtccctcaagagacagaaaacctcatgatcacaaagccacttatgatactaaacggccaaatgaagagacaaaatctgtagataaaaatccttgtaaggatcgtgagaagcatgtattagaagcaaggaacaataaagagtcaagtggcaataaactactttatatacttaacccaccagagacacaggttgaaaaagagcaaattactgggcaaattgacaagagtactgtcaagcctaaaccccagttaagtcattcctctagactttcctctgacttaactagagaaactgatgaagctgcttttgaaccagactataatgaaagtgacagtgaaagtaatgtttctgtaaaagaagaggaatcttcaggaaacatttctaaggacctgaaagataaaatagtggagaaagcgaaagagagcctggacacagcagcagttgtccaggtgggcataagcaggaatcagagccacagcagccccagcgtcagccccagcagaagccacagtccttctggaagccagacccgaagccacagtagcagtgccagctcagcagaaagtcaggacagcaagaagaagaagaaaaagaaggaaaagaaaaaacacaagaaacataaaaagcataagaagcataagaaacatgcaggcactgaagtggaattggaaaaaagccaaaaacacaaacacaagaaaaagaagtcaaagaagaacaaagataaagagaaggagaaggagaaagatgaccaaaaagtgaaatctgtcactgtgtaaaaagacagattttttaaattgacttaattactaagtcatctgtattaaattttgttataatgtaaagagattcaagccttgtaaataatgacatggaagaccctgtgctgcacttaaaatattgctgcttgattatttgatttttacatcagagctttataacacgaacttttgtacagaattgtgagttgtgaccatgtaacatgagaggttttgctagggcctattatttttaaccaccattaattagttggggtggagtttactgtaatgtgaaattttcacatttgaattttttaattgcctggcaaaagctgatataagttctaaaatatcagcagaatgatttgctgaattcattacaaccctgttatgtcactttttgattacaataaaagttttcagtaaacttttcaaaaaaaaaaaat

SEQ ID NO: 146784 - DNA, 1092 bp, Homo sapiens
agctcggtacccggtgtttccctttgtctcaagtggcaataaactactttatatacttaacccaccagagacacaggttgaaaaagagcaaattactgggcaaattgacaagagtactgtcaagcctaaaccccagttaagtcattcctctagactttcctctgacttaactagagaaactgatgaagctgcttttgaaccagactataatgaaagtgacagtgaaagtaatgtttctgtaaaagaagaggaatcttcaggaaacatttctaaggacctgaaagataaaatagtggagaaagcgaaagagagcctggacacagcagcagttgtccaggtgggcataagcaggaatcagagccacagcagccccagcgtcagccccagcagaagccacagtccttctggaagccagacccgaagccacagtagcagtgccagctcagcagaaagtcaggacagcaagaagaagaagaaaaagaaggaaaagaaaaaacacaagaaacataaaaagcataagaagcataagaaacatgcaggcactgaagtggaattggaaaaaagccaaaaacacaaacacaagaaaaagaagtcaaagaagaacaaagataaagagaaggagaaggagaaagatgaccaaaaagtgaaatctgtcactgtgtaaaaagacagattttttaaattgacttaattactaagtcatctgtattaaattttgttataatgtaaagagattcaagccttgtaaataatgacatggaagaccctgtgctgcacttaaaatattgctgcttgattatttgatttttacatcagagctttataacacgaacttttgtacagaattgtgagttgtgaccatgtaacatgagaggttttgctagggcctattatttttaaccaccattaattagttggggtggagtttactgtaatgtgaaattttcacatttgaattttttaattgcctggcaaaagctgatataagttctaaaatatcagcagaatgatttgctgaattcattacaaccctgttatgtcactttttgattacaataaaagttttcagtaaacttttcaaaaaaaaaaaat

SEQ ID NO: 146785 - DNA, 364 bp, Homo sapiens
tgaatgctgatctagggaagtaggctggttttatgtagtcttttgttgtctttgaagaagggaattgccaaagacaaggttgtaaatagattttgggggtgagccacatttgtgttgatacaatcataatcttaaattgtgtgtcttccttagggcagaataagttttttgttttttttaatgttaaaaggacatttgtgtttaagttagcatttttatatttatcagtgttttataattaatagtaaattcttcattaattaaaaatattttgttattctttttagtacgagctcaactggaggcagtcctgtgcggaaatctgaagaaaaaacagatacaaagcgaactgtgattaaaacga

SEQ ID NO: 146786 - DNA, 410 bp, Homo sapiens
gatatggtgcttgtctaaactaatttggcattgcgctgaattatgtgttcccattatgttatagtagaacatgtagcatgagtactctgccttcttaacaatggtaaaacatgaaaactttcttttacagagaagcatatgcaattgggaagaaagagaaacctcccttcttaccagaggagccatcttcttcctcagaagaagatgatcctatcccagatgaattgttgtgtctcatctgcaaggatattatgactgatgctgttgtgattccctgctgtggaaacagttactgtgatgaatgtaagaagtgctgaatcttggaagatgtatattttagaatatttgtatttacttggaatggctcttcccaacctcatatgttttaataataaaataaataatgttga

SEQ ID NO: 146787 - DNA, 5463 bp, Homo sapiens
acagactgccaatctggctgaagccaatgcttctgaagaagataaaattaaagcaatgatgtcgcaatctggccatgaatacgacccaatcaattacatgaagaaacctctaggtccaccacctccatcttacacgtgtttccgttgtggtaaacctggacattatattaagaattgcccaacaaatggggataaaaactttgaatctggtcctaggattaaaaagagcactggaattcccagaagtttcatgatggaagtgaaagatcctaatatgaaaggtgcaatgcttaccaacactggaaaatatgcaataccaactatagatgcagaagcatatgcaattgggaagaaagagaaacctcccttcttaccagaggagccatcttcttcctcagaagaagatgatcctatcccagatgaattgttgtgtctcatctgcaaggatattatgactgatgctgttgtgattccctgctgtggaaacagttactgtgatgaatgtataagaacagcactcctggaatcagatgagcacacatgtccgacgtgtcatcaaaatgatgtttctcctgatgctttaattgccaataaatttttacgacaggctgtaaataacttcaaaaatgaaactggctatacaaaaagactacgaaaacagttacctcctccaccacccccaataccacctccgagaccactgattcagaggaacctacaacctctgatgagatctccgatatcaagacaacaagatcctcttatgattccagtgacatcttcatcaactcacccagctccgtctatatcttcattaacttctaatcagtcttccttggcccctcctgtgtctggaaatccgtcttctgctccagctcctgtacctgatataactgcaacagtatccatatcagttcattcagaaaaatcagatggaccttttcgggattctgataataaaatattgccagctgcagctcttgcatcagagcactcaaagggaacctcctcaattgcaattaccgctcttatggaagagaagggttaccaggtgcctgttcttggaaccccatctttgcttggacagtcattattgcatggacagttgatccccacaactggtccagtaagaataaatactgctcgtccaggtggtggtcgaccaggctgggaacattccaacaaacttggctatctggtttctccaccacaacaaattagaagaggggagaggagctgctacagaagtataaaccgtgggcgacaccacagcgaaagatcacagaggactcaaggcccgtcactaccagcaactccagtctttgtacctgttccaccacctcctttgtatccgcctcctccccatacacttcctctccctccgggtgttcctcctccacagttttctcctcagtttcctcctggccagccaccacccgctgggtatagtgtccctcctccagggtttcctccagctcctgccaatttatcaacaccttgggtatcatcaggagtgcagacagctcattcaaataccatcccaacaacacaagcaccacctttgtccagggaagaattctatagagagcagcgacgactaaaagaagaggaaaagaaaaagtccaagctagatgagtttacaaatgattttgctaaggaattgatggaatacaaaaagattcaaaaggagcgtaggcgctcattttccaggtctaaatctccctatagtggttcttcgtattcaagaagttcatatacttattctaaatcaagatctggttcaacacgttcacgctcttattctcgatcattcagccgctcacattctcgttcctattcacggtcacctccataccccagaagaggcagaggcaagagccgcaattaccgttcacggtctagatctcatggatatcatcgatctaggtcaaggtcacccccttacagacgctatcattcacgatcaagatctcctcaagcgtttaggggacagtctcctaataaacgtaatgtacctcaaggggaaacagaacgtgaatattttaatagatacagagaagttccaccaccatatgacatgaaagcatattatgggagaagtgttgactttagagacccatttgaaaaagaacgctaccgagaatgggagagaaaatatagagagtggtatgaaaaatattataaaggttatgctgctggagcacagcctagaccctcagcaaatagagagaacttttctccagagagatttttgccacttaacatcaggaattctcccttcacaagaggccgcagagaagactatgttggtgggcaaagtcatagaagtcgaaacataggtagcaactatccagaaaagctttcagcaagagatggtcacaatcagaaggataatacaaagtcaaaagagaaggagagtgaaaacgctccaggagatggtaaaggaaataagcataagaaacacagaaaaagaagaaaaggggaggaaagtgagggttttctgaacccagagttattagagacttctaggaaatcaagagaacctacaggtgttgaagaaaataaaacagactcattgtttgttctcccaagtagagatgatgccacacctgttagagatgaaccaatggatgcagaatcaatcacttttaaatcagtgtctgaaaaagacaagagagaaagggataaaccaaaagcaaagggtgataaaaccaaacggaagaatgatggatctgctgtgtccaaaaaagaaaatattgtaaaacctgctaaaggaccccaagaaaaagtagatggagaacgtgagagatctcctcgatctgaacctccaattaaaaaagccaaagaggagactccgaagactgacaatactaaatcatcatcttcctctcagaaggatgaaaaaatcactggaacccccagaaaagctcactctaaatcagcaaaagaacaccaagaaacaaaaccagtcaaagaggaaaaagtgaagaaggactattccaaagatgtcaaatcagaaaagctaacaactaaggaagaaaaggccaagaagcctaatgagaaaaacaaaccacttgataataagggagaaaaaagaaaaagaaaaactgaagaaaaaggcgtagataaagattttgagtcttcttcaatgaaaatctcgaaactagaagtgactgaaatagtgaaaccatcaccaaagcgcaaaatggaacctgatactgaaaaaatggataggacccctgaaaaggacaaaatttctttaagtgcgccagccaaaaaaatcaaactcaacagagaaactgggaagaaaattggaagtacagaaaatatatcaaacacaaaagaaccctctgaaaaattggagtcaacatctagcaaagttaaacaagaaaaagtcaaaggaaaggtcagacgaaaagtgactggaactgaaggatccagctcaactctggtggattacaccagtacgagctcaactggaggcagtcctgtgcggaaatctgaagaaaaaacagatacaaagcgaactgtgattaaaacgatggaagaatataataatgacaataccgcgccagctgaagatgttatcattatgattcaggttcctcaatccaaatgggataaagatgactttgaatctgaagaagaagatgttaaatccacacagcctatatcaagtgtaggaaaacctgctagtgttataaaaaatgttagtacaaagccatcaaatatagtcaagtatcctgagaaagaaagtgagccatccgagaaaattcagaaattcaccaaggacgtgagccatgaaatcatacaacatgaggttaaaagttcaaaaaactctgcatctagtgaaaaagggaaaaccaaagatcgagattattcagtgttggaaaaggagaaccctgaaaagaggaagaacagcactcagccagagaaagagagtaatttggaccgtctgaatgaacaaggaaattttaaaagtctgtctcaatcttccaaagaggctagaacgtcagataaacatgattccactcgtgcttcctcaaataaagacttcactcccaatagagacaaaaaaactgactatgacaccagagagtattcaagttccaaacgtagagatgaaaagaatgaattaacaagacgaaaagactctccttctcggaataaagattctgcatctggacagaaaaataaaccaagggaagagagagatttgcctaaaaaaggaacaggagattccaaaaaaagtaattctagtccctcaagagacagaaaacctcatgatcacaaagccacttatgatactaaacggccaaatgaagagacaaaatctgtagataaaaatccttgtaaggatcgtgagaagcatgtattagaagcaaggaacaataaagagtcaagtggcaataaactactttatatacttaacccaccagagacacaggttgaaaaagagcaaattactgggcaaattgacaagagtactgtcaagcctaaaccccagttaagtcattcctctagactttcctctgacttaactagagaaactgatgaagctgcttttgaaccagactataatgaaagtgacagtgaaagtaatgtttctgtaaaagaagaggaatcttcaggaaacatttctaaggacctgaaagataaaatagtggagaaagcgaaagagagcctggacacagcagcagttgtccaggtgggcataagcaggaatcagagccacagcagccccagcgtcagccccagcagaagccacagtccttctggaagccagacccgaagccacagtagcagtgccagctcagcagaaagtcaggacagcaagaagaagaagaaaaagaaggaaaagaaaaaacacaagaaacataaaaagcataagaagcataagaaacatgcaggcactgaagtggaattggaaaaaagccaaaaacacaaacacaagaaaaagaagtcaaagaagaacaaagataaagagaaggagaaggagaaagatgaccaaaaagtgaaatctgtcactgtgtaaaaagacagattttttaaattgacttaattactaagtcatctgtattaaattttgttataatgtaaagagattcaagccttgtaaataatgacatggaagaccctgtgctgcacttaaaatattgctgcttgattatttgatttttacatcagagctttataacacgaacttttgtacagaattgtgagttgtgaccatgtaacatgagaggttttgctagggcctattatttttaaccaccattaattagttggggtggagtttactgtaatgtgaaattttcacatttgaattttttaattgcctggcaaaagctgatataagttctaaaatatcagcagaatgatttgctgaattcattacaaccctgttatgtcactttttgattacaataaaagttttcagtaaacttttcaaaaaaaaaaaat

SEQ ID NO: 146788 - DNA, 4085 bp, Homo sapiens
aaaatacttgccatatccgcacaagtgcccacagcaactccagtctttgtacctgttccaccacctcctttgtatccgcctcctccccatacacttcctctccctccgggtgttcctcctccacagttttctcctcagtttcctcctggccagccaccacccgctgggtatagtgtccctcctccagggtttcctccagctcctgccaatttatcaacaccttgggtatcatcaggagtgcagacagctcattcaaataccatcccaacaacacaagcaccacctttgtccagggaagaattctatagagagcagcgacgactaaaagaagagtctaaatctccctatagtggttcttcgtattcaagaagttcatatacttattctaaatcaagatctggttcaacacgttcacgctcttattctcgatcattcagccgctcacattctcgttcctattcacggtcacctccataccccagaagaggcagaggcaagagccgcaattaccgttcacggtctagatctcatggatatcatcgatctaggtcaaggtcacccccttacagacgctatcattcacgatcaagatctcctcaagcgtttaggggacagtctcctaataaacgtaatgtacctcaaggggaaacagaacgtgaatattttaatagatacagagaagttccaccaccatatgacatgaaagcatattatgggagaagtgttgactttagagacccatttgaaaaagaacgctaccgagaatgggagagaaaatatagagagtggtatgaaaaatattataaaggttatgctgctggagcacagcctagaccctcagcaaatagagagaacttttctccagagagatttttgccacttaacatcaggaattctcccttcacaagaggccgcagagaagactatgttggtgggcaaagtcatagaagtcgaaacataggtagcaactatccagaaaagctttcagcaagagatggtcacaatcagaaggataatacaaagtcaaaagagaaggagagtgaaaacgctccaggagatggtaaaggaaataagcataagaaacacagaaaaagaagaaaaggggaggaaagtgagggttttctgaacccagagttattagagacttctaggaaatcaagagaacctacaggtgttgaagaaaataaaacagactcattgtttgttctcccaagtagagatgatgccacacctgttagagatgaaccaatggatgcagaatcaatcacttttaaatcagtgtctgaaaaagacaagagagaaagggataaaccaaaagcaaagggtgataaaaccaaacggaagaatgatggatctgctgtgtccaaaaaagaaaatattgtaaaacctgctaaaggaccccaagaaaaagtagatggagaacgtgagagatctcctcgatctgaacctccaattaaaaaagccaaagaggagactccgaagactgacaatactaaatcatcatcttcctctcagaaggatgaaaaaatcactggaacccccagaaaagctcactctaaatcagcaaaagaacaccaagaaacaaaaccagtcaaagaggaaaaagtgaagaaggactattccaaagatgtcaaatcagaaaagctaacaactaaggaagaaaaggccaagaagcctaatgagaaaaacaaaccacttgataataagggagaaaaaagaaaaagaaaaactgaagaaaaaggcgtagataaagattttgagtcttcttcaatgaaaatctcgaaactagaagtgactgaaatagtgaaaccatcaccaaagcgcaaaatggaacctgatactgaaaaaatggataggacccctgaaaaggacaaaatttctttaagtgcgccagccaaaaaaatcaaactcaacagagaaactgggaagaaaattggaagtacagaaaatatatcaaacacaaaagaaccctctgaaaaattggagtcaacatctagcaaagttaaacaagaaaaagtcaaaggaaaggtcagacgaaaagtgactggaactgaaggatccagctcaactctggtggattacaccagtacgagctcaactggaggcagtcctgtgcggaaatctgaagaaaaaacagatacaaagcgaactgtgattaaaacgatggaagaatataataatgacaataccgcgccagctgaagatgttatcattatgattcaggttcctcaatccaaatgggataaagatgactttgaatctgaagaagaagatgttaaatccacacagcctatatcaagtgtaggaaaacctgctagtgttataaaaaatgttagtacaaagccatcaaatatagtcaagtatcctgagaaagaaagtgagccatccgagaaaattcagaaattcaccaaggacgtgagccatgaaatcatacaacatgaggttaaaagttcaaaaaactctgcatctagtgaaaaagggaaaaccaaagatcgagattattcagtgttggaaaaggagaaccctgaaaagaggaagaacagcactcagccagagaaagagagtaatttggaccgtctgaatgaacaaggaaattttaaaagtctgtctcaatcttccaaagaggctagaacgtcagataaacatgattccactcgtgcttcctcaaataaagacttcactcccaatagagacaaaaaaactgactatgacaccagagagtattcaagttccaaacgtagagatgaaaagaatgaattaacaagacgaaaagactctccttctcggaataaagattctgcatctggacagaaaaataaaccaagggaagagagagatttgcctaaaaaaggaacaggagattccaaaaaaagtaattctagtccctcaagagacagaaaacctcatgatcacaaagccacttatgatactaaacggccaaatgaagagacaaaatctgtagataaaaatccttgtaaggatcgtgagaagcatgtattagaagcaaggaacaataaagagtcaagtggcaataaactactttatatacttaacccaccagagacacaggttgaaaaagagcaaattactgggcaaattgacaagagtactgtcaagcctaaaccccagttaagtcattcctctagactttcctctgacttaactagagaaactgatgaagctgcttttgaaccagactataatgaaagtgacagtgaaagtaatgtttctgtaaaagaagaggaatcttcaggaaacatttctaaggacctgaaagataaaatagtggagaaagcgaaagagagcctggacacagcagcagttgtccaggtgggcataagcaggaatcagagccacagcagccccagcgtcagccccagcagaagccacagtccttctggaagccagacccgaagccacagtagcagtgccagctcagcagaaagtcaggacagcaagaagaagaagaaaaagaaggaaaagaaaaaacacaagaaacataaaaagcataagaagcataagaaacatgcaggcactgaagtggaattggaaaaaagccaaaaacacaaacacaagaaaaagaagtcaaagaagaacaaagataaagagaaggagaaggagaaagatgaccaaaaagtgaaatctgtcactgtgtaaaaagacagattttttaaattgacttaattactaagtcatctgtattaaattttgttataatgtaaagagattcaagccttgtaaataatgacatggaagaccctgtgctgcacttaaaatattgctgcttgattatttgatttttacatcagagctttataacacgaacttttgtacagaattgtgagttgtgaccatgtaacatgagaggttttgctagggcctattatttttaaccaccattaattagttggggtggagtttactgtaatgtgaaattttcacatttgaattttttaattgcctggcaaaagctgatataagttctaaaatatcagcagaatgatttgctgaattcattacaaccctgttatgtcactttttgattacaataaaagttttcagtaaacttttcaaaaaaaaaaaat

SEQ ID NO: 146789 - DNA, 5307 bp, Homo sapiens
acagactgccaatctggctgaagccaatgcttctgaagaagataaaattaaagcaatgatgtcgcaatctggccatgaatacgacccaatcaattacatgaagaaacctctaggtccaccacctccatcttacacgtgtttccgttgtggtaaacctggacattatattaagaattgcccaacaaatggggataaaaactttgaatctggtcctaggattaaaaagagcactggaattcccagaagtttcatgatggaagtgaaagatcctaatatgaaaggtgcaatgcttaccaacactgggaaacctcccttcttaccagaggagccatcttcttcctcagaagaagatgatcctatcccagatgaattgttgtgtctcatctgcaaggatattatgactgatgctgttgtgattccctgctgtggaaacagttactgtgatgaatgtataagaacagcactcctggaatcagatgagcacacatgtccgacgtgtcatcaaaatgatgtttctcctgatgctttaattgccaataaatttttacgacaggctgtaaataacttcaaaaatgaaactggctatacaaaaagactacgaaaacagttacctcctccaccacccccaataccacctccgagaccactgattcagaggaacctacaacctctgatgagatctccgatatcaagacaacaagatcctcttatgattccagtgacatcttcatcaactcacccagctccgtctatatcttcattaacttctaatcagtcttccttggcccctcctgtgtctggaaatccgtcttctgctccagctcctgtacctgatataactgcaacagtatccatatcagttcattcagaaaaatcagatggaccttttcgggattctgataataaaatattgccagctgcagctcttgcatcagagcactcaaagggaacctcctcaattgcaattaccgctcttatggaagagaagggttaccaggtgcctgttcttggaaccccatctttgcttggacagtcattattgcatggacagttgatccccacaactggtccagtaagaataaatactgctcgtccaggtggtggtcgaccaggctgggaacattccaacaaacttggctatctggtttctccaccacaacaaattagaagaggggagaggagctgctacagaagtataaaccgtgggcgacaccacagcgaaagatcacagaggactcaaggcccgtcactaccagcaactccagtctttgtacctgttccaccacctcctttgtatccgcctcctccccatacacttcctctccctccgggtgttcctcctccacagttttctcctcagtttcctcctggccagccaccacccgctgggtatagtgtccctcctccagggtttcctccagctcctgccaatttatcaacaccttgggtatcatcaggagtgcagacagctcattcaaataccatcccaacaacacaagcaccacctttgtccagggaagaattctatagagagcagcgacgactaaaagaagagtctaaatctccctatagtggttcttcgtattcaagaagttcatatacttattctaaatcaagatctggttcaacacgttcacgctcttattctcgatcattcagccgctcacattctcgttcctattcacggtcacctccataccccagaagaggcagaggcaagagccgcaattaccgttcacggtctagatctcatggatatcatcgatctaggtcaaggtcacccccttacagacgctatcattcacgatcaagatctcctcaagcgtttaggggacagtctcctaataaacgtaatgtacctcaaggggaaacagaacgtgaatattttaatagatacagagaagttccaccaccatatgacatgaaagcatattatgggagaagtgttgactttagagacccatttgaaaaagaacgctaccgagaatgggagagaaaatatagagagtggtatgaaaaatattataaaggttatgctgctggagcacagcctagaccctcagcaaatagagagaacttttctccagagagatttttgccacttaacatcaggaattctcccttcacaagaggccgcagagaagactatgttggtgggcaaagtcatagaagtcgaaacataggtagcaactatccagaaaagctttcagcaagagatggtcacaatcagaaggataatacaaagtcaaaagagaaggagagtgaaaacgctccaggagatggtaaaggaaataagcataagaaacacagaaaaagaagaaaaggggaggaaagtgagggttttctgaacccagagttattagagacttctaggaaatcaagagaacctacaggtgttgaagaaaataaaacagactcattgtttgttctcccaagtagagatgatgccacacctgttagagatgaaccaatggatgcagaatcaatcacttttaaatcagtgtctgaaaaagacaagagagaaagggataaaccaaaagcaaagggtgataaaaccaaacggaagaatgatggatctgctgtgtccaaaaaagaaaatattgtaaaacctgctaaaggaccccaagaaaaagtagatggagaacgtgagagatctcctcgatctgaacctccaattaaaaaagccaaagaggagactccgaagactgacaatactaaatcatcatcttcctctcagaaggatgaaaaaatcactggaacccccagaaaagctcactctaaatcagcaaaagaacaccaagaaacaaaaccagtcaaagaggaaaaagtgaagaaggactattccaaagatgtcaaatcagaaaagctaacaactaaggaagaaaaggccaagaagcctaatgagaaaaacaaaccacttgataataagggagaaaaaagaaaaagaaaaactgaagaaaaaggcgtagataaagattttgagtcttcttcaatgaaaatctcgaaactagaagtgactgaaatagtgaaaccatcaccaaagcgcaaaatggaacctgatactgaaaaaatggataggacccctgaaaaggacaaaatttctttaagtgcgccagccaaaaaaatcaaactcaacagagaaactgggaagaaaattggaagtacagaaaatatatcaaacacaaaagaaccctctgaaaaattggagtcaacatctagcaaagttaaacaagaaaaagtcaaaggaaaggtcagacgaaaagtgactggaactgaaggatccagctcaactctggtggattacaccagtacgagctcaactggaggcagtcctgtgcggaaatctgaagaaaaaacagatacaaagcgaactgtgattaaaacgatggaagaatataataatgacaataccgcgccagctgaagatgttatcattatgattcaggttcctcaatccaaatgggataaagatgactttgaatctgaagaagaagatgttaaatccacacagcctatatcaagtgtaggaaaacctgctagtgttataaaaaatgttagtacaaagccatcaaatatagtcaagtatcctgagaaagaaagtgagccatccgagaaaattcagaaattcaccaaggacgtgagccatgaaatcatacaacatgaggttaaaagttcaaaaaactctgcatctagtgaaaaagggaaaaccaaagatcgagattattcagtgttggaaaaggagaaccctgaaaagaggaagaacagcactcagccagagaaagagagtaatttggaccgtctgaatgaacaaggaaattttaaaagtctgtctcaatcttccaaagaggctagaacgtcagataaacatgattccactcgtgcttcctcaaataaagacttcactcccaatagagacaaaaaaactgactatgacaccagagagtattcaagttccaaacgtagagatgaaaagaatgaattaacaagacgaaaagactctccttctcggaataaagattctgcatctggacagaaaaataaaccaagggaagagagagatttgcctaaaaaaggaacaggagattccaaaaaaagtaattctagtccctcaagagacagaaaacctcatgatcacaaagccacttatgatactaaacggccaaatgaagagacaaaatctgtagataaaaatccttgtaaggatcgtgagaagcatgtattagaagcaaggaacaataaagagtcaagtggcaataaactactttatatacttaacccaccagagacacaggttgaaaaagagcaaattactgggcaaattgacaagagtactgtcaagcctaaaccccagttaagtcattcctctagactttcctctgacttaactagagaaactgatgaagctgcttttgaaccagactataatgaaagtgacagtgaaagtaatgtttctgtaaaagaagaggaatcttcaggaaacatttctaaggacctgaaagataaaatagtggagaaagcgaaagagagcctggacacagcagcagttgtccaggtgggcataagcaggaatcagagccacagcagccccagcgtcagccccagcagaagccacagtccttctggaagccagacccgaagccacagtagcagtgccagctcagcagaaagtcaggacagcaagaagaagaagaaaaagaaggaaaagaaaaaacacaagaaacataaaaagcataagaagcataagaaacatgcaggcactgaagtggaattggaaaaaagccaaaaacacaaacacaagaaaaagaagtcaaagaagaacaaagataaagagaaggagaaggagaaagatgaccaaaaagtgaaatctgtcactgtgtaaaaagacagattttttaaattgacttaattactaagtcatctgtattaaattttgttataatgtaaagagattcaagccttgtaaataatgacatggaagaccctgtgctgcacttaaaatattgctgcttgattatttgatttttacatcagagctttataacacgaacttttgtacagaattgtgagttgtgaccatgtaacatgagaggttttgctagggcctattatttttaaccaccattaattagttggggtggagtttactgtaatgtgaaattttcacatttgaattttttaattgcctggcaaaagctgatataagttctaaaatatcagcagaatgatttgctgaattcattacaaccctgttatgtcactttttgattacaataaaagttttcagtaaacttttcaaaaaaaaaaaat

SEQ ID NO: 146790 - DNA, 5042 bp, Homo sapiens
acagactgccaatctggctgaagccaatgcttctgaagaagataaaattaaagcaatgatgtcgcaatctggccatgaatacgacccaatcaattacatgaagaaacctctaggtccaccacctccatcttacacgtgtttccgttgtggtaaacctggacattatattaagaattgcccaacaaatggggataaaaactttgaatctggtcctaggattaaaaagagcactggaattcccagaagtttcatgatggaagtgaaagatcctaatatgaaaggtgcaatgcttaccaacactggaaaatatgcaataccaactatagatgcagaagcatatgcaattgggaagaaagagaaacctcccttcttaccagaggagccatcttcttcctcagaagaagatgatcctatcccagatgaattgttgtgtctcatctgcaaggatattatgactgatgctgttgtgattccctgctgtggaaacagttactgtgatgaatgtataagaacagcactcctggaatcagatgagcacacatgtccgacgtgtcatcaaaatgatgtttctcctgatgctttaattgccaataaatttttacgacaggctgtaaataacttcaaaaatgaaactggctatacaaaaagactacgaaaacagttacctcctccaccacccccaataccacctccgagaccactgattcagaggaacctacaacctctgatgagatctccgatatcaagacaacaagatcctcttatgattccagtgacatcttcatcaactcacccagctccgtctatatcttcattaacttctaatcagtcttccttggcccctcctgtgtctggaaatccgtcttctgctccagctcctgtacctgatataactgcaacagtatccatatcagttcattcagaaaaatcagatggaccttttcgggattctgataataaaatattgccagctgcagctcttgcatcagagcactcaaagggaacctcctcaattgcaattaccgctcttatggaagagaagggttaccaggtgcctgttcttggaaccccatctttgcttggacagtcattattgcatggacagttgatccccacaactggtccagtaagaataaatactgctcgtccaggtggtggtcgaccaggctgggaacattccaacaaacttggctatctggtttctccaccacaacaaattagaagaggggagaggagctgctacagaagtataaaccgtgggcgacaccacagcgaaagatcacagaggactcaaggcccgtcactaccagcaactccagtctttgtacctgttccaccacctcctttgtatccgcctcctccccatacacttcctctccctccgggtgttcctcctccacagttttctcctcagtttcctcctggccagccaccacccgctgggtatagtgtccctcctccagggtttcctccagctcctgccaatttatcaacaccttgggtatcatcaggagtgcagacagctcattcaaataccatcccaacaacacaagcaccacctttgtccagggaagaattctatagagagcagcgacgactaaaagaagaggaaaagaaaaagtccaagctagatgagtttacaaatgattttgctaaggaattgatggaatacaaaaagattcaaaaggagcgtaggcgctcattttccaggtctaaatctccctatagtggttcttcgtattcaagaagttcatatacttattctaaatcaagatctggttcaacacgttcacgctcttattctcgatcattcagccgctcacattctcgttcctattcacggtcacctccataccccagaagaggcagaggcaagagccgcaattaccgttcacggtctagatctcatggatatcatcgatctaggtcaaggtcacccccttacagacgctatcattcacgatcaagatctcctcaagcgtttaggggacagtctcctaataaacgtaatgtacctcaaggggaaacagaacgtgaatattttaatagatacagagaagttccaccaccatatgacatgaaagcatattatgggagaagtgttgactttagagacccatttgaaaaagaacgctaccgagaatgggagagaaaatatagagagtggtatgaaaaatattataaaggttatgctgctggagcacagcctagaccctcagcaaatagagagaacttttctccagagagatttttgccacttaacatcaggaattctcccttcacaagaggccgcagagaagactatgttggtgggcaaagtcatagaagtcgaaacataggtagcaactatccagaaaagctttcagcaagagatggtcacaatcagaaggataatacaaagtcaaaagagaaggagagtgaaaacgctccaggagatggtaaaggaaataagcataagaaacacagaaaaagaagaaaaggggaggaaagtgagggttttctgaacccagagttattagagacttctaggaaatcaagagaacctacaggtgttgaagaaaataaaacagactcattgtttgttctcccaagtagagatgatgccacacctgttagagatgaaccaatggatgcagaatcaatcacttttaaatcagtgtctgaaaaagacaagagagaaagggataaaccaaaagcaaagggtgataaaaccaaacggaagaatgatggatctgctgtgtccaaaaaagaaaatattgtaaaacctgctaaaggaccccaagaaaaagtagatggagaacgtgagagatctcctcgatctgaacctccaattaaaaaagccaaagaggagactccgaagactgacaatactaaatcatcatcttcctctcagaaggatgaaaaaatcactggaacccccagaaaagctcactctaaatcagcaaaagaacaccaagaaacaaaaccagtcaaagaggaaaaagtgaagaaggactattccaaagatgtcaaatcagaaaagctaacaactaaggaagaaaaggccaagaagcctaatgagaaaaacaaaccacttgataataagggagaaaaaagaaaaagaaaaactgaagaaaaaggcgtagataaagattttgagtcttcttcaatgaaaatctcgaaactagaagtgactgaaatagtgaaaccatcaccaaagcgcaaaatggaacctgatactgaaaaaatggataggacccctgaaaaggacaaaatttctttaagtgcgccagccaaaaaaatcaaactcaacagagaaactgggaagaaaattggaagtacagaaaatatatcaaacacaaaagaaccctctgaaaaattggagtcaacatctagcaaagttaaacaagaaaaagtcaaaggaaaggtcagacgaaaagtgactggaactgaaggatccagctcaactctggtggattacaccagtacgagctcaactggaggcagtcctgtgcggaaatctgaagaaaaaacagatacaaagcgaactgtgattaaaacgatggaagaatataataatgacaataccgcgccagctgaagatgttatcattatgattcaggttcctcaatccaaatgggataaagatgactttgaatctgaagaagaagatgttaaatccacacagcctatatcaagtgtaggaaaacctgctagtgttataaaaaatgttagtacaaagccatcaaatatagtcaagtatcctgagaaagaaagtgagccatccgagaaaattcagaaattcaccaaggacgtgagccatgaaatcatacaacatgaggttaaaagttcaaaaaactctgcatctagtgaaaaagggaaaaccaaagatcgagattattcagtgttggaaaaggagaaccctgaaaagaggaagaacagcactcagccagagaaagagagtaatttggaccgtctgaatgaacaaggaaattttaaaagtctgtctcaatcttccaaagaggctagaacgtcagataaacatgattccactcgtgcttcctcaaataaagacttcactcccaatagagacaaaaaaactgactatgacaccagagagtattcaagttccaaacgtagagatgaaaagaatgaattaacaagacgaaaagactctccttctcggaataaagattctgcatctggacagaaaaataaaccaagggaagagagagatttgcctaaaaaaggaacaggagattccaaaaaaagtaattctagtccctcaagagacagaaaacctcatgatcacaaagccacttatgatactaaacggccaaatgaagagacaaaatctgtagataaaaatccttgtaaggatcgtgagaagcatgtattagaagcaaggaacaataaagagtcaagtggcaataaactactttatatacttaacccaccagagacacaggttgaaaaagagcaaattactgggcaaattgacaagagtactgtcaagcctaaaccccagttaagtcattcctctagactttcctctgacttaactagagaaactgatgaagctgcttttgaaccagactataatgaaagtgacagtgaaagtaatgtttctgtaaaagaagaggaatcttcaggaaacatttctaaggacctgaaagataaaatagtggagaaagcgaaagagagcctggacacagcagcagttgtccaggtgggcataagcaggaatcagagccacagcagccccagcgtcagccccagcagaagccacagtccttctggaagccagacccgaagccacagtagcagtgccagctcagcagaaagtcaggacagcaagaagaagaagaaaaagaaggaaaagaaaaaacacaagaaacataaaaagcataagaagcataagaaacatgcaggcactgaagtggaattggaaaaaagccaaaaacacaaacacaagaaaaagaagtcaaagaaaaaactcaagaaacataaaaagcataagaagcataagaaacatgcaggcactgaagtgcaggaatcaagta

SEQ ID NO: 146791 - DNA, 4847 bp, Homo sapiens
acagactgccaatctggctgaagccaatgcttctgaagaagataaaattaaagcaatgatgtcgcaatctggccatgaatacgacccaatcaattacatgaagaaacctctaggtccaccacctccatcttacacgtgtttccgttgtggtaaacctggacattatattaagaattgcccaacaaatggggataaaaactttgaatctggtcctaggattaaaaagagcactggaattcccagaagtttcatgatggaagtgaaagatcctaatatgaaaggtgcaatgcttaccaacactggaaaatatgcaataccaactatagatgcagaagcatatgcaattgggaagaaagagaaacctcccttcttaccagaggagccatcttcttcctcagaagaagatgatcctatcccagatgaattgttgtgtctcatctgcaaggatattatgactgatgctgttgtgattccctgctgtggaaacagttactgtgatgaatgtataagaacagcactcctggaatcagatgagcacacatgtccgacgtgtcatcaaaatgatgtttctcctgatgctttaattgccaataaatttttacgacaggctgtaaataacttcaaaaatgaaactggctatacaaaaagactacgaaaacagttacctcctccaccacccccaataccacctccgagaccactgattcagaggaacctacaacctctgatgagatctccgatatcaagacaacaagatcctcttatgattccagtgacatcttcatcaactcacccagctccgtctatatcttcattaacttctaatcagtcttccttggcccctcctgtgtctggaaatccgtcttctgctccagctcctgtacctgatataactgcaacagtatccatatcagttcattcagaaaaatcagatggaccttttcgggattctgataataaaatattgccagctgcagctcttgcatcagagcactcaaagggaacctcctcaattgcaattaccgctcttatggaagagaagggttaccaggtgcctgttcttggaaccccatctttgcttggacagtcattattgcatggacagttgatccccacaactggtccagtaagaataaatactgctcgtccaggtggtggtcgaccaggctgggaacattccaacaaacttggctatctggtttctccaccacaacaaattagaagaggggagaggagctgctacagaagtataaaccgtgggcgacaccacagcgaaagatcacagaggactcaaggcccgtcactaccagcaactccagtctttgtacctgttccaccacctcctttgtatccgcctcctccccatacacttcctctccctccgggtgttcctcctccacagttttctcctcagtttcctcctggccagccaccacccgctgggtatagtgtccctcctccagggtttcctccagctcctgccaatttatcaacaccttgggtatcatcaggagtgcagacagctcattcaaataccatcccaacaacacaagcaccacctttgtccagggaagaattctatagagagcagcgacgactaaaagaagaggaaaagaaaaagtccaagctagatgagtttacaaatgattttgctaaggaattgatggaatacaaaaagattcaaaaggagcgtaggcgctcattttccaggtctaaatctccctatagtggttcttcgtattcaagaagttcatatacttattctaaatcaagatctggttcaacacgttcacgctcttattctcgatcattcagccgctcacattctcgttcctattcacggtcacctccataccccagaagaggcagaggcaagagccgcaattaccgttcacggtctagatctcatggatatcatcgatctaggtcaaggtcacccccttacagacgctatcattcacgatcaagatctcctcaagcgtttaggggacagtctcctaataaacgtaatgtacctcaaggggaaacagaacgtgaatattttaatagatacagagaagttccaccaccatatgacatgaaagcatattatgggagaagtgttgactttagagacccatttgaaaaagaacgctaccgagaatgggagagaaaatatagagagtggtatgaaaaatattataaaggttatgctgctggagcacagcctagaccctcagcaaatagagagaacttttctccagagagatttttgccacttaacatcaggaattctcccttcacaagaggccgcagagaagactatgttggtgggcaaagtcatagaagtcgaaacataggtagcaactatccagaaaagctttcagcaagagatggtcacaatcagaaggataatacaaagtcaaaagagaaggagagtgaaaacgctccaggagatggtaaaggaaataagcataagaaacacagaaaaagaagaaaaggggaggaaagtgagggttttctgaacccagagttattagagacttctaggaaatcaagagaacctacaggtgttgaagaaaataaaacagactcattgtttgttctcccaagtagagatgatgccacacctgttagagatgaaccaatggatgcagaatcaatcacttttaaatcagtgtctgaaaaagacaagagagaaagggataaaccaaaagcaaagggtgataaaaccaaacggaagaatgatggatctgctgtgtccaaaaaagaaaatattgtaaaacctgctaaaggaccccaagaaaaagtagatggagaacgtgagagatctcctcgatctgaacctccaattaaaaaagccaaagaggagactccgaagactgacaatactaaatcatcatcttcctctcagaaggatgaaaaaatcactggaacccccagaaaagctcactctaaatcagcaaaagaacaccaagaaacaaaaccagtcaaagaggaaaaagtgaagaaggactattccaaagatgtcaaatcagaaaagctaacaactaaggaagaaaaggccaagaagcctaatgagaaaaacaaaccacttgataataagggagaaaaaagaaaaagaaaaactgaagaaaaaggcgtagataaagattttgagtcttcttcaatgaaaatctcgaaactagaagtgactgaaatagtgaaaccatcaccaaagcgcaaaatggaacctgatactgaaaaaatggataggacccctgaaaaggacaaaatttctttaagtgcgccagccaaaaaaatcaaactcaacagagaaactgggaagaaaattggaagtacagaaaatatatcaaacacaaaagaaccctctgaaaaattggagtcaacatctagcaaagttaaacaagaaaaagtcaaaggaaaggtcagacgaaaagtgactggaactgaaggatccagctcaactctggtggattacaccagtacgagctcaactggaggcagtcctgtgcggaaatctgaagaaaaaacagatacaaagcgaactgtgattaaaacgatggaagaatataataatgacaataccgcgccagctgaagatgttatcattatgattcaggttcctcaatccaaatgggataaagatgactttgaatctgaagaagaagatgttaaatccacacagcctatatcaagtgtaggaaaacctgctagtgttataaaaaatgttagtacaaagccatcaaatatagtcaagtatcctgagaaagaaagtgagccatccgagaaaattcagaaattcaccaaggacgtgagccatgaaatcatacaacatgaggttaaaagttcaaaaaactctgcatctagtgaaaaagggaaaaccaaagatcgagattattcagtgttggaaaaggagaaccctgaaaagaggaagaacagcactcagccagagaaagagagtaatttggaccgtctgaatgaacaaggaaattttaaaagtctgtctcaatcttccaaagaggctagaacgtcagataaacatgattccactcgtgcttcctcaaataaagacttcactcccaatagagacaaaaaaactgactatgacaccagagagtattcaagttccaaacgtagagatgaaaagaatgaattaacaagacgaaaagactctccttctcggaataaagattctgcatctggacagaaaaataaaccaagggaagagagagatttgcctaaaaaaggaacaggagattccaaaaaaagtaattctagtccctcaagagacagaaaacctcatgatcacaaagccacttatgatactaaacggccaaatgaagagacaaaatctgtagataaaaatccttgtaaggatcgtgagaagcatgtattagaagcaaggaacaataaagagtcaagtggcaataaactactttatatacttaacccaccagagacacaggttgaaaaagagcaaattactgggcaaattgacaagagtactgtcaagcctaaaccccagttaagtcattcctctagactttcctctgacttaactagagaaactgatgaagctgcttttgaaccagactataatgaaagtgacagtgaaagtaatgtttctgtaaaagaagaggaatcttcaggaaacatttctaaggacctgaaagataaaatagtggagaaagcgaaagagagcctggacacagcagcagttgtccaggtgggcataagcaggaatcagagccacagcagccccagcgtcagccccagcagaagccacagtccttctggaagccagacccgaagccgtcgtagacagtgagccgtcgtagcagtgaggggatcctcagaacgaccac

SEQ ID NO: 146792 - DNA, 637 bp, Homo sapiens
acagactgccaatctggctgaagccaatgcttctgaagaagataaaattaaagcaatgatgtcgcaatctggccatgaatacgacccaatcaattacatgaagaaacctctaggtccaccacctccatcttacacgtgtttccgttgtggtaaacctggacattatattaagaattgcccaacaaatggggataaaaactttgaatctggtcctaggattaaaaagagcactggaattcccagaagtttcatgatggaagtgaaagatcctaatatgaaaggtgcaatgcttaccaacactggaaaatatgcaataccaactatagatgcagaagcatatgcaattgggaagaaagagaaacctcccttcttaccagaggagccatcttcttcctcagaagaagatgatcctatcccagatgaattgttgtgtctcatctgcaaggatattatgactgatgctgttgtgattccctgctgtggaaacagttactgtgatgaatgtaagaagtgctgaatcttggaagatgtatattttagaatatttgtatttacttggaatggctcttcccaacctcatatgttttaataataaaataaataatgttgatgacaagtgttgatcaatgagcattaa

SEQ ID NO: 146793 - DNA, 272 bp, Homo sapiens
atttctaattttgagtaggtctttgccgaatacaagcattttgaattagccagaaaaaaatattcagaatatgacgtaaaattgagctctgatatttcattcttccaaaagttcttttactgtttgatagttttctggacttaactgaaagtgtagtttgtgtcagagtctttagtgattgatgacaggtaaaagttggcagcatgacctggaattttaatggatcatggaggattgactccttgagagaaaaattgtcagatgatgctcag

SEQ ID NO: 146794 - DNA, 422 bp, Homo sapiens
caacgcccatgaagacctaagggaaaacctaaagggaaaaaaaggaaacccaacctaaaagaaaaaaaagataggggaggcaagaggaggcaaagagagacaaaggaagacaccacagagaacaggaaagcaaaagaaaaggagaaaatacaggagaattggtagaagaaattataggtaaaataaatgtgaggaactgaatgtgggaggctacagagtgccaaaagaaattagcttaaatagccaggcaaggtggtgtgtgcctgtagtcccagctactccaggggctgaagtaggagaatcacttgagcccaggagttggagacagggcaacataccaagactctgtctctctgtttttttttttttgagacggagtctcgccctgtcgcccaggctggggtgcaatgacatgatatcgg

SEQ ID NO: 146795 - DNA, 107 bp, Homo sapiens
tgtgtgtgtgtgtgtgtgtgttttaatttttgtattttttaagagcaatgaggcaacactgtcatcatttctcattaaaatgaaaatacaactggggatgttcccca

SEQ ID NO: 146796 - DNA, 205 bp, Homo sapiens
cctgattttcttcgatgtgatattttcttcaaattaatgtaatttgagtaaagacacagaataaaacctgtttttaagacattaaactttctgtgtagactatgcagaaagtaataccagaaatgaatgaggaaattcagagactgcctaaaagtattgttgctgattctgttggcagaatcttttctcttccctttcgaaaaat

SEQ ID NO: 146797 - DNA, 402 bp, Homo sapiens
tattttgttaataaaacatttgtgaagttgccaacattttaaaaataattttagagcatttgggagacaaaacaccacgattcatgtggaaaggcttgcaaagcccatgaagttccttaaatagctatgagacctcctactgtttatgttttatttgtgatcttgtaagacagatttgttgcttcacttcagccttgttgttatttgtgttcacaacaatgtacaggctatataaacttaaatctacctccccagcaaaatatgtattggaggtacgtacttataaaatttttcaatgtataattttcgtcaagggtttttattattgttattatcattgtttggggggactttgtaactagtaacagattacacataaaatcccaaagaaaccaagaattt

SEQ ID NO: 146798 - DNA, 380 bp, Homo sapiens
ttgtacaagtgatttaaactatttgaactgcattttcctccctctcaaaattaatttatgtttattgattacttaccatgtgccaggtgcttttatgcatcatcttatctaattctcatgtgaccccaatgtaactcacagcctccttggacctccctgttgcttttgtgaagccaatctcagtaagttgttgaatccctccccatctcacctccccccgcaaaaaagaacccagaattccatctttaaaatgttgaaaaaagtgtatatttttctgcatattttgggagaagacagaggggagaattacttaacaaaacttcttaaacatacccttttttttttaaccacctcttctctttcctcaaaattcttctttg

SEQ ID NO: 146799 - DNA, 184 bp, Homo sapiens
tggtagctgggctcctggggccagactgcctgggtttaaatctttgttcccttacacttttagctgtgtagccttgggcttcacttaactctctgggactggttccttgtcataggatcgatttgaggctaattaaatgaggtcaagcaggtaagaaggcctgtcatacctagcacatataggg

SEQ ID NO: 146800 - DNA, 342 bp, Homo sapiens
caagagtcagaagctcctgtctccctgtttctgccttttccatgacagcatgctgtttctcaaaggcatcttctcctagaaacaggaggctacaggctagtttttggcatgtttactgatttcattctttccgaatccgtttccatctccatcttccagatctgtaaataaagtctatcccttcaagctatcccttagttttaatttttcccctgtggtttgtagctcctcctggcttgacatcactaggtccactcttggctcccacgggcagctgcccaagactccttctggaatgagagtcctttctttctcctaggcctcattctaccttcattccta

SEQ ID NO: 146801 - DNA, 425 bp, Homo sapiens
tgttgcggggcattttgtacagaatggatgttcgagtccaataagtgcaggaagtctctaacttcccaaggagctgtctcccagagaaagccgttcccactcagaaaccggattataaatgacgtcgggcttccaggaaccgcccgaaagctgctgaactctgaatgcagctgaaaatctgtacatgtgaaatgaaaacagtaaaaatcaatactagttgcaataccagtaatttctgaacagaaaaaataaatggttttatgcatctgactgtggatgctggagagagaaggtagttttcatcagaggaggcctaggggaggagggaggccttctcattccacttcccctgcgtctctctccagcctcagcctctcagcctggaaggaacaccccagtccctcctgcgagccctcctgtctact

SEQ ID NO: 146802 - DNA, 422 bp, Homo sapiens
agatcatgcttggagccgagggatgagagcgcacgcactgtggcagcttttatgtagtggagtttatttttatgcaacttaaagtagcggcagcatctttagtagaatggactcgttaggtttggataatccacactggtgtaacactgatgtgtacattttattaccaaactggggtttcagacatttggggatgcttgaatttatggcagcagctaagattccctgatgagggactgtattgagtttatcaaaattaaataacagatttaggacttttttcttttcttttaaattttaatgtgaaggtgtgtttgggtgactggctatgtactttttcttttcccctttggtctaattgctttaattccttggacaccttcacttatttctcaattattttcttctctaattttgtgtaa

SEQ ID NO: 146803 - DNA, 542 bp, Homo sapiens
gttgggagatttttgaatattgactcaatctcctcactaactacaatatagttctattcaaattttctatttcttagtgatttagtcttaacaagttttgtgtttctagaaatttgtacacttcatctaggttatccaatttattgatgaacaattgttcgtagtatttttttttttaaagagtctcgctctgttgcctaggctggagtacaatggcacaatctgggctcactgtaacctccgcctcctcagttcaagcgattctcatgactcagcctcctgagtagctgggattacaggaacatgcaaccatgtccagctcagtttttgtattttcagtagagacagggtttcaccatgttgcccaggatggtctcaaactcctgagctcaggcaatgcacccaccttggcttcccaaagtgctaggattactggaatgagccactgcgcccgaccaagggaacacttcttaagtctttctgtgaggccagcattaccctgataccaaagcgagacaaagacagtacaagaaaactacaaa

SEQ ID NO: 146804 - DNA, 304 bp, Homo sapiens
taaatgattactgcatcagctagcagctccggaatggccatttggccctgtagaaagatcattcttgggcaggctgttgatgtggagagtgagaggagcagctgttctttcacctgaggccccatctgggtagcagatggtccccagctaggcacaagccctgtgtagggacatccgtgctgcccaggatcctgggacactgcccaaatcaactgtcaggctgggagcctgtgtccagaactgtggatggcattcactttgggttgtggaagttggtttgtacctactcttaagtcttgcccct

SEQ ID NO: 146805 - DNA, 285 bp, Homo sapiens
cctttcatgaacatggtacaggatgtatggatgcaagaaagataaatatttctatctttcagaaagcagtaaataagtttaactttttcttttattaagcctaactaaaattctttatatgtaccaatttatagtacaagaaaaacagaatttagtgagtttaacaagcattaaatggtcatttctatagcattaaaagcaaaaatccccaaggccagcaacatctgggtataggtttgcaaacatcttgttttgggtcacctttatgggatactgaggacattc

SEQ ID NO: 146806 - DNA, 220 bp, Homo sapiens
cttcaaggaccaggtcttgccggctgaagtttgaagctcccactgatgccctccaggcagaggcctgaggccatctgagaacaatcttgaagaggggaccccagctttgggtgggaggctgggttggaaggctgtaaggtccttcctgtgctaagattctctctgccaagtctccagtgacagggagcttgttcctttgtaaggagcttgttccatgttg

SEQ ID NO: 146807 - DNA, 326 bp, Homo sapiens
cactcttgttttatgtgggaacctctctctcttacagctttgttttttaaccattcatgggctctcatgagtacactggtggggatttgtgagggaaggaatccaaaaaggtccttcaatccagcctgctgcctcttggcagaaccacacttctcagggatctggggctgaggcgagtcagacggcgggtgcagagcagcacggtgcccccttcctcaagtgggaggcttgagaacctgctggctgccccagtcggccgcacggaggggagagggcatgggaactgcacatagctataggatcaggctcaggcatctggggtgcgg

SEQ ID NO: 146808 - DNA, 430 bp, Homo sapiens
gcaagaatagaaaaaaagaacagaagttttaaaagtatgtatatacatttaactaatgcttaagaaagagggtaaatatttctatctcaattagattgatatgatattaaatgacatatgaaaaaagatgtgaaagtatttactaaaactattaataatatacaactaaccagtgtttatataatggtttttattatatatagggcttagctgttacctttattcacataatgcagtaaaacttcatgaactagtataaagggacttattttgaatatccccattttttaaaaatgtgcatactagtgttgccttccacctagatttcaaaaagactgtatgaaagacactgtcaggaagaatatatacttaaaatgactattttttatcataatcataattttattaaaatctgcattgaaaaacatgt

SEQ ID NO: 146809 - DNA, 263 bp, Homo sapiens
  misc_feature (15)..(15): n is a, c, g, or t
cgatctagaggatcncgtcattaggtcatggacaagacccatgctgtgtcagtttgctaatgccccaatttccctttatgttcaaagaagctggcaaaccctgagaaattctatggcttgcaaatattaccctcagacaataaaacaccctttctaaagttgttgtagaataacagctaagagttagataattcttcgtaagtggtaggaatgtaaagtacctgtcctatgaaatttacatctattaatgcatttaaatgtca

SEQ ID NO: 146810 - DNA, 681 bp, Homo sapiens
ggtggtgcatgtttgtggtctcagctacttgggaggctgagttgggaggactgcttgaacccaggaggttgaggctgcagtgagttgtgatggcaccactgcactccatcctgggtgatagagcgagatctcatcttaagaaaaccaaagtagggccaggcgcggtggctcactcctgtaatcccagcacttcgggaggccgaagtgggcagatcacaggtcaggagttcgagactagcctgaccaacatggtgaaaccccgtctctgctaaaaatacaaaaattagctgggcatggtagcacgaacctgtaatcccagctactcaggaggccgaggcaggagaatcgcttgaacctgggaggtggaagttgcagtgagccgagatcatgccactgtaccccagcctgggtgacagagctagactctgtctcaagaaaaaaaaagaaaaaacaaaaccaaagtagatttatattggcttacagaaatgtaaacctatatcatcaacaagattaaaaataagtaaaaaaattgatgcaaagggaaaacgtaggaaaaataagtcgaagccaagcgagataagatttaggactaaaaggaatggcgtaagatctgtgcacctggtagagaagggccacagatttgactctgaacttgttggcagccattgtaaaaagaaaaaa

SEQ ID NO: 146811 - DNA, 185 bp, Homo sapiens
tttacatgtcttaaaatttttttggggttctctccacatacgttttaatcgtagtgtttataattaaaaggtattttatatttattttagtgaccttaatagcttatgctctgatttcacaaaggttttacttggaagctcaatattcttgtaaaaacaaatgcatcatcaaaaatgtgagtcct

SEQ ID NO: 146812 - DNA, 285 bp, Homo sapiens
atggtttaaactcaagcccctgttctttagactaagttcccctttttaatactatttctcatagaacatttcagacagacacgaaagtagagagaatacggaaatgagtttcctcgcgccagtccctcagacgcaagcaccagtcgagtttcttgacttcctttttaagcattaaacttcactggtggtgaaaaagagctttttaagcccacgccttcctcatgggttttgtttggttttgcttttctatagcccagcatgccctgaggtgctgcacggtggaag

SEQ ID NO: 146813 - DNA, 450 bp, Homo sapiens
tgtttttaagagtgacaaaatactatatggtatcctggtaataaaggttttcctaaactttcctaatacagtttcaggaaaaggggcagttcacatagtcatagaagtagaagtagaaattgacctaactttcctggatggaaatttagcaataactttctacaatgtaaatgtacatactctgagactttgcaagtccacttctatgagtctattctataaagaaacctcacatataaccaaggcacatcttcgcatataatagtgaaaaactggaaccaacctaaatttttcatcagtttcaataggagaatgatactataatacatctacactgaaataccagttgctgtcaggcagaatgaaaaacaatctatatgttttgtcgcagaaatgtttcctgaaaaaagcaagccacatgtgaatatgaataatatgactccagttttg

SEQ ID NO: 146814 - DNA, 472 bp, Homo sapiens
tctagaggatcttcggtatgagtggccactgtgacatcaaagccaaagaaatcaagaaacaaacctagaggaatcctgcaaagagccctaagtggattttaatttatgtttagagtttgactttcaagattattttcatcaggaaacatttgggttggtttaggttcagttgaaaaggcagtcacagagttgtttaaaaaaaatgggatttggaatctgacagatgtgagagtcattcctagctgtgttacatttaccaaatctctgccggtttgaatttgtttccctgtctataaggtggaaataataagacccgttttatcacctcacatagcggagtcttaaaggaaagaagggaaatgaaaactatttatgacatatcaaaagttgtgtttgctgtcctgattgacgatcctctcatttacacttacacagccaggatgaaaataagtttcatttcacaggccacgta

SEQ ID NO: 146815 - DNA, 165 bp, Homo sapiens
tatcctcaaatggaatagccatgttttctccagagttctatctagttgcatctgaccagctctttttcctttcatttctggcagacctggtgtctgagggctcctcattcttctacagctgtgtgtgtccatcagagccatagcctcagagccagagggtcacgg

SEQ ID NO: 146816 - DNA, 298 bp, Homo sapiens
tgcagctgtcctgtgttgctggggtcactctgcaaggtgatctcccagctcccattttcccatttgggaaggaggacccaagtccctgtggctttgggttcccaaaactctctgtagttttctattcccacccccaggtggttctaccctgggctgggtatgggggaggctgcatgaggtgaaggaaaaagttccacactggaaactttagtccctccgtgccagtctcccctcctccctcagctctcaaagggattaacccttgtcatggctgaaattgtggctcccctccaccaaa

SEQ ID NO: 146817 - DNA, 363 bp, Homo sapiens
tattcgtcccacgtcggtcccatcgcacttcctccttcaagtgccatactctgttttttgctccagcctttagacatgttgttcttcctccttagaacccagctcctctctctgcactgtctggctacctttccctcattcttgaaatctcagcttagagtctcttcctcacgaagcccttggactagggactatgttatttgctaccttttctgggttcccatagcaccccattcttccccttgtataatacttcacaacccctttcctggcccagcgataggagggactgccctctttccagtatgtggcatctagtgaatgggcaatacatacgggcattccccctgacgcatgcttatg

SEQ ID NO: 146818 - DNA, 290 bp, Homo sapiens
atgtgattttaaaaaaatgtgcagtagtctgtgaaagaaaagactcaggactggggggtcagaggaattaaattttctgacagctctgcaggtaaccaactggatcaatttgttcatgacactaatattaccagtaaagcacagagttgaatgaactacatgacttttttttttttttttgagacagggtttttgctctgtggcccaggcgtgaattgcggtgccttgattcttggctcacagcaaaggtgggcctcctgggctcaagcaatcttcccatctcagttctc

SEQ ID NO: 146819 - DNA, 780 bp, Homo sapiens
ctgggattacagatctcagccagtgcacctggctatttctccactgactgttttccagaagtatgtagaagatttttccctgctggtgacatctctcatgctctatgtggtgttatgtcttttttttctttccaattctcactttaacagagtcccagaggagaggacatatatgcttgtttagtttgccttctttcgctggaagctttaaaataagttttaagactgggtacagttggcttatgcctataatcccagcagtttgggaggccaaagtgggaggatagcttgagatcgggagctctagaccatcctgggcaatatagtgagaccctgactctataaaaaatttaaaaattagccccgtgtgatagtggacacctttagtcccagctactcaggtggctgagttgggatgatcccttgagctcaggagttcaaggctgccgtgagctataagtgtgccactgcactctagcctacatgacagggtgagaccctgtctcaaaaataaacaaataaacaaaataaaatataattatgttttaaaataaaataacataatgtcttaacagtagattttgacatatctccatgctagctggcatctcgtcatctttaagggctgcatagtattctgcagtatgactgtactataatacgtgtcgtcattccccagttaagtggttttaaatgtattgctgttatcaacagggctccagtgagcattcttgtacatatatctttgcacacacatacaagcatttcctcaggataaat

SEQ ID NO: 146820 - DNA, 327 bp, Homo sapiens
cagttaaagaaaatgctcattggagcatttcagattagggatgctgaactaactgataagtataatgcacatatgccaaaatttaaaaaaaaaaatccaaaatactagaaatggaaatgtgtatatgtgtcacaaaagtcatgcacaagaatgttcataataggccggctgcggtggcttcacgcctgtaattccagcactttgggaggccgaggcgggtggatcacctgaggttcaggagtttgagaccagcctggccaacatggtgaaaccttgtctctagtaaaaatacaaaaattagtcaggcgtggtgggcacctgtaaacc

SEQ ID NO: 146821 - DNA, 195 bp, Homo sapiens
agtaagagtacatttcaattcaatatatgatatcataaaaattggttataacatcataaatagaacaaaatgcaaatagcttagaacaccataaaattggactcttttagtatacagaagtattagtatctatccatgaacacagtccttctccaaacgttctttttttttttttttttttttttttcaacagaa

SEQ ID NO: 146822 - DNA, 135 bp, Homo sapiens
tctttagggccttcagaattttggctaaaggctatactagtggaggtactaagacctgacacctggagcctttattaaggatgttagaatccactcccatgacaacatcccagctttgccaatttgcctcatgtg

SEQ ID NO: 146823 - DNA, 322 bp, Homo sapiens
cctatgtaaggaacctggacattctgcacatgtatcccattttttagaagaaatcaaacaaacaaacaaaaaactcatttccttgtaaattgctcagtctcaggtagttctttatagtaatgtaagaaaagactaacatcaaaggtcactattcacagtgcagtactggagtgaaatgtgttaagaaaaagatttcctaaacttggaaatagccatattggagaaatgtgcaacagatccatcattgatgatttaattatttaaggctgttaactttgatttaacgctattgattgggatatttacaactctatgcatagat

SEQ ID NO: 146824 - DNA, 164 bp, Homo sapiens
gtacctggaaagaaagtcagtcatcagcccattacattgccctgagataggaacacatttctaagaaactgtaaaagcagtttacagcaaactagggataaattttcatcccaaattagtttctacttagtttcaagtccagggtaggcaaacaagcctgtggg

SEQ ID NO: 146825 - DNA, 528 bp, Homo sapiens
ctcctgacctcgtcatctgccttcctcggcctcccaaagtgctgggattacaggcgtgagccaccgcgcccagctttctttacaaagctgaatgttgataattgaaatagagactagtctgaaatgtacttctgttccacttgtgtaaaaagggtttcctaaatgaattaatggcacaagggagatgatctgcttcagagaataaactttgcaagtcacttcagttcttccgatggggtgctgattaatattcaaatgttatgttgagaaaggactgattttcagatctttgtgacctagaatcacttcccctatggtgcattttacacattgtgtggttgtagtatgtcaaatccttttttatttggagctcatgttatttagattgagtctatggtgaggttgtatgtaatgcatgatgccaacagcgctgggagagaaatgctgtctttatctcagtacctgtttatcttgagttgaaagtttgttacttgtaggtggattgtactctgtactgtgcttttgtct

SEQ ID NO: 146826 - DNA, 303 bp, Homo sapiens
gggcaggtgtatacgggagtgagcatgtgggtggaccgatacacactggggaatgagtgaagggggaggagtagaaatatatggatgagagatttctgggggtcaccatgtgtaaccagagatcaaagcaaatcttggggatatgatattataatgtagattgagtctatggtgaggttgtatgtaatgcatgatgccaacagcgctgggagagaaatgctgtctttatctcagtacctgtttatcttgagttgaaagtttgttacttgtaggtggattgtactctgtactgtgcttttgtct

SEQ ID NO: 146827 - DNA, 841 bp, Homo sapiens
taatatttcattatgtgtttagctcagaagtacaactgccggattgcaggatatactaaatagttttccaaggcttcctttaccaccctctgctcctgtatctaatttccgctctacaatgagggtaaaattatatcccattgtggttttaatttgcatcttcatgattaccagtgaggagcttttcatgtattatttagctattcatgtttcctttcatgtagaataactgctcttgtttttgcctatatttatagaagtttttgtatgttctgaataatcttttttaggtcatatgtgtggcacatattttatcctagtttttgtcttctctttttatttgcaatgtattgtcttatgataagcaaaagtttataattttaatgcatagagcttttaatataattgttttcacattttctgatgtgcttaagaaatcctcaatgctgtggtcatgaagttattctcattttttttcctaaaaaatttaaggagttgtttttcacatttcagtgtttatttggagaatgtgtgtgtatgtgtgagcaggtgtgtggtaggaggcaggaatccaatttccctttttccaacatgagtcctagtaccccttgtcaaatatgccccattaatgtgcaatgacaactctgtcgtatatgagttgccatatgtgtttgggtgtgtctgagttcccaaatcaattccatttgtctttttcttccatatccataataatgtgccgttttcattattacaactttattataggtcttaatatacagaatgggcaagtcacactacttgttcatcaggaaatcttaactattttccttttatcttccat

SEQ ID NO: 146828 - DNA, 461 bp, Homo sapiens
gggtagaaagggaatcggactgatagaggcagggagggagtgttggtcagaagttctgaactcaatttctggctttgttacttaaggtagaagacttactctctctagaaattagcttcctttttttatataatgagatagagctgagcagaacttatcaccttatctcctctacctgctcttttcctgttgttccctatttctttaaatggcaccatgacccagttaacaagtcagaaatctgagagtcagctttgacttctcctttaccctctgcattgattactcaccagttcatgctaatttcacctcttgaatttcccttgatctgctctgttctttctatcttcttggcaattagactaagcttaactccctccttctttcccctagtgactggactgtccatgcgaagagccacttcactacccacaggcttcctcctcaccctcccctctcaa

SEQ ID NO: 146829 - DNA, 590 bp, Homo sapiens
cagttacaacagctgttgagctgcagaggaactatttgtggtgggcaaattgtgcttcagagactattaaagatgcttcatgagagttgggggcatgggatgggaggtcccctagcttactgtcaggtgtcttactcctcaaggctcaggcctcaggtcagcttgtctgtcttcaggaacaagagcctgaaaacttcccaaatggcctagaggagtggagttgtaagcggcacagccttggccccaccctgccccaggcagagtgtctggcaggcattggggctggcgagtccactccaacagaggagcagctggaatgacccttctcaaagatctgcctcctcccaccctgactatcgcaaatgctgtgctctctagagctctgctcacaagactgtagggtcgagagtggcagttccaggcctcagcaagaaagcctttgcatgtggctgcaccagggagaggagaggcccagtagagccactgtaaacccaagccagctgcaagggcgtggcctatgggcacatttcccagggcacagctacaggaggcagtgctgaggcagaagaaggcccagaggtggatggacc

SEQ ID NO: 146830 - DNA, 324 bp, Homo sapiens
ttgtaaacaaagatctgatacaagcagccaacaaacatgaaaaaaatgctcaagggtcaggtgtggtggcttatgccagtaatcccagccctgtgggaggctgaggtgggagggtcaccagaagtcaggagctcaagaccagcctaggcaacacagcgagacctctgtctctacaaaaattttaaaccattagctgggcatggtggcacatgcccgcagtcccagctactcagaagctaaggcagaagggttgcttgagttcaaggctgcagtgagctacaattacatcatggcactccagcctggatgacacagtgagacccc

SEQ ID NO: 146831 - DNA, 453 bp, Homo sapiens
aacatcttgaacttctggacccctccccacaaagtaaagattggagtccatgccattgagttacttagtaatgtttttctgaagcgcctcccatgtaaccagaactatagggaggataaaagaaatatagcacctggttgataggaacttactgcatgttaaggagataagatgaatcctatggcttatcttagccaaacttaacatttgtgtccctcttttatattatttttctgtctcaaataagtgctgtagcattcaggcttgacggaaaagatagactttgttaaagaaaagtgcagaccatctttttggtttctgtagaatttgtgtggctctcaagtcactcagtgcccttcagaataggcagctatggacatggggggctttgtgaactgtcatctgcctgtgtcagtgagccttgctttggtatcaggcaaagggcccatcagt

SEQ ID NO: 146832 - DNA, 587 bp, Homo sapiens
aagagagaatgctaagtgccacagggtccctgaaataggtcccagaaatacagaaaggtaacctttgctcctgacctgaacaaagctgtacttcgtagctgtaagttctatgagattccctgtatccttcaggtaaactaaattcttgtttggactaaattaagagggtttctgtttctgacaactgagatttcttggccaagacattgatcaaatgtgtgcaatgacattatatttatgctccatatttttacacagaccaaaagttccttgagatcaacattgtaattttagctcattgattgactcgctaggtgatcttgagcaaaatatctctagttctttactattctgtattactgtccttaaacacgaacaaaattctatcactatgctttgacacaggtcagaagttaggagaaatgctgaagctacttgagaaataggcatactgcgcataattcaaggatgttactaagcagatgctagcttgggggcattcacagcagttctggcaactttaaatagctaatacagcttctgaggctgcccagctactgacacaacagggcttatccactgggagg

SEQ ID NO: 146833 - DNA, 123 bp, Homo sapiens
ggccactgattgactttttaaagtaaactttcaactcattgttttgctttcctgtctgtaaacataaaactgccagatgcaatttaatgtagagcctggactctgtaattccacagttttact

SEQ ID NO: 146834 - DNA, 256 bp, Homo sapiens
ctcctctctggcccaccccagggtgtttatggggcaagatggagcatggggtaccggccaggccctggagacagactgcctgggtttcagtctagtcctgtcatttactagctgggtgacttcacctctctctgcctcctttccccacccataaggtagaaacaatcacagtccctgcttcacagggaacttgtcaccattaagtcattattagcacttcaaaggcattaacaacagtccctggcacttaggaagt

SEQ ID NO: 146835 - DNA, 348 bp, Homo sapiens
gatactttactcattaccaaaaaattaaaagtattttagtacaaataattatgaaaataattactcttaactaaaggttgaatagttaattcattaggattttgtgaccagttttgaggctttggttacttcctttctgtttttttaagcgaaatattcttttttccctctgagatgcctgttataccatcagggatttttaaaataaagatttttttaatgattatccttgatttctttttttagaataaatttggtggagggcagctaaaactctagatagagactgcctacctgcttatagacagaaaatcaaacatcatttttgatgaaactcagctgatttca

SEQ ID NO: 146836 - DNA, 188 bp, Homo sapiens
atgatgttatggtgatttatatacttatctcacccttaagcttagaagttccttgtaggagggtttctatcttacttttttttttttggaaatagagtctggctcttgtctccatgccgataaattaaataggtcttcctaggaagcagtattcagccaaccacctctttctcaaacatcataaggta

SEQ ID NO: 146837 - DNA, 429 bp, Homo sapiens
gaacacagaggcagcagcccatggcagcgatgagagctatgcctcacctcctctgtgcctctcacagccatgccctccagacaagagctggaaaggcaggtggaaatttgacatgtatggacatatggaggtactggcattgtgtgtcattttttccttccattttggttttgagtagtggtgtgataagtgacagcttactacaggtgaaccctttctagttcttcaaaacccagtagaggtgttccctctcccagaaacctgatcctagggcgagaattcccttttcttcctctaggcttatggcatccttggcttgtgcctgggtgtggcaggtggcacctaggttcctggagaagctgaggaacccctccactgagggcccacaactgacccgtggtgcatcacctctaccgccccagtgcacag

SEQ ID NO: 146838 - DNA, 438 bp, Homo sapiens
cgactaggcagcctatggttttcagtattcccttaaatactaagctaaaagagaaggctttccccttcttttagtgtcaaagccacagtatagcatggtagcctctggttatggtcatgagtcctaaggcagaaaacaaggccttgggcagaacaaaggccctggggcataggtaaaaaaattttttaaaagttgatgggaaatcctctacctaagaagacagacgtctggtgtttggcacagtattggcccaggaggtgattaacaaccgcttctgaacaaatgtggagctagaaagaatttcagcttttatgggtcaccctctccctgctctgcttccagccttacccttttatttgttcttttgggaccatcattattcctaaaaatatgagggcatttttaaaaagtctattatttggtagggaaaagagatca

SEQ ID NO: 146839 - DNA, 433 bp, Homo sapiens
actaattattccactcaagaagctagaaaaaaacaaccaaaacaaagcagaataattactacaaataaaaccagaaattaatgaaatggaaaacaaaagatttgataaagtattaataagtaagtaaatatgacttttggaaagaccagctctacctagtttggtagacattctttggcagatatgactaagaaaaaggctaaataaataaatacattaagaaataaggaaggggatttaaccatagattctaaggagatgaaaaaaaagttattataagaaaatattggggccaggcgcagtggctcacgcctgtaatcccagcactttgggaggctgaagcaggcagatcacgaggtcaggagatcgagaccatcctggctaacacagtgaaaccccgtctctactaaaaatacaaaaaattagtcaggca

SEQ ID NO: 146840 - DNA, 401 bp, Homo sapiens
tctgacctccctgcccaaattcctttgtattggacgcaataatgagcctctcaggcaagacaattttcccagaacttcaatgtctatttctgtccgattagtgccaagtcctgaagaaggctgccaattaattcagagatgctataccaaagctggtcctctcctattcttgatcacgggatatacagatcaagcaacaatctccaggcttggtaggatggacactccctggaatacgtgatctctctaacactaaccctgactggctgagacagccctcttaccaaagagacagcagatactctgtgactggccccttgagggagccattaccaccatcatcactgcaacaaatgaaaacactttagtttaggtcagtctaggcctgaaaaccaggaaga

SEQ ID NO: 146841 - DNA, 700 bp, Homo sapiens
gccctagtgtgtgctgttcccctctgtgtccatgtgttctcatcatttagctcccacttagaagtgagaacggatggcatttgtttttctgtttctgcattagtttgctaaggataatgacttccagctccagccatgcctctgcaaaggacataatctcattcttttttatgagctcaagcttcgtagtagggaaaacaccggatattcagtctaaactaacattaaggtagggtatccaagataaaatgttttttctttgaaaaccactgaatatactttatggtagctttaccttgtttggctccagaggtttgcaaataagaatctattatttatatatatatattggtaaaagacaaaatattttttaaaaagtgatcttgagtcttctaaacattaaattggaagataaagtgccattttagagattacatagagacttggccctgtcattgattttaaaaatgaccttctcattgcactgatttttactccatgttaaagttagtattttatttatacattaaattagatttagagattagtaaataatgcttatatcaaggatggtgctttttaagctaattaggtaaaaattagggcagtgttttataatctactttaataaatgagtcttaccttagaattaatctattaaaaattaaaaaagaaaaattgaactacttctgagatagat

SEQ ID NO: 146842 - DNA, 156 bp, Homo sapiens
ctgctcctcttcctgccactcttcctccccctcctcctgttcctcttcctgccactctttcccctcctcctgctcctattcctgccactcttcctcctcctcctcctgctcctcttcccgccactcttcctccccctcctcctgctcctcttcccg

SEQ ID NO: 146843 - DNA, 590 bp, Homo sapiens
tccaccccatgtgtgccaagtgcatttgagccagcttgattattatttctcaaaaggcttccttattcctggatgaccgttacttgggcagcactaactcttctccactcctgctctcccatttaattgtccatggcagcctcagactccccgtttgattcatcagtccatcaactcccaaggattcttgagcaccagtcaaaggcgatcaatctgtggatgaggatgcagtccatggcgggaagttacagccaataaagggcagctgaagcactcatcaaaaatttaataatttgtggttcaaattagactgtgccaagaacttcaagaattaagaaatggggtaatgtagctgtggaggtcccagcgagaaaataatcaaattggtctttgggagacaggaagtcttttgaaaacagaaggaaaggaagaagagaattctggaagaaaacaaaacccatgagaagcaataactaacagcctgagcaacatggggaaaccctgtctacaccaaagatacaaaaaattagccgggcgtcgtggcatacacctgtggtcccagctactttgggggctgaggcaagaggatc

SEQ ID NO: 146844 - DNA, 312 bp, Homo sapiens
tggcatatcaggaaagcaactcagctttcatctgttagctatctgagttttcttattctctaagggtttgctattccataaccaaagggagaatatctgcattcacaggagagaagctatccaaattctaaaatgtgctcatttctggtatttagaaataagagaggttttgaagttatctccaaactgtgattcccaaatgatttcttctgagatttggtatctagattatccttttaaagtaagttgctttgtggtttgccttctgattattacatctgtatatctatcactgattcagccaaaacacag

SEQ ID NO: 146845 - DNA, 246 bp, Homo sapiens
aaaaagatatcattcatttcttttcaatggcacgcattgttatttgatggaaggaagaactgttggggatttggatagttaaagaagttcacatttttgctcttagaaggagtcttgctttgggtcagacagtcctctaccatttgaagttgacgtctaagaagatgagaactcaactttataaagtctcctcttgttttgagacaaaaggaaaaatagaggaaaaaccggaaagtccagctcaga

SEQ ID NO: 146846 - DNA, 385 bp, Homo sapiens
caaccccctcccctcagtctcacaccctggggctttgtactggcagcgtagagccccctgagctccaagcacagggcccagtccctgacaggcattccaggaacctcggtggaatcaataaagtgatttctagccaggcgggcatgtccatcaccagaaggttcgattccctttgtacacaccagggggcacagcaggagctgtgagaaactgctcccaattgtttgaattattgcctcaatgaggctactttgtggtaaaacaaaagaaaacaaaacgaaaatgcaagatggagacttgaaatttaaaagctgtgtgaactcacgtgtgtgttgtgagtgcctatagcttactggaatcatcatcttcatcaacatgattatat

SEQ ID NO: 146847 - DNA, 624 bp, Homo sapiens
gtagctataggcagccatgtttcccatcatgaggtctagaaagacacaggcagcccacctgtaaagaaaaatgtggcaagtcacagagaggaggaggtgtgaaagctgagagacagaacttccaggctgctccacggtgctcagggtctatgttcagcatgaccctcaggcacggctgtgagattccccaatgttcttacaatcaattcccccctgcctttttttctgtatcctaacactgacagacttctatagattatgacagttctgactggaaaaagggacaggtcagataaactttcagaaagagacctggcagcactgtagagaacaggcttgaagtccaaagaccagagacacttaacagagaaggcaggaagcttttatacttcataatatttcaaggtcatgagtgtgccctttcctctttctggaaggaccaactttcatacattgaatttttaatctctatctgagctattacagaacagtgcacagcagctgtgttgatttataattgattggccaatcttaattttactctagtgaaatatgaaacagctaagaaataagcctttaaaaaattcctcttaagctccataatgcagaagctggctctgtctc

SEQ ID NO: 146848 - DNA, 372 bp, Homo sapiens
ttcaagaccagtttgagcaacttggtgaaaccccatctctaccaaaaatacaaaaaagttggctagtcatggtgatgtgcacctggggttgctcagggggctgaggcaggaggattgcttgagcccaggaggtagaggttgcagtgagccgagatctcgccattgcactacagcctgggtgacagagtgagaccccatctcaaaaaatcaatcaatcaataaatcaatacatagaagatgtgcattggatcagccccaaaaggcgagatatcttgaagcttacaggttataggtgggtttagggattctttagttggcagttggttgaaagagttgagctttgcctaaaaactgggagtcagtagaaaggaa

SEQ ID NO: 146849 - DNA, 210 bp, Homo sapiens
ggggagaaggtgggtgtcaggaaacatcccaacgccagtattcgggatgccgggagagaacagggggcacacatccaatgttgtatttcaacaagtcacaggacttttgagtcagctctgaactggtttgaccacagagaaaggatgactcttatgcctagaaggtgagtgaactatcacttattttgctggaaaaaaagtgggggaggg

SEQ ID NO: 146850 - DNA, 297 bp, Homo sapiens
  misc_feature (269)..(269): n is a, c, g, or t
tgaaaattattccgtccatctgagaaggtcaataaattccaaataggctgggcacagtggctctcacttgtaaacccagtactttgggaagctgagattggaggattgcttgagtccaggagttcaggagaagcatgggcaacatagcgagaccccatctctaaaaaaaaaaaaaaaaaaaatttagctgggcatggtggtgcattcctgtagtcccagataatttttgtatttttagtagagatggggtttcaccatgttggccaggntagtctcgatctcttgacctaatgttcc

SEQ ID NO: 146851 - DNA, 148 bp, Homo sapiens
tgcatatcagtaaaaatgagtgccatgaaggaaaaagtacatagtgttatgaaaatcaccataggaggatttaatttagaatttgggggaaaagaaagtctgttttgataaagaaatttaggtccctctccctctcccgctcccgctc

SEQ ID NO: 146852 - DNA, 367 bp, Homo sapiens
cattcaagggcttgctggcttccaacttgctacttactgcattgaaaaatattccacacgatggaagaactattttccaaaacaaaatgctagtattcatcaggaggcgcgggttgtgcagtgtgaacaattcactttcgttaagtaccatatggccgctggtaggaaaacgctaacatgtttcaacagtacagctgggggagggctcctttattcaccgtgcagatggctctaattgacatctctcctaaaacaggtctccagcatttctgcaggatcattagagtaattagttattaaataccatcaccacttttagagagggggtctgatccttggcaacattccagcgtgatggaactgacag

SEQ ID NO: 146853 - DNA, 370 bp, Homo sapiens
ctgggattacaggcacgcaccaccatgcccaaataatttttgtatttttagtagaaacagggtttcaccatgttggccaggatggtctcaaactcctgacctcaagcgatctgcccacctcggcctcccattttgctaagcccgtgaaggtaaacctctgtgttttcttctaagcattttatagttttagctcttacatttaggtctgtgatccactttgaattagtttttgtatatggtgtaaggaaggtgtccaacctgattctttgcaggtagatatccaattatttcagtatcatatgttaaaaagacttctttctacaatgtttgtcttcacccttgtcaaaaatcaattgactataaatgttaa

SEQ ID NO: 146854 - DNA, 227 bp, Homo sapiens
taatacaactaaaattcacattatagatttgatatattcagcatgtatcttaagtactactggccagtcagaactattgatgaaatttaggggtataatattaagaagagattaattgacatgttttattgaacacctggcttgtgccttgttctctgcaagcataaaggtgaatataaaagaaacatgaacctcgctttgctcttacggagtttaccatcccagct

SEQ ID NO: 146855 - DNA, 340 bp, Homo sapiens
cctggtactgctggttcagggttctctcagagctgacctgtcctggacaccgtctccagtgtctactgggcccctgatgttgtctctgaagaatctgctgtggagctcagagtcctgggacatggtatatgtcggagttctccagagagacaggatcaatgtgttatacagatacagaagaggggacttactaagggaatgggcttatgcaatcgtggaggctgcgaagtccggtgacaggctatctgcaagctgaagaccttgggacatcaggagcgtggctcagtccaagcccgaaggcctcagcaccagggacactgatgatataactctcagtccc

SEQ ID NO: 146856 - DNA, 213 bp, Homo sapiens
aggatggtctcaaactcttgacctcgtgatccaccctccttggcctcccaaagtgctgggattacaggcgtgagcaattgcgcccggccgatttattacacttttgaaaagtttgactagtgaccacatgtacaaggaaccaaagcaacaaaaatagggcacccagttcccttcccaagagaccaccacaattccagtttcctgatggtgacc

SEQ ID NO: 146857 - DNA, 588 bp, Homo sapiens
ccgaggttggtggattgcttgagctcagaagtttgagactagcctgggcaacatggcaaaaccctgtctctacaaaaaaatacaaaaaaaagccggtgtggtggcagccacctgcagtcccagctatttgggaggctagggtgggaagatcaattgagcccagcaggttaaggctgcagtgaactgttaccatgccactgcactccagcctgggtgacagaaagagacctgtctttaaaaaaaaaaatctttttttggaggaaaaggtaatggttatagaaaaatcatataagcttaactgattattttaatttgttaagagtttagagaatagtatgatagtttcttgggagtagaccatatggtaaatgtatgtttttcaaacttactaaatgcaatcaaactgttttcagtggttcaagaagtatttgcaaattagagatgatattttgctttttttcatttcattttgtgaactggtgataactgtttttcaactttgttttactctgttttgtgttgctattacagaatacctgagaggaggtaacttataaagaacagaaatttcttctcttacagttctgg

SEQ ID NO: 146858 - DNA, 452 bp, Homo sapiens
gtagcagctagtgcattatgaaaattacaacacaccagccaaacaagctttactatctctgaaccacacactgctgtgtggccaagctgccttgccctgagcaagttcatcaagaattaccatggcaggaattcacatggaagaaaaattaaaacaaatagaaactagtactaaacttccagtgaacaataaaacttcagcaagtgggtgggtaagtggaggaatgaagatattttccaagtttcctataactaaaactggcacaagaagtatggggaaaagaggggatgtttagttctcaatcacacgaagtatctgctacaaatttgatttctgctctgctgggtcctttcttatctggtggaggaaacaaatccactttcaatgatagatcttcgttttttcctgttacccagaaaaatggtaccttctaatatcctttctgaacacat

SEQ ID NO: 146859 - DNA, 428 bp, Homo sapiens
ccaggctggccaacatggtgaaaccctgtctctactaaaaatacaaaatttagctgggcatgatgatgagtgcatgtaattccagctactcgggaggctgaggcaggagaatcacttgaaccagggaggcagaggttgcagtgagccgagatcacaccattgcactctagcctgggcaacagggcaagacaccgtctcaaaaaaaaaaaaaaagaaagaaaagaaaaatgaagtattgaaaaaagtaataaataaatatgttgctgtaatagaatgagattagtgctaggagcacagtaagaaggaagaattaaggattgctaaaagaaatatattgaaagaaaaaatgactttaaatgtaagagcaaaataattgcttcaagtgtagataactagaagcatgctgaataaaagtttcacagctggcc

SEQ ID NO: 146860 - DNA, 149 bp, Homo sapiens
taatcggctgagttgtgtccatgtgggcagtgcaggaaaggatgcagcgggacgctgctccagggatgtctttggcttccatcatgggggagcaggcgcctggattacccacatggacacaactcagccgattaatcttcctctcagaa

SEQ ID NO: 146861 - DNA, 227 bp, Homo sapiens
cccctgaaattaattcaaatcccagagggtgattcatagactctcaaagtcacaagaggctttaggagccattgagtctaacttcataaattggtaccatattctcttctaaaagagttccattattgtggttcttactagctcattcagaccactctgattattagacaatttccctgtattaagatgaatctcccttttcataattcactcacatgacactctta

SEQ ID NO: 146862 - DNA, 470 bp, Homo sapiens
cgatgtaccgcccattttggttcatgtggactattccaggaggacctagtgagcaacataaccaatctagaagcatgtcagtctaacaaaagaatccagttggatgaactagaattaagttttgagtccccattttggctgagatactactcagagggtagataaaccaggccaaagtgaggctgccaaactaagatccttttctgttgacagctgcacttcatggccaatcttctttctaggtttattgaccaggaggaagtgaagggagtagagtgagaattatttttgagttgattatttaggagcccattccaaagctcaaaaacaacagataatcgtggatggtagggagtgtggaagttccactggatatactttaactatcagcccattaattattggggtttttttggtaataaaagaagcactaatatcagactgcaaaagtctgaaaattaaagtacatg

SEQ ID NO: 146863 - DNA, 125 bp, Homo sapiens
aggataagtcagtgggctccacctgtcctcaccccaaggcacccagctaaccagcccaccaccactgaggcagggagacctgcccacccttgggatacaacagtgatgctaggatgcagcccctc

SEQ ID NO: 146864 - DNA, 381 bp, Homo sapiens
tggaaaagcaaaataaggttcctgttcttcaacagttgagggttttaagtcacaactaagtgcttggttgtgcttatactaggtacattcctataccacgggaaccaggtagtggctttcctggccatttgctaagttatggttagacaggaacaagtgtaaactagtctttgtcatagtgtagtttcctgttgttgaaatattcctttgctttctcggcttccctaacatgtaaattctgaagacccatcttaaactctccccagtgtcccaaatgaatttattccagtgaagggtaaggggcttgcattatgaacaataggtaggtttcttttccaagagctctggtctgcttttgttcatttactcatctcattttgt

SEQ ID NO: 146865 - DNA, 1187 bp, Homo sapiens
cttctgtggagaaccacctgccatcaaagatgctgtcattacggggaataacttcactttcaggaacaccgtcacttacacttgcaaagaaggctatactcttgctggtcttgacaccattgaatgcctggccgacggcaagtggagtagaagtgaccagcagtgcctggctgtctcctgtgatgagccacccattgtggaccacgcctctccagagactgcccatcggctctttggagacattgcattctactactgctctgatggttacagcctagcagacaattcccagcttctctgcaatgcccagggcaagtgggtacccccagaaggtcaagacatgccccgttgtatagctcatttctgtgaaaaacctccatcggtttcctatagcatcttggaatctgtgagcaaagcaaaatttgcagctggctcagttgtgagctttaaatgcatggaaggctttgtactgaacacctcagcaaagattgaatgtatgagaggtgggcagtggaacccttcccccatgtccatccagtgcatccctgtgcggtgtggagagccaccaagcatcatgaatggctatgcaagtggatcaaactacagttttggagccatggtggcttacagctgcaacaaggggttctacatcaaaggggaaaagaagagcacctgcgaagccacagggcagtggagtagtcctataccgacgtgccacccggtatcttgtggtgaaccacctaaggttgagaatggctttctggagcatacaactggcaggatctttgagagtgaagtgaggtatcagtgtaacccgggctataagtcagtcggaagtcctgtatttgtctgccaagccaatcgccactggcacagtgaatcccctctgatgtgtgttcctctcgactgtggaaaacctcccccgatccagaatggcttcatgaaaggagaaaactttgaagtagggtccaaggttcagtttttctgtaatgagggttatgagcttgttggtgacagttcttggacatgtcagaaatctggcaaatggaataagaagtcaaatccaaagtgcatgcctgccaagtgcccagagccctctctgggtcactggacaagaacaaacaggcttaaggcctggggtaagcacagtgttgtttgcagagctcactgctgcaaatagcagccag

SEQ ID NO: 146866 - DNA, 246 bp, Homo sapiens
cgaggtgaacctttatgagagcacacctcacagggtggggaaccagcatgtggggcctattgcttctcagtctgaggaggttccccattcccttctcttagcctactctcttggactcgataaaaataacaacaaggcctggtgtggtggctcacatccataatcctggcattttgggaggccagagctagaggatcgcttgatgccaggagccagcctgggcaaaataatgagaacttgtccctg

SEQ ID NO: 146867 - DNA, 162 bp, Homo sapiens
cgctgaaacacatgtataaaaaaggtatttatatatgtttttcctagtatacaagctttcaaagcagacaaaaacaagacttatacaagacccatctaccaaaaattagctggacctggtggcatgcacctttggttccagcaactcagaaggctgaggcag

SEQ ID NO: 146868 - DNA, 483 bp, Homo sapiens
aaacattgtgctcagtgaaaaaaaaagccaaacacaaaaagacacatatgattcaatttataggcaatgtccagaataggcaaatccatagagacagagaggaaatcagtggttgccaagggctgaggggaggggagaattgggagtgactgtttaatgggtacaggatttctttctggagtgatgaaatgattctggaattagatagtggtgatggttgcacagtcttctgaatgtatgaaaagccactgaattgtataatttaaaatggtttaaatggttaattttatgttatatgaattttacttcaattttaaaaagaataagccatagaaacaacttcccctattctgtgacccattcacttagagccttgtgatgggcagctaatgtcataatttaatttgtgccgggaagttaacagctaatggcatttcactgttagccctctaagaagccatttgcatgtaaagccaatattgc

SEQ ID NO: 146869 - DNA, 360 bp, Homo sapiens
ccctttacccatccatagcagccctcatgacactatattcgaattattatttacatgtcttcctaaagtgaagctcttgggagcaaggtcaatatatattgcccatcattgtatttcaagcctcaaaacccatgattggcaattaaatgattatttaatgagtggatttgtgctgatgtgccttttctaatggtcagcttaattgtaacctacaatttctgcaagttgatctattatttgctttgaccaaagtaaacatttgaatcatagagcaaaattttatagaacctaaaattgtctacaatcaggcttgatcaagtgcaattcctaacaggcagtatagtgtaatgcagtggctcc

SEQ ID NO: 146870 - DNA, 271 bp, Homo sapiens
agagtccccactgtctgtcctccccacagcccagtgactcagagaggggctagggtgaggccacctggcaaacatccccaagaaaaagagaaccaccaaatccagagagatgccttttcatcttagggagaggggcagggaagggaatcagaatatctgagttcctgccctactggggctcccctcggggaagacagagagtgcaagaaacccaggaaactccctggatgatcttgggtagtagtagaccttttgacctccctagtcagag

SEQ ID NO: 146871 - DNA, 446 bp, Homo sapiens
tagtaggctctcaggatgcacaatgaccctgtccctgcttgctggagacataagagaagcccccagccactgacatctgggtgttgtaagaaagcaagaacagtcatggacactgctaagttttgatgccaaagagccaaatttgcagtaccagaatgtcctttccatgtgtgacccaaagttttggctactgaagacgttgcatgccctccaacagtggaagtggtgccctgaatacgccagaaataatcgtggagtcaacgaagatctgggagtattgtttggagacatctcagtattcctaattcattttcccatccttaaataaaaatctttcttactgatgatctgagaacttcttgtaagccccatttccatgagtagagttggccattgcccactaagaaaatttaggtggtttttattgggattagtggatgaactta

SEQ ID NO: 146872 - DNA, 264 bp, Homo sapiens
cagggtttacctgatgtccctgctctcttagagtcagctggttttttttaagcttttaaaaaagatgttgttttagacctaggtaaaaaatttaggtcttttagtgttttattgctatatcagtagcattatttgtctttaagtcttttcagatggctttttaaaaaattggcataaggttgtgcaggctgtgggaatggaaactgctgcgtgtacttgactttctggccccctaggcctggagagtgtttcatggccctctgg

SEQ ID NO: 146873 - DNA, 488 bp, Homo sapiens
agaggattaggtatagagtggcatgagatactacttcacacccatcaggatagctgttagcaaaaaacaaaaacagaaaacactaatgttcgtagcagcattgttcacaatagccaagagatataaacaagccagtgcccaacaacagatgaaaaaataaacaaactgtggtatatacatacaaagggatatgattcagccttaaaaaggaatgaaatgctgacacatggttagttacaacatggatgaaccttgcaaatgaaaccagcccaattgtcctatagaactgatgcttacagtcttttaaaataaagatagaaattgaccctcccagtcttaaaacttgagaaagttacatttgtcttatctgaattccttttttgggaaacaaaccataaggcctcccagatagttatcaaggaactgaaacttaccacatcaccacatctgaaccataagacaccagaccacctcacccatcacaattg

SEQ ID NO: 146874 - DNA, 314 bp, Homo sapiens
gggggaagagataacttaagttgtaatgatgataacggaaatttgtataataaagaaatctggcaactcccaaagttcaaagcgttcatcttttccgaataatctatcacgaagataaaatttgcttccctttaggcctggcagagtggttcaagcctgtaatcccagcacttgggaggctgaggcgggcggattgctgcttaggagttcgagaccagcctggcaacatggcctaactccgtctcttaacaaaaatacaataaattagccgggcatgggggcgcgcacttgtggtcccagctactcgggaggct

SEQ ID NO: 146875 - DNA, 395 bp, Homo sapiens
ctataacactgtggatagcggacagagggatggggacagagctgacactcaacacatctgaaatgacacctccattacaaagggtcggctgctctacattccctggagaatttcacttgctcctctgtttttcagatgcattgctctgcaaactttggtttccctgggtcttccttctcaggcctctcgtttctcctgaatgatttcataatcctcaacatgttctgtcatcgcagggagttgatgtgaacatgattactggggttatgaaccaaggactgcgacctcaataggggagaggcagaaaaaaaacacagctagccaccaaaatggatttcacagaccttggtcacaaggggataaatgagggcacccagccctgcagccatctctat

SEQ ID NO: 146876 - DNA, 110 bp, Homo sapiens
tgagaggtatgcttgctgtaccactgtcacagagaccgtgggttcaggagcctgtaattaataaagctaggtatggtggtgcacacctgtaatcccagctgcttgggaag

SEQ ID NO: 146877 - DNA, 229 bp, Homo sapiens
tccacaacagccaggccacacacctgcccacctatagacacagtgctgtctgatgccaacacgttgtggcacatgctgtgcctctgccagaaatgccaacccagagccttcgtggctcggctccagtgcctcctcttccaggaagtctcccacaccttccttggctacagctcatcagtccccctgctcttgtacaaccaggacactggggttaaacctcagagggaca

SEQ ID NO: 146878 - DNA, 254 bp, Homo sapiens
aagaacccagagaaccgaggtgctcccattgatagaaagaaagaccaggcagaaacaaaaacagagaggtgttggctctgagcaagaccttctacctcgagcagagaggcctgccccagagagaggcagcaggctagttcagcaacgttgtcgttcacagaaagaacgtccagggaaagaatgggcgggccttctttttgcaaggtcagagctcgtccagtggaaaggctctggggctgcaacgcacaggatgt

SEQ ID NO: 146879 - DNA, 232 bp, Homo sapiens
ctcttgcctccctcttatcaaaacccttatgattacattgggcccacctagttaatacaatataatcttctcattttaaaatccttaactcattcacatctgcaaggtccttctgccatgtaaagtaacatatacacaggatttgggaattagtaggtggacatctttgagggggtccgttactcagcttaccataccctctgtatccaatatatcactaagccctatttat

SEQ ID NO: 146880 - DNA, 501 bp, Homo sapiens
caagagatgatggtcatttgaaccagagtggtagcaatagcaatggtgagaagcagttggattctggatgtattttgaaggtaaagccaacctattggaaattagagagggattagatgtacagtataaaagagaaagaagagttaactgtagcttgagaaactagagttgtgaagggatgtacttgtcattattgatgtggggaagactaggggaggagcaggattaagaagggggcagagaaaaacaggagtgtggttttggacatgttaaactgaaaatttgtattagacatccaggtggaaatgtcaggtaggcagttgtacataaaattcttgaggttaggggaaaggtcaaagctggaaatatatatatatatatatcagtgtcaccagcatatagatcgtatttgaggctttgagctctacgagatcatcaaggaagtgagcatacctaaaaaatagaagacggctaggtatgagctgacaggtgaaagaaaaa

SEQ ID NO: 146881 - DNA, 93 bp, Homo sapiens
agacctccctaggaggtgacccacagatgagggccacagatgagagcttcttgctcttccaagaggcctaggtaaggcttctagtcagaatgg

SEQ ID NO: 146882 - DNA, 588 bp, Homo sapiens
taaaatattcaactaggttaaaagtgtcagacatatcaatttggaggcaagctgcaaaaatacacaggaaaaaaggtcttagaagttgagattagataaactcttttacgggatacaaagaaaaccaaaaaagtggaaaatgggttctaagaggacactcctgaaaaggcaagaaaaggaaccgacattcacttatgaaattcacacttcctgaatgtctactatggacagagcatgattccagttatggggaaggggaaatgaacacacagacaggtcacaaatgagcattggggaaagaggggaaagctgagggagcgctacatcatcacatcaactgagcatggacttggggaaataaggtacaccacaagctgtgactcaattcacaagcacaggtggaggacgaggttttggtatctgaatgcctaaagaaataaataaaatcgagggcagaaaataagtccaaggtttttttttgtttgtttgtttgttttttttttgttttttttgagacggagtctcgctctgtcgcccaggctggagtgcagtggcgggatctcggctcactgcaagctccgcctcccg

SEQ ID NO: 146883 - DNA, 541 bp, Homo sapiens
taaaatattcaactaggttaaaagtgtcagacatatcaatttggaggcaagctgcaaaaatacacaggaaaaaaggtcttagaagttgagattagataaactcttttacgggatacaaagaaaaccaaaaaagtggaaaatgggttctaagaggacactcctgaaaaggcaagaaaaggaaccgacattcacttatgaaattcacacttcctgaatgtctactatggacagagcatgattccagttatggggaaggggaaatgaacacacagacaggtcacaaatgagcattggggaaagaggggaaagctgagggagcgctacatcatcacatcaactgagcatggacttggggaaataaggtacaccacaagctgtgactcaattcacaagcacaggtggaggacgaggttttggtatctgaatgcctaaagaaataaataaaatcgagggcagaaaataagtccaaggtatttttaaagcaaggaaggaaagaaaatggaagataaaaagaatgaacataaaagtctcaagttaattt

SEQ ID NO: 146884 - DNA, 998 bp, Homo sapiens
cagtctctgggctcctgtccctctgccctccccctgctttacctgtgtcaccaaaactctccggggacagcaacacctacctcccatgccaccgtgatgattaaatgtgaaaacacatatgaaaggtcttcgtaaactctaaagtgctttatacatggaaaatagaattaatatctgtggaggagggagaaatagaggggcaccttgaagaatgaataggtgctacgtaagtggagagctgtgtgcctgcctgtcaaggaagtaagcactttataaaagtcaactcataacgtcaggcagggactattattattcccattctacagatgaggaaactgaattccaaaaagtttaagtaacttgatcaaggccacctcgttggtaaatagtaaagtttggactcacaccgaggaagtctggctacaaaatttgtgctcttaaccaatatgctcttctgcctccctcattgaaaaaaaaaatgtttgtaattcaatttgattccaatcaatacatggcttgagtgccagactgggcactggctgtgtaatgatgaagacagtccatgctctccagaagcataagcaaataagaaaatactccaaagaataaggaaataagatactacaaatatgactggcactggaataatgtaaagaagaatgtggaaatggaaaagaggaggagtgttccagtggccgtgcatttaacagagtagagaaccaagcgggtggataaagagcagttcaaggtgaggctgaaaaggtgatgttctggagcctgatggtggagggtccagagtgccaggctaaagtgacagggtgttagcctggagagggtgggcaactgtgaaggattttggatcaggtaaatagtatatcaaaaagagaattttaagagacttaaactaatgaaataggagaaggacgtttatctgggatcagcacagttactctagtctgtggattggtaaagataaataaaggttaatttttcaactt

SEQ ID NO: 146885 - DNA, 2965 bp, Homo sapiens
  misc_feature (585)..(586): n is a, c, g, or t
atgcacaggtgtacagaccacctctgttgatgcgcgcgcaggagactgtgagcagatgccacactaggtgggtgctggactggagcctggggaagaactagaggggctggaagggcgcagggaggtctgccagggtgaagggacagcctaggggaaacccagctcggaacccacaaggcagggcagctggagcgtgcagtctggtctccccgtgttcaagctctcactgtggggcttcatctagtgcatgacacccctgggagcacaaatgcctgctcctactgataaagaagcagggggagtgagcggctcccaagcagcggcgcaggagcgaaggcaggtctagacatccctgccctttttcccatcacagcagtctgcagttgctgctgaggtcgagtttccgaattgaggtgctgctttgctccctttccaactcaggctgctctaagctcttccagaaaggggctccagagggaactttgccaggacagttggagaactgccgagacaggcagggttcctggttccagagccccacgagaaaggggtctttgctttgcaccttcctgcagcctagcagcnntcctgcctcagagcaggacgaggcctggggtcttctaggaaagccctttgtacactgtcaaggggatccccacgccaaggccatttacagcctttgttcttccagcctgcggaccctcctgcctagccctgccatgttcgcagcagccagccagccagctctgcctctgcccgaggccagggaccccgaccttagagcctggggtttctaggtaggctgccctgcttgcctgtggtttggacaggagagctgggcttggcacaagtgggtgctggaaagaggcttcaatatgacggactttccgtctctggttaaatcacaataaaccactggaggagagctttgaggctgtggtttgaatcctgggtgccaggagacctttctcccacctcgctttccttgctggaaatgagggtacagtaggtgacccctcaggtccctctgagctaccactctacaaatcactctgctcagattttagctactgccattaaggcacagtgcagagagtttaaaaattgctgcagagtttaaaaattgcctgacatacaaaaattagccaggcgtggtggcgggcgcctgtagccccagctactcgggaggctgaggcaggaggatcacttgaatctgggaggcggaggttgcagtgagccgagcttgcgccactacactccagcttgggtgacagaatgagactttatctccataaataaataatcgcccaacagcaggctgggtctccatacccagcttttccaggttcacctctcgtggctgttttcacatggatagggaagacatgggtcatccttccctcccagactccccccaggacactgcccggccctctagacagcaggtggagtcagcagagggagcagggccttctttttgtggttaatgatctctgtcctaagcaatgccatggccccagactcacatacatctctaataaccagcagaggactgtttcacagaaactgctgtgttccagacaagcagggacaccgatttccctcccacttgccacgggagatgggaagaatgataccagcagcaggaatcctttttctgggtgatcgaaagacaattttcagtttaaaaagcatccttggaatggctgtgggtgaagccttctcctgaggcctgggatgggctgactttagcactttggctttctatgggtctttgaagtgagatggagtgaaaggctgttctactcaggtgtcctcagacttggcacctggctaagtgctgtccctcgcccagatgggaagaggctgcagtgactggccctggagctgatgttggcctatcccccaggatggttttagccacctggctgattgtggaaacttctccacaaaatgagatgaattatactgtcctcaacattctcccaataaatactcagaactactatcagcttaggccaaggcatggtgattatactttcgagaaggatagttaagcagagaatcacaggatattttctaactgacgaccggaggtgtgtgtgtggaaggtatccaggcctgggaagttgacacagggcagtgagatgaggacaggctaaagagccatggtaggttgaccccaagaggccattgtggagaatacaagctgaaatggctcttgccaacgcctgggacaagctattattttatcccaggaatccagaaccagaagaaacaagcaaatgaagtgattttttttttttttttggagtgatggagaacaatggcagttttgttttgtatactgtgagctctcaacagagttggatttatttttctctcatataaaccccatcccccaaacatttttttttttttttagaggtgatggtagcagacagtgcttgtcactaagtcctctcttggggtgggggcagaggtggtgaggagcaccggcttaggggaaaaggcaggcaagtgaggagcaggccgaagcctgggactgtggaggatgttcgctctgtttgcaggctgagctgcggaaggtaaaaactccaggccaaaggattctagaaatatgggcacaggggtcatattttcatgaaaaaataaaaataaaagcacagggtgggccgggcacagtggctcatgcctgtaatcccagcactttgggaggctgaggtggatggctcacctgaggtcaggagttcaagaccagcctggccaacatggtgaaaccccgtctctactaaaaatacaaaaattagccgggcatggtggcacttgcctgtaagctcagctactcaggagcctgaggcaggagaatcgcttgaacctgggaggcggaggttgcagtgagctgagattgtgccactgcactccagcctgggcaacaagagcgaaactgttttaaaaaaaaaaa

SEQ ID NO: 146886 - DNA, 279 bp, Homo sapiens
tctctctggctacttttaagatctttgcttttggagctttgtggtttctctacaccatgtccagatgtgggtttctttctttttctttttttttttgagacagagtctcactctgtcgccagctggagtgcagtggcgcgatctggactcactgcaacctctgactccctgaggcaggagaatcgcttgaacctgggaggcggaggttgcagtgagctgagattgtgccactgcactccagcctgggcaacaagagcgaaactgttttaaaaaaaaaaa

SEQ ID NO: 146887 - DNA, 1854 bp, Homo sapiens
  misc_feature (72)..(72): n is a, c, g, or t
tggttgcctcccaaattttttcccccaaacttgctttggggacaatttcatcactgtatcttttaaataatntatttttttgtgagacatagtctcgttctgtcacccgggctagagtgcaatggtgccatctaggctcactacactccagcttgggtgacagaatgagactttatctccataaataaataatcgcccaacagcaggctgggtctccatacccagcttttccaggttcacctctcgtggctgttttcacatggatagggaagacatgggtcatccttccctcccagactccccccaggacactgcccggccctctagacagcaggtggagtcagcagagggagcagggccttctttttgtggttaatgatctctgtcctaagcaatgccatggccccagactcacatacatctctaataaccagcagaggactgtttcacagaaactgctgtgttccagacaagcagggacaccgatttccctcccacttgccacgggagatgggaagaatgataccagcagcaggaatcctttttctgggtgatcgaaagacaattttcagtttaaaaagcatccttggaatggctgtgggtgaagccttctcctgaggcctgggatgggctgactttagcactttggctttctatgggtctttgaagtgagatggagtgaaaggctgttctactcaggtgtcctcagacttggcacctggctaagtgctgtccctcgcccagatgggaagaggctgcagtgactggccctggagctgatgttggcctatcccccaggatggttttagccacctggctgattgtggaaacttctccacaaaatgagatgaattatactgtcctcaacattctcccaataaatactcagaactactatcagcttaggccaaggcatggtgattatactttcgagaaggatagttaagcagagaatcacaggatattttctaactgacgaccggaggtgtgtgtgtggaaggtatccaggcctgggaagttgacacagggcagtgagatgaggacaggctaaagagccatggtaggttgaccccaagaggccattgtggagaatacaagctgaaatggctcttgccaacgcctgggacaagctattattttatcccaggaatccagaaccagaagaaacaagcaaatgaagtgattttttttttttttttggagtgatggagaacaatggcagttttgttttgtatactgtgagctctcaacagagttggatttatttttctctcatataaaccccatcccccaaacatttttttttttttttagaggtgatggtagcagacagtgcttgtcactaagtcctctcttggggtgggggcagaggtggtgaggagcaccggcttaggggaaaaggcaggcaagtgaggagcaggccgaagcctgggactgtggaggatgttcgctctgtttgcaggctgagctgcggaaggtaaaaactccaggccaaaggattctagaaatatgggcacaggggtcatattttcatgaaaaaataaaaataaaagcacagggtgggccgggcacagtggctcatgcctgtaatcccagcactttgggaggctgaggtggatggctcacctgaggtcaggagttcaagaccagcctggccaacatggtgaaaccccgtctctactaaaaatacaaaaattagccgggcatggtggcacttgcctgtaagctcagctactcaggagcctgaggcaggagaatcgcttgaacctgggaggcggaggttgcagtgagctgagattgtgccactgcactccagcctgggcaacaagagcgaaactgttttaaaaaaaaaaa

SEQ ID NO: 146888 - DNA, 327 bp, Homo sapiens
ctccccacgaagactcagctgtttatccactgtgtactctttccttaaccccactcttcagatttctcagaagatgcccaagtgaggaatttgcaaggtttcttttcactcttcagcaagccatgcaagcagctctctttcctgtcaatattgttcttttcagtttctcaaacgaactgaagttggaaggccaggttccagtgtataattcctgtatttgtgtgaattctgtgctgaactactgctgccttgggaaaggttatctgactttgatcccatagccactaccctgttctctccacctgtcttcttactgcatcacgaggg

SEQ ID NO: 146889 - DNA, 2016 bp, Homo sapiens
atcaggatgtctgagaggagagcatggtgtttttgcttcattggatccatgcaggtcttggagggtggtggcccactctttctgggccaagtagagggtggctcagacacccccccttcctccaggcttctcatctgtaactggtgaagcccggaagagcttgttgttcaagaggaaatcttgtgttacttctttatgaaggactccagcctggtggagatgaatgagtcctgaagatggaatcgaagctgtttgggcacaatactttaatcagcatttaatgacccagtcgaaaattcattgtttggacccaagcactggtgggaaaggcaggaggggaggcctgccttccttcctccctcccgagccctacagcaggccatggagtggtgagcgagttcgtacagtgccaaccacattcccagaaacttccagcagaggttaatcctgctcctctcaggtaggagacaatgaatggattttaacaaatggactccctgtgttagctaatgccagtccctactcaacctaggatgactccaatggcgcatgtccccattcccgggccctaaggctgcgctaacatgctatcctgcctgccccttcattctccaccctgccacattcccactcctttcccctcccaacacgaagccatgcctgagctggacacccttccataccaacccaggaaaaagtgattcagctccggtccaccctgggtgcagcggtccttctgccaagatgccttcatatcatacagctattattttcgggaggattccaagtgagggcagtcagggtgggcttggcccattctctagactttggaaggtaatgttctatagaggcctgttctgaagctttaccaggtcaaaccggagaagaacccaacaagtaactcatcccagcctaactattcttcaagggcaatcaacctacagcatccaagcacagagaaatcaaatccatggagaatcttcaaattaggctcagaatccatttgggtcaatgaatttactgttattaagatcttagttgtgttcaaccatgatttgacataccttagagtgagaagatattcttcctggcctcagactagttgaaggtagagagagagacaggcccttgggtgtggggagacctctcctgggataatacacacaaaaaaccaagagctgctcactgtggtgcaggagacagcagggcctgaagccagaggctctgtgtccttgaatacaatgttttactcctctgacccctgttactgtgatttggagaggcagacaatataggatgggctttgcaggcagggaggtccagttataatcccagctcttactaagttgggtaagactcactctgagacttagtttcttctgtcatctctcaatagaatcataaaggtactttcctcttagtgttgttttaaaattcagtaaaataatgcaggcttagcacagggtctgatgtaaattttcaatgaattatcgttgtcaatattgctctggaaaacaagagggcatattagaagatcaaaagtactgccaagcattgaagtgccaattctagatccagtctcagccctctgagaatggatatcattgttttcaagccattcagaaaccaatgtgaattgaacacctagtatgagctctctgagggaagagccaagtcatgcattttttatcttaaggggtcttcaatacctctagcccaaaacagtatctccatcaggattcttctctgatagtgttcatttcttttttctcaatggatgccttaaaaaaaaaatcctacaaggaaacctgtactcctcaaatacaccactcaggtgaccattaaatcatttacattggccctccctgtctccaggggggttgagcatggccatctcataggtgcccctggagttggggctggggtttggggtggcctacctcaagaactaaaacacttcatcctttcccgcctacctcacccagagccacgtcttccagacaggggcaacataga

SEQ ID NO: 146890 - DNA, 296 bp, Homo sapiens
tacctccctgcagcgccaagccggctccccaacctggtctgctgaacgcaaaccgctgagagtttgctgcaccgccccctggggcccctggctgccgagtcccgctaaggcaaagacgccagcaagcgaggaagcgcagcggaagaaaaacaagcgggcgcgcgaggggagccccaggagggctgccgagtggctggcaggcggctcccgcccctcccgggtggcctcgccggcggctgacggcccggaggacgcgcgctccgaaaagttagactccgggcggcggcgcgctacgc

SEQ ID NO: 146891 - DNA, 336 bp, Homo sapiens
tcttacagccacctccccacggaatcgcacgccaaggccaaagctcagttttccaacctaggctatgcccaatctcgcttcactgtaatctgttgccaccagaaaatgacttcccaaaagctgtttttgtgagatcctttgcgtcccattccacagcctaaaagaattcccaagagttgccaggtgaggtcttgtgacccacccaggccttctgcgttcactgttaatcgacctgacctttctaacagtttcccagcctgctcacatccagccacgtactcaacccccatcaactcattcactcaacaatctctgggcatctgtgatgcgatctat

SEQ ID NO: 146892 - DNA, 389 bp, Homo sapiens
acagggtttcgcttttgatgcctaggctggagtgcaatggcaccatcttggctcactgcaacctccgcctcccaggttcaagcgattctcctgcctcagcctcccaagtactgggattacaggagtgagccactgcgcctggccccagttaaacttttttaatggtaaaaggtttgagcagacacttgaccagagaagacagacaaaatggcaaaaaagttcatgaaaagatgtggaacatcgtacttcattaaggaaatgcaaattgaaaccacgatgatacaataactgcatccccactagaagaggtgaaatcaaaagatttctggtaaggctgcagggcaggcggaactgtcacgtgctgctggcagacacacaaaatggcacag

SEQ ID NO: 146893 - DNA, 200 bp, Homo sapiens
ccggtaaatgtagatactgtgccggaatgtagatactgtactgtgaggaatttctacggcccttactgccaaacctaacataaaagatgtcaatactgaaagagctgagggcataaaaagagaagtcaaaagtctaaaaaattacagactgacaggtcaatattataaacttgactaggtggaatacaacagataaaggc

SEQ ID NO: 146894 - DNA, 326 bp, Homo sapiens
ttgctctcggttccacttgttgacctccctcctgcctccactcaaattatctgaagctctggccctgttgctaccaggaaactgcccactaggtcacccgcaacttccatttcaaagccactagcctgtctcgctctgacctggccccatcaccagcagctgctgttaagacactctcttccaactctcacactggcttccgcctctacctccctcccagccctgtgggttcttcctccatctgcagggacatactgggactcgccagggctccatcctcacatctccagctgatcctccactctaatgtcccaacatgcgcctgt

SEQ ID NO: 146895 - DNA, 643 bp, Homo sapiens
gaggagatgacacgagttcaccaaggggtgagtagaagttgggaggaggccaagtcagaagagcatcttctagacaaaaggatggccttgaacaaaaatgcagagaaatagaagaacacagtgggtgttacaaacccatcatcttcatcctggggatattttcctgttaagaaaatattttccagcataaactctgttgagccaatttatttccttcatcaattttctaatgcaaggcaattcaatagtttcctatttttttgactttcacttttatgttatcagaattatttttgccatctattcttttcttcctttggcattgtatagtaccagtttcactggttgatctgtttgttttgttcacaccaaattgtactgaataaagcttttttcatggtgatagatgtacataggcctttaattcttccaactttgactttcctgggtcaaattttatatcaatcaatatagtctagaatcttattattttacacatcttttggttaaaaaacaatattttatcaagtatacttttcgccactctcacttttttaaatttcattttgattattctaccagcaagatgcattgtgaattaggtagactactgagcagtttttgtttcttagattatccgtga

SEQ ID NO: 146896 - DNA, 203 bp, Homo sapiens
ttctatagctgttttccaaaggattgtttgatacagtcgggagctcccgtgaccaaatctaaagcctgagaaccaactttctgtgataaagcatactaagcaaagaagactctgtggcattgtaaccgatgctactgagtatgccacaaatgttcatacaaattttgtgtatagcgctattgcataaatcgttttaatatggg

SEQ ID NO: 146897 - DNA, 243 bp, Homo sapiens
tgtgtgtttgcgccactgcacaccagcctgagcaacacagtgagacctacctcaaaaaaaaaaaaaagaaaaagaaaagaaaactgcttagtaagaaggaaaaaatcaaccctcggcgatgaaaagctttttatagaaatatgccttttctatagggtataagggttaagggcatgagttcgggacctcggttacagactattattacaactccctcagccggggtctccaggggtaccgagc

SEQ ID NO: 146898 - DNA, 524 bp, Homo sapiens
agtaggatggccatgtgatgttggcaagggtgcaaagacaattcattgcagaaaggtaatctttttaacaaaagatactggaaaaactggatatccatttgcaaaataatgaacttcaacctatacctcacgtaatatacaaacattaactcagtatacatcataaacctaaatagaaaatctaaaccataaaacttccagaggaaactatggagaaagtcttcaagacttttgattacgtaaagatttccttagctatgatactaaaagcaagattcataaaaattgtaaattagactatcaaatttggaatcctctgcttcttgaaagacattattaagagaattaaaaggtgggaagaaaatatttgcaaaacacatgtgtgatatggaaattgtgtctagaatatataaataactttcaaaattaaataagaaaacaaaataactgaatataaagaaacatatttaaagagacactttgccaaaggagatataaagatggaaaataagtacatgaaaaga

SEQ ID NO: 146899 - DNA, 269 bp, Homo sapiens
gaattccgtgattttttatatatagggattaggcttatatggagcttttttcctgcacattaaccatacctccaggttgtactaaaagcatgctgactgtttttatgctttttagttatataacatatgtattctatatcttatatggaatatataaattatatcttacaccaaggctttctttcacccttgtctgcttgtttccaaaagtttctgtttctttttcttaagagacaggatctcgctatgttccccaggcagtggctatt

SEQ ID NO: 146900 - DNA, 334 bp, Homo sapiens
tggagtgtgattgtatgcatcttctttaagaagatgccgaagataattaataacaatctgagcaggtggtatgtgtatggggaaaaggaggaatcaaaggaaaggcaaacatgtgaagtatataaattctgaaaacagcatgttagagttggaagagatttaggacaacgggaattttctaagaaatatggcacactccacattcttttaggtgtctacatatggagagagcctggtgtcaaagaagtgacctgagctttggcctcagaatgtcctcatttggggctgtgcatgggggtgtcaggaggtgatatccaccatcccgagtggctgg

SEQ ID NO: 146901 - DNA, 209 bp, Homo sapiens
aagtgtggattcaactataactgtctcctttccaccatttggtccttagctcaaaatatgaccttttctaaaaggccttccctgaccatccccacctaaagtggcttcaaagttactatcacagtgatttatttcacagaatttagtacttcacagaatttagcacaaactatatttcattttgcatttattggtttacttgacactgt

SEQ ID NO: 146902 - DNA, 254 bp, Homo sapiens
ctaaggtgggaggatggcttgaggccaagggttcaagaccagcctgggcaacaaagcaagactctgtctccaaaaaaataaaataaaataaataaataaaaacaataaagcgcagaagacaattgacaacatctttcaaaatgttgaaaaggagaaaactatcaagccagatattccagtgcaatatcctttaaaaatgaggttaaggtaaaggcattttaagatagaagcctcctttggtgctctgggggtac

SEQ ID NO: 146903 - DNA, 841 bp, Homo sapiens
attttattgcatactaaatctaattttggtctgcaggttgttgaacatgttagtttccttaagacagttgctatagtgatggcagcaaattcctttaatcttagtgtaaagtagtcattttctataggccatcattgctactcaggaattgtcaatgaaagcatctcattttattaagttcttgaatttttctcttagtttcttaagaaaatttaaaaaatttgtttttaacagatcatgatatctactgaactagtattttcatttcctttttatgaagtttcacacctgcttataatatttcagagaaataatatagacttctacaagtaaaatagctgtctgctattttagtttcaaagcattcagtataaaaaagtatataggaattttgttgtgatatataatgaaattttcataattttgtagtagctttttctccctctcacaaatgaatttactgaaatcttgaaatgggccaaaatgatgctttgctcctaaatatttaccgttaacagttagggtggcaattcttaattttctatttaagttatatacctatcttggaaaatggccaccttcttcctcctttgccaacattttaactttatcttattttatgttcttttttagtatgagtgtgaggaaattttacttctataattttaacaattgtttgaagttatttatgataacatctgactaaaatatgtctgatagtacttgtttttattgcttttttaaaaaagagaatatgtttagaaaaaaattttaagtataagcatgtaggccatatttatatataaacatgaaagttaagtgtggattaaggttattgtat

SEQ ID NO: 146904 - DNA, 128 bp, Homo sapiens
actctccagattcccaaataccaatgtcctgtaccagattcttggtacatggaccagatacttgaacacttaaagcactgttggtgttgtactttgagagacacagtgtaagagctgtcatttgtttg

SEQ ID NO: 146905 - DNA, 232 bp, Homo sapiens
gtgtgtacccacgtgaggcctttggagatgatgccgtcagtgagaggaatctgccctggcattccagggccagaattagttggggcatggatggagacttgggatcctgttgtcaaccacagaggtctcctgatgtggctctgcagggacttttcagtcttagctcagctttccaacaggtccaccttctcccctagaccctggggacccagtccctttccccttctgtaat

SEQ ID NO: 146906 - DNA, 372 bp, Homo sapiens
atttccaataaagggccagagagtaaacagaaagttttgagggccatatgatctgttgcaactttataaaaactctgccagtgtaatgcaaaaaccgctacaaatatatgtaaacaaaagaacatggccatatttcaataaaagtttatttgcaaacacaggaaatgggccagatttagtctatgggccagtctgcgtgaccctggcttaaacaatgacctgaagataaagtggcagacagatctgaggtgttcagtggcagaattttaaaaatatttatcttcattcctactaagttttcttcacagatacctgtggtcccttttataaccaaactctcaagtttctcagcttatattcactcttcaaaac

SEQ ID NO: 146907 - DNA, 264 bp, Homo sapiens
gatcgagctggcccccaagtgatagaaaaaaaagataaaggatatccacacaaactattcttaaagaggggtgttctagaactttgtattatttatgtctgaagatttgtacagatcctcaattccatatctgcaattcctaaatcaaaaaagctctgaaaagcaaaagactgtatgcaacttttctggcagtaaagtctgacctgcactgacataaggctatttatagtctttataccacttggtatgattttgttttttttt

SEQ ID NO: 146908 - DNA, 147 bp, Homo sapiens
tgcactaaaaagtagaaaaaagtgatataataaatcaaaggagacctaagtaaatatgtagattagaagactaacagattaaagatgttaaccatcctcaaattgatctgcagacttaaggcagttccaatcacagtcccaaaagga

SEQ ID NO: 146909 - DNA, 220 bp, Homo sapiens
ttatttattagtatttatcctcattaaaagcttccatcacaccagaaaggatactaaggcctgctaaaacacctcacatagttggcactccatgaatgttgatttccttcctcatgttcacttttctgattctaaggtcaattttaccttaattctcttttgaagtttttttcttttgaaaaaatgtacatcttttttcttttaacgttatatatgattg

SEQ ID NO: 146910 - DNA, 213 bp, Homo sapiens
aagggagaaagaaaatacttaagaggccaagtgaaggaaattttcaaagataagaaaatgttggcagaaatggaaggggcattagagagagagggaattgactaaatgctgtagtctcagctgggcagtttttgagttgggataaacttacaagacagctccttctgttgggggctgaaagatgcaggcaggtgggtctgggtcctggcacag

SEQ ID NO: 146911 - DNA, 199 bp, Homo sapiens
ataatggcaaaacccgcaattacttttgcaccaacctatatgataaattggttgaaaaggaagaaataatcttgccattattcatggatataaagctgtcaaaagaatctcctgataatgtatttagagagtgaatttagtaagatcactgcatacaaagtaatcacacaaaaatcagctttatttattagcagcaaat

SEQ ID NO: 146912 - DNA, 319 bp, Homo sapiens
gcaggtacggcatgttggaaggtgtaccatgtgcccttaaaggtgaacccagtgcaccttcatgaaccgtggtacacctttaagaacttggtatgccttcatgaacacttaaagtaccagggggcacttcatgaaacatcattaagtttctcctaagtcattgcaaaatgatcagaactcttttgtcgtggacagcatttcttttgtaggtgtttagagttgccaatagctccataaattgttaaaagcaaaatattgaaatataacctaataatccagggccccatgttttgaaagatcactgccaaatctttcacgt

SEQ ID NO: 146913 - DNA, 348 bp, Homo sapiens
agctaaaaggttagaaaagacatacagaggagggaaaaacaagccagatggcagcaagaggagaaagacacaaagaaatgagtgatgccgtgagagacctcactgtccatgggaagactgtggcttgtctctggacagcctgagttcctcatgggtctgatccacatgcatcctccaatatagccccttgtacagaaagtggtctgaatgaaactctgttctttgcaacaaaaaatccctaactaaaacacttccttcaactcccccttaagatgaagttttcccaggaggtgcctcagtgccacaaacaaacagattctgggcaagcccaccccctccagccccccg

SEQ ID NO: 146914 - DNA, 730 bp, Homo sapiens
aacagctgtgataatggcactacttacagaaactgagaactcattatctctaaaaaatggtatctgaatcagccaggactgtagaaccaggatgtctctcaattcaagaacataactgggccaaggaatactagaaataatgtctttataatcccatttcttcctgaattcctagggtaatgccaggatatctcaggtattgccttgtcttaagctacagccacaggtgaattgtttctctgaaaactttctccatagctgcacattcagttgtgctcacttcatttttcagctttttctactaaaaatatttgatggcaggaagatttcagacatgcttcagtcagtagaatttcaaaaacattaacaacagtttctgcaatctttgcactttgagcaacaaagcagttacgatttcacaatcttttatgaaagaaaactggaaaaggaaaataagagtcaaggattccagtcattgctttcagagactgccactttatttggcttcagtttagagttatttaatctgagaagagcaactgatgctttaaagaggaaaagaccctagacaagttcaaggaaagatcatattaacaggctccttgtcaaatttctttctttttttttttttttttgagacagagtgtcgctgtgtcacccaggctggagtgcagtggcgcgatctcggctcactgcaagctccgcctcccgggttcacgccattctcctg

SEQ ID NO: 146915 - DNA, 209 bp, Homo sapiens
caactgatgcccctccatggatccatcatcaccccaagtgagtagctcacgttagggttcacgctaggttttgggcatcctatgggtttggacactgacacgtgtccccccttgcagaatcaaatggaattgtttcacggccatcgaagtcctgtgtgccccgcctgctgcggcattcttgtttcgggcatgtggtttttcatcatttc

SEQ ID NO: 146916 - DNA, 301 bp, Homo sapiens
gaactattattaaaagagccataagaaaacttcttgagtcttaagtttattacaaaacctacagcttaccttattctcaagaaatattgaaacatttttcctgtaagcaagaaaaagataaggataccattattgaaattaaatatatatattttgatatctcaacaaattaggaacaaaggggaatttcctagacttggtaaaaaaattacaaaaaccatacagctaacactgcaatgctgagaaacttgaagctttcctactatggtcaggaagaaggcaaaaatatacccttttacca

SEQ ID NO: 146917 - DNA, 291 bp, Homo sapiens
ctgggattacaggcatgagccaccgcggccagcagcttttttccttttttgaaggattacttattggcgcatgttcttcccttgaatattctgtgcagaattggtacaaagagtatatgttgagtattttgaaagagctcagaagacatctattaaagcagacatgagtttgtttgtttgttacaacacagggctgtaaaagctgagtaggagattgttttatgaagtatacttcgaatcttaagtaaatcacagttatcggaaaatcagtcctttgtttccctgttcata

SEQ ID NO: 146918 - DNA, 290 bp, Homo sapiens
aaacggagggaaatattttaaaatctcaaaagcaggaagataaacctggtagctcttaatgccattcgattctgctatgtttaggccaagaacttgaagagaaccctgtgtgtgaaggagggagcctctcctcacttctaagaggaacacatgacggacactgttggtgtccacccacaggttcccttcgcggggagccgatgatgctttgatggggggcctaggaggctgctcttggcctcaaggcagaacttcctttgtgaggcttctcactccagagatacgggggg

SEQ ID NO: 146919 - DNA, 355 bp, Homo sapiens
tgtaatcccagctacttgggaggctgaggcagagaattgctggaacctgggaggcagaggctgcagtgagccaagatcacgccactgcactccagcctgggcaacagagcaagactccatctcaaaaaaaaaaaacattcaagaaagcatttgctgtctgttcccatcacccagcactaaatggaaactgttctcttgttatgtgtacttgtgtttacctgctcaccagattgtaaaatctcaaaggcagagactggattttaaaacagcttgatatttgcacagtatttgagagtctgcacagaacattttgagatttgttttctcagtagttccttacaattcccatattgta

SEQ ID NO: 146920 - DNA, 457 bp, Homo sapiens
ccaggcagacactcctgattgggctgggaacattcaggggtatctgttgagcctgagctccctaggttatagaaggaatctagagggggatgaaggactcctgcaggagaaaaccaaagtcctcctggaggaaggaatcctcaattcaggacccaagatttttcaaaaattaagagcagggctgggtgcagtggcttgcacctgtaagtctcagcactttgggaggccaaggcgggtggatcgtttgagctcacaagtttgagaccagcctgggcaacatggcaaaacccccatctctacaaaaaatacaaaaccaggggtggtggtgcacgcctatagtcccagctactgtgaaggctgaggtgggaaggatgggttgagcccaggatgtggaagttgcagtgagctgagatcatgccactgcactccagcacagagcaagaccttgtcaaaaaaa

SEQ ID NO: 146921 - DNA, 425 bp, Homo sapiens
aaataaaggaaaatgtttaaaaaatttttttttacaaattaaattacaggttgtaccaatacccatttgagttctatgaaaggaaatggcaatcttttcttcttccatgaactcagtgattagggttttccttttaggctatgcctaccttcacatgtggctttttttcttcttcttttctttgagacagagtctcactctgtcacccaggctggagtgcagtggcgtgatctcggctcactgcaacctccacctcctggcttcaagcaattctcctgcctcagcctcccaagtagctgggattacaggcatgtgccaccactcctggctaattttttgtacttttagtagagatggggtttcgccatgttggccatgctggtctcgaactcctgatctcaggtgatctgcctgtgttggccttc

SEQ ID NO: 146922 - DNA, 135 bp, Homo sapiens
cagttgctactggcattgagtgggtggaggccagggaagctgtcaacatcctacgatgcataggacggcccccaactgagaactacccagtagtgccaaggctgggaaactccgctttgtagtcacatggctccg

SEQ ID NO: 146923 - DNA, 585 bp, Homo sapiens
caaagatatatcttaaaatcactccagaaggtgcccttgtaaccccttctaatcatttgccaccccataagccaccactgctgggatttctgtcacctttgaacactgttttaagctccaggttggcatcagttcactgaaatgcctttttgataaccctgttatggatggctgtggtctaggagcccatttaaagtgattctgcaccctggatcctttagcagttatttactcactgttcattcaacagatatttggtgagcccctactgtgtaccaaacactgtgctattcctagaagcttagcagtgactaagacaggctcaggtaacatgctggtggagctcacagctagaagggaccacagaaagcaagtaaacaagaaccagggcctacttctggactttgcctgtctccaggctgttttaagtcaccctattctggcccatcagtttgcccaataaatatatactgagcagctaaagtgcacccagagaggctgcgcatagattctcccctccgtgaagcagcacagcatgtgcttaagagctcagattttggaaggagacagccttggtttgaatat

SEQ ID NO: 146924 - DNA, 288 bp, Homo sapiens
ccacagaggcagagtcttctctcatccaatctgctgcaccctcagatggccaacagcttgtccccacctctccccaaactgatggcccactcagagcatggtccttgtgtccacagcagcatcccctgtgtcctagctagaaatgcaggttcgtgggccagccctgacctgccaaagtggaggctctggggccagggtcccggaaaacattaacaaggcccccagatgcttcttctgtgaactgctacttggtccatgggggaaatagcacatatgcaggaagtgctg

SEQ ID NO: 146925 - DNA, 407 bp, Homo sapiens
gtatttcataaattgatatcagaggtgaatatataacaatgccaagtagaaatctagaaaggttaaagaaaatgagaatttagaaataaatgactgaatttagcaaacaagagttaaagagttttcagagcactgttttagtaatatgagtaaaaagaatggtagcaaacctgataaactcatggtcagaatgaaaaatagacaaaatgcctgcatataaattttaacaaactttctattgggatacttgatttccaagtggcaataaagtacaaaaccaattattgatacattcaactacccacagttgcctctatcaaggagaatttttactttattttgtttggttttggcctctgtgcctttgatcatgttttcttacccatttcaaaatgcccaaatcttaa

SEQ ID NO: 146926 - DNA, 460 bp, Homo sapiens
actggatgcaaagtgtcacaaatggaaagagacaaggaaaacataatgaccccatgcaatgtggtattctgcactggatcctgggacacaaaaaggacattggtgagaagctggaaaaatctgaataaattctagctttgttaaaaagtattgcaccaatgttactttcttagttttgatcagtataccaaatgttattactaccaggggattctggttaaaggacataagggaacttactgtactatctttgcaactctttgaataattttagatttataatagacatgcttttcttaagactgatcataccaagttgttgaggacacagaccaacaagaactgtcatatactgttgcttgaaaaatgtaaaacagtatgtagtacaacaactttagaaaacaatttggccacactgggcacagtggctcacgcctataataccgacactttgcatcga

SEQ ID NO: 146927 - DNA, 1007 bp, Homo sapiens
  misc_feature (491)..(491): n is a, c, g, or t
ccagttatacagctcagcagcaccagcggcatctcttatgcagagtctcagacggtcatcccggtcaaaaaaggtcagatctataccgtatccggcttgcttaaaacggatattgacagtttaggaacaagcggaggagcctggattcatgtctattattacggcaattcaggaagtgtcaatgattttgccacaaagctggttaccacagataccgactggaccaaatatgtcaaaacattaagaccccaagaagatggttattacaagatccgcttagaaatgaagaacgcctccggaaaagccttcttcgataacctccgctttagctacgccaatcaggtcacggaatatctgtatgatgccaagcagaactatgtcacccaaataaagaaccaacaggatcaagcagccacctatgatctggacggctacggccaagtcaaaaaggttattacaccagaaaaccagctgttgtaactggccagttncaacagctcatgatgttggcatgaccttgtatctccacttcatacacactaatactgtggaggaggatcaagtcgttgggtttagcctaggcatgccaagggtatggcatgagcatggaacacataatgctagaactgccagcccagtcttaatacttagcactggttgccagtttaaaaaacaatacaaaggtataggtaaaatgttaaaggaaacttgtactaatttatgtcctttgaagtgacctttttgtgtctcatggactctgggctgtagtacctgactatcttctgcaactcggatggagaaaatgccccttccttacctggcaggcagtgagccaggttggacattagatacatagtcgacttcacctactctgtgatttagcttccagctttacagtttgctgtcttggcagcagcttgtgcatggtgaacttttctgactagaacagttaataacccccacagatgttgggagcccagttttgcagctgttgtaactggagttgg

SEQ ID NO: 146928 - DNA, 326 bp, Homo sapiens
aggacttgctgatatatgggatgtgggataaaggaaaagagaggaaccaaagatagcacctagatattttttggcctgggcatctaggtctaagatggtgccatttactgaggtaggaataggtgaagtgtaggaagaatatctcgagttcggtgttaagcaggttaaacctgagatgccaagtacactgatttccaagtggcaatgtcaagtaggcagtgctatatttgagcctggggctcgggcaagagaccagaaatgaaatgagataatgagatgcatatacacacagtctgaagaaatgacttgtgaaacttggccaagac

SEQ ID NO: 146929 - DNA, 564 bp, Homo sapiens
tggcctgtttgaataaaaaccatttgatttagaagatgttgaatttaggaaattattaagatgatgtacatcttattaccgtagaagatataatttataaatgttcaaatataaactcatctaatcataatgtttagagggttttatacttgatgtacctaaaaaaaggtagaaacatttttcaaaatcagcaaagttcttttaaaatcataaagtaggccgggcgtggtggctcactcctgtattcccagcacttcaggaggccgaggtgggcagatcacttgaggtcaacaagggcaaagacaattttttgagagccatgaaggcatcattatattatggctcactacaattacgttcacaacagtgaccttctttgagtcttaagaaaaagttgaattaatttaatgtattcagtgtactatatttaattgtaaaagttatgtgttaaactgtaacttaaataaaatcctacttatatgagataccacatatcaattatggctagataatgcagaataggaaaaagaaaaagactgcagctgtgtacagtcctattctgtg

SEQ ID NO: 146930 - DNA, 431 bp, Homo sapiens
tgtccttgaagcttgtatctgatatcagcactggattgtaggacttgttgctgattttgaccttgtattgaagttaactgttccccttggtattaacgtgtcagggctgagtgttctgggatttctctagaggctggcaagaaccagttgttttgtcttgcgggtctgtcagggttggaaagtccaagccgtaggacccagtttcctttcttagctgttgtaactggacaacagtgaccttctttgagtcttaagaaaaagttgaattaatttaatgtattcagtgtactatatttaattgtaaaagttatgtgttaaactgtaacttaaataaaatcctacttatatgagataccacatatcaattatggctagataatgcagaataggaaaaagaaaaagactgcagctgtgtacagtcctattctgtg

SEQ ID NO: 146931 - DNA, 337 bp, Homo sapiens
ctagatgactattcagagatttgtgctgagtgaaaaaagcaatcccaaaaggttgtatcttgtaattccatttatgtatttttcctgaaatgacaaaactgcagaaatgtagaacaaattagtggctgccaggtgttaaggagaaggtgaagataagagaaaaatgtgtgcagctataaaagtgcaacatgagggatccttgtggtagtgaaactattcggtatcttgcttatatcaatgtcagcatgttacttgtgattttgtggtgtttgatttttttggcgttgttatagtttttccattggtggatattgggtgaatagcccatgagatatat

SEQ ID NO: 146932 - DNA, 331 bp, Homo sapiens
ccggtaaatttgatactgtgccggatatgtagatactgtgagaatcagatataggcgtcaagtgtacctgggaagttgaaacagtgctggcatggggctaagaatttgggctcaaaattaaaaatagttaggtgggaactccattactcccttttgcatgctgtgcgaccttgggcaaatcactgagctgctgaaagctgcaatttccttctctggaaaatgggtgtaataatagtggcacacattcaaggctgtttacggatgaattgaaatcagttcaataaaacatgcaaaggtcaagcagactcgtgcttaaaatatgccttcatta

SEQ ID NO: 146933 - DNA, 656 bp, Homo sapiens
taagcatacattaaaagagatagtcagggactatctcttttaattagtcagggactaattagccaggaacagacacacctaactcacgtgatggtttcattttccttccttctgcaaggatgagatcagtcacaaactctcacatttggccttttagggtggatgcaattttgcaagtttcagaaatgtgaccctatctcacataaccaagagatctctggtctgacaaattcctgggcaggacagcctgtggcatcctccctaggcccactgtggatccatggcctcagcaaatacatgtgctttgtaaaaattgagaaagcagaggtgcaaaagacagctccatcggcccatcctataggcctatagagacccccttcctcttcaaagcaatactgcaccaatcagagagagaatgggagcagagagagagtaagaagatggacatccccagaaggaaacagagtgaggagaaatgggagaagataaacaaaaagaagaaagctgaatattggaaagatggaaaagatggcaggcaggagaaaaatttacactaaataccttgaggtttcccctttccacccccaaatgcaggctcataagcagcagcatgcaagacagcgagtttctagaaggctgatcaacccgtcttctaa

SEQ ID NO: 146934 - DNA, 179 bp, Homo sapiens
aaaggccccctgacgggctgcacttgaccctggttccagatcctcttgactccccatcgtctgtgccccaaaacgagcagcagccccaccccatgtgtccccaggatgaagaggggccacggcagcctccagggagcacccgggggcaggtacctagtccgtctcacaggcccacgggg

SEQ ID NO: 146935 - DNA, 233 bp, Homo sapiens
ccttacctcaagtgatctgccagccttggcctcccaaagtgttgggattacaggcatgagccactgcacccaggctattttgaagcaaattccagactggatattattccatgcctatgtgtcatacttccacgtgtgtctctaaaagataaggaaaaaaaattctgccacatctagaatgccattatcactgtttaaaatcacacaattccttattctcacgtgtttgtgta

SEQ ID NO: 146936 - DNA, 238 bp, Homo sapiens
ctaaataattaccttactttattggaggctcagattttgtgagttacagctagttatgggcagagttcaatacagtagtttttctactgtatagcatacattctggaaagacaaattgctaattatttttttctatgaattttctaagtatctactgaggtatactgtgctagttgctggacattcaaacaaaatctgaaaactaagttcctgacattcaagaacagtgtcatggggg

SEQ ID NO: 146937 - DNA, 305 bp, Homo sapiens
ccagaggcaccaaggaggctagaagttaggaaggtagagaaaaaggggagggaagattgtgctgtgtataagatgcctgttgtaaaaattgcaaaaatgactgctagaggcacgagggaactatccgagtaagttgtttattgagtaatagtgaattcagtttgaggaatcttagagatgggtcaattggtaattttatagatggaaccatgagattagtaactcaaggcgttacaccatttaatggcagatatgtgatgaaaatccagtgtctttccctccttgcaccaccctctctccatgat

SEQ ID NO: 146938 - DNA, 266 bp, Homo sapiens
ttcttttaatgatggggtatgcaataaaaatacagcagtgcttcatttagccaaaggagctggagcaaaaaagacctaaataaataaataataaacgtgcatgggccacttaccaaaactaaaatcatttcattcaaccttttacaggaggtgcatgcagtattttgaaagcaaaaattctcataacacaaacctccacttaaaaatcactgccaagggctggaaccatggcaggatgttatttctttttcaatttattttttaat

SEQ ID NO: 146939 - DNA, 253 bp, Homo sapiens
taattagcaagagagtatttttatccccatattatgagtaaggaaactgagactagaaaaagtgtactgtttgcctagggttgctcagctggtaagtggaagagcagagatttgaatctgggttattcttacttcaagtctctagttctacactgtcaaatgttgctgcttctctcctaacataggttatgttattggggctccaagtctaatgatgatttagttggtcatccatataaaataagattcacca

SEQ ID NO: 146940 - DNA, 140 bp, Homo sapiens
actcttatccttgaccccattctccagtcactatctacctctccctagttacctccagcatactatcaatctcacccactctctcctcactgcctccaatccttctctagcaaagaattgttggctatgtgtttcccttt

SEQ ID NO: 146941 - DNA, 396 bp, Homo sapiens
aaaaaaagaaggcaggtctcttaatagctccaaatgtttttctaatatgtaaaatgggtattaaaaatgcctaactagcctggacaacatagtgagatcccgtcctacaaaaaatttgaaaaaagcttcttatccctgtagtcctagctacttggggcgctgaggtagggggatttgcttgagtgcaggagttttgaggttacattgagtagagatcacgccactgcacatcagcctgggtgacagagaagaccttgtctctaaacacaacaacaacaaaactgcctaattatcacagcttgctatgtgattcaaagtaattctttacagaaagtactgtgggcattatgaactaatttgtataaattctagttattactgttgtttctgttatta

SEQ ID NO: 146942 - DNA, 357 bp, Homo sapiens
tgattccgaagagtcaacatgggcacccaagtcttctgtctcctcactgagtttcttactgtgtcatagtgctaataacatccaaattatgaaataaaactagaaaactggaggagtaaatgtatagtttacaattgttccctctctctcaagctatagaagaaagtttataaaattggttctaatttcatccagcactgcattttgcttcttttgttaagcgctatgatatacataaaagttatgagagaacttctgggataatttaaagcaaaacaccaccagatcactttctattcaaaatttgtgtactccaacaacctcctgtctttattcaatgttggctttactttttaa

SEQ ID NO: 146943 - DNA, 407 bp, Homo sapiens
ttcacaactctaacgtcaacacaaggctccctcaattgccttgctgtaaaataggtgaataggtgtagtgggagattcagtggccaagcctgggtcccaggtaaggtgactaaccatcccagttttcctgaacagagaaatttcccaggaaactttgggttttaaagccaggaaagtcccaggtaagcaagggtgagttgatcaccctggcagggaactgattcattcaattctggataattgaataaagtccacatcctcaccgggaacattctactgaatgataagaagaagttccttctagttttgcctgtttcttttccaggatctgggtccatgggacccctaccttatcaactgtccccatacccaggccctggctctcatccctacattgacctccaccc

SEQ ID NO: 146944 - DNA, 307 bp, Homo sapiens
ctttgtgccgctgggactgataaatatttaagctgacttcctccctcgtgaagcattttctgggttctttggagatttccggtcctgaaactgcaaaacatctacagcacctatggcaaaagccagtgaagcattctgtttgtgaacaggctgttttccccattattctactccatggggaaacttcttgtctcccagtagtccccttggggaggatttcagatgtctccaggacagtgctctctcccccttggcacatctgtgttttgtgaaaaatgatcatccatcttttacctgacaaactttg

SEQ ID NO: 146945 - DNA, 375 bp, Homo sapiens
tgcgctttcctgagctcatgctgatgctgaccaaggggtgtgggggctttggagagccaatgcctctgatgatcacccaggaaacatgccttgctcatcagataaggccacatagtacccacaggacagtctcctggctgcaactagtcagaccagtcctgagaaggtctctaacaaggcaggctaagagaagtatggggatgacagcatgcacctctgtgtccagggggctgtctggctggcgtgggagatgtgtgtcgctcccaaacaaggagtgcgttacagaacagtctggacactgtccagcttctcccgagtgaccaccaggcccctgggtgggccctgcacgagcaggctgctgccttcccagacaga

SEQ ID NO: 146946 - DNA, 529 bp, Homo sapiens
tggccccacctcaccccagaaacctctctccccaatactgggtttctgcttttcccagcaccagcctccgtattcttaggaatgcttaccaggtccgtggccctgggctctcccctgccatcacgtcagggtgggcagtgctcggcctcggacttgtcttcctctcccactccccagtgagtcagggctctttctacacggggtcagctgactgtctcaccaaatggccctgccgcctgttcagccttgtctctggctttatgtgtccctgtcactacacacctgttgctgggtcaacaccaagggagggagttggagggccataaatctctcttcctgccacttcttcgaatcccttagtcacagctgtcacaaatacttctgaagcacaaagtaccttgcccccttaagcctgatcatgtttccctcccctaagcaagcccttaagtttcttagcccaatcaccagcacctctaaaggcatctaaaacttcattcggtatcagagaattataggggtggggaggtgc

SEQ ID NO: 146947 - DNA, 266 bp, Homo sapiens
tgatctgtcacttaagtggcctacctagggcccaagccaggctgttaactactacactgtactgctatccacactttaccttttagttttttgctttttgccattctgcttaatacctttcaatttcactatgtgatttgtatatctctttagccatattaagacaatggaattattgatggaagtctgagagcaaactactatttttagtggcttcctttacccacaggatgtgagggaaggtctttctcagtctggcctccaat

SEQ ID NO: 146948 - DNA, 444 bp, Homo sapiens
tctcctgccacagcctcccgagtagctgggattacaggtgcctgtagctgattattgtagctgattactgacagtgtaacttcagtgtccaatacagaagtcccagccacatgtggccatttaaatttagacaaactgggcttggtgactcatgcctgtaatctcagcactttgtgtttttttttttgagacagagtttcactcttgttgcccaggctggtgtgcatgcagtagcatgatcctagatgaaaccttgaactcctgggaggatcacttgaggccagaagtttgagaccagcctggccaacgcagtgaaaccccacctctacaaaaatacaaaaattagctgggcacttgtggtcccagctacttggaaggctgaggcaggagaatcgcatgagcctgggaggcagaggttgcagtggagtggagatcacgcaactg

SEQ ID NO: 146949 - DNA, 805 bp, Homo sapiens
gtctaattcatagtaagcactaagtaaatgttagctgtaataataattatttttagatttttggattcagactctgctcttctctggcccttatttattcataggacaaattcagcatctgctgcatgctgggccgggtgcccaggcacctggggtacacagactatgtcagaagaaggtcctcctcttggagtttaaggacaaaaaaacaagtgtattagggttgtgaaggagagatgaagggggctacagcatcgcctgtaaaaataggacgtccaggggctgggcttcttcccctaccccctcacccctactacgttcctcagcttccagagtctgcaggtagattccctcaagtcctctgaaattcttctccagggacttgtgaggagcttgggctcactggacctgtctctactagggtgggcagagcaggctctccccaaaacaacagaatcttggcttcccagccccagcctggcagagcactagcctctgggttttaatgagctgccctgggttagaaacaggacgtgactgtggctggctgagaatcctgaagatcttattaaagaatcatctcccttgtactttgggctgaaatgctctttccaaccaaggatcaaagcaaacttgacacacattctctcattaatctccccatcccctggggcgggagcagatcggtagctgttttctctggttctcaaagagggaagctgatgcgacattgacctggtgtggcttgtggaaagacctcccccttggtcagatgctgaacagggaccaggacccaggcatccta

SEQ ID NO: 146950 - DNA, 421 bp, Homo sapiens
tccactagtgtaggcacacacccgtggtcccagctacttgggaggctgaggtgggaggactgcttcagtcccggaggtcaaagctgtggtttgcaccactacactccagcctgggtgacagaacgagaccctatctcatgaatgaatgaatgaatgtaaaatgaaattaaactaaaccaggctgggcgtggtggctcatgcctgtaatcctagcactttgggaggatgaggtgggagtattgcttgaggccaggagtccaagaccagcctgggcaatatagtgagatcctgtcactactcttaaaacacttttttaaaagacttttcctcctttctcacttgcttagagtcatgaagctcctgagagcagagccagtctattcttactaagcagcacactatccatcacttcccaagtggc

SEQ ID NO: 146951 - DNA, 371 bp, Homo sapiens
agagatgaaattagacaaaatgatcactggtaaaatatgggaattcattctgttcttgctacttttatgtatttttgaaactttctataataaaaaattattttcaaaaaaacaactgaataggtggccggagcaagggtgggggaggaatttcaccacccatctttttgtaacttttgaatgataatatatttatattaccttttgaaataaaagttttaatattgtcaacatctaacatattagatttaataaactaagcattaaccaaaacataatggtacgtttcttcccacaaaaataaagaaggagaattaaagaccctgaacaccatgctattcaataactcaagctgtacgtgtgcaggtgag

SEQ ID NO: 146952 - DNA, 251 bp, Homo sapiens
agtgctttatgtgtaacacttcatttcatttttacaacagctctatgaatttcgtactatcattatccttatcctacagcgaggaaactgagctacctagaggctaagtaatttacacaagatcaaacacctaggaaatggtaaaaatgagatttagtctgggactccagaactcagtctcccctgccctgcccttttttttttcttttttttttttgagacagagtcttgttctgtcacccaggctggag

SEQ ID NO: 146953 - DNA, 113 bp, Homo sapiens
actggctgctggcacaaaagagtagggtatcacaaagcatgaaactgtgtaaacaggccaaatttcagggactttttgaggcatttcaaaaatctagccctacccattagtga

SEQ ID NO: 146954 - DNA, 748 bp, Homo sapiens
gggatagggagaggttggttaaagaatacaaaattacagctagataggaggaataagttctagggttctatagttctggagggtgactatagttagcaataattcattgtatattttcaaaaagtgagaagaaaagattttaatgatcttaacataaagaaatgatcaatgtttaaggtgatagatatgctaattaccctgatctaatcattacacattatatacatgtatcaaaatctcaccctgcacatacaccatggaataccatgcagccataaaatgaacaagattatgccttttgcaggaacatagatggagctggagaccattgtccttagcaaactaatgcaggaacagaaaaataaatactgcacgttctcacttataagtgggagctaaatgatgagaactcatggactcaaagagaggaacaacagacactgggacctacctgagagtggagggtgggaggagagagaggaccagaaagatgaagaagcaggtataagccaaatgttgagagttagagaatgccagcctgcagttgtcatcacccaggcttagtacctgggtgatgaaataatctgtacaacaaaccctcatgacacgagtttacctatataacaaatctgcgcatgtaaccctgaggctaaataaaagttttttaaaatctcactctgtactgcataaacatgtatgaatattatgtgtgaattaaacatttttaacatcctttaacaaggtatca

SEQ ID NO: 146955 - DNA, 415 bp, Homo sapiens
tctgttccccttcctggaacactctcctccttcagtattcatgactttctcaggtctttattgaaacgtcactgtttcagtgatatctttccagataagatttaaaattgaattcttaaaaaaagaacttacaggaatacacatcttggggcagggtggggggtggatttaagttctcctgcaccaatactctctatcttccacctttattttcctttatagcaattatcaccatctaacatactatatattctctttacctattttgtttagtgtttgatttgctccactaaaatagaacttccattgcgtgcaggcgtttttgtcagttgtgttcactgatgtatctccagtacctagactaggaatgttttagtagctaaatacattcctaaaggaatgtatgtctctggct

SEQ ID NO: 146956 - DNA, 322 bp, Homo sapiens
gctgaaccttcatagtattcagtggcaaaaggctgaaccttcgtagtattcagaggcaaaggctgaaccttcgtagtattcagaggcaaagcctgaaccttcatagtattcagaggcaaaggctgaaccttcatagtattcagaggcaaagcctgaaccttcatagtattcagaggcaaagcctgatccttcatagtattcagaggcaaagcctgaaccttcatagtattcagtggcaaaaggctgaaccttcgtagtattcagcggcaaaaggctgaaccttcgtagtattcagaggcaaaggctgaaccttcgtagtatt

SEQ ID NO: 146957 - DNA, 419 bp, Homo sapiens
atcctatgcctataaacaatcccctccccccagaccccagcaggcagacacacaggtggctggacatggcgagaagcacatcaggaggcaccagcacaccagcaggccacccaccagcagaacgacatttggctagggcagccagaggagagcccagtccacctagcggtccgactccaggggaaaaccatctcccttctgactccccaatctgctgagagctacttccactcagtaaaaccttgcactcattctccaagctcataagtgatccgattcttcccatacaccaaggcaagaaccctgggatacagaaatctgtctttacgataaggcaggggtataactgagctaacacaagctgcctatgcatggctaaactaaaagagcaccctgtaacacgcgctcactgggacttc

SEQ ID NO: 146958 - DNA, 604 bp, Homo sapiens
tgattagttgaccagtgagctatgcactctgcctggagcattactgcaaatgagcctaggacctattgagagaaggtcccaggggtgaagtaacagtgggaggccttacagttgggaagtgaagcttaggtcttccctgttctccaggccagactcaaactctgtgcctgatctgcttcccaagagaggaactccttgggcagacctggagaaaaagtggggattttggatggtccccaaaggagggtaggggtagaagaggagtcgaaacagagacaggaggaagtccaagacaaactttccttccttaatacatagtgctcgggggcatccttctggctgtagcatctgcgtaatagctgctcctaagaatgcaacgtgagctgaattcaaacatgaatttggagccagtacctgaatatgtgggttgttctatgccaccgggccccctgcctgtttaatttctccttcccctgctgccaaggcttccgagaagttgctgtgtaggtgcttaatgcttcggagatggtcaggtatgagtttaaatcctggtctcgggcactttaattgctaattgtgtagcactgagcaaaaataataggga

SEQ ID NO: 146959 - DNA, 357 bp, Homo sapiens
tcctgggtagtgtacctgccaagcaagccactggagtgtgggaagaaagttctagcgcttctatttcttgccgtgtgtaacattttattatgaaatatttaagacttcctcaaagctccaaagactattcttgggaagacctatttctgtcacataaagaggttaatctttactactgtggagaatggtttggtcctgccgggtgggagggcccccctcctgcagcgtagtgtacctgccacaccctcctccctctggcacagagcttttcctgtcctgccgctgagaaccccggtggttgtagtggcatgtaagggaggcagggggcttcagcgtctccagcacaggttcaaggac

SEQ ID NO: 146960 - DNA, 344 bp, Homo sapiens
ctcccaaagtgccgggattacaggcgtgagccaccacacccagccttgagacagtttttatgtctgtttcttcatttgtgcttcatgccactgttgtgaggtaggccaggcagggaatggtgacttctctttttacagataggcaaattcaggttggactcctgtcccaaattggtaccagacccaaaggacctgattcagggttaaggtctttcccttccattacttaaatcttccttctggttcccactggaggtggtggtgggtggtatgtgagtttgtgatgtctggatccagccaggaagaaaatcccagcatccattaactgtgaccttgtgcaagac

SEQ ID NO: 146961 - DNA, 324 bp, Homo sapiens
gtgtggaacagagggtgcagaaggaatgatggaaatcaaggtttctcaggcaatgcaaagtgcccacatgccctggacaaggagccgggttctgctcccgaggtgacatgaaaattgacatagggtaagtttgttacaaacacctacgaagggtgaagaatgttccagatgaaaatgcccaagactcaggcaaagtcggcttcgagtagagctgggaggagctacaggtactggagcgacatcccgggggctctggacggtgaggggacacagtcagtgtctgaaaggccagagtgaggctgggttcgtacccacatagccaca

SEQ ID NO: 146962 - DNA, 465 bp, Homo sapiens
gaggcaggagaatcgcttgaacccaggaggtggaggctgcagtgagccaagatcacgccattgcactccagcctgggtgacagagcgagactccatctcaaaaaaaaaaaaagaagtgtaatatttgatacgaaaaaaattaattagaatgcatggccaacgtcgtgttccccagctctgtgggtttacacatatttttccacaaacgaaataacacatgaacagcaaagcttagggctaaaaagcatacccatttagacaatctgtaaatatatacttggttgaaataacactgtgagagtttgtgcacatttctttggttgttttcgtcatctgcatcatgtctgaaataaagtgaacacctgagactaccacagaaccaaaacaccaccaatcctgtggaagctacctgacttacagttttgaaggacttttgacagccatggggagaattgaccctagggg

SEQ ID NO: 146963 - DNA, 651 bp, Homo sapiens
ttcttagggagctaagaagtataatagcaaagccaaatgagggaaggagggaataaataggaagccttgcgtgtgctggtggaagcacagatgggggctgctgttctgggaagcaatctggcattacttaagcaaattgactagttatctactctgtgacccagcaattccgttcctacaggtggacacaggaatgtgtaccagaggtccccaagaggacatgtccaaggttgtttacttctgttattagtggtggaggggaatgggaggtaactgagtgagcattgcttgggggagaggaaaaatggcgggtgcacgtcatggagttgtctgtagctgtagaagcaaaggattagataaacataaggaattcaaatagattttaagaatatagtgcttggtgaaaagataagagtgtgaagtacataaacattaaatcctttatgtgagtttaaaattcattagcccagcacagtgcacattttgtaagagtacttacataaagtacatcttacataaagatactccttaaacacgttagaatggctgcctgcgtgggatccagagcatgggagtgggctatggagatgaaaaggaataaagaaagaaaataatgataatgtgccatgaaccgggaagtataagcgttga

SEQ ID NO: 146964 - DNA, 375 bp, Homo sapiens
aagaactcaatgaaggacctgccactgagtgctaggaaaccagcaagatgccatcctcatggggcagacaggtgctctccaagtgcaggcagagaaggtgctcaatcctggtgtctgttgtcacatcagaaacctgaactaaaaatgtgaagccgcttcctctctgaaggaggagactcaaggggttttatctggccacagcaggcagtcatacttcctcaccagactccccacttaaaaggtccagcagaaagggccacaggctggaaaatcaactcaaaggttagacccttacctgtcctgtccccaggcattcaccttaataaaaaaaatcactcaagaactatagggattaaatatgacactaaaaataca

SEQ ID NO: 146965 - DNA, 137 bp, Homo sapiens
ggcctccctacccccagaggcacctgggagagtcaggtgaggtactaaagattctagctctacctcgccatgcccgactgtgagcaaagaggcaattcctgccacacgcagctgatttaaggcataaacgagaggga

SEQ ID NO: 146966 - DNA, 256 bp, Homo sapiens
gaattgaactttcaggatctcaagaaccagctcaaccacatgtctgtatcctcaatcaagcaagctgtggattttctgagcaatgaggggcaggaaagggcggggtactggtggcacccccggtcaggtctgtgtctgagctgagggctgagcagctgctggtcaggtcttgttggcccagcagcggagggggtggctgagacgcctctgaccgaaggcattggggcgagggatggcagcctgagctgcagccagg

SEQ ID NO: 146967 - DNA, 414 bp, Homo sapiens
catctccaggaccttggcactaaaggtgccagtaagatcagaaacaatagagatatcaggggaaagatcctacaggacaggcggaaccaatgagcctcctttctcctcactcaacactgggcttgggtcagtccagtatatccttgacccaacacttgggtcagtccagtatatcctctgtactgcccagggaaatcagaatgagagggacagtagcttgtcaaacccagtcctgctgaggaactcaggcctccaggctccagggaaaaggctgaaaatgaaagagctttcctagatacagagtgactatttttgagctgactctaataatctactatttcaactaccagatcatcctctcatgggatcacaaagacaggcccaatgcagaatctttaagaaccctagaaatct

SEQ ID NO: 146968 - DNA, 465 bp, Homo sapiens
tcgagctcggtaccagttcgacggagactctcttctttcaatattcatgggtttaaatcaccttttccaaaacaatgccttaattctgagatattgtctatgtctaataatctgtttacagattttgttttcatggcagtttatttccatttcacctaaagtgcaatttcaaatccaagaaccaagatatatgagtttagtattccaaatgatatatagaaataacttaggcaattattccaattttgtatattttaaaataaagcctgcctcattaaaataataatagtttgtgtgtttctagtccagtcatcccaagagcatagctgcatccaaatgcatatgtaatagaattatcttcaaatatgctctaagcaaccagaaatactctctagacaagatataccataacactttaaaaaactgagttatgatatatcttgtctagagagtctccgtcgaact

SEQ ID NO: 146969 - DNA, 247 bp, Homo sapiens
gcatttttttccagttactaaatggctgaacctgaactctgcattcggctcagagacaggggaaatatctacagttctctctactatcctagaattggaattgactgcagattaacacttatcaccagagtgcaaatgagaagatgcaaaagaaactctatttccagcttgtctctctttatgggaaagcctcagtttttttctttccagttctctgtttcgttttgcttttcccccttgcagcaca

SEQ ID NO: 146970 - DNA, 511 bp, Homo sapiens
tgctctagtaactgtgtcctgcctccccactcctgatccctcctgtcagtttcccactagctaacccgtcttccagtagggtcctatcctgggggttattacaaatgctggtagcagcatgtcatggaaagtttgctctgtttactttaattgttgttgctttacttctgcctgctgcaaagaccccttttctttacagtccatcgtttccaacccatgcaatgcacaacctaataccaactgagctggcaccactcctttgatgtattttttcagaggaaggttatttttgctggcttgaaaggttttcttttctagctttaggtaaaaatcagcaaagattccagttcttatcaattgagtgcttaagtaaacagagcaggtgccaaagtcaataggatatggaaaacaagattctgctgaagattatttgtaatggggatcaactgctgacatagaatcaggagttcacacttgatgaaaaagaacatgaaagaggaaagagcccaaa

SEQ ID NO: 146971 - DNA, 134 bp, Homo sapiens
actttcttttttcaccattctttttctgaatttgattactcaagtatctcatatgaatgaaattatatagtgtttgtcgttttgtgacttgcttatttaacttaccataaggttcataaatgttgtagcatgtg

SEQ ID NO: 146972 - DNA, 279 bp, Homo sapiens
aattagcttgcgacaggcataaaaaggaatgagatcatatcctttgcagggacacggatggagctggaagccattatgctcagcaacctaacgcaggaacagaaaaccaaataccacatgtcctcacttgtaagtgggagctgaacaataagagcttctttacccctttttccctgagctccttcaaaagttaggtgacttgcagcctctacttcttggcaacctcattaacccattaaagtttggctcctttgttttccgttaaagactgcgcatttc

SEQ ID NO: 146973 - DNA, 128 bp, Homo sapiens
catttcctactatatttccacttatacatcttcctttctgatcatatgtctaaatgttttacataatggcagtccttataaacatatagttatcctgcttttctcagcacaacataaaacatttctat

SEQ ID NO: 146974 - DNA, 328 bp, Homo sapiens
actcatcatatgagtaggtattcttatccccatcctacggttgaggaaacaatcttggagaggttaagtaagttgttttgttttgttttactactggtcaatattggagctgaggttcaaacccaggaagctgactcctgggtcaatgaagcccttttgggaaacatttcacctctggtattggctttgggctttgaaacacattgtcctttattgctttttaacaatgaatgagctttgtatatgcaatttgccctgcttccctatgctctctttcctaaatgtgactgttggtgtcttgtggcctagaagtgcctccagctccccg

SEQ ID NO: 146975 - DNA, 144 bp, Homo sapiens
ccatggttttcttgattttacacatgaggacttcaggcagaaggcagggaagctgaccaaggacatatggacttttggaagtggcaaggcccggattctctccagaatctgaccacagttcccacttttcacctgatgactgcg

SEQ ID NO: 146976 - DNA, 390 bp, Homo sapiens
agccttttgactagtattatcatccttaactttggagttatcatatagagggaaattatgtatattacagtgaaatttttgtgcccacagttcagtattacttgagataaaagagaactctttaacattaaaggatccttctatttttttctcacctttactggtctgctttttttatcctagaattataaggaagctttaaaatttgctaatataatcccattcctttcatcttgttctttgtctctagttttcttgtttaaaagttttagacttcttacagattttggtcagtgaaacaccagggaaagagtccatgaccagtaatttcaggaaatgcagtgtgattattttcttacttgtagaaattccaatgcatgttgaagctcc

SEQ ID NO: 146977 - DNA, 239 bp, Homo sapiens
cccaggattatgctcggggggtgattaatcatgatgtatggttggtttgtcacagtttggcaggaagtgggaccaatgactgctgagagtcatcacaatactaatagtataacactaatagtattcataatttgttatttgctaatatatacaaatatagtattatactatactataatagtattagttatagtggtatagtatgtgtatatatgtttgtgtatatgtgtatgtataca

SEQ ID NO: 146978 - DNA, 536 bp, Homo sapiens
gtattccagttacaacagcttcacaggaagcctctctcaaacaaacaaacaaaatggggagggaaggggaggaggaagtgagggagaagagagtatgggaaatgaaaagtaggttaatgtacactgcttcccagatactttagttctcgacccatgcctagacaaaagaaacctgccactaccactgctagagtcaaaagttcctctgtcatccaacaagctcagaacgaccaacgaatctccaaacagccttggcagcccaacaataccagcaaatgtcaaaccaaaatcctggggctccaaatctgtcattacagtttcaactgaggctcacctcggtctgcttaagttcaatatccgcactcccaggaaatcctatttaaagagtctttctggcttccccacccatttgccttcctgaataaagaaagaaaactactataaaccatcagtcaagctggccaactacagaaaagaagcaattaacggatttacctgcactatctttggtaatcactgagctgttggaagtggcg

SEQ ID NO: 146979 - DNA, 494 bp, Homo sapiens
cataaggactgcagacttctaagcacgttcaggttgttggcatcggttttaaatggtgatgccttgaatgcaatgatacagtgggtttggtccccgatgtaattggagccttaaattttaaataattctgtatgaattaggactaaagatgcaacaagaaactttagcttctaagctcagctgctaacaaactcaaagtattaataatgaggtggagctacataaaattgctgatatttggtacatttagttctcaagaactgactgattatacaaaaacagtaatagcaatagtgaacaactagagggtcaggcactgttctaagtgttttttattatttatgtcacttaacagaaactgacaatttgataaaacaggtaagtttcacttgacatgggaggggtggttcttaggggaagcccttttactgaatgtaggcagatctgcagtttaatttcctttggacagcgtttattcctctacgatctccagg

SEQ ID NO: 146980 - DNA, 523 bp, Homo sapiens
tataagacctttcactggtactccacaaacagtaacatatgtgtgacttgctagtgaccttgttaacatgcagaatctgatcctgtaggtctgtggggcctgagacactacatctctaataagcttgaccaggtgaatgtggtaaatatcagcagtagtgggatgggttgccatcagtcttcttcttatgcaatgtcctgggaagaatacagcaccatgtgtctggtattgccgctaaggaagcatgacctgagtccggtcacgaggaaatacagatcagattgagggttatcctgcaaaatgaaaagactttactctggcagggacatggaagtcaggaagagaaaagggaactattccagattgattgacactggtgagatgtagctctggggtagactcctggactagaaaggaaagacattgttgggacagctgacaaaattcaaatggggtctatggattggattgagagtgtagtatcagtgttgatttcctgatgtggaggcttgtatgctggtta

SEQ ID NO: 146981 - DNA, 281 bp, Homo sapiens
agcatgaagagggacagagctgctgaactcttggctctcagggccacagtcacctggggcccttctttttccagggggctgcttcatccgccgaagtcgcagccttcttccttggggacgtgtttacagggtcacttggctcctttctctacctttctggagggtgggggaaacccagccccattcctggcacctaaagttggaaactgagggaggctcctgggagtccccgtccctgagggaggggtggtgtctttggggtggctgggtctgagcagcgt

SEQ ID NO: 146982 - DNA, 315 bp, Homo sapiens
acaaaagaaaaagagatgaactagagacaataagcatacccaacttttcaaacagtttggtaataaaggaaacaaatggcatggtagctaggagatgtgaaatcaagagaaacattgcagcatgttatgttggtgggaatggaagaagaaagaaaaaagataaggcagtagacaggggaaatgacttggaggggttgaatgggatcctgggcacacaacactcaaatgtttattgagttgaactgttgctacccttaaacatgtcttggaaaaaggtggcctactaattcagctttctaaaattgtatacagaaa

SEQ ID NO: 146983 - DNA, 324 bp, Homo sapiens
ttgccagggcggcagggaggctactgatcctcacgcacctggtcctgggttccgccaggtatgaccctctctgtgccacagtgtccctgcagagctgataggagagtcttccttcctgagcctcctccatctctcctgcacccttccagaaatgatctgtggaccagcctacctttttttgcaaatgttttattctttagataatatacaaattttaaacagtcacagaaagataagaatataatgcaaaagagatttcttttccaacaacccccttctggaaccacttgagtgtagtgacatattgatgttctgctaccctgg

SEQ ID NO: 146984 - DNA, 351 bp, Homo sapiens
tatattctcagaggcaagtgatagaatggccttgggtacattttgtaatggaactatcaacagcagtctccttcgaatgcacatagctcctttcttcccctttacatactcaaggttaactttttggcatttttctagatttttgtgtggggatggctatgtaagtataagaagacttgttaaatgattgttttaaaactgtggttctgggccgggcgccgtaatcccagcactttgggagactgaggcgggcagatcatctgaggtcaggggtttgagaccagcctggccaacatggtgaagccccgtctctactaaaaatacaaaaattagccttgcatggtggcgtgc

SEQ ID NO: 146985 - DNA, 192 bp, Homo sapiens
attcttataactaataaagatctcttcagataagagcatgagtgtatatatatgtatgtatttctttttatgagacggagtttcattcttgttgagtgtgtgtgtgtgtctgtgtatatatatatgtatctaaatccttgcataccttgttcaattggagaattctcatgtttttcatttatcattgtaaca

SEQ ID NO: 146986 - DNA, 726 bp, Homo sapiens
agtttgttaaaaacaaataaacaaaagaaaaacttgtaggtgaacagacactataaaagactgcaatggcattccaaaagctgggagaaaatatttgcattgcccatgaccaacaaagtttcgaatataaaaagtcagagtcagtcaactacaaaaagaaaaccaaaagaaaagtgtgaataaggcatagacatttcatagaaatatttgtaaacatattcgcacgtatctataattagagaaaagtaagtttaaactgaaattcttgtgtcatactcatcatatttccaggtattaagtgtataacactgtcagcattagtgagcaacaggaactggcatacactttaggcaaagtgaatctttctacaatccctctagaaatctatttggaatcaatggtaaagtttagctataacactgagaaagcagttccactgctaagtatatgtcggggcaaggggccttaaactatctaggacaaaggaagaatgttttttaaaatttccagtcttttataaaatgtgacaaaaataaattattttaaaaaaggcttgaacccaggaggtgcagggtgcagtgagccgagatcacgccactgcactgcagcctggcaacagagtgagactccgtctcaaaaaaataataataaaaataaaataaaaaaagaaatgttaatacacttccagaaaacaataaatatgaaaacatggacataaaaaatata

SEQ ID NO: 146987 - DNA, 310 bp, Homo sapiens
tgtgtgcgtgtgtgtgtgtatgtgtgatgagaacatttaagatctgctctcagcaaattccaagtacacaatacagtgttatatacattagatctgcagagcttattcagcttctatctgcaaggttgtaccctttgaccaagatcacccgtcctcaactgatgttctactctatttctataagtccacctttttagatttcacaagtaagatcatgcagtgtttatcattctgtgcctgggttatttcacttggtataatattcatattcttgtaaatagcaggatttcattctttttttaaagctgaa

SEQ ID NO: 146988 - DNA, 645 bp, Homo sapiens
gtagctaggattacaggtgtgtgccaccgtgcatgacctttgtctctaatttttaaaaaacagacaaaaccttaggatctgtcttagtttataaaggggcatctattttgctttcagataacaccgtagagctgaaacattttggaaatggctttctaagggtcacgtctgatatttcaggctttgcctggcccataagtagactggatagtacttgtcaggtcctgaatatcatcctcaggaaaataatattctgcttctgctgcttttatccgtttttactccctctccttcccctggtcccaccatgtgttagctggtaataagtcaggtatcctaggatcataagttataattaagactctgaattctttaaaaaatgtctgaaagtcttccccaggtttaggacatttttaaactatgacctgtttttatccgtagcatgtaagtcaggaatttcatgctacattttcaggttgttctgttttataaggaaacagttgaactgttcttttcagagaagaaaggcaactcagagttagtagactgtgaatattcaggagtagatgcagtattcaggtaaaatgggagcagtaggagttacattagtttatctgtctttggtgtgggaggtaatcttgcgtt

SEQ ID NO: 146989 - DNA, 710 bp, Homo sapiens
taaatgtttaaggagatggatgtccctattaccctgatatgataattgcacattgtatacaggcatcaaaacatcaagtatacccccaaaatatgtgcaactattatatgtcaataaatatttaaaaacagttagattaggcagttagttcagaggagcaatgtgggcctggagatgcacactggggagtcacaacatgtaaagccatggcaaagattagacccctgaggaggagagctagagaggttgatcctctgtgcactggagaaccaaacaggggaggacaagtggaagactgagcctgcggagaagtcagaaatagacaatgaagaattaatgggaagtgtgatatcgaggaaacccagaaggacgatgtttcgagaagcgactgagtttttatatttaccagtggtgctgaggggatgagtaggacaaggaaaaaaggtgatctttggagatggaagtgtggaggtggttggtgatggtgactacagaagttttggtataggggcgggaatggaagccagatgtgattgatttaaagagttaacaggaggtaagagagtggaaaaggttgttgtgcaacttctaaaagctgactgtctttgaagcagagcagaaccatggaaatgggtagaagggaatgtgggatcaaaataaagcattctgaagacccgggaaaacaagggcaagtgtgtgtactttgaaaa

SEQ ID NO: 146990 - DNA, 435 bp, Homo sapiens
actggtgtgctcaagaaggaagaccttgggtgtggggaggtaaggagccacaggtctacttccttggatatgcattctcatgactccatccacaccagttgctgtttttgttttgcaaacagattgaaaaatgagtggaagacattggatctgctatcttactggacttccaggctaatgaggcacacagtaaggcctcagtgcaggactgtgaaagacagacaaattagtacatagctttattcagaagatttcaaatgaacaatactcccaggatttctgaaagtgctatgggttaggggttaaagcagggagtctgtaagagcagatgaaattcggataccagctctccacttcatagtatgtgaccttcctctgcttcctctctcccaagaacctgttctccagatctttggaaggctgactctctccttt

SEQ ID NO: 146991 - DNA, 435 bp, Homo sapiens
tttaaaaaaatgtaacaagtaggcaaatgcctaaatatagacatccactgcatcaccatagggctgtgcacacagcagctccctcaactgctgcatgggggtggtcccattttaccccaccccactttcccctgcctgactcacttattctcaatgactatggaggggggctttcccactcctctgaggaggagacaatacagctttctttgccccttaaatggagatgtaaccacagggaaccagataggcccagagtatgaatgaaatggattcgcctgcttctgctgctgttttgcttccaaatgttggctaaaacaatctctctcctaaagcctatactctatcagtggatattcttttttaacctatctccatccttttttagagggaagaggtacttcaaaacttttagcctcctagagtgctatattt

SEQ ID NO: 146992 - DNA, 700 bp, Homo sapiens
ataaatgagaaaaataaatggaatgaatgagtgcatagtgtgacccatatttgtattagatcctcaatggaaaaataatttattgcttttgtaaagtgcctgagaattggcaaagagcttattgactgccttccctatcagactgtaagcccaacaaggtgaggtttttgtctatcttgtttatctctgtgtctcagtatccagaacaatgtctgacacatagtagaagctcaataaacacttgttcaataaacattcacacagcatctccacaaggccaggcacaatcaatttccactgtactggtagagaatgtggggctcaaaaaggtagaatgaaagcttgcatactataatggaaaaaaccataatatttggaaccagaatacctggcttcaagtcccatttataccacctactagctatagatttgggaagatcattgaagccctcttgttcctacttttggtgtggtcctttgaggctgtggcttcactaagcattggacaaatggaagttgctgtggttgatagtgttgtcaatgctgcctaaacactcagagataagactattacaattcttagaatgggttctgaaatgaaagaccttcaagaagcatgcgaaggcatctaatatgaattataaaaaggaagttgcagatctagaaaacaatgattgcctgaacatgcagagctccctga

SEQ ID NO: 146993 - DNA, 190 bp, Homo sapiens
aggatttaatgtcctgagggtgtgggatgctaaatacctttcagtagttgggagtgggagggtcccacttaatgaaggattgtcctgtccagaatgctgaaggcacccctgataagctatctcttttttttttttttttttttgagatggagtctcactcagtagcccaggctgtagtacagtggcatga

SEQ ID NO: 146994 - DNA, 461 bp, Homo sapiens
aaaaacctttctctccaggttaacaggggctggggctggggagttagtgtttcaagggtgtagagtttctgtttgggaagatgagaaagcgtcccagagatggatagtggtgatgcctgcacaacaatgtgagtgttcttaatgccactgaatcgcacacttagaagtggttcaagtggtaaatcgtatgttatacatatttagcaccattttttaaaagcatgtctttccagctgatgacaactgaaaagtctagacaaaatacaaaaaggaagcatctgaggtcactgaaagacaaacaaaagcagggaggttgcggagtggagtcaaaacttagagaatggccaggcacaatggctcacgcctataatcccagcactttgggaggccgaggcaggtggatcatctgagctcagcagttcgagaccacccagggcaacatgatgaaaccccgtctcgct

SEQ ID NO: 146995 - DNA, 390 bp, Homo sapiens
ctccctattgctctacagtccaccctctctctgtcccccaatgcctctctgaccttctctgtctctggccactcctggctcactccaccccagatgtgtggggtttgcctgctcctggaagccacctgtttagcacagtcccacctcagggcctttgcacctgccattgtgtccacctggctcccacctcctgagaccctgtctctacaaaaaataagatgtcaaaaaatcaaaaaattagccatgtggaggggcaggcgcctgcagccctagctactcgggaggctgaggcaagagattggcttgaacctgggaggcggaggttgcagtaggcccagattgtgccattacactccagtctaggtgacagaccaaggccccatctcaaaa

SEQ ID NO: 146996 - DNA, 459 bp, Homo sapiens
tcgagaatcaatcccagttggtcatggtgtattattatttttttagatattgttggatttgatttgcaacaattttatttagaattttttcatctgtgttcattaaagatactggtttgtagttttcttatgtctttgtctgctttcattgtcagtataatgctacattatcaaaggagtttgaaaatgtctcctcttagtaccttttctaaaaatgtctgtgtaggattgttattttttccttaaatatttgatagaattgtccagtgaagctgtctgggcctggagttttcttcataggaaaattgattatgaattcaattgttttaatagatacaaagttcttcagattttctcttctccctccctccctccttctctctctctcttcttttctttctctctttttattcttcttcctcctcttcctccctctcctcccccctcctgttgttgttc

SEQ ID NO: 146997 - DNA, 371 bp, Homo sapiens
cagtgccagtcacacaaaggtcatctgcaggctccctcattaacatccctctcggtctttgtctcttttcccttagttttgggttagtgcctatgacatttgccactcttggctgggttttacaaacaaggctttaccttgcctgcctacatatccagtggtgctaccaggttaccacaagacactgggatcagaaaagctggaattaataaacaaagaagcaacattaggtggattaagacccagcctcaagggctaggaatgcttttcttttttttttttgtgacagagtctggctctgtcacctgggctggagtgcagtggcacgatctcggctcactgcaacttccgcctcccgggttctaagcgat

SEQ ID NO: 146998 - DNA, 331 bp, Homo sapiens
caccaaaaaagggcacaaacgcgtcaacaccagctcaagcagagctatgaagctgctttaatggatgagtcctgaatcagacgagatactagactcagtaatctctaagttcccatcccaatttgaaattccatgactctaaggtatccttaagaataaagattcatcattagagtgcaatataaaattaaccttatgaggtatgcaggtcttatctgtgttctgccattttttaaattcagtattagacaaagttagttgacctagtctgagccccagtttttttagaggggaataatggaaacctacctttcacagctgttgtaactgg

SEQ ID NO: 146999 - DNA, 119 bp, Homo sapiens
tgaactaagattgaattcactttttaattttaaagcttctgtagctttgattctctttggacatcaaactgatttatacgagatatgaatacaattgcatattctgctaaattacctat

SEQ ID NO: 147000 - DNA, 317 bp, Homo sapiens
tcagtcggtactgatgactgcacacgagtatgggaactaaggcagtgcctgttcccatgtaagtgggggtagagagcacaagtatcacctggaagatggcaatcacccacaaaaacagacctaatctcccattcttaaatccagtgacttccatttccttggtcttcaacaactaataccaagttgttacggggaaatattatgtctgaaatccatcaggctgttttcccaagacccacaaaataccacttttctagtcttattttcaagggtggagggctgtttggatgttctgtctctccactaacctatgctac

SEQ ID NO: 147001 - DNA, 139 bp, Homo sapiens
gaattgtggtccagaaatgtgaggtccctgccctggaagagccatctgctaattagtggcagatacagtgacatgaattttcatagaaatagtcacaggacccaattagaagggatgtaaaaatgaagcattgggattt

SEQ ID NO: 147002 - DNA, 364 bp, Homo sapiens
cccacatgcccagctcgatgggcagctgtgggcacacggctgtgtcctgggcctttctgaccgtatatcccacaggtgacaggagtggcctggcctggcccccagcaagctcgacacctgcaggctgttagtttctgactgtgggcacagatggggcttaattgctcccagttcctcgacttggcctttgttctgcatgctgctgagctgacaaacagggccatatgctggagcacatgctgccggtgcctgcgtgtgcatgtacacgcgtgtgcatgttctcggagctctgatgccagcctgacattttcccttggcatactctaaggaaaacgtgttccagcccaggcttcttggagcggag

SEQ ID NO: 147003 - DNA, 139 bp, Homo sapiens
gcggccgcctactactactactgctcgaattcaagcttctaacgatgtacggggacatgaggaaagctgctgcctagaaagactgagccccctcccctgccctctccctgaaataaagaacagcttgacaggaagaaaa

SEQ ID NO: 147004 - DNA, 566 bp, Homo sapiens
aggacagaggaagaagaaacaggaggagaaaacagaggtcggcacaattagatgttcccaagtgcttgaaagtcatggctgtgcttgtggttgattgcgggtggctgtgaaagcttaaagacttaaggagtgaatgagtggaagtagaggcaattcctcttttttggaaggtaagtagaaggaaggtgaaagatgccattttgttaggaatccctggggagtttccttgaatccgtctcttcgtttccattctcacttctgtcactcctaaccagatttgtttccctctttcctagactgatattaaacccccctagcttatttccctgtgtctgcctttatcctcatttcttttcttttttgtactaggaactcctatggcagtccagtgaaggccatagactcctcagaatgaggcttttaaaggaataaatgaaaatacagaggatatgtcctagcaagttcaaggatccttttaattctatccatggaccacttgggagttcatggaaccccatcaagaacccttgcaagaataagatggggatagtgtggggtgagaaagt

SEQ ID NO: 147005 - DNA, 420 bp, Homo sapiens
gatgctggttgctttcttgggacatgagtttagccatggtggcaggccaggtgccaagttccccttgagctactgtgagaactggagagtcagggcctagtgattcggggcagtggccatcacccccagctgttgagagcggttacttcctgcagggctctgccttccctgaattgggagtgcacagcctgtgctttacccgactgcaggcaagagcagaagctcactgagcaccagggcaggtgacggggcatcgctgaggtccaggggcaggagggaggagcaagagcaggtggccttgggcctgggccttggcgctgcctggagtttgaatgtggtgggcagggtgtgaaggagatactggagttccataagggagcgatgggagcaggaggaaacggagttagaatcatccatggg

SEQ ID NO: 147006 - DNA, 405 bp, Homo sapiens
gaataatttatgaaaagcactgacaacagtgcctgacacataaaagattagaagttattttttttctggattggtatccaaaaacccctttaattcataaaatgtcttaatttcaggccgggcacggtggcagacacctataatcccagcacattgggaggctaaggcaggcggatcacctgaggtcaggagttcaagaccagcctggccaacatggtgaaaccccatctctactaaaaatacaaaaattagctgggcgtggtggcgggcgcctgtaatcccagctactccagaggctgaagcaagggaatcacttgaacctgagaggtggaggttgcagtgagtcagtcacgccactgtactccagcctgggcaacaagagcaaaactctgtctcaaaaaaaaa

SEQ ID NO: 147007 - DNA, 428 bp, Homo sapiens
gtgactttaacttctctacgcctcagatccctcatctatggaataaaggtaaagtacctagctcttaaagctattatgaagattaaacaaaagaatccacatcaaagcacattgctcagtgcttcctataacacattattgcactttattgtttacttgtttaactccctctactgaagtgtcctgaaggcaggactctgtcttatttgaatccccagcgcctagcacagtaccaggggcaaatgacttgagaaatgaatgaatgagctcaaaatacaacatgaggtttccactgctaggtgccaattgaatgtgtgatacacatcaggcatcttagtggatcttcttagacatccagacaaccagggtccacccaagacctactgaataagaatggccaagagtggggcctagggatctgtattctt

SEQ ID NO: 147008 - DNA, 260 bp, Homo sapiens
gatgtaaaaaaaaattaatccaagctcatccattcttcaagttaaaaaaaggcagggtaagaaattatcattttcagtctgctaaaaactaactagacagatatatttagcctaatacatacatccctttctcacctgagattaaaattttattccttgcctcactaagcagctgtttctaactttcaggtattgtaatttgaagcctcaatgctcattagaaattctaagagagtattcctaaatccccattaaactat

SEQ ID NO: 147009 - DNA, 686 bp, Homo sapiens
gcttctgctaccatttacatatgcatattttagcattatatgataagttgcattgaggacatttttcttgcctttgattagattaaatcttctttaagtaaggggtagtatcttcaattttgtatttttagtgtggagcacagcacagggttggtaaattggcaacatgagggcaggaatttcttatttcttttgttcactaatatatgttaagcactagaacagtgcttggcccatagtagttactcagtatgtatttgttggatgaatgaatcctgtatgccaaagataaaagtcttaatatttaagaatgttcttttggcactatattggttcagatttgacaaaatggtgtagaactgattaataggtaaattccaccagaacttgcagtcaaccaacacctttgctttagactgcctcctgtttgggagggcaagaatttagctaatttggatcttgagcttaataaacactaacatggtcaaaagtcaattagcaggagagaaaaatggaaataaaagagctaaatattttgcagattcattaaccaatctatcattaattaatccttaaacattgtatgttagtagccactagaaagggaaatcttcttgtggggaagatatagtgctgggaaatttgtaaattataaactacaaagttaaagtagtaaataaaggaaa

SEQ ID NO: 147010 - DNA, 232 bp, Homo sapiens
ggccacgtggcaggacaggaaggagggtttgagagaaagttcccagaatcctctgaagtcagagatggctcccactgcacgttgcagaatattgacagagctcaggaagctgaaatgaatgggtgggcttgtggaaaggtcaagggaccagaggggcacagagcagtggatgccagcaatggctttggagacagtcggagctggctcggaacccgccttgcacagccttctt

SEQ ID NO: 147011 - DNA, 1016 bp, Homo sapiens
gcagggttctcagacacaggagagagcgggatcttaatgaattgcatttcctgcagagcctctagtgcacaggccagttctcggcagtggcttttcagcacaagggccttgcattgaagctccctcttctgagatttcacccagcctgatgaggcctgcatggttccggcctcgtcatccagtgtagataccagtcttcctatttttgtgacatctgcacatttggggtcattccctatatctgcataggagctattgctaaccttgttagggagaaacatggtctaatgagaaagacagacccctaggctcagctggccctgccatccttccagaggattcctctgcaactctaggcaagcacccagcttcctgggctctttttcctcatctgtgaaacttgcagggtgcagtgaggtttcaaaccagtgtgataagtgttggcctcacacctggcccaggggatgctgggagaacaggagcacttgttaataacagaaacactgatgggaccgaagccagtgcacacaccaggaaacctgcccgtggctgacactgtcctccagcctgcattctggggaggctgtgatgggcacgtttgccaaccccccccccccagtagagcccaggaccctcctctctcagcttgccagtgccctgccctccacatggcggggaacagcatcaatgaggtccttgctccctgagagcctctctggaacctgcccacttttctcaacatgtatattctgctttgtagtctgaggttgattttctagaggcgaggaaggggctgagttctgccctcgtgctgttcgctggtgctgatcagggccaagacgacccttccctctcccccacagcctgttgaggtgccgttgacgtggacagcgcccctcccttaagatgcccccttgccgttgccatgagccgctgtgactcacgcgtgcactgggccttgcttggtgctcccctcctcctcctgtctgagatcggagcttgctggagagcacccc

SEQ ID NO: 147012 - DNA, 342 bp, Homo sapiens
ctccgagcagtggtgtggaataggaagagttcgtcatttatcttttccatatttgccaaaaacgtcctttcgttcttatcctatgttcacagcaatgttttgacctggttttccaattagttgataccaagaaggagaagaatggattgctgagattaatattttattcactgtaaacataaaatcagaggtcctgcctgtctccttaagagatggcatgttagtccccaagactccactcaacattaagcaaactgagtaaaataaagtttatgaccttgcaaagctgaaatttctctagaactaggtgatttcttggtagacatctatactcaagcattg

SEQ ID NO: 147013 - DNA, 470 bp, Homo sapiens
caaatgatataggcagaggataaacgggaatgtttggatgaaggcagcaaaagtaggaagtcttttcttggggctgtggtttgtggatagaaagcccggtgcttcccacagaggaggctctgtcggtctgtggattgagtgtggcttcgcatggcagcagggatacgtgacagtcattgcatgggccggtgggtcctcagatcaagtactattgggccccatagcacttaagtcattgtctaggaaaaggtcatgacataggtccagcttcctccccaagaactgctggaggttcttctggggcaggaggggtcgctaagctgtaacaccgtaaatgcctgtggcatggccgtctccgcgtaccagcccaccgccttcaccactctggccactgcagatgaacgctgctgctgctttttcagaaaggtttagtgctcttgacctccatgcctctctgccccgccatataa

SEQ ID NO: 147014 - DNA, 555 bp, Homo sapiens
  misc_feature (555)..(555): n is a, c, g, or t
ggtggcatattgcctgcggagtcctcctgggcccttgcaggatgtggccaagatgcttggtgctgcagatagtctcccggaagagaggggcttacacattcttggtaagctgtggctgggtttagaatgattccttgggaaaaggggtagcaaagtaactttgtcctgaagaagccccaagtatcctgagcccagcagccttacataaagtagtattgcatagtgactaccatttcagggtctggatttagacttggctttgagtcctatctctgcagcttttagtaactgtgtgacattgtcattgacctctctaagcttcagtttcctcatctataaagtgaagataatattccttaatggtcagggttatagtgaggactaagtgagggagggctcagctgccagcttggcatcctcagcccatggcagccgtgtcatggctttgtgctccagtttgttgccagggcctggtgtttcatggttcactctcttgtctgactgtttcccagatcaggcaagagagtctccgtcgaactggaccgagctgattan

SEQ ID NO: 147015 - DNA, 208 bp, Homo sapiens
tgcctggacagagtcctgagcactaaaatgtcaagatcagatgaaaaaagattagctagcaaaaatcactgagaaggaactctcattgaagttgctgaaagagaagtgggcatctggtgttgcaaaaccacagggctggacacactgtagacattcaaagagagttagtttcttctttaatggaaaagtatcattcatccattttagg

SEQ ID NO: 147016 - DNA, 167 bp, Homo sapiens
aaaggtgttagtcaaacaaaacaaaacagccactccaagacatgaaggagtacacattgtatgatttcaattatacgaagtataaaaacaggagcacttaatctgtgatgttggagtcagttgggtcacccctggggaaggctgtgtgtgcagaggaaacaggcttc

SEQ ID NO: 147017 - DNA, 156 bp, Homo sapiens
taggaacagtcttgtcccagcgcaggcacgaggagggctcaggaatctggctgggagcattcctgccgtccctactgaggagctgccactgtggaccaggacacccccctgataggagcagactcccggggtgtagacactgcttcccttttcaca

SEQ ID NO: 147018 - DNA, 752 bp, Homo sapiens
cccccgtcgtccaaaaaaaatgtttttaagttctgtgataatatgatgcaggtatttaccacatttttgtggcatataggctgtaaaacatgaattcaagggttttagtgtttcattttaataaaaccaggaaaacttttacgcagagaaaattgagcagaaacttattttttagtgtgttaagtataatcacaaagcaattacttcctttaaaaaagcaattatattggaactttatatctaagagcctctatccaaggcataaatttggagtgaagcctgttcatttcagggattttattactctgaatatgttaggttgtgccccagtataatcatgtgcaaaacagaagtttgtgggttcctaatatagtgaatctccattgaatctgacttaatttgacgttacttagtgcagagcatcacagtgatggatgttagacacatccagagacatgcactttcatttaccacctcagaaggaagcaagaactttagacctggaatcttgacatagaacttgggggctctgtaactttcttttgttttctttactgttccctacttcccatgggcaatatccatagaataagcacccgctcctccccacacctgccctcttccattctctcatccctgtgttttgtacttcttttctgctgactttacctttcattctttccctccctcccatgtgccttaggaattattattctcctaatagtcttcctcattgccttagctaaaacctg

SEQ ID NO: 147019 - DNA, 368 bp, Homo sapiens
tggcctctgctctgctctgtgtctgcctctggcactgcttctcaatccctctgtccctctgcccctatgactgcttgctctcttggttttggtttttgaatcctatctctctatctcagattttacatttctccatctctattggtttctgttcactttcagctttcaacccgtccaatacctaccctttccctgatatttgaataccttcctcagctttctcactaggcaagaaggcccaaagtgaaggattatggtagaggtcacaagagctgggggtattttccaagaagaccaggtatactgaggcggggaggagtggcccaggaggtataggggatggaagcagcagagaggacaggtccgag

SEQ ID NO: 147020 - DNA, 463 bp, Homo sapiens
tcagtcaatatcccctcctgttacaatggatgatgaaacgtccatgtttctagttaaagccagccttccacttgtgcagtaaagcacaccccgtcttgcctgcccagtaattttcatccctcttctgttaacaccaattttcccattttactggatcacacccatcaacatataaatatgctttgtttttccagctaaaaacaaaactctttactccttttctcccatcatcaactaccccatttcttttgcagcaaaactcttcaaaagactcctctaggtttaccgtctcctattcttccctgcccattctttcctgaaaccattatgttcaggcttgtagtagctcttcacacaggtggtcagtctgccttcgtggaaatgctttttttcatttggtttctagcacgctataatcccatggttttcccttgtttcactagctgctactcttttggagcca

SEQ ID NO: 147021 - DNA, 283 bp, Homo sapiens
aacaactatggatattaatggttagtacttatatggcccttactaaatgccagaatctgttttaagagctttatatgtattttctcatttaattgttacagctaccctataacatatcatcctccaaagtgcagagaagttaagaaactttctcatggtcacataacaagtaagttgtagagatgatgtggctaaagtgaggacctttaatcactgaggtaatcagacaggaggccagaggctgaagcccagtgagtgagagtgatgggagatgatgaggcag

SEQ ID NO: 147022 - DNA, 388 bp, Homo sapiens
catgtgaattaaacaactgtgaaataataattaaaccataagtgcaaagttataatgaataaccttctaatgctctcaacttgatcatagtcataggcaatacattggacaccgaagcaattatattgaactgaagaggacaaaaatcttaacaaattacttaatcacatacagaaaaccaacaaaactaccctcccttttcatactgcatataggtaccttttaaaattgttgaatctcaataaagaaaatatgttaaatatcatcaaccctaaaagctggcccagcaagctgggattacacctgtaatcccagcactttgggaggacagggcaggaggacagcatgagcccaggggttcaagatcagcctggacaacatggcaaaa

SEQ ID NO: 147023 - DNA, 200 bp, Homo sapiens
gtttggtttgaatacttcattcgaagtaccttagcaacactagaaaagcaaatgaaaaaatgggctatgtagtaattacataaacttgtgcagtgctccaacttcaggttgaggagtgtgttatatggattttattaactacataaggacatgtgttatattttatttaggatgtcggaaccatttaaagtatctgatac

SEQ ID NO: 147024 - DNA, 299 bp, Homo sapiens
tcgtgaaatctgcttatggataattcaaatctgcagcaaaatcattcgcctctgacaatcgtcctgtttctaattcatgcctttgtagtttattcgatgtgtaatacatcaatgagtctatagattctaatatcaatgtttttttcttttctgcaagataaagttgaatttcataatatgatacactagcagctaatgttatctgaataaaaatttgacaagcatgaaatgtaacatattctgtattattaaggaaagaccatagtatatagtaaccacacaaaatgcacacatatata

SEQ ID NO: 147025 - DNA, 332 bp, Homo sapiens
tccaggctgccgtggagctccgcaattgtgagctacacccaggtgagccaccacctctcagaccagagacaactgcagtctcttcctcccaggggagctcccaggagcccagtgagtacgctgccccggccatccactagcccagaccccacgctccaaggaaggagaccacagtgagcccagatggtgcagcagctggccccatggacacaagaccaccgtcatttcccaagtagcaacgctgagggaaggaagggccaaccacctagcttgagtaagccgcaatggacttctccacgtggtttacagtaacttagctgtgttccagaact

SEQ ID NO: 147026 - DNA, 175 bp, Homo sapiens
aatgagagtgcaaaaagtaattgttaaacgctaatctcaaaatattgcatactttgtaaatccatttatatagtattctcaagtgacagggttatacagatagagagcagattagtggtagccaggtttagggatagtaaaccatggggaaaactaggtgacgggcacacaggaa

SEQ ID NO: 147027 - DNA, 300 bp, Homo sapiens
cttggcaatgagagagagtgtgggcagtgaaatgcgtggggtccctagaggagggggggagatgggagcccaggaggggctgcttagagatcaagaaatctcaccccaaaggctctgggcccccagatggtccacactcaggatgcagtggagtgactagaatagatctcagagtgggagtgggttccccagggagaccctagttcctggaggggcacagggtgcttcacctgctcatttttggacagttcagagtgactaagaccctgaggcattcaatgcagggagcgttagcgactt

SEQ ID NO: 147028 - DNA, 465 bp, Homo sapiens
ttgagacggagtctcactctgtcacccaggctggagtgcagcggtgtgatcttggctcactgcaagctccacctcccaggttcaagccattctcctgcctcagcctcccaagtagctgggactataggcgcctgccaccacgcacagctaatttttttgtatttttagtagagacaggttttcaccacgttggccaggctggtctcaaaacttctaacctcaggtgatccaaccgcctcaaagtgctgggattacaggcgtgagccaccgcacccggcccagactccttaaaatgtgagaagtagcactgaggaatgtgatcagatcatggccttgattgacacatggggtcgctttccacggttggccttcttgttctccacggcatcttgtgcatagccatttgccatttcaggagctcagcatgcacatccggtatttctgtgcttggttgtctttctggaa

SEQ ID NO: 147029 - DNA, 414 bp, Homo sapiens
taaagataaaatcaaattttttttgcaaaggaattacaatatgtaaaaatagtctgttcaaatgaatctggaaatattttctatccccaattgacatactgttctctgataaatttgtgaggcccagtaggtaatcctgtataatattcattttaattcatatgaaagccatacacctctaaccttaaaaattagtaaacttaaggtagtcacatttcttaggaattattcatatctgaattttgtacattaaggaagtttattcatatagacacttaaaaatattaagcaattctgatttaatggtttccagagtatgatcttccctacctttatgaaaccacacattatttaataatttttctcttgatgaatgaagtctctgtaattaatatcaaatactattacatgttt

SEQ ID NO: 147030 - DNA, 457 bp, Homo sapiens
tctattctctattttctatgattgtctctagaaactttgatgatggtttctagaattttccttaataaaacaggaaaaaacatatcactcattatggccagccccatgaaataggatattttagtctttaaaattatctcagttagtgataggatgttactgaaatgcccatcagtagaaacaagcacttttaaacacaatgataatgaaaataaagtaccatttgagtatctactatataagccactttacaaatacctcactaactcataactctacaagactgatactattgtcctcattttatagctcagcacactgagactcagagaagttgattttagcttgtccaagatcccacaattggtaagtggtacagaaaaatttaaatgcaagtttggctccaaatcctgtacttttctgtatagatttgtgttatatctcccaaagttcctca

SEQ ID NO: 147031 - DNA, 484 bp, Homo sapiens
cctggagctctaatcaagatgactcttcttccccatggggaccatgggcccctatgcaccctccatttccctgtatttcccacagagcccatcatggtcctgagcacttctcagtaatacctgtatgttttaaagggtttatgttgcataaagccctttcatcacacattgcatttcaaccttatagtatttctgtaagggacacatcagcatgtcattattccaacttcaaagatgagagaccgaggtgctcaaggtgatactgctgggtcgatgtgaagagggaactagaatcaaatctgttgcccccatccaagagtttccctgccagcacaccagcttatggaacttaggcaaggatggagtgaatcctcccacttgctccctccaacacaaccaaggcagcctctgttcaggaagcgcttcccagggtggggagcggctgatcctcatgacctctgagctgaggagggaatagcaggaa

SEQ ID NO: 147032 - DNA, 368 bp, Homo sapiens
gcgataaacacacacttattgaaattcttttcgccaggcgcgtggctcacacctgtaatcccagccattgggcccagccagtttatcttcctaaatgtgtgcttctatctctgctacttagtttatcagccttaaatgaagtcttttgaccctgtgtataaaagctgaggcactccctctccatttcctgtttcctgtcccgaattttgattatgtgtatgttgtcgtggtttgtaaacacttacattttattatgtagccacggttcacaggtgttttcatcttagctctctggttaaaatggcttaactgctcagtgccagttgttttgctatacagtaagtcctcagttagtgttgccagtagat

SEQ ID NO: 147033 - DNA, 286 bp, Homo sapiens
cacagcactgagcgccaagggaaggtggcccaagggcagtcttaagacacaatgtcaaacgttatgaatgggtaatttctaacaagctgaagaactgcaacctgctacattgtaaacgaagttctggagagaactgaattttctagaaaaattcttattgggaggaaaataacctaaaacaactttttataacatggatttgtttgattttaccttaaaagaattttactgatgccttgtgtttcaaaaccactcaacatttggatattgttagcaaccctcctga

SEQ ID NO: 147034 - DNA, 240 bp, Homo sapiens
aacacctcaccatgcctctgggaacctcatcgtatcagggctgcccgacagcagcagagcaagcaggggcagagggcggcatgagtttcagctgctctgcaccttggccagcacttgatgctatcagtttcattactttagcctttcgagcaggggtggtaccccacgtggatttagtttgtttccctaatggccaatactgagcatcgtttcagctgcctgactgtcatcctatatctt

SEQ ID NO: 147035 - DNA, 150 bp, Homo sapiens
tttgtggacataccattttggcagactacaaagtatgaggcaggcaagctgagcatcgatagtggagaaaatacccaacctggtgcccctagactagacacggtctgagagtgagtctctagtcaaactttagtatttgtaatagcctaa

SEQ ID NO: 147036 - DNA, 347 bp, Homo sapiens
tagagaatacttatttgtcatgtgtgaacaaaagaaaacacaaaatcaagggaaaaaatggggaaaaaactagagaaatagccaagttaaagttctactgacactagggattattctgggatctaagaaacaatatgcctaggtttaagtaacccacaaaatccacttttccagcaaggcagtttacctggctttgtcatcaggcatctcagtggatgaccacctaaaactattagggataatttttataggtaaaattatggctatcatacaaatataaaattaacatatgccaactttgtaactcattgattaatgagggaaccaataagatgttacatagacca

SEQ ID NO: 147037 - DNA, 733 bp, Homo sapiens
  misc_feature (21)..(21): n is a, c, g, or t
cagcggtcctctgggatgctngtgtctatggagtagccattcttattcctttactttcttaataaacttgcttttgccttgatctgagaacctctccctgaattctttcttgtgtaagatccaagaaccctcttttggggtctggatcgggaacctttcctgtaactctttgacataattttgctgagttcataaacacagattctgctacattcttacagtatcatgccccaggaggccaaaatcctagattactgttttcagaagtgtttacttcaaactcgttatcttgagtggagttgagccctgtctgtgattggccatgtttcataacatgcatgggaaaactgcaactgatagtcacagctctgttttcttgaggccttcttactggtttcttacttctattgttttcacagttcattagtgatgacaaagagctgcaacgtaactgtatttaccattagctcatttgttgcctgctgacagtatgtggcatatctttattcctcatcataggtagcatcatcattacaaagctgggcttcatcagggacttacagagagatttgtacacccacattcgtggcagcggcattcacaatggccaaaaggtgggaacaacccaagtgttcatcgacagatgaatcagtacacaaaatgtggcatacatgaaatgaaattttattcagccttcaaaaggaatgacattctgacacttgcatcacatgaa

SEQ ID NO: 147038 - DNA, 475 bp, Homo sapiens
aagaatgcttgcaaacttgcttcctcatatacccatacacatatgcagaaacagatgtgcacgtgtgtgtacatatatgcattcatattgtgtatgaattctatgcatcacacagctgaaagcacaagatggtagatacccttctgcttttgtctcttaacagtgtaatttggaggtcattcctaccatatttatggggtcacctcattctttttttgctgactgcataggctatcattgtaatcgtgtttaactggctgttcccagtaggcatttgggttgtttctagtcgttctgataaatagggctgcattgaaaatccctgcagtaggtacatgggggatatttcctagaagtgtgattatttggtcagtgcatgtgtgtgttaaattttgagatctggccaaattactctccataaaggctacctcagagtgtctgtttctctgctctcttttgaacctagaatgtcatc

SEQ ID NO: 147039 - DNA, 635 bp, Homo sapiens
ccaggtttccccacctggctcatgttctgcaggagctactgtgtccttggagctgaggtgctgacatcgggccttggttaaatgtgtttctctgaggggtccctttaaaggaatgcccttaatccccctcaggaagtacagaggaggttgggatcacattaagttgcctcttagtttctgttttacaacttggacaaacgtctccctttgatcttggcattaaagaagcacgtcagagaatgttggagaaggctgagttttgatctctgggcactggcaaaaaggtgggaaggacccaggatgagaagagccatctggccacggatgaataataggagccactaccaccttcaagcctgctttgatccctgaaccatttgctgacactagagtttcccaaatggggcatggatggggacacccaggacttctcagttccatctcattccttttcattgcttccttctctcccttcctaacatggtttctcacctatgcctgatgctttaaaccaacagacctcccagggtttgaaatcctcttatgcttggtctgagaatctgggctagactcccagctctgacactgtgattacttttgtgactttggactgattggttatgtgattttgggaa

SEQ ID NO: 147040 - DNA, 854 bp, Homo sapiens
  misc_feature (29)..(29): n is a, c, g, or t
  misc_feature (37)..(37): n is a, c, g, or t
tgtaatcatagccctttggaaggccaagncaaatagnttgcttgagcccaggagtttgagaccagcctggcaaatatgccaaaaccccacctctacccaaaaaaatatttaaaaattagccgggtgtggtggtgcacgcctgtagtcccagctactcaggaggctgaggtgggatgatcacctgaggctggggaggtcgaggctgcagtgagccatgactgtaccacttcaagactccagcctgagtaaagacccatcccaaaaaagaaaaagaaaaaattttaacatagaatgaccatatgagccagcaattccactctcagttatatacttaaatgaaaacaggaacccaaacagctagttgtacatcaacataaacattattaacaataggcacaaggtggaaacaacctaaatatccatcaacagatgactggataaacaaaatgtatatacatacataaaaagcaatgatattcaatggtacgctgtcatgaaaaaaaggaatgacatttttgatacgtgaatgaaccttgaaaatatactacgtgcaataaatcagacacaaacggacaaatattgtatgattctgctttatgaaatatgtagaataggtagattcatagggacagaaagtagattagaggttaccagcaatttggagggagaggaaagaatgggagttattggttagtgggtacagagtttctgtttggggtgatgaaagggttttagaaatagacagtgatgatggttacataacattgtaaaagtaactagtgccacttgaaaatggttaaaatgacaaattatatatatatatttttttaccacaagaaaaagtctctgaattt

SEQ ID NO: 147041 - DNA, 490 bp, Homo sapiens
ggagtgtcaccagtgacatctcactctcctcgacttccacagcaggatcatccaggtctcctgaatctgaaaagccaggcctgagctgcagcagcttcccggtggcatgccgcctcctgccctctcaccatcccccctattccccaccccccgcacggtggtagaggcgctgcaggctggggagtagcgctagggcacgttggcggtggccgtcaagctctacatcctgcacaagtacccaacggtggacgtcctccgcttcaggtatctgctgaagcaggcgctggccactggcatgtgccgcagcctcctcgccaggcccctcaactccgaagcaaggggggccactggcagcttcaaattagatcccaagcacaagaggaaaatccagcccagggagatggccccctgatggtccccaggagagcggaaaaggccaaggggaaggacgccaagaaaccaagtgaggccaaggaggatcctcctaacg

SEQ ID NO: 147042 - DNA, 419 bp, Homo sapiens
acgaagccccgaagatttgaatgaaatggcttcaaatattactagtcatgaacatgccaagaaaaatcaactgccataatcagaagtataattcatgaccactcatgtgattcatgttgggaaaatataaaatatccatttaatggctcatgaccacctcacaaaatgactcagagaagaagttaagaacagagggtgaccttacaagaagcagaggccaaacatttgaggagaggtagaatgtgtgtcagaattgtgagaagtagaaacctgaactctgcagagaagtagcagtgatcaaaggcagtgctgagtccacttgagtttagtggtgaatacagaaaaggtagatttctctgccctcattgtttttgttctcaagactctcttggaagctcagttgtgaacattggaaatct

SEQ ID NO: 147043 - DNA, 336 bp, Homo sapiens
gattgcagtgagctgagatcgtgccactgcactccagcctgggcaacagagcaagactccatctcaaaaaagaaaaagaaaatgggcaagtgactcagcctctgagcctccgccttcttgtctgttaatagtaacttccacactggacttttatgaaggttcaacgagataaagtttgaacatggattataaactgacttactccacaaacaagtaaacagttcttggcattaacaatattcatttgtccaatttatattaatcccccaagcctctgggccactcacctcttttcaggaagtgctccctggcatcagctcactgttctctgtgcaa

SEQ ID NO: 147044 - DNA, 203 bp, Homo sapiens
cattaaacaggatctatttagagaagggttgtttatatccattatttttccatcaacaacctaatttggcctatttttaaacttgggaaaaatgaatggtgcctcacagtggattaccacaaccataatgtcatggtcatgcctactaaggctccatacccaatattactgaaattattgacttatccaattggcagctggta

SEQ ID NO: 147045 - DNA, 364 bp, Homo sapiens
ggtagcccaggctggagtgctgtggcgcgacacagtttaccgtagcctcaacctcctgggcaagtgatcttcctgtctcagcctctcgagtagctgggaccacaggcgtgtgctaccatgcttggctgatttttaaaatttttgtagagaatggggtcttgccatgttacccaggctggtctcgaactcctgggctcaggtgatcctcctgccttggtctctcaaaatgttgtgattataggcatgagccccagcattttttcttaaaaacttctaggtttttctttaaactaaagctttatatgtccatattttggagtcaactattctagattgggtaagacaaacaggagtccttaagtat

SEQ ID NO: 147046 - DNA, 296 bp, Homo sapiens
agtggggacccatgatggagcagatggttgggggagagcatatgatgctcctgggaacagcatgcagtttccaagtactagggtgataactctgaagggacataaaccaataaccctccacctctccacctacactagagtaaggagagaggctaattctagcagtagtcatgctaagtggtattcttttttttttttttgagacaaagtctcactctctcgaccaggctggagtgcagtggcacgatctcagctcactgcaacctccacctcccaggttcaagtgattctcctgc

SEQ ID NO: 147047 - DNA, 486 bp, Homo sapiens
gagaagaaggaagggtaaaaataatttagtaaaatcaacacttatttgcaggcacttaacaatgctagacgctgttataatcactataaatattaaatctttatttagtcctatttgtacccctagaggcacttactgttattatccccattttatagataagaaaattatggcactgagaggttaagaaacttgtccaagcttgtaagtggtggaagcagaatttgaaccaagcagtcttactctagaaagagccttagccactgtgccatctttcttgttatgtgcatgtgtgtgcatatacatatacatctatgtgaacatattcaccaatgcattagctgagctagaccataaatatatgtatcagcggatacatgaatatgcacaatattttaaaccctcagaaaaaggacaatgtaattaatgaagaaaaacatgaaggatatgagaatggggaacatagataaaaataacaaccttatt

SEQ ID NO: 147048 - DNA, 351 bp, Homo sapiens
atggaatacattaggaatgctgagggcacatggaaaacagtgacccattctacctagtggggttttaaaataattatttttaatgtttaatgctttagggaagaaagcagggagatgaaacatgaaagatgaacaggaaatggtaggagatttttatgaaggtagaagagacagggctttgggaatggaaaagcccaggttaactcccagatttctggcttaggcaactgagtggcaccactgtcagagcctagaaatacaggcttgaaaggagagatgctaagtgtagctttgttggctctttgataaatatgcgacctgcacgtggagctatccaggaataacaagtca

SEQ ID NO: 147049 - DNA, 399 bp, Homo sapiens
tactcttctgacttaccaacagcctcgtgtgttgttatttcaaaatcataaatatggctgtaatcagtatgtttaaggtgctcctttacacaggatttttaaattttttctttagtttgatagcttaaaccttgctgtttaggatattttggttttccaagaatgatttattcaggtcctgattttaaacctttgattttaggatattagcgtgcatccaaaggaccttaccttcttagtacttaaatttgtgattacccgttctggtttttagataccctaaagcacagtttttaatcttgtttgtgtgtgccacaggcccctttgagaatgtgatcattgttattgaccataggcacaaaatacacacaaatacttaacatacacaattttgcataa

SEQ ID NO: 147050 - DNA, 456 bp, Homo sapiens
cctgggaatggggcacagttgaggaccagcgtggaggtcagtgtggggggaattaggggaaagcgacatgaaaggggaatgaagtctgaggtgggcaggggccggctccatgaggctcatgggccccaggaggggttcacaatgaaagccatggagataggagggtgccggggtctgttgggggagagcatccgcaatttctaaaaacaaaggtccagggttttcatgagacttcctgcatgggtcaaaccacttaccctggaagcccctagaaggcccctctggctacttttgggatatgagcaggctgctgaactcctagtgacaatacttccctacccaccatgacccacaagctcactgagctgagcacagcccccacacacacacccactcacagagctccccccagcagcctcattgcctccctcaggaaaccttccaggcaccacatgg

SEQ ID NO: 147051 - DNA, 385 bp, Homo sapiens
cgcagctcactgcaacctctgcctcccaggttcaagtgattctcctgcctcagcctcccaagtagctggtattacaggcacccaccaccacgcctggctaatttttgtattttagtagagatggggtttcaccatgttggtcaggctggtctggaactcttgacctcaagtgatccaccctccttggcctcccaaaatgctgggattacaggcgtgagccactgcacccaggctgtttgtttcttaatgactagaatcagggtaaacgttttcttagacattgtttttcaacacaaaagataaaattgtgagtgcaccactgtgcatcttgctttatctactgaacaatgcctctttgagaaccttccctatcagtacacaaaga

SEQ ID NO: 147052 - DNA, 783 bp, Homo sapiens
  misc_feature (617)..(617): n is a, c, g, or t
  misc_feature (631)..(632): n is a, c, g, or t
  misc_feature (637)..(638): n is a, c, g, or t
ttgacaaagttccattatggttgttagaaaatctgcttagtctgtagtcactactatgaattttattaaaagtcactagaactccacagtcttcctttaaaaagactagctctaaagagaagtaaaagatgagtaacagtttgtgttattgaatgctgattatgtgccaggtactatgcttgaaacctcacacatttcttactatttatttatttattttgccagtacaacagaatagattttatttctcttagagacagggtctcactctgttgctcaggctggagtacagtggctattcacaggcacaatcccactactgatctgcatgagagttttgaccttctttgtttctgacctagacaggttcactcctccttaggcaacctgggggttccctgctcccaggaggtcaccatattgatgccaaactcagtgtggacacccgactggcatagcgtactacagccctaactcctgggctaaagcgatcctcccaccccagcctcccaagtagctgggactataggcacgtgccaccatgcctggctaatttttgtatttttagtagagacagggtttcgccatgttggccagtctcgtcttgaactcctganctcaggtgatcctnnctcannctccctaagtgctgggattacaggcgtgagcccccatgcctggcctgtttccccaactataaaatgacctgcaatagtacctaccacaggggtatacttcagtttgatctgctaaccgacaggaccattgcggatcctctagatc

SEQ ID NO: 147053 - DNA, 245 bp, Homo sapiens
cttccagaatgggcccttatttcgcaagagtccgtttcatcccaaaataaatacatgccagtttttcactatctcagcaaatttagcatctctttacaaaccaatgtgctaccagcggcctcaaagtgcctgtgtcatgtccctgcttagtggatttgcagcagctgtgaaatgtcaagtcaaaatgccatggaagatctatacaacgcctcagcagaagaaagggcaagaaatggtaaaatgct

SEQ ID NO: 147054 - DNA, 515 bp, Homo sapiens
tcctcatgccattcggttctctgctcaaatgtcccttagtcaagttctcaggaacctcttatccaacaaaatatatctcctgccatcctcaccaccaccaatcttctaacccgagtatattttctccataacaattatcactgatattagaataaatttgaaagttgttgtctgtaccactaaaacatattatttgaggccaggaccttgtccagccaccacttgtatccctagcatctagaacataccagtacagaggaggggcttaacaaataagaggtgaatgatgggtgaatataattggtatgctgcttttgataagcaattttataacatgtgtgtccgaggcgggtggatcacctgaggtcaggagttcgagaccagcctgaccaacatggtaaaaccccgtcttttctaaaaataaaaaaattagccaggtgtggtggtgcacgccagtaatcctagctactcgggaggctgagacacaagaatgacttgaccctgggaggtggagg

SEQ ID NO: 147055 - DNA, 770 bp, Homo sapiens
atatatgaagaaaagatacagtcattttcagacaaacaaatgctgacagaattcgccattaccaaaccagcactacaagaactgctaaaaggagctataaatcttgaaacaaatcctggaaacacatcaaaacagaacctcattaaagcataactcacacaggacctataaaacaaaaatacaagttaaaaaccaaaaacgaagtacacaggcaacaaagagcatgataaaagcaatggtacctcacacgttcatactaacattgaatgtaaatggcctaaatgctccacttaaaagatacagagctgcagcatggataagaactcaccaaccaactatttgctgccttcaggagactcacctaacacataaggactcacataaacttaaggaaagtggtggaaaaaggcatttcatgcaagtggacaccaaaagtgagcagtggtatctattctcataggagacaaaacaaactttaaagcaacagtggttaaaagtgacagagggacagtatataatggtaaaaggccttatccaacaggaaaatacgacaatcctagacatatacgcacctaacactggagatcccaaatttataaaacaattactaagaaattgagatagagagagatctaagaaatgagataggcagcaacacaataatagtggaggacttcaatactccactgacagcactagacaggtcatcaagatagaaagtcaataaagtaacagcggatttaaactataccttggaacaaacagactta

SEQ ID NO: 147056 - DNA, 339 bp, Homo sapiens
acacagggtcagtctctagtaatctcacgattgtgccatataaaagaatgagtgcagatacaaagtatggggtcctcaatctagagacctcatcatgttaaaaattcacataaattctgcctattcttacgggaatttctatgtgtgatcctaataccttttagaaaaaaaaggtcccatgaccaaactgaaaataccaggtgtttctctctagagtccttttgacctctgccaatatacatctatgttctctgcccctagtgattttaattgcacattctcttgaataaacatagtccacatagatgtcgctaatggcaactccagcaaaattgcagg

SEQ ID NO: 147057 - DNA, 811 bp, Homo sapiens
cattttcagacacctgcgggtcacgtgggtggatgggaagctgggcacctggtgaggggtgaggatgttgagagccagagctgcgttttgtctctgttgatgtggcgaggccctgggttggtcactgggatttttttttttttttgagacggtgtctcgctctgtcgcccaggctggagtgcagtggcatgatctcggctcactgcaacatctgcctcccgggttcaagcgattctcctgcctcagtctcctgagtagctgggattacaggcgtcaccacacctggctaatttttgtatttttagtagagacagggtttcaccatgttggtcaggctggtcttgaactgatctcaggtgatccgcccgtctcggcctcccaaagtgctgggattacaggcgtgagccaccgcgcccggccggtcgttgggattttaacagccctgaggcccctcacgctgccaggtgccagcccaccctgcagccctgctcccctgcccacacgcagaagccaccagaggcttctggactgagcccccactgtcctgcagccgggctggcctgtccacaccacagggcgtgctcagctactgagcagaagcgtcacggacagggcagatcaggccaggacaaagctcttccgccacaggcgggggtctgaaggcatctcagagggcccccaaacaagggacgctgcctggaaaccccgggacaagatgacctcggttcagatcttagcaccttctggcaaccttagagaaagcttctggagggaggggctggttcccaggatgggcagaagccggaaagtc

SEQ ID NO: 147058 - DNA, 628 bp, Homo sapiens
ggagatagcagtgctgaatcatacttcactacagactccaattcctggctcaagggaatcctcccacttcagcctccagagtagctaggacacaggcaggcgccactacgcccaggcatgtaaagaagggatcttgccatgttgcccaggctggtctcaaactcctgggctccagcaacccaccgtctcggcctcccaaagtgctgggattacaggcgtgagccaccgcgcccggccggtcgttgggattttaacagccctgaggcccctcacgctgccaggtgccagcccaccctgcagccctgctcccctgcccacacgcagaagccaccagaggcttctggactgagcccccactgtcctgcagccgggctggcctgtccacaccacagggcgtgctcagctactgagcagaagcgtcacggacagggcagatcaggccaggacaaagctcttccgccacaggcgggggtctgaaggcatctcagagggcccccaaacaagggacgctgcctggaaaccccgggacaagatgacctcggttcagatcttagcaccttctggcaaccttagagaaagcttctggagggaggggctggttcccaggatgggcagaagccggaaagtc

SEQ ID NO: 147059 - DNA, 419 bp, Homo sapiens
agcaccgtgtgaggagtgctgagtcagaaaacaaatcttgtgggcctctcatcgtaaattgtgaaacgtttctggaaagcaatgcagcactgtcttcctaaattaaaaacgtacccaccttttgacttgacaattacttatctaggactttattttgtagagacacacaacagtgtatgtacatcattgcagcattaattttagctgcaaaatagctgcacactacttaaatgtcatttaaataaattacaatacagtcatgctagggaatattatgcagctgaatgtggcagtttcgcaggtgcaatacggaaagatgtcaccaacacactgttaagcagacagcagtgtgcactgcagctcccgtttgtgggtgcccatgtgaagagcacaatgaatttacccccccgcccctccac

SEQ ID NO: 147060 - DNA, 434 bp, Homo sapiens
agcttaccccttactgggattacaggcgtgagccaccacacccagcagtgttgacattttctatcaagagtactgctgagctggcgccctttggccagttactgaactgacggatgcagaaatttacacatgttcatgtatacacaaaaggaaccctaattccatggaactggccttctcaagcttgctgatttcttagttatgagtaaatttgggaggctgcagtgagagaattgcttaggcctgggaggttgaggctacagtgagccaagattgcgtcactgcagtctagccagggcaacagagcaagaccctatctcgaaaaaataaataaataaaaacaagaggacctaacataatctgagtcaggaggtgactattgggaaggttgcttggagtttgaatggcattctaactgagacctggaggatagg

SEQ ID NO: 147061 - DNA, 230 bp, Homo sapiens
cacagcccagccacccaccgctgaaatgccataaggccaggaaggggagggggcatcgttttccaccccagaacgtggcttctctgatgctcagatgtgcagccttgacgccccgcctcccagctgcacctcaccagcagggtctcttgcacccaactccctcctccacccacagcctgcagcctggcttcaggctgtgggtggcatcgataaacaccgggtaccgagct

SEQ ID NO: 147062 - DNA, 274 bp, Homo sapiens
aacagggagactgtgggtgggcagcgccccagtatcaagtgccaggagccgatgaaggccctgccctattgggtgagcccactgccgaaacctggcagccactcaggttcctccctgcccccacccccacacccgacctgctcagcctcctcctaaactacctggaattggctctgcctatttccagtccttctctagggcattattatttccagcccagaaggctgaattataaatgaaattcttgtctgcagtcctgccctcttacaaactg

SEQ ID NO: 147063 - DNA, 259 bp, Homo sapiens
ctgtgaatatatatctgtgtgtgtctgtgtgtgtatctctgaaagaggaaccaaaagcaaccctgcaaagataaaatataaaaccccgctcctgtcagggaatgccgactgattacagagagtcttaggaagttaactggaaacttagggcatgaaacagttcaacctcagcacattttttccaaggcaatgatgaaagtttggaagcatagggcaatgatggtatcatcactcagatcctcacacctgtcccaacagc

SEQ ID NO: 147064 - DNA, 216 bp, Homo sapiens
ctgaattctcagcacagtagagtttattgaatcctgggatttctgtcctcagagagtccttgggatcatctagttagaattcctttcaacttacaaatgcagaaactcacccaaaattcttgtgttttgccctagttcttgaggctggttatctgatttcaccctcagaactgtaatctaggtctttctgcaaccctatggaggggtctagtgagc

SEQ ID NO: 147065 - DNA, 458 bp, Homo sapiens
tccactagtgtaggctaataatgataaggatgaggaatgcctaggggcaataagtatttagaatccgcagaaccatgttttttgcagaaggtactctctattccttaattaagagattaggcctggcatggtgactcatgcctgtaatcccagcatttggagaggccaaggtaggtggaccacctgagttcaggagttcgagaccagccccgccaacataaaagtgagctaattcaatttagtattgtatttaatattaaaccaaaatgatttcatagattgcaatagagtaccaaatataggccgggtgcggtggttcacacctgtaatcccagcactttgggaggccaagaccaccagatggcttgagtccaggagtttgaaaccagcctgggcaacatggtggaaccccgtctctacaaaaaatacaaaaattgtccaggcttgctagtgcgctc

SEQ ID NO: 147066 - DNA, 442 bp, Homo sapiens
agtgcagttcttggggcttcagcttcctcactggagccataggcttaatcctgaagcctgaaatcaggaaggaaggtcaagctgtccatcctccacctctgagcatgacctcacccccaccacctctgctgccaggaagcctggtggggaatttagaatccatctacaccttcccttctcccccatttgtttacagagggggaaactgaatcccagagtggagaggaatttggctaaagttgcaaagcaagacagtcaatagataagtattgtacacctactgtatgtcaagagacctggtctctgctcttatggatcttctggttgtggaaagcagggagcagacattgagaccgtcctatttccatctaactcccagccatccatggaagagaatacagcctcctaccttctcattcaaggtgctctgggcttggcttga

SEQ ID NO: 147067 - DNA, 302 bp, Homo sapiens
ggtcctatctgtgtcggggttgggactggaactgtgtttgggagctcatgcattggtttttttcagggcagtgggcaaaacgaaccagtcgggctataacttgacctacagaggagagggatcacagagctctttgaggatgctggggccctctcacaaatttatttctcatagaacggttcaagtgattctcttgcctcggcctcctgagtagctgggatttacaggcgtgagccactgcgcccggccaacatacaaatttttcttatatatttaagattctgcaaccccgaacacggata

SEQ ID NO: 147068 - DNA, 716 bp, Homo sapiens
ccactgccaaaattgtacattctacaccctagagtaataaacttctctcttggtgctagaaaaacttaaatcatactgaatgttgggatgtttggggatgctatgattagacttcctttagttaccatgagcctaattaccaccgccaaactattttgcttacttgttggctgtgtccatactggtgtgggataaagtggagggaattggttacttaaaatatttgcagctcttccacaaactaccattgtggccttaaataagacactttaactctttgagttttagttggtttatatatgagacagaagagttgattggataatttccctcttctctgttgaccctcaagctcagtagttttaatcttgtaaattttgttgtgcttgtcctgctttttcttttggggaacaggctactctttgaagtggactagtagtatcttggtgttctaatgagtagatcaacctatgacatgagagccactgcatgccagggcactgttcagtcactgatgtgccttatctcatttgagacacctaaagaggtttaggagagcagacactgatgaatcttagttgacagttgacagtgtgcatagacaagtttaaataacttgctctatattacacagccaatacgatacttcctctccccctgcaccttcatgctttcccgcagtttttgtttataatgtcacaactttatattgaaca

SEQ ID NO: 147069 - DNA, 168 bp, Homo sapiens
tctacttccctccagtcactgattttttaattagattcatgattacaactctaatcttgttacttccctgctcaataaccttcagtggctcccctctgcctttaaaggaaaacaaaaacttactagactttttttttttttttttttttggagaccctgtctcactct

SEQ ID NO: 147070 - DNA, 537 bp, Homo sapiens
tatttttagtagagatggggttttaccatgtgggccaggctggtctcgaaattctgacctcaggtgatcctcttgcctcagtctgggattacaggcataagccactgtgcctggcctagatgagaattttaaccttttataatctcatcccgctctctgtttcagttctttgttaaaatggtatgcagtggttacattactatgcctgtataaatattccatttagttaagtagcctactatatttcctttgttctgaagttaaaaattcctctttatttgattaatctccatcttcctatgtactccagcaacctctcaaaatgaatttccacatagccaaaccaccagataataatcttttggtttctgttgttttcctggacacctctctgctagatactttctctgtcctgcttcaataatggactggttattaattatgcctggttgcacaattaatgccttgggaatttcctaagggtctctcctgtatgcgataccctgtttttttgcaatacctttctttgttggttta

SEQ ID NO: 147071 - DNA, 378 bp, Homo sapiens
taaaacagtcccctgagtatagattctgagaactccaaaaatggaaccttcagtgactggtagcagggatggtttcttttttgaattcaagggttctgttattgttctctgtgtcactagcttagatgtagagcctgatgctctttgaagctgatcatttcttttgagcttataaatgtttttgctctgaggtgacataaatagaaatttaattacttggaaaatcataaccaaagggagcattttatttcctactgtttggtggaagctgcatttttttttatgccttgtgctttggcatacatacatacatgtatttttggtaaaaattgcattgtaaaggaacttcagaaatttcaaatgttgatggaactgcct

SEQ ID NO: 147072 - DNA, 412 bp, Homo sapiens
ccttgccttatcttgctgtgacactgttgtgcctacctgggtctcctgcagatgcttacatttcagatggccttggcctgacattagactgcatttggaaggggcctgtttaaatgaagacccttgacggtagttaacaaaatcaccttcacactgtcttaagccaaagagggactgtcctaggggaagcttggtgactcacaggaagccaggacacactgcagggccaggccgcaggtgggacccgggctggagagtcctcagaaccagcctgccaggctttctgcaccagtgtgtactgtcgctcaagtgctgtcacttgctctgtggcttcttgtccttcctttgtctttttctactcactggctcctctgctgcttcaaacccattcccctcacccatagctgtctca

SEQ ID NO: 147073 - DNA, 423 bp, Homo sapiens
atctatttactgttcccagcccctatcactttgttcttataaacatattcattccacatgcatcactgacaggcactgctaggaaaggaaactaacccatcttggccacctttacacatcaggtacttatactaaggtgatttctatatattacagtattgaatcaccacaacaatccagtgacgtaggtatcattacatattattatccccaattaagacattagggaaatgaaacgtaggaagattcagagaaagcacaggaaggtgaatatgcccaagatttcacattaagtaaatggaatgcaggattcaaatttacccctgtctgaatctaaatctcattctctttccatggcatcattctctctcctctctaggcctttatagaggaaatataggcccaaataaaatatcaaaatct

SEQ ID NO: 147074 - DNA, 177 bp, Homo sapiens
acagatgaccactgttcaagctgaaaggaacctgagggttgatccccttcgacttcttattttacagaaggagtaagccagggtaggcacctgtcacatagtctggtggtggtagaagtacatctaacatctgggtctccttcctttcctaactttaaattaagaactatatccatc

SEQ ID NO: 147075 - DNA, 257 bp, Homo sapiens
tgctggagttgcaggcagaaggagccaccacacccggccaaagcctggctcccttctgaggctgcgtgacatcccatcgtgtgcacagggcacgctgggctgacccacttgtcctcctatggatgctctagctgccccccactcctggctctgtgaatcgtgctgtggtgaacctggatgtacgcgtttcaggctggaagttttctgagatatgtccctaactcacttccccaaagggtgtctccactgacccactc

SEQ ID NO: 147076 - DNA, 175 bp, Homo sapiens
ttgaaaaattctttggcagtcatgtttacttgaattgatgccaggataggaccatggttcacaagcctgacttctcagaactgacagtaaatcttcagaaagacaaaaacaaagtacaatactcaaggctgtctttcccccagtccccaataagaattgccagggcccagacctg

SEQ ID NO: 147077 - DNA, 636 bp, Homo sapiens
agttccccagcctacccctctgcagaacaccaacactcccctggccctgatccaggttcccacctctggcctggactcctcccagcagcctcctcctcacacttgtccccttcatctcctcccggcacgtgccagcgaaacgacctactttaaatgtaaatctgattgtgtcctgccccactgagagttcttcagtgtctcccagcaatgataccatatttcctaagttggtgtgaccctacacctaggcgtcaatggacatcaaccactggggttggacatcagaaggcccagcaggaacacggcatattgttctggaaaccaaatttccttcacagcaagtacttgaagatctctgtttagactattctacacatatcacatgaagataaatgacaacacaggaatcattctcatgtactagtggaaggccagtaaagggtacatatacccaatctaccctatctcctcacacacatgtgcgcacacaggcacacgtgcacacacaggcacacacaactcccctctgcagtgtggcaagtgaccctggagggcagttgcctttaggttcaggcatgagtctcagcctggcacacagagcctgtctacccttacctgccaatccctgcctggaac

SEQ ID NO: 147078 - DNA, 429 bp, Homo sapiens
gctgcaatatttgcaggaccataaacaatagtttcaaagtaggaatatcaatagtgttctagtaacgataaaagagttgaatgcaatttaagatcctgcggcagttttagaaatagattttaaagaaatgatgatttctatgtttaagaagatgagttggaaacttgaaaagagaattctagaactgaaaaatgcaaaaagtgaaattaaggactccatcatttaacagattagacacagctagagtgaatttgtgagtaggaaggtgggccagaaggacatttccagaatgatctcaaaagtcaagggcaggaagttggagaaacagaaggcaccgagacagaatgtgcaggcagacacaggaaaggagacactgaacgggtcaaaagcacgtctgaaaggaccctggccaagaactaccccaaatgg

SEQ ID NO: 147079 - DNA, 440 bp, Homo sapiens
ggatggggagatcagtgtggtgaagcagtctgggcaggcttcctggaggaatggccccagcacagaagtggttgacttggatttcatcagcatcaaggcaggagcagagagtgacagaggacagacccctatggggagaatcgggagctctgaattcctgttctgactccacctctgaatcattctgcctccgctctctgtgtgtacctctcctcttttattcaccaatggcagctgcgggatctgctgagctaacctcaaaggctgccatgaaattcaaacgagacagtgtatctaaagacattcatcgggaactaagtaccacattaatatcagggacaatcattagccgtggatcaggaaagctaatgcaaaccttatgatcataggagttttccctgctgagttcatcgatggatggcaagtgcttaggacagcgc

SEQ ID NO: 147080 - DNA, 768 bp, Homo sapiens
caatatttacatatatatgtatttaaacatcttttgccatgtagtccattttattttattaatatcttttttggtgcactttagggcagactgtatttttgtctaattgttatcattatatatagtccttttatttgtggctgttttctgttggctcccaactatgagtaattatgaaattagcttgcatctcttcttcctctctccctttctccgtttcagcatctgatttgtaaaaaaaaaaaaaaagccttttacttctaattaaaaaaattattagtagtcaacaaatttattatattttatgtgcattcttttcatgttgcattggacctgtattgatagaggacagagccataaattactatactctttcccttacaactgccataaaagcttcatttaggaaaagttctctgtagcattgattttaccatatgtcttatatccttttcatactaaaagattctttaatagtttattgggcatatggtgctataaatatacattcatgtaacactacttcctggaacctcctaaaaatgaacaaaactaaccaaaaatagagaagaaaacagctaaaattcatatcacattttatgaaatttccagtgaagtgtggatccatttgcaggaggatacagagatgtggcatccccgcccatctctggctggttgcaggtgtctaagcataggtttctgaaggtactactcacagtcgttacagcagagctaggagctgatggatgaatagaccattgccaaaga

SEQ ID NO: 147081 - DNA, 820 bp, Homo sapiens
gtgggactcgtcaccagtcttcgcaagtaactggaaccagctggaaagtcatcagggcccagggcattgagcacctctggccattgctctagggccatgtgacctcccatctcagaactttctctgcttcctggtggatgtgttgaagaatggcctcttggccctacagctgttcagctccaaccccacagccagctgtgctgagtccttacccatgcttcggacccctgtgatataactcacatcccatacgattcccctccctcctggagcactggatatgggcttctcgctgccctgtctgaggcctacatctcatcctgtgccttcagcctggaggtcgtgccctcctccacggctcagattcccctgacactgatctctctgtgcccatctccttccttccccttccttcttcggtttgttttctttctttttaaccagcctgattccataaatgcccgcatcctcccagctgttttaacaggaaagctgcttgactccaggtccaagagaacagctccttgctgctgcttccggcttgttcacctctctccctcactcccggccagtgtcatcttcctatggaccgttccagcagccaagctctcccagcacctgctctgccccctccaattaatttgccatgctgctgttggagatatttccttcaaacatatttctaatcccatcgctttcatttctaaagcctccggtacttttcctttgcctgtaggagtccgcacttcccgcacgccctccttgcccccgtctcctccctccccagcctcacatgccactcaatacctagatctctaac

SEQ ID NO: 147082 - DNA, 234 bp, Homo sapiens
caaaaaaaaagacccaattctacctaggtgagaccttatagtgtccagcacaatgctcagtacacatatggcaatgccaaattctctgaggccttgtgatgatgctgctattggagagtgggaattcttctaaagtgtgttttcctggatccccagaggaatgcaatcactgccttcctcaaagaccctcattatgagaggtagcccttggcctgtggcttcctggcttgacag

SEQ ID NO: 147083 - DNA, 457 bp, Homo sapiens
gcttcctctagtagaattaaaactcaaaaggtgaaataggaaatgggcaaatgaaaactagaatttagcatctaaaaggaagaaaatcagctctcttagagaggaagacaatcagctctcttagacacccagccggcagagtaggagaggacagtctcaaaggctcctctggaccagtcaaaacagaacaccaacaaacaattgcttagcctggagatacagttttgcagttgtgttgaatacagtgtgtggtaccttagaaattcaaaggattttaaagtaatgactgaagctgtgaaaaactgagaggtacaagaatgacttctttcttctgatctcaacaactcctggctctataccacattctggaatgtagaagtaccaccctagaaaggggattctcaagaccctccaaaagttatctgatgcctgctcatctcctttggaatttggggtg

SEQ ID NO: 147084 - DNA, 382 bp, Homo sapiens
ccctccactgaggagggccgtagttctgttgagaaattgtcagagttgataagctaagggtacagtcacagattttcttgttcagtctgcttaacagaaaggctgttccaacggtagggggagagaaagggaccgtgtttcattcctagtgtaaacattggaagtccaggtattttgaagattacctcatttttcaaaggcgaaacccctcagtcttcaccccaggaaaatgggacgcctcacgcctcattttagctgggtctcctgagtagctgagactacagctaatttttatatttttttgtagagacaggatcttgctatgttgcccaggctggactagaactcctgggctcaagtaatcctcttgcttcagcctccc

SEQ ID NO: 147085 - DNA, 209 bp, Homo sapiens
cttagattctctacccttctctatttttcctgtcttagactatcctaagaggctgtccatgcatttcactgctataaattcaccaacccagatattccgttcttctcctcacttctatctcctcatgttttctaaatagctccttttcagtcatttcaactctaccgtcatgctttatcagattttagggccaggcgcggtagctcacg

SEQ ID NO: 147086 - DNA, 246 bp, Homo sapiens
agttttattaactaaagagagaattaatggcaccaagtaaagtaactcagctggaaaggttttgtttgttttctttcttggttgtgtgtggtttatttaaacatctactatttttttaaacatctactatttagattttttttaaacatctactatttcttcataaggatgctgtatatcaaaacctccaaaaagaggtcagaatagccagtctaagtaatcaggacctgttggcccagtatttag

SEQ ID NO: 147087 - DNA, 455 bp, Homo sapiens
accgccttccagcttgggattcctctgcttggtaccaccccccaaaggggccacaaagccttccctaagccaggaggtctctgccagcatcttcgtcacgccccagcgcagagcacacagtaggcactcggcatgcggggtccgtcagagcaaggccaggtcttcctcttggctctgggtgcgtagggcccaggcccggcctggccccgcccagcctccacagtccctcctgaggacttctccgtggattttttgaggaacaccaagcctggagcatgacgggcccagctctctgggagtggggatgggaagagggagagagaaacagtcctccccacttgacactctagaagcttccatctgggcagcatcaccatgtattgagcgctgcgctggacatgtcaaccctataggcgccactgtgtccatatcagagagaggaacactgaggccca

SEQ ID NO: 147088 - DNA, 399 bp, Homo sapiens
tccacctagaaccttaaaatatggcttaaggtctttacaggtgtaatcgagataaagtcatactggacttgggtgggccataagtccaatgactgatgtccttctaagaagagggaggggacacccagtaggaagacagtcatgtgaagatggaggcagaggctagagtgctgcagctgcaagtcaggaaacgccaagaaatgctggccaccatccgaagcgagaaagaggcaaggatcctccctagagccctcagggggagtgtggccctgctgccaccttgatttgggacttctgacttccagaattgtgaaagtcttaatttctattgttgtaagccacccagtttgtgataatttattacagcagccccaggaaacaaatacagtatttttatga

SEQ ID NO: 147089 - DNA, 289 bp, Homo sapiens
ctctctctctctctctctctctctctctctctggactgaggtttttaaatatttctttctctaacccatcagcacaataaaaaaaagtcactggttcaacaacagggtttaaaaaaaatgtcttcagctttaattcaaaacttcaggtttctttttcttccttttttttggaaattattttcctgagccttttgttttacggtatattgtaaacttttatgttaaagaaaaaatatacatttacaaattgtgagatttttaagagaaattttctacgatgtatactggc

SEQ ID NO: 147090 - DNA, 520 bp, Homo sapiens
cttgtgaccctgcgaagcgccctcctggcaagtcccctgcaggtgcggtgggtgccatgcaggagggtgctgagcttggatggaagcaggccctctctgcggcagatggcggctctcaggacgccatgggtctgcggtgtcccttacccactgggggggctcggcagcctgaggagctccctcttcctgatgcagagccctcactgctcactgccatggaggaggcaggagatcccgccggaccccgcttggagggctgggcctggagcatgcatgggtgcggggtcaacgcctcaggagacttggagcttgggagccccctgttctgggacacttgtggccgtccagctgctgccctgggaatccacacctggaaggtgggttagggagccatccttgggggaagctctgcttttgagtctgagaagtcgtcccaagttttgagggtccctgtgctggcttagaagtccatgtaaagcttgatgggggatgaaagtcagctgaggcctgccggtgataa

SEQ ID NO: 147091 - DNA, 1827 bp, Homo sapiens
  misc_feature (19)..(19): n is a, c, g, or t
  misc_feature (21)..(21): n is a, c, g, or t
  misc_feature (25)..(27): n is a, c, g, or t
ggcgccgaggggaggaaananacannnacgccgcagccgccgcgccgccgccgccgccgccgccgccgccgccgccgccgttgcgcagatccgggccgcggctgtggggagggcgacggagcgggtgaccttccggaggcgggagcgagcgaggaggcccgggagcgccgagcgtcgccgccgccgccgccatgaacaactcgggcgccgacgagatcgggaagctcttcgtgggcggtcttgactggagcacgacccaagagactctgcgcagctacttttcccaatatggagaagtcgtagattgtgttatcatgaaagataaaaccaccaaccagtctcgaggctttgggtttgtcaaatttaaagacccaaactgtgtggggacggtgctggccagcagaccgcacacgctagatggccgaaacatcgaccccaagccatgcacaccccgggggatgcagccggagagaacacggccgaaggaaggatggcagaaaggacccaggagcgataacagtaaatcaaataagatatttgtcggtggaattcctcacaattgtggtgagacagagctcagggaatacttcaagaagttcggagtggtcacggaggtagtcatgatctatgacgccgagaagcagaggccccgaggttttggatttattactttcgaggacgaacaatcagtggaccaggctgtcaacatgcattttcacgacatcatgggcaaaaaagtggaagttaaacgagctgagcctcgggacagcaagagccaagcgccgggacagccaggtgccagccagtgggggagccgggttgtgcccaacgctgccaatggctgggcaggccagcccccgcccacgtggcagcaaggatatggcccgcaaggaatgtgggtgccggcaggacaggcgattggtggctatggaccgccccctgcaggaagaggagcccccccgccacccccaccgttcacctcctacatcgtgtccacccctcctggaggctttccccctccccagggcttccctcagggctacggtgccccgccacagttcagttttggctacgggcctccacctccaccgccagatcagtttgcccctccgggggttcctcctccaccagccactcccggggcagcacctctggctttcccaccgcctccgtctcaggctgccccggacatgagcaagcccccgacagctcagccagacttcccctatggtcagtatgcaggttacgggcaggacttgagtggcttcggacagggcttctcagaccccagccagcagcctccttcctacgggggtccctccgtgccagggtcggggggcccccccgccggcggcagcggctttggacgagggcagaaccacaacgtgcaagggttccacccctaccgacgctagcccgcggcgccgcgacgtctgcacggcccagacccaggattccaaacttgtgaactcgtgacaatcacaaacttggcggcaaagtggcgactcaaccttgggggggggggcggggggagggcgcgaggcttttggagcggctgtgggtgtcgtctggactgaggtttttaaatatttctttctctaacccatcagcacaataaaaaaaagtcactggttcaacaacagggtttaaaaaaaatgtcttcagctttaattcaaaacttcaggtttctttttcttccttttttttggaaattattttcctgagccttttgttttacggtatattgtaaacttttatgttaaagaaaaaatatacatttacaaattgtgagatttttaagagaaattttctacgatgtatactggc

SEQ ID NO: 147092 - DNA, 2258 bp, Homo sapiens
gtgcgcaggggcggcggcgcggcggcgcggggacgcgcggtgaccgttggcgccgaggggaggaggcagccgccgcgccgccgccgccgccgccgccgccgccgccgccgccgttgcgcagatccgggccgcggctgtggggagggcgacggagcgggtgaccttccggaggcgggagcgagcgaggaggcccgggagcgccgagcgtcgccgccgccgccgccatgaacaactcgggcgccgacgagatcgggaagctcttcgtgggcggtcttgactggagcacgacccaagagactctgcgcagctacttttcccaatatggagaagtcgtagattgtgttatcatgaaagataaaaccaccaaccagtctcgaggctttgggtttgtcaaatttaaagacccaaactgtgtggggacggtgctggccagcagaccgcacacgctagatggccgaaacatcgaccccaagccatgcacaccccgggggatgcagccggagagaacacggccgaaggaaggatggcagaaaggacccaggagcgataacagtaaatcaaataagatatttgtcggtggaattcctcacaattgtggtgagacagagctcagggaatacttcaagaagttcggagtggtcacggaggtagtcatgatctatgacgccgagaagcagaggccccgaggttttggatttattactttcgaggacgaacaatcagtggaccaggctgtcaacatgcattttcacgacatcatgggcaaaaaagtggaagttaaacgagctgagcctcgggacagcaagagccaagcgccgggacagccaggtgccagccagtgggggagccgggttgtgcccaacgctgccaatggctgggcaggccagcccccgcccacgtggcagcaaggatatggcccgcaaggaatgtgggtgccggcaggacaggcgattggtggctatggaccgccccctgcaggaagaggagcccccccgccacccccaccgttcacctcctacatcgtgtccacccctcctggaggctttccccctccccagggcttccctcagggctacggtgccccgccacagttcagttttggctacgggcctccacctccaccgccagatcagtttgcccctccgggggttcctcctccaccagccactcccggggcagcacctctggctttcccaccgcctccgtctcaggctgccccggacatgagcaagcccccgacagctcagccagacttcccctatggtcagtatgcaggttacgggcaggacttgagtggcttcggacagggcttctcagaccccagccagcagcctccttcctacgggggtccctccgtgccagggtcggggggcccccccgccggcggcagcggctttggacgagggcagaaccacaacgtgcaagggttccacccctaccgacgctagcccgcggcgccgcgacgtctgcacggcccagacccaggattccaaacttgtgaactcgtgacaatcacaaacttggcggcaaagtggcgactcaaccttgggggggggggcggggggagggcgcgaggcttttggagcggctgtgggtgtcgtctggactgaggtttttaaatatttctttctctaacccatcagcacaataaaaaaaagtcactggttcaacaacagggtttaaaaaaaatgtcttcagctttaattcaaaacttcaggtttctttttcttccttttttttggaaattattttcctgagccttttgttttacggtatattgtaaacttttatgttaaagaaaaaatatacatttacaaattgtgagatttttaagagaaattttctacgatgtatactggcttattttttaatttaaaacggggtttccgtcggcactggtggagggggtgcgctgttagtcccctcgctcctggctttgggggttgggacttggtggtccagaaactctgggagcttctagaagaaatctactgagtgtatttctgttttttgtttaattccttgcttttgtcgactgacctgcttggtagtgtctgaggtgaactgtgggggttgcgcacagccagccgcgtggatcccacgcagcgctgaaccgaaccgagtaggaagcctttctccccaggcacgtggcttcagggcgtttcccattgaccagtttgaccctggtttgaataaagagaagtgcgtttggattagaaaaaaaaaaaaaaaaaaaaaaaaaaagaaaaaaaaaaaaa

SEQ ID NO: 147093 - DNA, 2093 bp, Homo sapiens
  misc_feature (64)..(64): n is a, c, g, or t
gggcacgggtgacctcccggctccacctgaggaccccagagaaacctgagacttctaagcctcnacgggagcgccgagcgtcgccgccgccgccgccatgaacaactcgggcgccgacgagatcgggaagctcttcgtgggcggtcttgactggagcacgacccaagagactctgcgcagctacttttcccaatatggagaagtcgtagattgtgttatcatgaaagataaaaccaccaaccagtctcgaggctttgggtttgtcaaatttaaagacccaaactgtgtggggacggtgctggccagcagaccgcacacgctagatggccgaaacatcgaccccaagccatgcacaccccgggggatgcagccggagagaacacggccgaaggaaggatggcagaaaggacccaggagcgataacagtaaatcaaataagatatttgtcggtggaattcctcacaattgtggtgagacagagctcagggaatacttcaagaagttcggagtggtcacggaggtagtcatgatctatgacgccgagaagcagaggccccgaggttttggatttattactttcgaggacgaacaatcagtggaccaggctgtcaacatgcattttcacgacatcatgggcaaaaaagtggaagttaaacgagctgagcctcgggacagcaagagccaagcgccgggacagccaggtgccagccagtgggggagccgggttgtgcccaacgctgccaatggctgggcaggccagcccccgcccacgtggcagcaaggatatggcccgcaaggaatgtgggtgccggcaggacaggcgattggtggctatggaccgccccctgcaggaagaggagcccccccgccacccccaccgttcacctcctacatcgtgtccacccctcctggaggctttccccctccccagggcttccctcagggctacggtgccccgccacagttcagttttggctacgggcctccacctccaccgccagatcagtttgcccctccgggggttcctcctccaccagccactcccggggcagcacctctggctttcccaccgcctccgtctcaggctgccccggacatgagcaagcccccgacagctcagccagacttcccctatggtcagtatgcaggttacgggcaggacttgagtggcttcggacagggcttctcagaccccagccagcagcctccttcctacgggggtccctccgtgccagggtcggggggcccccccgccggcggcagcggctttggacgagggcagaaccacaacgtgcaagggttccacccctaccgacgctagcccgcggcgccgcgacgtctgcacggcccagacccaggattccaaacttgtgaactcgtgacaatcacaaacttggcggcaaagtggcgactcaaccttgggggggggggcggggggagggcgcgaggcttttggagcggctgtgggtgtcgtctggactgaggtttttaaatatttctttctctaacccatcagcacaataaaaaaaagtcactggttcaacaacagggtttaaaaaaaatgtcttcagctttaattcaaaacttcaggtttctttttcttccttttttttggaaattattttcctgagccttttgttttacggtatattgtaaacttttatgttaaagaaaaaatatacatttacaaattgtgagatttttaagagaaattttctacgatgtatactggcttattttttaatttaaaacggggtttccgtcggcactggtggagggggtgcgctgttagtcccctcgctcctggctttgggggttgggacttggtggtccagaaactctgggagcttctagaagaaatctactgagtgtatttctgttttttgtttaattccttgcttttgtcgactgacctgcttggtagtgtctgaggtgaactgtgggggttgcgcacagccagccgcgtggatcccacgcagcgctgaaccgaaccgagtaggaagcctttctccccaggcacgtggcttcagggcgtttcccattgaccagtttgaccctggtttgaataaagagaagtgcgtttggattagaaa

SEQ ID NO: 147094 - DNA, 1681 bp, Homo sapiens
gtgcgcaggggcggcggcgcggcggcgcggggacgcgcggtgaccgttggcgccgaggggaggaggcagccgccgcgccgccgccgccgccgccgccgccgccgccgccgccgttgcgcagatccgggccgcggctgtggggagggcgacggagcgggtgaccttccggaggcgggagcgagcgaggaggcccgggagcgccgagcgtcgccgccgccgccgccatgaacaactcgggcgccgacgagatcgggaagctcttcgtgggcggtcttgactggagcacgacccaagagactctgcgcagctacttttcccaatatggagaagtcgtagattgtgttatcatgaaagataaaaccaccaaccagtctcgaggctttgggtttgtcaaatttaaagacccaaactgtgtggggacggtgctggccagcagaccgcacacgctagatggccgaaacatcgaccccaagccatgcacaccccgggggatgcagccggagagaacacggccgaaggaaggatggcagaaaggacccaggagcgataacagtaaatcaaataagatatttgtcggtggaattcctcacaattgtggtgagacagagctcagggaatacttcaagaagttcggagtggtcacggaggtagtcatgatctatgacgccgagaagcagaggccccgaggttttggatttattactttcgaggacgaacaatcagtggaccaggctgtcaacatgcattttcacgacatcatgggcaaaaaagtggaagttaaacgagctgagcctcgggacagcaagagccaagcgccgggacagccaggtgccagccagtgggggagccgggttgtgcccaacgctgccaatggctgggcaggccagcccccgcccacgtggcagcaaggatatggcccgcaaggaatgtgggtgccggcaggacaggcgattggtggctatggaccgccccctgcaggaagaggagcccccccgccacccccaccgttcacctcctacatcgtgtccacccctcctggaggctttccccctccccagggcttccctcagggctacggtgccccgccacagttcagttttggctacgggcctccacctccaccgccagatcagtttgcccctccgggggttcctcctccaccagccactcccggggcagcacctctggctttcccaccgcctccgtctcaggctgccccggacatgagcaagcccccgacagctcagccagacttcccctatggtcagtatgcaggttacgggcaggacttgagtggcttcggacagggcttctcagaccccagccagcagcctccttcctacgggggtccctccgtgccagggtcggggggcccccccgccggcggcagcggctttggacgagggcagaaccacaacgtgcaagggttccacccctaccgacgctagcccgcggcgccgcgacgtctgcacggcccagacccaggattccaaacttgtgaactcgtgacaatcacaaacttggcggcaaagtggcgactcaaccttgggggggggggcggggggagggcgcgaggcttttggagcggctgtgggtgtcgtctggactgaggtttttaaatatttctttctctaacccatcagcacaataaaaaaaagtcactggttcaacaacagggttt

SEQ ID NO: 147095 - DNA, 3386 bp, Homo sapiens
gtgtcccacttggcagcagtgcaggtgagcgtggtgccgtcaccactggcctgtcccaggaactcatcgcccgccacgcatgaggtcagcgtgcggctctgtggcacggtcctctccccatggcaaggattgggatcatctttcatgtctgcagacagcatgggcgaggctgactcgccattgctgtgagctttgtatgccgtcacgtgcacaaggacgtttgcgtcagctgcttctgtggtttgaattaagacctcagcttggcttggatgggggcatttctaaggcgagcgctgtcttgatcctgaatgttttctcattgaatcgcaggaagctcttcgtgggcggtcttgactggagcacgacccaagagactctgcgcagctacttttcccaatatggagaagtcgtagattgtgttatcatgaaagataaaaccaccaaccagtctcgaggctttgggtttgtcaaatttaaagacccaaactgtgtggggacggtgctggccagcagaccgcacacgctagatggccgaaacatcgaccccaagccatgcacaccccgggggatgcagccggagagaacacggccgaaggaaggatggcagaaaggacccaggagcgataacagtaaatcaaataagatatttgtcggtggaattcctcacaattgtggtgagacagagctcagggaatacttcaagaagttcggagtggtgagtttctccccaccccggcagcactgtggggacagagccgcttctgctcaggcctgggccttcttggggctggagtggccgagccacaggtgcacgggcctttcaggctgggagctcgctgtctcgtatttccccaacgcctgcgccctccggaaaggtggaaagcccggcctttgccttcatggccatttcgtgtcccagtagggtggttgggcggtgaaccagcctgacagccttcagggcggccgcccgattccattgtgaacaccgtggggtccagtgtcagagaagggcagttacacagaaacggggttcagtgtggcctgggcgagccagccccacagagctgactttccactgggcaggtgggagaatgcccgagctccgttgagcccagtgccagagggagctgggacagccggagggggccggcggggagccctcctagtcacccaaggcaggggcgtgtggtcaccccaaggtcctgctgggactcctgccgtgccccgcaggtcacactccgagccccgccagcaggacagccctgcgtgcctgagtactgcgcacgttcatcaggtggtacctgagggtgccacgggcctgggccaggaatgagaggcctgagcggggcctggaagagcagggtctgcagaggagctgtgtgtggctgccccgccacttcgagtgagggccgagcgtgccctttgcttcccgcgtttgggtgggaagggcttctgtggggtctcctggctcccacgtcccctgctaggatgcgtggtcggcgttgttggcccttcatgtccgtcagcacacacgtgagcggggccacgggcagcccggaggcgggtatccagacgcctgccctggagctgcttctccctgcctgcgtctggccctgggagtgttggggctccagcctttctcagacagcagccccacggagcagctgttgcccgtgcacctcccccgctcagggagggcgcaccctgtgcgagagtttgggttcgtgggaacaggctgtgccctcggaagaccacctgtggtgctggccctggtgtccgtgctgacgccaccctctccttccaggtcacggaggtagtcatgatctatgacgccgagaagcagaggccccgaggttttggatttattactttcgaggacgaacaatcagtggaccaggctgtcaacatgcattttcacgacatcatgggcaaaaaagtggaagttaaacgagctgagcctcgggacagcaagagccaagcgccgggacagccaggtgccagccagtgggggagccgggttgtgcccaacgctgccaatggctgggcaggccagcccccgcccacgtggcagcaaggatatggcccgcaaggaatgtgggtgccggcaggacaggcgattggtggctatggaccgccccctgcaggaagaggagcccccccgccacccccaccgttcacctcctacatcgtgtccacccctcctggaggctttccccctccccagggcttccctcagggctacggtgccccgccacagttcagttttggctacgggcctccacctccaccgccagatcagtttgcccctccgggggttcctcctccaccagccactcccggggcagcacctctggctttcccaccgcctccgtctcaggctgccccggacatgagcaagcccccgacagctcagccagacttcccctatggtcagtatgcaggttacgggcaggacttgagtggcttcggacagggcttctcagaccccagccagcagcctccttcctacgggggtccctccgtgccagggtcggggggcccccccgccggcggcagcggctttggacgagggcagaaccacaacgtgcaagggttccacccctaccgacgctagcccgcggcgccgcgacgtctgcacggcccagacccaggattccaaacttgtgaactcgtgacaatcacaaacttggcggcaaagtggcgactcaaccttgggggggggggcggggggagggcgcgaggcttttggagcggctgtgggtgtcgtctggactgaggtttttaaatatttctttctctaacccatcagcacaataaaaaaaagtcactggttcaacaacagggtttaaaaaaaatgtcttcagctttaattcaaaacttcaggtttctttttcttccttttttttggaaattattttcctgagccttttgttttacggtatattgtaaacttttatgttaaagaaaaaatatacatttacaaattgtgagatttttaagagaaattttctacgatgtatactggcttattttttaatttaaaacggggtttccgtcggcactggtggagggggtgcgctgttagtcccctcgctcctggctttgggggttgggacttggtggtccagaaactctgggagcttctagaagaaatctactgagtgtatttctgttttttgtttaattccttgcttttgtcgactgacctgcttggtagtgtctgaggtgaactgtgggggttgcgcacagccagccgcgtggatcccacgcagcgctgaaccgaaccgagtaggaagcctttctccccaggcacgtggcttcagggcgtttcccattgaccagtttgaccctggtttgaataaagagaagtgcgtttggattagaaa

SEQ ID NO: 147096 - DNA, 3087 bp, Homo sapiens
tcgagctcggtacctctgattacgcggctcgggaagctcttcgtgggcggcctgactggagcacgacccaagagactctgcgcagctacttttcccaatatggagaagtcgtagattgtgttatcatgaaagataaaaccaccaaccagtctcgaggctttgggtttgtcaaatttaaagacccaaactgtgtggggacggtgctggccagcagaccgcacacgctagatggccgaaacatcgaccccaagccatgcacaccccgggggatgcagccggagagaacacggccgaaggaaggatggcagaaaggacccaggagcgataacagtaaatcaaataagatatttgtcggtggaattcctcacaattgtggtgagacagagctcagggaatacttcaagaagttcggagtggtgagtttctccccaccccggcagcactgtggggacagagccgcttctgctcaggcctgggccttcttggggctggagtggccgagccacaggtgcacgggcctttcaggctgggagctcgctgtctcgtatttccccaacgcctgcgccctccggaaaggtggaaagcccggcctttgccttcatggccatttcgtgtcccagtagggtggttgggcggtgaaccagcctgacagccttcagggcggccgcccgattccattgtgaacaccgtggggtccagtgtcagagaagggcagttacacagaaacggggttcagtgtggcctgggcgagccagccccacagagctgactttccactgggcaggtgggagaatgcccgagctccgttgagcccagtgccagagggagctgggacagccggagggggccggcggggagccctcctagtcacccaaggcaggggcgtgtggtcaccccaaggtcctgctgggactcctgccgtgccccgcaggtcacactccgagccccgccagcaggacagccctgcgtgcctgagtactgcgcacgttcatcaggtggtacctgagggtgccacgggcctgggccaggaatgagaggcctgagcggggcctggaagagcagggtctgcagaggagctgtgtgtggctgccccgccacttcgagtgagggccgagcgtgccctttgcttcccgcgtttgggtgggaagggcttctgtggggtctcctggctcccacgtcccctgctaggatgcgtggtcggcgttgttggcccttcatgtccgtcagcacacacgtgagcggggccacgggcagcccggaggcgggtatccagacgcctgccctggagctgcttctccctgcctgcgtctggccctgggagtgttggggctccagcctttctcagacagcagccccacggagcagctgttgcccgtgcacctcccccgctcagggagggcgcaccctgtgcgagagtttgggttcgtgggaacaggctgtgccctcggaagaccacctgtggtgctggccctggtgtccgtgctgacgccaccctctccttccaggtcacggaggtagtcatgatctatgacgccgagaagcagaggccccgaggttttggatttattactttcgaggacgaacaatcagtggaccaggctgtcaacatgcattttcacgacatcatgggcaaaaaagtggaagttaaacgagctgagcctcgggacagcaagagccaagcgccgggacagccaggtgccagccagtgggggagccgggttgtgcccaacgctgccaatggctgggcaggccagcccccgcccacgtggcagcaaggatatggcccgcaaggaatgtgggtgccggcaggacaggcgattggtggctatggaccgccccctgcaggaagaggagcccccccgccacccccaccgttcacctcctacatcgtgtccacccctcctggaggctttccccctccccagggcttccctcagggctacggtgccccgccacagttcagttttggctacgggcctccacctccaccgccagatcagtttgcccctccgggggttcctcctccaccagccactcccggggcagcacctctggctttcccaccgcctccgtctcaggctgccccggacatgagcaagcccccgacagctcagccagacttcccctatggtcagtatgcaggttacgggcaggacttgagtggcttcggacagggcttctcagaccccagccagcagcctccttcctacgggggtccctccgtgccagggtcggggggcccccccgccggcggcagcggctttggacgagggcagaaccacaacgtgcaagggttccacccctaccgacgctagcccgcggcgccgcgacgtctgcacggcccagacccaggattccaaacttgtgaactcgtgacaatcacaaacttggcggcaaagtggcgactcaaccttgggggggggggcggggggagggcgcgaggcttttggagcggctgtgggtgtcgtctggactgaggtttttaaatatttctttctctaacccatcagcacaataaaaaaaagtcactggttcaacaacagggtttaaaaaaaatgtcttcagctttaattcaaaacttcaggtttctttttcttccttttttttggaaattattttcctgagccttttgttttacggtatattgtaaacttttatgttaaagaaaaaatatacatttacaaattgtgagatttttaagagaaattttctacgatgtatactggcttattttttaatttaaaacggggtttccgtcggcactggtggagggggtgcgctgttagtcccctcgctcctggctttgggggttgggacttggtggtccagaaactctgggagcttctagaagaaatctactgagtgtatttctgttttttgtttaattccttgcttttgtcgactgacctgcttggtagtgtctgaggtgaactgtgggggttgcgcacagccagccgcgtggatcccacgcagcgctgaaccgaaccgagtaggaagcctttctccccaggcacgtggcttcagggcgtttcccattgaccagtttgaccctggtttgaataaagagaagtgcgtttggattagaaa

SEQ ID NO: 147097 - DNA, 1705 bp, Homo sapiens
gctcggtaccccttttggggtctttgctcggttgcatctgttgtacctgagaaacattttttaaacaaaaaaattcaacacaaaagaattttttaagaaaaaaatgctactggcctaaataaggtttatagttaagtatttagtcttaagttgtaagatgctaagtgtagtcataagttacccgagggtgtgtctaaagggaagggggtgctgggacccgcagcctcgccctaaaccagagctcggtttgtttaggtggaagttaaacgagctgagcctcgggacagcaagagccaagcgccgggacagccaggtgccagccagtgggggagccgggttgtgcccaacgctgccaatggctgggcaggccagcccccgcccacgtggcagcaaggatatggcccgcaaggaatgtgggtgccggcaggacaggcgattggtggctatggaccgccccctgcaggaagaggagcccccccgccacccccaccgttcacctcctacatcgtgtccacccctcctggaggctttccccctccccagggcttccctcagggctacggtgccccgccacagttcagttttggctacgggcctccacctccaccgccagatcagtttgcccctccgggggttcctcctccaccagccactcccggggcagcacctctggctttcccaccgcctccgtctcaggctgccccggacatgagcaagcccccgacagctcagccagacttcccctatggtcagtatgcaggttacgggcaggacttgagtggcttcggacagggcttctcagaccccagccagcagcctccttcctacgggggtccctccgtgccagggtcggggggcccccccgccggcggcagcggctttggacgagggcagaaccacaacgtgcaagggttccacccctaccgacgctagcccgcggcgccgcgacgtctgcacggcccagacccaggattccaaacttgtgaactcgtgacaatcacaaacttggcggcaaagtggcgactcaaccttgggggggggggcggggggagggcgcgaggcttttggagcggctgtgggtgtcgtctggactgaggtttttaaatatttctttctctaacccatcagcacaataaaaaaaagtcactggttcaacaacagggtttaaaaaaaatgtcttcagctttaattcaaaacttcaggtttctttttcttccttttttttggaaattattttcctgagccttttgttttacggtatattgtaaacttttatgttaaagaaaaaatatacatttacaaattgtgagatttttaagagaaattttctacgatgtatactggcttattttttaatttaaaacggggtttccgtcggcactggtggagggggtgcgctgttagtcccctcgctcctggctttgggggttgggacttggtggtccagaaactctgggagcttctagaagaaatctactgagtgtatttctgttttttgtttaattccttgcttttgtcgactgacctgcttggtagtgtctgaggtgaactgtgggggttgcgcacagccagccgcgtggatcccacgcagcgctgaaccgaaccgagtaggaagcctttctccccaggcacgtggcttcagggcgtttcccattgaccagtttgaccctggtttgaataaagagaagtgcgtttggattagaaa

SEQ ID NO: 147098 - DNA, 1275 bp, Homo sapiens
cctgagccttttgttttacggtatattgtaaacttttatgttaaagaaaaaatatacatttacaaattgtgagatttttaagagaaattttctacgatgtatactggcttattttttaatttaaaacggggtttccgtcgccacagttcagttttggctacgggcctccacctccaccgccagatcagtttgcccctccgggggttcctcctccaccagccactcccggggcagcacctctggctttcccaccgcctccgtctcaggctgccccggacatgagcaagcccccgacagctcagccagacttcccctatggtcagtatgcaggttacgggcaggacttgagtggcttcggacagggcttctcagaccccagccagcagcctccttcctacgggggtccctccgtgccagggtcggggggcccccccgccggcggcagcggctttggacgagggcagaaccacaacgtgcaagggttccacccctaccgacgctagcccgcggcgccgcgacgtctgcacggcccagacccaggattccaaacttgtgaactcgtgacaatcacaaacttggcggcaaagtggcgactcaaccttgggggggggggcggggggagggcgcgaggcttttggagcggctgtgggtgtcgtctggactgaggtttttaaatatttctttctctaacccatcagcacaataaaaaaaagtcactggttcaacaacagggtttaaaaaaaatgtcttcagctttaattcaaaacttcaggtttctttttcttccttttttttggaaattattttcctgagccttttgttttacggtatattgtaaacttttatgttaaagaaaaaatatacatttacaaattgtgagatttttaagagaaattttctacgatgtatactggcttattttttaatttaaaacggggtttccgtcggcactggtggagggggtgcgctgttagtcccctcgctcctggctttgggggttgggacttggtggtccagaaactctgggagcttctagaagaaatctactgagtgtatttctgttttttgtttaattccttgcttttgtcgactgacctgcttggtagtgtctgaggtgaactgtgggggttgcgcacagccagccgcgtggatcccacgcagcgctgaaccgaaccgagtaggaagcctttctccccaggcacgtggcttcagggcgtttcccattgaccagtttgaccctggtttgaataaagagaagtgcgtttggattagaaa

SEQ ID NO: 147099 - DNA, 1467 bp, Homo sapiens
gtgcgcaggggcggcggcgcggcggcgcggggacgcgcggtgaccgttggcgccgaggggaggaggcagccgccgcgccgccgccgccgccgccgccgccgccgccgccgccgttgcgcagatccgggccgcggctgtggggagggcgacggagcgggtgaccttccggaggcgggagcgagcgaggaggcccgggagcgccgagcgtcgccgccgccgccgccatgaacaactcgggcgccgacgagatcgggaagctcttcgtgggcggtcttgactggagcacgacccaagagactctgcgcagctacttttcccaatatggagaagtcgtagattgtgttatcatgaaagataaaaccaccaaccagtctcgaggctttgggtttgtcaaatttaaagacccaaactgtgtggggacggtgctggccagcagaccgcacacgctagatggccgaaacatcgaccccaagccatgcacaccccgggggatgcagccggagagaacacggccgaaggaaggatggcagaaaggacccaggagcgataacagtaaatcaaataagatatttgtcggtggaattcctcacaattgtggtgagacagagctcagggaatacttcaagaagttcggagtggtcacggaggtagtcatgatctatgacgccgagaagcagaggccccgaggttttggatttattactttcgaggacgaacaatcagtggaccaggctgtcaacatgcattttcacgacatcatgggcaaaaaagtggaagttaaacgagctgagcctcgggacagcaagagccaagcgccgggacagccaggtgccagccagtgggggagccgggttgtgcccaacgctgccaatggctgggcaggccagcccccgcccacgtggcagcaaggatatggcccgcaaggaatgtgggtgccggcaggacaggcgattggtggctatggaccgccccctgcaggaagaggagcccccccgccacccccaccgttcacctcctacatcgtgtccacccctcctggaggctttccccctccccagggcttccctcagggctacggtgccccgccacagttcagttttggctacgggcctccacctccaccgccaggcagccgctgacccgcactcctaagggcccacagcggacaccagaggggcttttgtctgcagagcgtcttccaccagcagagcctttggaagctcccccagggagccccacccaggaccctttgggggatgcctcagtcagggccaggctgaccctgacccctgcttaccctagtcccctcaacctcctgacactggaggaatacttttctcctaagtctaccctggacactttttagggcacctggagagaactttcctctccactgtggcccctgcgtggtgaagatcaaaagaagttgtttgggaaaaaaaatttattaaaaaattctattatttt

SEQ ID NO: 147100 - DNA, 649 bp, Homo sapiens
ctctctctctctctctctctctctctctctctggactgaggtttttaaatatttctttctctaacccatcagcacaataaaaaaaagtcactggttcaacaacagggtttaaaaaaaatgtcttcagctttaattcaaaacttcaggtttctttttcttccttttttttggaaattattttcctgagccttttgttttacggtatattgtaaacttttatgttaaagaaaaaatatacatttacaaattgtgagatttttaagagaaattttctacgatgtatactggcttattttttaatttaaaacggggtttccgtcggcactggtggagggggtgcgctgttagtcccctcgctcctggctttgggggttgggacttggtggtccagaaactctgggagcttctagaagaaatctactgagtgtatttctgttttttgtttaattccttgcttttgtcgactgacctgcttggtagtgtctgaggtgaactgtgggggttgcgcacagccagccgcgtggatcccacgcagcgctgaaccgaaccgagtaggaagcctttctccccaggcacgtggcttcagggcgtttcccattgaccagtttgaccctggtttgaataaagagaagtgcgtttggattagaaa

SEQ ID NO: 147101 - DNA, 2244 bp, Homo sapiens
gtgcgcaggggcggcggcgcggcggcgcggggacgcgcggtgaccgttggcgccgaggggaggaggcagccgccgcgccgccgccgccgccgccgccgccgccgccgccgccgttgcgcagatccgggccgcggctgtggggagggcgacggagcgggtgaccttccggaggcgggagcgagcgaggaggcccgggagcgccgagcgtcgccgccgccgccgccatgaacaactcgggcgccgacgagatcgggaagctcttcgtgggcggtcttgactggagcacgacccaagagactctgcgcagctacttttcccaatatggagaagtcgtagattgtgttatcatgaaagataaaaccaccaaccagtctcgaggctttgggtttgtcaaatttaaagacccaaactgtgtggggacggtgctggccagcagaccgcacacgctagatggccgaaacatcgaccccaagccatgcacaccccgggggatgcagccggagagaacacggccgaaggaaggatggcagaaaggacccaggagcgataacagtaaatcaaataagatatttgtcggtggaattcctcacaattgtggtgagacagagctcagggaatacttcaagaagttcggagtggtgagtttctccccaccccggcagcactgtggggacagagccgcttctgctcaggcctgggccttcttggggctggagtggccgagccacaggtgcacgggcctttcaggctgggagctcgctgtctcgtatttccccaacgcctgcgccctccggaaaggtggaaagcccggcctttgccttcatggccatttcgtgtcccagtagggtggttgggcggtgaaccagcctgacagccttcagggcggccgcccgattccattgtgaacaccgtggggtccagtgtcagagaagggcagttacacagaaacggggttcagtgtggcctgggcgagccagccccacagagctgactttccactgggcaggtgggagaatgcccgagctccgttgagcccagtgccagagggagctgggacagccggagggggccggcggggagccctcctagtcacccaaggcaggggcgtgtggtcaccccaaggtcctgctgggactcctgccgtgccccgcaggtcacactccgagccccgccagcaggacagccctgcgtgcctgagtactgcgcacgttcatcaggtggtacctgagggtgccacgggcctgggccaggaatgagaggcctgagcggggcctggaagagcagggtctgcagaggagctgtgtgtggctgccccgccacttcgagtgagggccgagcgtgccctttgcttcccgcgtttgggtgggaagggcttctgtggggtctcctggctcccacgtcccctgctaggatgcgtggtcggcgttgttggcccttcatgtccgtcagcacacacgtgagcggggccacgggcagcccggaggcgggtatccagacgcctgccctggagctgcttctccctgcctgcgtctggccctgggagtgttggggctccagcctttctcagacagcagccccacggagcagctgttgcccgtgcacctcccccgctcagggagggcgcaccctgtgcgagagtttgggttcgtgggaacaggctgtgccctcggaagaccacctgtggtgctggccctggtgtccgtgctgacgccaccctctccttccaggtcacggaggtagtcatgatctatgacgccgagaagcagaggccccgaggtaagggcagatctagtttgacctcggccgtctccctgctcctccctcagatggcaaactatctcacccgccaggcacacacaggtggcggctgtagcaaacagcctcaggaagggacgatttggagacaaatgactaaaacgtgggctcctcatgtgcaccccattcagcctgtctgtgcttcccgaggtcagacgtcacacattgttttttggcttgttcttttgaagtttttacgacttgtcatgagtctcggcctggcttctgtttttcactgtccggaagagtgtggtccttctgcatttgaccttccttcaccctcatccagtcctcccagtgtggccggtctcatttcgtgtcgtcagctgggtcagctggctcggcctggcttctgtttttcactgtccggaagagtgtggtccttctgcatttgaccttccttcaccctcatccagtcctcccattgcg

SEQ ID NO: 147102 - DNA, 398 bp, Homo sapiens
gcggccgcctactactactaaattcgcggccgcgtcgattattttttaatttaaaacggggtttccgtcggcactggtggagggggtgcgctgttagtcccctcgctcctggctttgggggttgggacttggtggtccagaaactctgggagcttctagaagaaatctactgagtgtatttctgttttttgtttaattccttgcttttgtcgactgacctgcttggtagtgtctgaggtgaactgtgggggttgcgcacagccagccgcgtggatcccacgcagcgctgaaccgaaccgagtaggaagcctttctccccaggcacgtggcttcagggcgtttcccattgaccagtttgaccctggtttgaataaagagaagtgcgtttggattagaaa

SEQ ID NO: 147103 - DNA, 399 bp, Homo sapiens
ctccgcagctcgcgggagggtttggagggttcccgtgtgaactaactatccttcccttcttcaacagcagaaaggacccaggagcgataacagtaaatcaaataagatatttgtcggtggaattcctcacaattgtggtgagacagagctcagggaatacttcaagaagttcggagtggtgagtttctccccaccccggcagcactgtggggacagagccgcttctgctcaggcctgggccttcttggggctggagtggccgagccacaggtgcacgggcctttcaggctgggagctcgctgtctcgtatttccccaacgcctgcgccctccggaaaggtggaaagcccggcctttgccttcatggccatttcgtgtcccagtagggtggttgggcggt

SEQ ID NO: 147104 - DNA, 1860 bp, Homo sapiens
gtgcgcaggggcggcggcgcggcggcgcggggacgcgcggtgaccgttggcgccgaggggaggaggcagccgccgcgccgccgccgccgccgccgccgccgccgccgccgccgttgcgcagatccgggccgcggctgtggggagggcgacggagcgggtgaccttccggaggcgggagcgagcgaggaggcccgggagcgccgagcgtcgccgccgccgccgccatgaacaactcgggcgccgacgagatcgggaagctcttcgtgggcggtcttgactggagcacgacccaagagactctgcgcagctacttttcccaatatggagaagtcgtagattgtgttatcatgaaagataaaaccaccaaccagtctcgaggctttgggtttgtcaaatttaaagacccaaactgtgtggggacggtgctggccagcagaccgcacacgctagatggccgaaacatcgaccccaagccatgcacaccccgggggatgcagccggagagaacacggccgaaggaaggatggcagaaaggacccaggagcgataacagtaaatcaaataagatatttgtcggtggaattcctcacaattgtggtgagacagagctcagggaatacttcaagaagttcggagtggtcacggaggtagtcatgatctatgacgccgagaagcagaggccccgaggttttggatttattactttcgaggacgaacaatcagtggaccaggctgtcaacatgcattttcacgacatcatgggcaaaaaagtggaagttaaacgagctgagcctcgggacagcaagagccaagcgccgggacagccaggtgccagccagtgggggagccgggttgtgcccaacgctgccaatggctgggcaggccagcccccgcccacgtggcagcaaggatatggcccgcaaggaatgtgggtgccggcaggacaggcgattggtggctatggaccgccccctgcaggaagaggagcccccccgccacccccaccgttcacctcctacatcgtgtccacccctcctggaggctttccccctccccagggcttccctcagggctacggtgccccgccacagttcagttttggctacgggcctccacctccaccgccagatcagtttgcccctccgggggttcctcctccaccagccactcccggggcagcacctctggctttcccaccgcctccgtctcaggctgccccggacatgagcaagcccccgacagctcagccagacttcccctatggtcagtatgcaggttacgggcaggacttgagtggcttcggacagggcttctcagaccccagccagcagcctccttcctacgggggtccctccgtgccagggtcggggggcccccccgccggcggcagcggctttggacgagggcagaaccacaacgtgcaagggttccacccctaccgacgctagcccgcggcgccgcgacgtctgcacggcccagacccaggattccaaacttgtgaactcgtgacaatcacaaacttggcggcaaagtggcgactcaaccttgggggggggggcggggggagggcgcgaggcttttggagcggctgtgggtgtcgtctggactgaggtttttaaatatttctttctctaacccatcagcacaataaaaaaaagtcactggttcaacaacagggtttaaaaaaaatgtcttcagctttaattcaaaacttcaggtttctttttcttccttttttttggaaattattttcctgagccttttgttttacggtatattgtaaacttttatgttaaagaaaaaatatacatttacaaattgtgagatttttaagagaaattttctacgatgtatactggc

SEQ ID NO: 147105 - DNA, 2220 bp, Homo sapiens
gtgcgcaggggcggcggcgcggcggcgcggggacgcgcggtgaccgttggcgccgaggggaggaggcagccgccgcgccgccgccgccgccgccgccgccgccgccgccgccgttgcgcagatccgggccgcggctgtggggagggcgacggagcgggtgaccttccggaggcgggagcgagcgaggaggcccgggagcgccgagcgtcgccgccgccgccgccatgaacaactcgggcgccgacgagatcgggaagctcttcgtgggcggtcttgactggagcacgacccaagagactctgcgcagctacttttcccaatatggagaagtcgtagattgtgttatcatgaaagataaaaccaccaaccagtctcgaggctttgggtttgtcaaatttaaagacccaaactgtgtggggacggtgctggccagcagaccgcacacgctagatggccgaaacatcgaccccaagccatgcacaccccgggggatgcagccggagagaacacggccgaaggaaggatggcagaaaggacccaggagcgataacagtaaatcaaataagatatttgtcggtggaattcctcacaattgtggtgagacagagctcagggaatacttcaagaagttcggagtggtcacggaggtagtcatgatctatgacgccgagaagcagaggccccgaggttttggatttattactttcgaggacgaacaatcagtggaccaggctgtcaacatgcattttcacgacatcatgggcaaaaaagtggaagttaaacgagctgagcctcgggacagcaagagccaagcgccgggacagccaggtgccagccagtgggggagccgggttgtgcccaacgctgccaatggctgggcaggccagcccccgcccacgtggcagcaaggatatggcccgcaaggaatgtgggtgccggcaggacaggcgattggtggctatggaccgccccctgcaggaagaggagcccccccgccacccccaccgttcacctcctacatcgtgtccacccctcctggaggctttccccctccccagggcttccctcagggctacggtgccccgccacagttcagttttggctacgggcctccacctccaccgccagatcagtttgcccctccgggggttcctcctccaccagccactcccggggcagcacctctggctttcccaccgcctccgtctcaggctgccccggacatgagcaagcccccgacagctcagccagacttcccctatggtcagtatgcaggttacgggcaggacttgagtggcttcggacagggcttctcagaccccagccagcagcctccttcctacgggggtccctccgtgccagggtcggggggcccccccgccggcggcagcggctttggacgagggcagaaccacaacgtgcaagggttccacccctaccgacgctagcccgcggcgccgcgacgtctgcacggcccagacccaggattccaaacttgtgaactcgtgacaatcacaaacttggcggcaaagtggcgactcaaccttgggggggggggcggggggagggcgcgaggcttttggagcggctgtgggtgtcgtctggactgaggtttttaaatatttctttctctaacccatcagcacaataaaaaaaagtcactggttcaacaacagggtttaaaaaaaatgtcttcagctttaattcaaaacttcaggtttctttttcttccttttttttggaaattattttcctgagccttttgttttacggtatattgtaaacttttatgttaaagaaaaaatatacatttacaaattgtgagatttttaagagaaattttctacgatgtatactggcttattttttaatttaaaacggggtttccgtcggcactggtggagggggtgcgctgttagtcccctcgctcctggctttgggggttgggacttggtggtccagaaactctgggagcttctagaagaaatctactgagtgtatttctgttttttgtttaattccttgcttttgtcgactgacctgcttggtagtgtctgaggtgaactgtgggggttgcgcacagccagccgcgtggatcccacgcagcgctgaaccgaaccgagtaggaagcctttctccccaggcacgtggcttcagggcgtttcccattgaccagtttgaccctggtttgaataaagagaagtgcgtttggattagaaa

SEQ ID NO: 147106 - DNA, 2111 bp, Homo sapiens
gtgcgcaggggcggcggcgcggcggcgcggggacgcgcggtgaccgttggcgccgaggggaggaggcagccgccgcgccgccgccgccgccgccgccgccgccgccgccgccgttgcgcagatccgggccgcggctgtggggagggcgacggagcgggtgaccttccggaggcgggagcgagcgaggaggcccgggagcgccgagcgtcgccgccgccgccgccatgaacaactcgggcgccgacgagatcgggaagctcttcgtgggcggtcttgactggagcacgacccaagagactctgcgcagctacttttcccaatatggagaagtcgtagattgtgttatcatgaaagataaaaccaccaaccagtctcgaggctttgggtttgtcaaatttaaagacccaaactgtgtggggacggtgctggccagcagaccgcacacgctagatggccgaaacatcgaccccaagccatgcacaccccgggggatgcagccggagagaacacggccgaaggaaggatggcagaaaggacccaggagcgataacagtaaatcaaataagatatttgtcggtggaattcctcacaattgtggtgagacagagctcagggaatacttcaagaagttcggagtggtcacggaggtagtcatgatctatgacgccgagaagcagaggccccgaggttttggatttattactttcgaggacgaacaatcagtggaccaggctgtcaacatgcattttcacgacatcatgggcaaaaaagtggaagttaaacgagctgagcctcgggacagcaagagccaagcgccgggacagccaggtgccagccagtgggggagccgggttgtgcccaacgctgccaatggctgggcaggccagcccccgcccacgtggcagcaaggatatggcccgcaaggaatgtgggtgccggcaggacaggcgattggtggctatggaccgccccctgcaggaagaggagcccccccgccacccccaccgttcacctcctacatcgtgtccacccctcctggaggctttccccctccccagggcttccctcagggctacggtgccccgccacagttcagttttggctacgggcctccacctccaccgccagatcagtttgcccctccgggggttcctcctccaccagccactcccggggcagcacctctggctttcccaccgcctccgtctcaggctgccccggacatgagcaagcccccgacagctcagccagacttcccctatggtcagtatgcggcggcagcggctttggacgagggcagaaccacaacgtgcaagggttccacccctaccgacgctagcccgcggcgccgcgacgtctgcacggcccagacccaggattccaaacttgtgaactcgtgacaatcacaaacttggcggcaaagtggcgactcaaccttgggggggggggcggggggagggcgcgaggcttttggagcggctgtgggtgtcgtctggactgaggtttttaaatatttctttctctaacccatcagcacaataaaaaaaagtcactggttcaacaacagggtttaaaaaaaatgtcttcagctttaattcaaaacttcaggtttctttttcttccttttttttggaaattattttcctgagccttttgttttacggtatattgtaaacttttatgttaaagaaaaaatatacatttacaaattgtgagatttttaagagaaattttctacgatgtatactggcttattttttaatttaaaacggggtttccgtcggcactggtggagggggtgcgctgttagtcccctcgctcctggctttgggggttgggacttggtggtccagaaactctgggagcttctagaagaaatctactgagtgtatttctgttttttgtttaattccttgcttttgtcgactgacctgcttggtagtgtctgaggtgaactgtgggggttgcgcacagccagccgcgtggatcccacgcagcgctgaaccgaaccgagtaggaagcctttctccccaggcacgtggcttcagggcgtttcccattgaccagtttgaccctggtttgaataaagagaagtgcgtttggattagaaa

SEQ ID NO: 147107 - DNA, 3309 bp, Homo sapiens
gtgcgcaggggcggcggcgcggcggcgcggggacgcgcggtgaccgttggcgccgaggggaggaggcagccgccgcgccgccgccgccgccgccgccgccgccgccgccgccgttgcgcagatccgggccgcggctgtggggagggcgacggagcgggtgaccttccggaggcgggagcgagcgaggaggcccgggagcgccgagcgtcgccgccgccgccgccatgaacaactcgggcgccgacgagatcgggaagctcttcgtgggcggtcttgactggagcacgacccaagagactctgcgcagctacttttcccaatatggagaagtcgtagattgtgttatcatgaaagataaaaccaccaaccagtctcgaggctttgggtttgtcaaatttaaagacccaaactgtgtggggacggtgctggccagcagaccgcacacgctagatggccgaaacatcgaccccaagccatgcacaccccgggggatgcagccggagagaacacggccgaaggaaggatggcagaaaggacccaggagcgataacagtaaatcaaataagatatttgtcggtggaattcctcacaattgtggtgagacagagctcagggaatacttcaagaagttcggagtggtgagtttctccccaccccggcagcactgtggggacagagccgcttctgctcaggcctgggccttcttggggctggagtggccgagccacaggtgcacgggcctttcaggctgggagctcgctgtctcgtatttccccaacgcctgcgccctccggaaaggtggaaagcccggcctttgccttcatggccatttcgtgtcccagtagggtggttgggcggtgaaccagcctgacagccttcagggcggccgcccgattccattgtgaacaccgtggggtccagtgtcagagaagggcagttacacagaaacggggttcagtgtggcctgggcgagccagccccacagagctgactttccactgggcaggtgggagaatgcccgagctccgttgagcccagtgccagagggagctgggacagccggagggggccggcggggagccctcctagtcacccaaggcaggggcgtgtggtcaccccaaggtcctgctgggactcctgccgtgccccgcaggtcacactccgagccccgccagcaggacagccctgcgtgcctgagtactgcgcacgttcatcaggtggtacctgagggtgccacgggcctgggccaggaatgagaggcctgagcggggcctggaagagcagggtctgcagaggagctgtgtgtggctgccccgccacttcgagtgagggccgagcgtgccctttgcttcccgcgtttgggtgggaagggcttctgtggggtctcctggctcccacgtcccctgctaggatgcgtggtcggcgttgttggcccttcatgtccgtcagcacacacgtgagcggggccacgggcagcccggaggcgggtatccagacgcctgccctggagctgcttctccctgcctgcgtctggccctgggagtgttggggctccagcctttctcagacagcagccccacggagcagctgttgcccgtgcacctcccccgctcagggagggcgcaccctgtgcgagagtttgggttcgtgggaacaggctgtgccctcggaagaccacctgtggtgctggccctggtgtccgtgctgacgccaccctctccttccaggtcacggaggtagtcatgatctatgacgccgagaagcagaggccccgaggttttggatttattactttcgaggacgaacaatcagtggaccaggctgtcaacatgcattttcacgacatcatgggcaaaaaagtggaagttaaacgagctgagcctcgggacagcaagagccaagcgccgggacagccaggtgccagccagtgggggagccgggttgtgcccaacgctgccaatggctgggcaggccagcccccgcccacgtggcagcaaggatatggcccgcaaggaatgtgggtgccggcaggacaggcgattggtggctatggaccgccccctgcaggaagaggagcccccccgccacccccaccgttcacctcctacatcgtgtccacccctcctggaggctttccccctccccagggcttccctcagggctacggtgccccgccacagttcagttttggctacgggcctccacctccaccgccagatcagtttgcccctccgggggttcctcctccaccagccactcccggggcagcacctctggctttcccaccgcctccgtctcaggctgccccggacatgagcaagcccccgacagctcagccagacttcccctatggtcagtatgcaggttacgggcaggacttgagtggcttcggacagggcttctcagaccccagccagcagcctccttcctacgggggtccctccgtgccagggtcggggggcccccccgccggcggcagcggctttggacgagggcagaaccacaacgtgcaagggttccacccctaccgacgctagcccgcggcgccgcgacgtctgcacggcccagacccaggattccaaacttgtgaactcgtgacaatcacaaacttggcggcaaagtggcgactcaaccttgggggggggggcggggggagggcgcgaggcttttggagcggctgtgggtgtcgtctggactgaggtttttaaatatttctttctctaacccatcagcacaataaaaaaaagtcactggttcaacaacagggtttaaaaaaaatgtcttcagctttaattcaaaacttcaggtttctttttcttccttttttttggaaattattttcctgagccttttgttttacggtatattgtaaacttttatgttaaagaaaaaatatacatttacaaattgtgagatttttaagagaaattttctacgatgtatactggcttattttttaatttaaaacggggtttccgtcggcactggtggagggggtgcgctgttagtcccctcgctcctggctttgggggttgggacttggtggtccagaaactctgggagcttctagaagaaatctactgagtgtatttctgttttttgtttaattccttgcttttgtcgactgacctgcttggtagtgtctgaggtgaactgtgggggttgcgcacagccagccgcgtggatcccacgcagcgctgaaccgaaccgagtaggaagcctttctccccaggcacgtggcttcagggcgtttcccattgaccagtttgaccctggtttgaataaagagaagtgcgtttggattagaaa

SEQ ID NO: 147108 - DNA, 2306 bp, Homo sapiens
gcaggtgcagccagtgggggagccgggttgtgcccaacgctgccaatgctgggcaggccagccccgcccacgtggcagcaaggatatggcccgcaagagatgtgggtgccggcagacaggcgattggtggctatggacgggcccctgcaggaagaggtgggggcgtgggcagcacgttctactctacatcgtgtccacccctcctggaggatgtcacgggccccaggggcttgctcagggctacggtgcccgccacagttcagttttggctacgggatcgggagcgccgagcgtcgccgccgccgccgccatgaacaactcgggcgccgacgagatcgggaagctcttcgtgggcggtcttgactggagcacgacccaagagactctgcgcagctacttttcccaatatggagaagtcgtagattgtgttatcatgaaagataaaaccaccaaccagtctcgaggctttgggtttgtcaaatttaaagacccaaactgtgtggggacggtgctggccagcagaccgcacacgctagatggccgaaacatcgaccccaagccatgcacaccccgggggatgcagccggagagaacacggccgaaggaaggatggcagaaaggacccaggagcgataacagtaaatcaaataagatatttgtcggtggaattcctcacaattgtggtgagacagagctcagggaatacttcaagaagttcggagtggtcacggaggtagtcatgatctatgacgccgagaagcagaggccccgaggttttggatttattactttcgaggacgaacaatcagtggaccaggctgtcaacatgcattttcacgacatcatgggcaaaaaagtggaagttaaacgagctgagcctcgggacagcaagagccaagcgccgggacagccaggtgccagccagtgggggagccgggttgtgcccaacgctgccaatggctgggcaggccagcccccgcccacgtggcagcaaggatatggcccgcaaggaatgtgggtgccggcaggacaggcgattggtggctatggaccgccccctgcaggaagaggagcccccccgccacccccaccgttcacctcctacatcgtgtccacccctcctggaggctttccccctccccagggcttccctcagggctacggtgccccgccacagttcagttttggctacgggcctccacctccaccgccagatcagtttgcccctccgggggttcctcctccaccagccactcccggggcagcacctctggctttcccaccgcctccgtctcaggctgccccggacatgagcaagcccccgacagctcagccagacttcccctatggtcagtatgcaggttacgggcaggacttgagtggcttcggacagggcttctcagaccccagccagcagcctccttcctacgggggtccctccgtgccagggtcggggggcccccccgccggcggcagcggctttggacgagggcagaaccacaacgtgcaagggttccacccctaccgacgctagcccgcggcgccgcgacgtctgcacggcccagacccaggattccaaacttgtgaactcgtgacaatcacaaacttggcggcaaagtggcgactcaaccttgggggggggggcggggggagggcgcgaggcttttggagcggctgtgggtgtcgtctggactgaggtttttaaatatttctttctctaacccatcagcacaataaaaaaaagtcactggttcaacaacagggtttaaaaaaaatgtcttcagctttaattcaaaacttcaggtttctttttcttccttttttttggaaattattttcctgagccttttgttttacggtatattgtaaacttttatgttaaagaaaaaatatacatttacaaattgtgagatttttaagagaaattttctacgatgtatactggcttattttttaatttaaaacggggtttccgtcggcactggtggagggggtgcgctgttagtcccctcgctcctggctttgggggttgggacttggtggtccagaaactctgggagcttctagaagaaatctactgagtgtatttctgttttttgtttaattccttgcttttgtcgactgacctgcttggtagtgtctgaggtgaactgtgggggttgcgcacagccagccgcgtggatcccacgcagcgctgaaccgaaccgagtaggaagcctttctccccaggcacgtggcttcagggcgtttcccattgaccagtttgaccctggtttgaataaagagaagtgcgtttggattagaaa

SEQ ID NO: 147109 - DNA, 3433 bp, Homo sapiens
cttgtgaccctgcgaagcgccctcctggcaagtcccctgcaggtgcggtgggtgccatgcaggagggtgctgagcttggatggaagcaggccctctctgcggcagatggcggctctcaggacgccatgggtctgcggtgtcccttacccactgggggggctcggcagcctgaggagctccctcttcctgatgcagagccctcactgctcactgccatggaggaggcaggagatcccgccggaccccgcttggagggctgggcctggagcatgcatgggtgcggggtcaacgcctcaggagacttggagcttgggagccccctgttctgggacacttgtggccgtccagctgctgccctgggaatccacacctggaaggaagctcttcgtgggcggtcttgactggagcacgacccaagagactctgcgcagctacttttcccaatatggagaagtcgtagattgtgttatcatgaaagataaaaccaccaaccagtctcgaggctttgggtttgtcaaatttaaagacccaaactgtgtggggacggtgctggccagcagaccgcacacgctagatggccgaaacatcgaccccaagccatgcacaccccgggggatgcagccggagagaacacggccgaaggaaggatggcagaaaggacccaggagcgataacagtaaatcaaataagatatttgtcggtggaattcctcacaattgtggtgagacagagctcagggaatacttcaagaagttcggagtggtgagtttctccccaccccggcagcactgtggggacagagccgcttctgctcaggcctgggccttcttggggctggagtggccgagccacaggtgcacgggcctttcaggctgggagctcgctgtctcgtatttccccaacgcctgcgccctccggaaaggtggaaagcccggcctttgccttcatggccatttcgtgtcccagtagggtggttgggcggtgaaccagcctgacagccttcagggcggccgcccgattccattgtgaacaccgtggggtccagtgtcagagaagggcagttacacagaaacggggttcagtgtggcctgggcgagccagccccacagagctgactttccactgggcaggtgggagaatgcccgagctccgttgagcccagtgccagagggagctgggacagccggagggggccggcggggagccctcctagtcacccaaggcaggggcgtgtggtcaccccaaggtcctgctgggactcctgccgtgccccgcaggtcacactccgagccccgccagcaggacagccctgcgtgcctgagtactgcgcacgttcatcaggtggtacctgagggtgccacgggcctgggccaggaatgagaggcctgagcggggcctggaagagcagggtctgcagaggagctgtgtgtggctgccccgccacttcgagtgagggccgagcgtgccctttgcttcccgcgtttgggtgggaagggcttctgtggggtctcctggctcccacgtcccctgctaggatgcgtggtcggcgttgttggcccttcatgtccgtcagcacacacgtgagcggggccacgggcagcccggaggcgggtatccagacgcctgccctggagctgcttctccctgcctgcgtctggccctgggagtgttggggctccagcctttctcagacagcagccccacggagcagctgttgcccgtgcacctcccccgctcagggagggcgcaccctgtgcgagagtttgggttcgtgggaacaggctgtgccctcggaagaccacctgtggtgctggccctggtgtccgtgctgacgccaccctctccttccaggtcacggaggtagtcatgatctatgacgccgagaagcagaggccccgaggttttggatttattactttcgaggacgaacaatcagtggaccaggctgtcaacatgcattttcacgacatcatgggcaaaaaagtggaagttaaacgagctgagcctcgggacagcaagagccaagcgccgggacagccaggtgccagccagtgggggagccgggttgtgcccaacgctgccaatggctgggcaggccagcccccgcccacgtggcagcaaggatatggcccgcaaggaatgtgggtgccggcaggacaggcgattggtggctatggaccgccccctgcaggaagaggagcccccccgccacccccaccgttcacctcctacatcgtgtccacccctcctggaggctttccccctccccagggcttccctcagggctacggtgccccgccacagttcagttttggctacgggcctccacctccaccgccagatcagtttgcccctccgggggttcctcctccaccagccactcccggggcagcacctctggctttcccaccgcctccgtctcaggctgccccggacatgagcaagcccccgacagctcagccagacttcccctatggtcagtatgcaggttacgggcaggacttgagtggcttcggacagggcttctcagaccccagccagcagcctccttcctacgggggtccctccgtgccagggtcggggggcccccccgccggcggcagcggctttggacgagggcagaaccacaacgtgcaagggttccacccctaccgacgctagcccgcggcgccgcgacgtctgcacggcccagacccaggattccaaacttgtgaactcgtgacaatcacaaacttggcggcaaagtggcgactcaaccttgggggggggggcggggggagggcgcgaggcttttggagcggctgtgggtgtcgtctggactgaggtttttaaatatttctttctctaacccatcagcacaataaaaaaaagtcactggttcaacaacagggtttaaaaaaaatgtcttcagctttaattcaaaacttcaggtttctttttcttccttttttttggaaattattttcctgagccttttgttttacggtatattgtaaacttttatgttaaagaaaaaatatacatttacaaattgtgagatttttaagagaaattttctacgatgtatactggcttattttttaatttaaaacggggtttccgtcggcactggtggagggggtgcgctgttagtcccctcgctcctggctttgggggttgggacttggtggtccagaaactctgggagcttctagaagaaatctactgagtgtatttctgttttttgtttaattccttgcttttgtcgactgacctgcttggtagtgtctgaggtgaactgtgggggttgcgcacagccagccgcgtggatcccacgcagcgctgaaccgaaccgagtaggaagcctttctccccaggcacgtggcttcagggcgtttcccattgaccagtttgaccctggtttgaataaagagaagtgcgtttggattagaaa

SEQ ID NO: 147110 - DNA, 1350 bp, Homo sapiens
gtgcgcaggggcggcggcgcggcggcgcggggacgcgcggtgaccgttggcgccgaggggaggaggcagccgccgcgccgccgccgccgccgccgccgccgccgccgccgccgttgcgcagatccgggccgcggctgtggggagggcgacggagcgggtgaccttccggaggcgggagcgagcgaggaggcccgggagcgccgagcgtcgccgccgccgccgccatgaacaactcgggcgccgacgagatcgggaagctcttcgtgggcggtcttgactggagcacgacccaagagactctgcgcagctacttttcccaatatggagaagtcgtagattgtgttatcatgaaagataaaaccaccaaccagtctcgaggctttgggtttgtcaaatttaaagacccaaactgtgtggggacggtgctggccagcagaccgcacacgctagatggccgaaacatcgaccccaagccatgcacaccccgggggatgcagccggagagaacacggccgaaggaaggatggcagaaaggacccaggagcgataacagtaaatcaaataagatatttgtcggtggaattcctcacaattgtggtgagacagagctcagggaatacttcaagaagttcggagtggtcacggaggtagtcatgatctatgacgccgagaagcagaggccccgaggttttggatttattactttcgaggacgaacaatcagtggaccaggctgtcaacatgcattttcacgacatcatgggcaaaaaagtggaagttaaacgagctgagcctcgggacagcaagagccaagcgccgggacagccaggtgccagccagtgggggagccgggttgtgcccaacgctgccaatggctgggcaggccagcccccgcccacgtggcagcaaggatatggcccgcaaggaatgtgggtgccggcaggacaggcgattggtggctatggaccgccccctgcaggaagaggagcccccccgccacccccaccgttcacctcctacatcgtgtccacccctcctggaggctgttagtcccctcgctcctggctttgggggttgggacttggtggtccagaaactctgggagcttctagaagaaatctactgagtgtatttctgttttttgtttaattccttgcttttgtcgactgacctgcttggtagtgtctgaggtgaactgtgggggttgcgcacagccagccgcgtggatcccacgcagcgctgaaccgaaccgagtaggaagcctttctccccaggcacgtggcttcagggcgtttcccattgaccagtttgaccctggtttgaataaagagaagtgcgtttggattagaaa

SEQ ID NO: 147111 - DNA, 1263 bp, Homo sapiens
gtgcgcaggggcggcggcgcggcggcgcggggacgcgcggtgaccgttggcgccgaggggaggaggcagccgccgcgccgccgccgccgccgccgccgccgccgccgccgccgttgcgcagatccgggccgcggctgtggggagggcgacggagcgggtgaccttccggaggcgggagcgagcgaggaggcccgggagcgccgagcgtcgccgccgccgccgccatgaacaactcgggcgccgacgagatcgggaagctcttcgtgggcggtcttgactggagcacgacccaagagactctgcgcagctacttttcccaatatggagaagtcgtagattgtgttatcatgaaagataaaaccaccaaccagtctcgaggctttgggtttgtcaaatttaaagacccaaactgtgtggggacggtgctggccagcagaccgcacacgctagatggccgaaacatcgaccccaagccatgcacaccccgggggatgcagccggagagaacacggccgaaggaaggatggcagaaaggacccaggagcgataacagtaaatcaaataagatatttgtcggtggaattcctcacaattgtggtgagacagagctcagggaatacttcaagaagttcggagtggtcacggaggtagtcatgatctatgacgccgagaagcagaggccccgaggttttggatttattactttcgaggacgaacaatcagtggaccaggctgtcaacatgcattttcacgacatcatgggcaaaaaagtggaagttaaacgagctgagcctcgggacagcaagagccaagcgccgggacagccaggtgccagccagtgggggagccgggttgtgcccaacgctgccaatggctgggcaggccagcccccgcccacgtggcagcaaggatatggcccgcaaggaatgtgggtgccggcaggacaggcgattggctgttagtcccctcgctcctggctttgggggttgggacttggtggtccagaaactctgggagcttctagaagaaatctactgagtgtatttctgttttttgtttaattccttgcttttgtcgactgacctgcttggtagtgtctgaggtgaactgtgggggttgcgcacagccagccgcgtggatcccacgcagcgctgaaccgaaccgagtaggaagcctttctccccaggcacgtggcttcagggcgtttcccattgaccagtttgaccctggtttgaataaagagaagtgcgtttggattagaaa

SEQ ID NO: 147112 - DNA, 843 bp, Homo sapiens
gtgcgcaggggcggcggcgcggcggcgcggggacgcgcggtgaccgttggcgccgaggggaggaggcagccgccgcgccgccgccgccgccgccgccgccgccgccgccgccgttgcgcagatccgggccgcggctgtggggagggcgacggagcgggtgaccttccggaggcgggagcgagcgaggaggcccgggagcgccgagcgtcgccgccgccgccgccatgaacaactcgggcgccgacgagatcgggaagctcttcgtgggcggtcttgactggagcacgacccaagagactctgcgcagctacttttcccaatatggagaagtcgtagattgtgttatcatgaaagataaaaccaccaaccagtctcgaggctttgggtttgtcaaatttaaagacccaaactgtgtggggacggtgctggccagcagaccgcacacgctagatggccgaaacatcgaccccaagccatgcacaccccgggggatgcagccggagagaacacggccgaaggaaggatggcagaaaggacccaggagcgataacagtaaatcaaataagatatttgtcggtggtccagaaactctgggagcttctagaagaaatctactgagtgtatttctgttttttgtttaattccttgcttttgtcgactgacctgcttggtagtgtctgaggtgaactgtgggggttgcgcacagccagccgcgtggatcccacgcagcgctgaaccgaaccgagtaggaagcctttctccccaggcacgtggcttcagggcgtttcccattgaccagtttgaccctggtttgaataaagagaagtgcgtttggattagaaa

SEQ ID NO: 147113 - DNA, 518 bp, Homo sapiens
tcttaaacagttgggctcaaacaatcctcctacctcaacctcccaaagtgctggtattataggcatgagccattgtgcctggccagagtttttaaaaacatattcagaatattaatatcttgtttctcatttgttgcaaataattttacccccagccttgtttgtggtgattttttttttttgagacagagtcttgctctgtggtccaggctggagtgcagtggtgtggtcttactgcaacctctgcctcctaggttcaaacagttctccctgccaaagcctcccaagtagctgggattataggcaccttttgtggcgatttttgatgcccagaggtattttgtgtgtgtatgtgtgatgtctgtttttaaaatgctttggaagctcttcctggtgctgagaacaactctttttccccaagcagttaattttgccaacactatttgggcagttatgtttctctctgctgatttgtgatgttacctttattatatattaaatttctatgagtattagag

SEQ ID NO: 147114 - DNA, 598 bp, Homo sapiens
cttcagattaaatggaaccctatggcaatgttttattctgagcataaatatgtgtgcaacctgttgaaaggaggagttaattctctgaagatatacagactgctgagaagtgaacaaaatgtatcaaggctgcagataaaaatataattgtgaataagaaaacaagcagcttatatcctggatattttaaatgaagccaatgagaatataaatttaaaattacacatctctagactgcctaaagatttcacaaaatggtgcctccaactttgttacttatcctcttttttatatcaaagtatttctatgatattttaacttttcttaaagtgtattggtgggtttctaacataggtaagattacctgtgttcgatcgatagaaaatcattttttatctcttttttattttgttttactctagtctgtgtatttttaatttacaatatatatacatttataaatttataatttcacccatgagggggaaaatactgtaactagctatgtcctttaagtggtgttgatttttcaagtggacacatcatctcgtttccaaaaatagtgatttccatctaataaaaattctaattctctcct

SEQ ID NO: 147115 - DNA, 884 bp, Homo sapiens
cttcagattaaatggaaccctatggcaatgttttattctgagcataaatatgtgtgcaacctgttgaaaggaggagttaattctctgaagatatacagactgctgagaagtgaacaaaatgtatcaaggctgcagataaaaatataattgtgaataagaaaacaagcagcttatatcctggatattttaaatgaagccaatgagaatataaatttaaaattacacatctctagactgcctaaagatttcacaaaatggtgcctccaactttgttacttatcctcttttttatatcaaagtatttctatgatattttaacttttcttaaagtgtattggtgggtttctaacataggtaagattacctgtgttcgatcgatagaaaatcattttttatctcttttttattttgttttactctagtctgtgtatttttaatttacaatatatatacatttataaatttataatttcacccatgagggggaaaatactgtaactagctatgtcctttaagtggtgttgatttttcaagtggacacatcatctcgtttccaaaaatagtgatttccatctaataaaaattctaattctctcctattcttggatgaagtagagattattctaatttatttataaatagccttttatcccttcctgctgtacaaaggagctgatagctaagcaacatttttccttcttcacatgtactcagtctcagcaaagaaatcagcctcaaattttaacatcactttctacttatttttttaagtaacaaggcctccatttcatttttaatgtaatttagtgatcttttggttatattcatataatcaaagtattattttaaagttgaatatatgtgaaatgcatagtaacttaatt

SEQ ID NO: 147116 - DNA, 356 bp, Homo sapiens
cgagaccctgtctcaaaataaaattaaatttaaaaagagcattggagatgaggtgtctgtatactttgtcatctttcaaactggaatacagtgaaagaactctaacacttacttcaagacaactgatgtaaagcaagactgtctagcccaggcaaacttcctgtcttcccccattttacctaggctgtccaatctgtttaatcaaagaagaaatagacctaactcttttcagagaagtaatcagctcagtaattaaaattaaaacttttagcctgacatttaaaccttatatatctgagagttaaaaatttctctctaagttgaacacatggacacagagaggggaacctcacaca

SEQ ID NO: 147117 - DNA, 272 bp, Homo sapiens
gatacaaacataaatgtcctccataattagttaagattaaaaaaaggacacagttattcaatgaaacatagccattataatgaacatgatatctatatgtcctaacatgaaaaaaagtccataatgtagtaagtgaaaaacatgtatgaaacatattgaatatgggtgaacaaatatataggtatatgtacattaaaatatatatgcacttatttattttaaaatgcataaaggaaactctacatagccaattgttaatagtggttgcttat

SEQ ID NO: 147118 - DNA, 189 bp, Homo sapiens
aaaatatagaatatctctgtgtctttgggttaggcaaagtattcttagatacagcactaagcatactccattaaggaaaacagtcataaaatacacttcttacaaattaaaaactcttcacaaaagacagttaacaaaaagggaagccacaaactgggacaaaatatttggacaatacatatctgacaa

SEQ ID NO: 147119 - DNA, 236 bp, Homo sapiens
  misc_feature (20)..(20): n is a, c, g, or t
atcttaccccttactgcagncttaccccttctgtcacttaccccattctgtcttagttagacatgaattaattgtagttagcacattttgagtgatgaccatgggcaggcagtgttctcagggaatgcactgattaatctccatgaccaccctgacatagggcctgctactatcctcgtcttacttctgagaggttttgtaaagtcacctgagatcacacagcttgggagtggtag

SEQ ID NO: 147120 - DNA, 415 bp, Homo sapiens
gtccaataactatggaacatgaaacagccactaaaaaagtgactgttagtgacatgaaaaaacatttatattaaggcagattacaaagtaataatatacttcaatcctgtttttataaaaactcatatatatacagacacatatactgaatttttaagactgagaggaagtacatagaaataaacagagaagacattgaaatgaaatacatagaaatacacagaaaaaaaggaacgtaaatataccaaactgtttaaatggttatttctaagtagtgagatttgaagtaaattttgtttttcttttatgattattatctatcatttttgtaataaaagggaaggtaacaataaaaactgtaatgattaaaaaaaaaatcactgtcctgttctaagccagttgagagaccaacatc

SEQ ID NO: 147121 - DNA, 210 bp, Homo sapiens
ccaccttaggcttcctgctagctgggactgtaggcatgcaccactgtgcctggcttaaaatgaatgttatattaagacaggtaccacttcccacccccatttgtggaggaatatggtggataatttttgttgatgccattcttagtcctataataccagatgtctagttctggggacccaagctcctgaatcatcacctttttttaaaaa

SEQ ID NO: 147122 - DNA, 204 bp, Homo sapiens
ccccaccccctgagttgtaatacaaaaattacttcagacactgctaaatgccctctgagaagcaaagttgccctgtgttgagaggtactgccttgtagatgctgtatctcaggtcaccttcatttagcaccttgcacttaacttgctgtagaccactcaggcttaatcatcccaccatcacaggtttaggggagaaaatcagtt

SEQ ID NO: 147123 - DNA, 386 bp, Homo sapiens
ctttcagtacattcttgtggttgtgcaactatcactgcaatcaattctagaacattttcatcactcaaacaaaaacccctgtaccctttttttgtcaccccaaatacctctatccaccttaggcaacaactaatctattttctgtcttctggatttgcctattctggacatttccttattaaatgttattcattattattaggatttttttttttttttttttgagacagagtcttgctctgccactcaggctgaagtgcaatggtgccatctcgtctcactgcaacctccacctcccaggttccaacgattctcctgcttcactctcccaagtagctgggattagaggcacctgccaccatgcccagctaatttttgtattttta

SEQ ID NO: 147124 - DNA, 171 bp, Homo sapiens
tgccctggatctgacattccccgaagaggacgtggtaggtggcagacagcaaaccctccacaagggaatctaggaaacgttagaagttatgaaccaaaacgtacccgagacaggtctcaatcaatttagaagtttattttgccaaggttaaggacgtgcccctgacacaac

SEQ ID NO: 147125 - DNA, 392 bp, Homo sapiens
acatggcatgtataggggacaggaagagaatagtccagagactgtattagggagtcataaggaatggcactgaaaaggtaaaaggacatattacagaaggacttgtgagcaaggcgcaaagtcaattagtccaacagagagccgttttaaatgctaaactcagcaaggagacaatgaaagcaagactgggaagagtcactaagcagatgaagtgaggggaagaaaagagaaaaaagagaactttcttgcacaagttagcaggggtagaactgagtcaacaggaatggaatgaaaggaaaggttatctcaaaaaggcatactttggcttttgtttttcaaaataaaagcctactggctgacccccttccatcatcctgttcggtgtatagcct

SEQ ID NO: 147126 - DNA, 448 bp, Homo sapiens
atcctgatgtttcaagggctgcatcgtgtgcccagagcaacagagccagggcatggggcaggggcctggggagtctgacaacccaaccaatgtgcatgctggcagctgaggcccagcaggccaagaggagccaaaaaggagcacctgtccacccatccatcaaccgagtacaagagggtgcctgagggaccagtgcagaactggcagtcctaggagagtggctcaaggcctgcagggcaggtgcatggacctagacctgcagggtcgggcccaggaacagcaagagtcagaagacccaggtcaagggaggcagagacaaatgtttccagatgaagcaggagagcactggggccgatctccagggccctgaggcaatgaggagtgcacagagggtcaagctggacggatatggggtgatagcagctctgcggaaagcctgatttggcca

SEQ ID NO: 147127 - DNA, 491 bp, Homo sapiens
  misc_feature (353)..(353): n is a, c, g, or t
ggcgatcgcgttgtctacttaagctagagattctgaatcctgtcatgatgagtggaaaattgaatattacttttaaaatttgtcctgcatgtttctttacctcttttcatattttttatttcttaatcttctctgcatcattctaattccagtacatgtgctgctgaagcaagcacacgtgcttaggttctgatggcctgtagaggcaggagacagagccttgggcctaagtaaggcaggaggttggaactgaaacacctgtaggaagttgggagtttcaaaggacaacaccttcaataaggttgaactagacaaagggaaacaccggtgtttccctttgtctccagacgtanctacagttattagcaataatagtagtggtagtgattgttactttttttttttttttttttgggaaaaaaatttccgcctcttgtggccccgggggggggggcggggggggcaactcaggtacgggaaaccccggctcc

SEQ ID NO: 147128 - DNA, 858 bp, Homo sapiens
tgcagcacagggcactatggagaatacaagggaagtggaggcctggtcttggcctctaagaggtaacaagggttggggtggggaggatgcatccacactcaatgccttggtaatctctgcaaagctacacaccccaagcccaaaggaaccgctggctcagctgccacatggggaaggggagtcggcaggacttccaggaggaggcaaggtctcttcgtgggtctgggggagaaaaaaaaatgtctaggtaggaattatggcttgtgccaaagatggggcacttggaggggtgggccttgcaggaagggcatttgtaaatcccaagagttggcattgcagcaatggtgagaggtgggaggtccctgaggcccgggagtcagaggacagcaggcaaagagagaaacagagacagcccccaagagggctctgcagagggtcctgcgccgtgtgctgacaaggtaaagagaatgatgccgctgtgtggttgaggggaggaggcaggtgagactgagtctgtgagaccccggtgggccaaaccaggatcaatgaagaaaactaaagggaagaaaccacagctgaaacgaagggagaaacggagaaacttcgcagtacgcctccctccggaagtagtgggttcccatggccggaagtgttctcagtgaagtccacactgtacttaccgagagcttacttcatgcagggaccattcctggacattctaaatttttcacatggccttaggaggtgggtgttattattatcatccctttttacagtgaggaggctgaggtttagagaggctaaacctctcgcccagtactatggagcacttgctgggatttctgttcaagcagggtc

SEQ ID NO: 147129 - DNA, 308 bp, Homo sapiens
ccagtcttccaacaatgttttgccaatgtataccgcatcaacttactgtaggaaagtgttccaattgcccagaagtctcaccaacacctggtatcattcatttatctgctgagtatatagtggtatctcattgtgattttaattcgcacttccctaattactcatgggtgttaagaaacctttgctttgcttatttgctatttggatatcctctttgtgaaacagtctgttcgagtcttttacacatattaaaaatggaactgtccttcttcaattttaggagtttttaatacatcatagatatgagt

SEQ ID NO: 147130 - DNA, 341 bp, Homo sapiens
cacctattcatccatttattcaacaaagacttattaagaacctcctctgtgtcagaagtatgtacaggttacgacaataaacacaagggtcctggtctctggctccacagatcttgattgtaatggagagacaggtaagcaaagagacacctatactgtagcgtaatatgtaaaatgatagaggaattatggggtcccataaaagtaggcaaggggccattataatcgaatgtgagggaagtgcctgctttcaggtggaagtagtatctaagctgaggcttaaaggaggaacccgctagacagcatttgttgctgtttttgggtcaggggcacagtggaaa

SEQ ID NO: 147131 - DNA, 735 bp, Homo sapiens
aggccgagtgggtggagccagctcagcagtcaaaagtgaaactcaggcagaggcaccactggccacagaggttaccgaaagaatcgtgtgtcactactgttagcggtgcctaatttatacaggtctgcagcaacttcagttcttgccttctaagaagagagaattcaactgaggtgggtcataaggcagagtcagagactgaggcaagttttaagcaggaatgaaagtttattaaaaagttttaagtaggaatgagaggaagtaaagtacacttggaagagggccaagcaggtgatgtgagagagtcaagtgcccagtttgacctttgacttacagtttggtatgttccagcatcttctgtcccttctcacctgattcttcctttgaagtgggctgtctgcatgcacagtggcctgctagcacatgggagggaccacaggcacagtgagtttactggagtagtatgcatgctcaggtgaggcattcttcccttaccagtagagtgttcctagaggaaggtcatataccagttaaactctgccattttggctcttaacgcacatgcttgagaacactcaccaattactgagatcttatcggaaagctgtgatcagcagtttcagttttccatctattgggagactgactttctctggtgacgggtgggacccataagtatttggagagacagttactactgatataactggtggttggctaatgttgaaaaggggg

SEQ ID NO: 147132 - DNA, 154 bp, Homo sapiens
tgtatgactaccttctataacttatttttaaaactgcagtattttaaagaagtctgtatgtttaagagatgagctactaaatgaatcttatctagttagcattattaattatgacagccctactccaggggtgaaaaggtgtttctggacccca

SEQ ID NO: 147133 - DNA, 343 bp, Homo sapiens
  misc_feature (60)..(60): n is a, c, g, or t
  misc_feature (81)..(81): n is a, c, g, or t
  misc_feature (87)..(87): n is a, c, g, or t
gagatgttttcctgtctctcctgtggccaaggagtctttcatttaaatgtcaggcttctnctcaccagttgcacaggcatncttgancctctcccctctcatacacaacataatttttatttctctttgaactacagtatgttaagtgcttgcccatgataaaatgaaatgtactcacacgtgagcaggtttaggttcagccaacttcatctggtttggatggtgggaaaagttccacactgcggcccctgctggacacttagtgtaatagagtcccatgttaccaaggagcaattcagaatgcagtcagtgccactgtatcttatttcttagaaattatccc

SEQ ID NO: 147134 - DNA, 274 bp, Homo sapiens
gtgagccgagatcgcaccgctgtactccagaagtagacaattcatacattttaagttgtgtgctgttgtgagtagcctgatgaaatctcatgctgtatggggcgtgtccatgctgtatttgctccctgtctgttagtcactagtggtcatctcagttatccatcaactgtcacggtttcacagtgcttatgttcaagtagcccttagtttatgtaacaatattttactactaaaaattattattgttgttgttagtctctcactgtgcctaacg

SEQ ID NO: 147135 - DNA, 714 bp, Homo sapiens
gccttccgtagaagatgtggcttgctcatgcttgacttctgccatggttgtgaggcctccccagccatgtggaactgttttcaggtgctggttccatggctcttcctgagccgaaaataaggaaactccatagaccttgtccactggaactcgttcccatctaccctccactctatccagggtgatggatctctgcagtaagtggaagagttcttcatggcccccaaggttatatccatctagaacttcagcacgtaatttcatctggaaatagtgcctttgcggatataagttaggtaaaactgaagatgagatcatactggattaggatgggatctaaatccaatgaaaatgtcttcataaaaaacaggaaagaacccatagaaacacaaggaagaaggtcatgtgaagatggaggcagagattggagggatgcagccaccggcccaggaatgccagcagccacccagaagctggaaggaaatgagggattctctcctagaacctttagagagaacatggtcctgtgaacagcttgattttggacttgcccatagcttgtatactcttactttggatacaattttatccaaacttggctaaacagtttctcagcctatggaaaatttaaaatggagaagattcactcgattcttacagattcaaagcaagaaaatgatgggaacataggaggagaccaagaagcctataaaa

SEQ ID NO: 147136 - DNA, 390 bp, Homo sapiens
agtagatatctatcaggcatcattggactcattaatagagataaagaaaggtaatctgcagaagacaggcagaagccttgttcaagttccagagtgaagcaggaattgaatctggttagaagtcagtttctagctctactctcaggcctggcccagggctgagtctgagctgtctttcttaacacagacccagtggatcagttttattttatggttctgccaagaaaaaggtcatgacataaaatttaaatagtgcaaaagaaatatttgaagagccctttgcagattacaaagtacttcctctttcatgatcccactggatccaatggtatagttaagatgagccacccccacagatgacccactggagggtcatcaatgtgaatgaaa

SEQ ID NO: 147137 - DNA, 462 bp, Homo sapiens
tcagtgccctttaccaccacacatactgcctcactcgtaactgattatatttttgtaacacaaactcgttctttagaaataaccagtacctagcccagcagacgcctgttcaatggatagcagaggttacagaatattaaatgtaaaaagatacatgtcgaatgatggaataccttagagaccaaggggaaagacttgtagttatagacattgggggacccctaataaacatcacagtgtaccacacgcatttacaagccctgcatgacatagaacttctagtcagatgtctagaacctcatcttaaatgagacagaatcaaggatgaacagacatttgagtcaagacttgaacagggtgatggggagtgcaaaaagtaaaagaaaaaaattatatacttagagaagagttcattttctgttgctatgaaataacaatcagaagacaagaaagaatgtttta

SEQ ID NO: 147138 - DNA, 460 bp, Homo sapiens
aaaatgagttaggatttttggaaatagatttctcactatatttttttcagataaagttcctagttcatgtatttgaaatttgaagaactttaatttaggatattcctgtgtataggactctgtctctcaaatctatatctataatggctttctaataaaaatttagttgctaactatacaataatgttttccattttatttctaaacaacaatttctaagaacaaaaaatatgcttgagaattcttacaacaatggagtttttcatttgataaaattttatttataccccttttactgaagcacacagactttttatgtttctaaagacacataagtaacactatttgttgagcaaagaatattgtatggttttgttctgatgttttccatgtgctaatatgttagctgctaaaatccggtttttttaaccagtaaaacttgattaacctggtatgtaaa

SEQ ID NO: 147139 - DNA, 425 bp, Homo sapiens
tcgctgtccacttcatacaatatgagtactgaaaaatatcctttgtgcgtggcaattcagaggtaaccttaatgagcagtttcagtggagtgttgagggtataatctagaagggttcaaaggaggatttctttaaagataggatattgttaggtttataaaagacaaacttgttttccctaatccttttatgccttactactaggactttttcctttaatccaagcatttccaaaccatggtgcttcattgtttagaaatcacatgtgctttaataattcaggttggtttttcttttcttaaccaaaaatagcaatgcaaactatggcgtatgtattatacactttattagggatttcaaattatgtaaatctctaaattaacacacaaaaaggatttatatcagattctatttatgaagtcaga

SEQ ID NO: 147140 - DNA, 497 bp, Homo sapiens
atatgccaccctgtcttcaagaattgggacttatctcccaatagctgggaggactggcttttggtaaatagccctcaactgtctgccctcttatggaactgtctactgtagaaagcatcttgcccaagggcacacccccttcctagggtcaacagaacctagtgacagatcatcactaatgtataatgacccagcccctcatctccactaggaaagactctgaaaggccactctatcttcagagcacccaaaggagacagctgaaatatttgttgaggctgtaccatagcccagcttagccctctgcccaaccttgcttactctctttcctcttccatgagtactggtcccaaagtactccctaaaaaactttctgaacactaaactttctaagtgtaaatctctagctaagtctgcttcccagagaatgtgaatattggaaatttccaagtaccggacattgactgacttgcagacaacaatttggcaacatatgt

SEQ ID NO: 147141 - DNA, 446 bp, Homo sapiens
aggctggtctcgaactcctcacctcaagtgatcctcccgccttggcatcccaaagtgctgggattactttctgtataaacctcgtttctttataaatcactcagcttcaggtattcctgtatagcaatgcaaaatggactaacacagtcctttctagtaggatatgctaaaaaggggatttagaaaaaacatagagtttttacttttaaacatggagtttttacttttacaactttttaaaaagttgtaaaacatacctaaggaaggaaacgtagtttgtaagaacttgctggctggtggtctggcttagtctctgaggcctggaatttaccatcagtaaagtcatgtcatgcctctcttcatatttgtgaagtgggcacaaaaggctgtatgtcccttaaatgattcacaggaattttacatgaaattattagtctacctcctaa

SEQ ID NO: 147142 - DNA, 188 bp, Homo sapiens
tagctcactgtgatggtaaattttaaatatcaacttgactgggttgagggatgccttgatggctggtaaagcattatttctgggtgtgtttgtatggtgtttctggaggagactgtcatgtgagtcagcagactgagagaggaagatccaccctcagtgtggatgagtgccatctaatcagctgggag

SEQ ID NO: 147143 - DNA, 402 bp, Homo sapiens
taagcatgccttttctttctctttgattgtggtcagtgcatggaatgtgccagggccgctgcggagcaagcacgtggccccgaataacccctccctgccaacggaattctgcagagaacatgtaagggctgtgctgtttcactcctgctttgggctctcagggtttgtttccgcgatcatccaaacctcatcctccttctcttgccccagataatttattggaagtctggagagggacttgagttctctcaactctccaaccagactgttgctgtgggcgaggccatgtcgggtgagctccaaggagagcagttggaatgacagagaggaacggtttcagcctgagaaatgtgaaatataaattcaaaccaaacttggcacctgtttggagagcttcagctg

SEQ ID NO: 147144 - DNA, 417 bp, Homo sapiens
tggattcaaagaaattgtaaatcttttaccaagtggttgagtttgccatcaccaattgtgagacagtctgacactctgacctcctgacaggaggcggtcgagggtgcacctcctcatcaatgtggtggtgttgccacaattgtcagacctgggtctaatcattaggatgagtccgacacatgcagaacactctccacacagccgacccggactcttcaataaatcggggcaactgttctaggttggtcaaaagacataacagccaaattcagtgtgtgaactctaattgcatccaaatagaaacaggaaaaaaaaacaccaataaaggattttttttgacaaatttgggttaatctgagtatggacctcatgctggataaaggtgtggaattagagttgaatttcttagggtggtaa

SEQ ID NO: 147145 - DNA, 463 bp, Homo sapiens
tgtggggaaaaaaaatcagttaagaggcaagctacgaatgaaataacccacaatatgtgctatcctgcaagcaaagaaatctcaaatatcaaattcattaaatggttttagatttttggccaggtgcagtagcttacgcctgtaatctgagcactttgggaggccaaggcagatggatcgcttgaatccaggagttcgagaccagcctgggcaacacagcgaaaccccatctctgtttaaaagaatttacattctcttcacaagagaacggaaatcatactttaatataacattaaggtaaaaaaaagaaacgatttaatttcttaaaggcagcaaaaatcttaaaaagcacagttaatctaataaataatcaagccacttttgcccagagctttttaaaaaaaagttctttagaataagcttcttctccaaattccccattattcaagcttacagtattctg

SEQ ID NO: 147146 - DNA, 485 bp, Homo sapiens
tggaattatttggaaagagagactaggccttttcccttcatcttggtatccccaatgcttagtacaaaacctggcacacagcatggttcaatatgttttcatgagatgaatgcatgaatgaaagtaaaccaaggcttccatttccttatagcccgaagttatcatttttcagctatatagttgccaagtttaactggtgtttaaagggctttccaggtcgagggtttccttaggacctgttaatacgtcatagctgggaaaaagtagtttgggatgggatcgagtcagggggctgaatagagaaagttttcttgcctctttttcttcacctgcccctgcccctgcccctgccccatcccagagctactgctttcctttaataaaggagtaattaggcactggttatcatgaagtgctagagaatattcctgtgagatcctaaaagttcagaagctaaccatttgttccagtttatactatggaaa

SEQ ID NO: 147147 - DNA, 342 bp, Homo sapiens
ccttgtctgtgtcgcttctgagttatggcatgattggttttatgtggtctataggaaggttggcatatccagacatgagcgtactgaacctgtgggggatagtggcgggaatgatagccctgtctctaggacaggatgacggttcttcaagtccaaagagattccggaggcttgagcctagaaaaactgttcttggctctttggtatttcgagactgaacaccagtacctctaacccccaagtgtgtgtttttttcacaggatgagtgtaaagatattgtcttcactattttccgtaactggactccacctagtttttcagcccaaccctgccacccccccg

SEQ ID NO: 147148 - DNA, 316 bp, Homo sapiens
ctaggactcacggtgcctcgacaactgtaagaaatttactgtagctttaataaggagcaaaggataaagtttagtgacctaaggataagaggtagaacaaactcagattttgaagaaacatttatatccaacagataatttggattttaacctgtaggagcttacaaaaattctcaagcaaaagagcaatgtatttatatttattttgtgaaaaattggctgggcacagtggctcaggctgtaatcccagcattttgggaggcgggggctggtggattgcttgagctcaggagttcgagaccagcctaggcgacat

SEQ ID NO: 147149 - DNA, 724 bp, Homo sapiens
ttgagtctgggaggccgaggttatggtgagctgtgattgtgccactgcattccagcctgggtgacaaagcaagacctgtctcaaaaataaaaaacaacaacacacacacacagtgaaacgaatggcaccaaggaagaaatccaagtgcaagaaaagagggaatcatacaataagaacaatagggtggaaagccagggtgaaatacacatctctgatgaaggaagggctgtgtatctgggtccttacttttccccttttacttgggtgcttctgtcattattatttgtaagtcacttctctcatgaagtgctttgagcttttggggcaagtaagagtagagaaactagaaatagttggcaattcattatcaaccttgttacgtgggattagaactattgtctaagatgggattgtgagtttttgaattgtaggtgagattttaatgcgtgtgtccatgcccccattattgaagtgggtttggagttcatgatattagaagcaattccttagttagcagttcttgtagatgagtgatgagccacaagatttctgttgagatcaacattcagttgtatgaaattcttgaggtgcagaggggagtagaataggaatttcctaatttggttggattgactccattttggaactagattttctgcacgcatgtgctaagaagagagatggtggtcacagtgaatggatcactgcgcaaagatctttggtg

SEQ ID NO: 147150 - DNA, 374 bp, Homo sapiens
aaggaaggaggtgatgcaggcccttcaggaggaggcccagctcctctgggttgcaggattgaatgagccagtatctacaaggccctggctctactcccttgtaatgtttccaggctttctctgtaatgccactgtagtgagacacatgtcattcagaactccatgtagtcccctagatttatgcacagtgcagcctgtggctagaactgaatcttaaaccaataatctgccttccccaggactagcaccaaaatatttttatgtgtcaacgagtctagaactggagagctccagaaaaatatggtgccgtgtggggtagggggtaatactgatttcacacgtcatactttccagaacagttagcaggccctgta

SEQ ID NO: 147151 - DNA, 164 bp, Homo sapiens
gcagatgcagaagtgtaagaaaggaataagctactggtatccaggattatctagctcatctttccagtggagctgagcctctgtcccttaaagcagtgctgaacgaatctttgttggagtctgagtatatttttctctgctattgttgttaagtggttggtggt

SEQ ID NO: 147152 - DNA, 243 bp, Homo sapiens
ggtttatcacttgagattcaaaagtcgtcagtcgctctttaagtgagagtaaaaaagagtcagaaaaaaatgactgcgtgggttaattccattaccagagtcatgggaaaagccaagttcagtggtgttcagatttttctgacgacaccccccacggggatgcacgttacattgagacccagacacagctgcaagttccaagaaataacgttttattctcatcatgccacagtacactctgga

SEQ ID NO: 147153 - DNA, 125 bp, Homo sapiens
cttacaggattaaccaccacaaatccactgctgcttccaacatttgtaagtctgatcttgacttcagaaaacctgataccaatatatctattggtatatatccactagacagctatgccagatgt

SEQ ID NO: 147154 - DNA, 169 bp, Homo sapiens
tagctcaaggtaaacaaatttcagaaaatatttcaattatctaggaagtcatctgatgcaagaatagcaccgaatctgacagcttcattactatgcttgtttaactgtgactcacagactgttttacagaagagtaaatttcctggtttctaatttcttgaggaacttg

SEQ ID NO: 147155 - DNA, 564 bp, Homo sapiens
ggtacctgaagcgagagatcattgaactaggaggtcggggctgcaggagctataatcatgctactgtattccagcctggctgtggcatagcaaaacccccatctcttggaagaaataatacattactattgttagtaaataagaaatatgaagtaattagaaactaaagaaagacttttagataaaaagaatgaaccaaaagaaaaagaaataattcctagaacaagacaataataaatattaaattactatacagaaaacattggaaatctctaaggggcaaataatctttttgtagaaactccagaagacaaagggaaacaccggtgtttccctttgtctttcagaaatttcaaagcacctaatcttagtctgtgttccaggattcattctaagtcttttgttaaactgtaagctctttaactaaaatttgagtttgatgttttaaaaccctattttctttagaagatatgtacttgtacatttttcttctattctaaacccactcactttttacatttttatatattaaaagacacagttaattgaggtaccttacagatc

SEQ ID NO: 147156 - DNA, 519 bp, Homo sapiens
ggaggaagctcagcagagcgggaacatttcagagatgaggctctccaagcatatggcagacaaaagcatggttacgactggctacagggaaaaccactcaggcccccttccctctttgagtgttaggataactgccagagaacaagctgacagtctaaagaataaggaatgcgagggggctgaatggagaaagagaagcagagctgaggggcgggctgcttgattcagggagactgccccaaacatttaccgctcagcacaagtcatgattttagaacagaaacaacattttctctctagtaaagatgttagagagagctaccagaactccgtgaaataaatttgtaaaagagaaaatacagttaaaagttctgtggacttggcctgatttcaaggtaaacaactctattcatagtcacaaagcatgaggtgaaagggaggatgtattgatgggtataaagaagggacggttacaagaggggtcagtgaatgaattcctctgtgttggcagtgactcag

SEQ ID NO: 147157 - DNA, 397 bp, Homo sapiens
tagaaatgtgattggacaaaaagagtatgatctcatactaatagactgagtgagaaacccagtaaggcctgtttgtctagattcttcttggcctctctgtgcagcattctttccttcagagtatggggcaggaccctttctggaatgaggatcttttgattcacaatcagattagagacctgccttgggcaggtaaaaggaagacaggaggttagagagaaagattctgtttcctgaggcttgctcctgtgacctgctcctgagacctaaagcactcctgtgacctgctcctgagacctaaagcaccccaacattataacaaaagactacaccaagggctgtggtagttaataagtcaggaaccatggacgaaaacctacacacacacacacacaca

SEQ ID NO: 147158 - DNA, 288 bp, Homo sapiens
tcaaccgtggctgacaactaggacgtgggaaagtagagaagaagctgataaagatgaaaagctcatctatagaaagatattgaaaatttatttcttctagattacaaaatgacattagatattataccctatgagaaaaaatacgcttaatcaacccattttcctcttatggccataattagtacatagtcgcatcaataaagattgacaatatagccttctcatattgccacttctagatccacttgtaggcttaattttggatcatatgccggatttgaattgtat

SEQ ID NO: 147159 - DNA, 123 bp, Homo sapiens
gacttctgacctcaggtgatccacccgcctcggcctcccaaagtgctgggattacaggcgtgagccactgcgcccagccttacatcctttttttcatcctgtctttgaaattgagtatgtatt

SEQ ID NO: 147160 - DNA, 137 bp, Homo sapiens
ttggttgcaggtctgatttgcggaggtagcgcagtccacctaccttgggcaaggggatggctgcactgtcctctgtgtgtcctgctctgttccagaggttgtggtctattgctgaggcccctggagccatagcagat

SEQ ID NO: 147161 - DNA, 256 bp, Homo sapiens
ataaactgcctaaaactaaataatagaaatctatatcacattcccctttagagttcatcatatcagaactttccaattttctatgtaattaaatagttctaccttgtctctcaagtctacaaatcaaataaatgcagcaggaaacctacctgtaaataataacagcaataataataaaggagttaacatttattgtcttttgtattgattgatttccatacactgatctgagttatcgctattaatttaatgagga

SEQ ID NO: 147162 - DNA, 482 bp, Homo sapiens
caatatgtctgagaaatgtcttacaaatagactcagtgtcacaaatagatgatttacaaatagactcagacccactgtagcgttaaggatggaacctggattatgcattcagtgcgggcatcaattttgacactcagagaccaggtgaaggtgtccaagagacgaaagctcagctctctcatcactcaggtgaaggagaaaggggaccagtggttccagcacgtgttccgcaggccggcagcatcagcatcacctggaactttttaggaacggagatcggaagtcccaccttgacctgccgagatagctctggggtgggcccagcaacccaggtctaacaaattttccagtgactctcctgctggttcaaacttcagaaacagtgaaagagacaatctcttagggtctttgcagcgtcgactcttaggaattttacaggagagcaatacaaagagaaaaggcaacaagtttaagaaacaaac

SEQ ID NO: 147163 - DNA, 523 bp, Homo sapiens
gcgtttaatataaaggtctaaagttttatatatgtgcacataaatgataaggctgactggactatttctctttgatcaactaaattcaacaaacacctgttagccattagtgttgtattaacaaaatgtattaatcctacctgtcagacaatctagtccgtctgacatctctttcctgtatctctaaatgcctagtcattttgcaattcatgatggcccatattattacttttcttttgaatctgtagatatggagtcttgctcgaccttgcttggttgcccaggctggagtatagtggcatgatctcggctcactgcaacctcagcctcccaagtagctgggattacaggtgcccgccaccatgcccagcaaatttttgtatttttagtagagacgggatttcaccatgttggccaggctcatctcgaactcctgatctcaggtgatccaaccaccttggcctcccaaagtgttgggattacaggcgtgacccacagtgccaggccattactttttctgtag

SEQ ID NO: 147164 - DNA, 292 bp, Homo sapiens
gtgagaagcccattatagtccgctgggagaaggaggaccgaatcattaaccctgagatggcccgttatcttgtgtccaccaaggaggtgggagaagaggtgatttctactctgcagattttgccaactgtgagagaagattctggtttcttttcctgccatgctattaattcttatggggaggaccgtggaataattcagctcacagtgcaagagcccccagaccctcccgaaattgagatcaaagatgtcaaagcacgcacaattacgctcaggtggaccatggggtttga

SEQ ID NO: 147165 - DNA, 682 bp, Homo sapiens
gttcccaaatatagctttctccccattggaacacaccagaataatgttttggaatctgtaccatcgggatgatttcaaagctgaaatgtgcagtggactttggtgctcatatctgaagttctcaggctggtcattttcacccaagaagctggatgctctttgtggactttatgggaaagaaataaaattgcttatttgaatatgtgatttgccaagtaagcatttttatgcctcagcaactggaggggacagagaggaagaagaagggctgaaattcaatgcacagtgctctttatgatgacactgtgatgggaatacccttgaaaactttttaattgttagaagcttgcttcatatggtacttctccacccttcttacatttatttatgcctagcactgttactttccagaaatgaattaatacagctatcatcactgagtctcaattacttgatagatgacaggaacatcctctgatctctatgggatgagaatgttaactttattacccttaattcctgctgttttgcaaccagagagtaagcaaaggctaaagctgagggtgagatgtagaaaccttgcctactatgtgtgtggaaaagtttagtggcataaacttgcagaatttacttatttgtatgaatgagaaatatgtgatcagtaatttggctcagaatggat

SEQ ID NO: 147166 - DNA, 368 bp, Homo sapiens
cggagccattatttgaacccggatatctgtgtctcccaaacccatgatttttctttttagcttgtggtgcactaaaaatgtaagacacagttcttgcccacaaaaaattttgggtccccctggaggatgagaaaactgtgcaaatactgtaattcagatcaaaatgtaaatacttctttgagatttacaaggttgaaaggcaggttaatgtctaaatgaagatcaaggaaagtttcctttctgtgtgggtcttttagaaagctgaaacttcaaggcagcagtatcttctctgaataattataacctcatggaagttcttttctaggtgaagaattttgtaattaaaggaggcacattcaggcgaatgt

SEQ ID NO: 147167 - DNA, 374 bp, Homo sapiens
gtcactcacacacatgccacatcacacagcatgcacacagtgcatacacagcacacacatgcacacagtacacattattcccttagttagggcaggaaacaaactttaaatacaaaactatagataagttgacagtaaaaaaaaaaaagatatagcttacaaatgccaaccaaaagaaagctagtgtagctgtactaatttcaacaatgtagatataaaggaatattattagagacaagtctgtggctgggagagtctgtgtggccagcagcctctgatctgtgcagggtataaacgtgtcagggctgagtgctcggggatttctctagaggctgacaaaaaccagttgttaggtctgtacgggctagtcgggg

SEQ ID NO: 147168 - DNA, 333 bp, Homo sapiens
cggctagctttccaagtattaaaggtcagtggtaataatgtaacaatctcataaagcactatcacttcaaagaagcaaactatgttccttttcttcccactccagacatgaacgacagatatccagttaggcctcatcttcaaaggaggtctgagttctcttttttcccagtaactaagaatagattattctacaaaactggaggttcctaataatttagtaatttaacatttttcagatcaaatagttgaatattatgttttgataaaaatacttccacatagactaaatacactgtttggttataatgaggtttcttttttgtgtgtgtga

SEQ ID NO: 147169 - DNA, 443 bp, Homo sapiens
taaacagacataccagtgtcattaaaaaactgtgataaggagattcccagctcgctagtggtctctctttaaaatcagatttattgaagtctaatttacatacatttcagcctttcctgtgtacagttctgtgagttctggcaaacaaataaagccatataaccaccaccatacggaagagatagaatattccatcactcccaaaattcctttgtgtcctattgtactcaatcctcttccccgactcccagcccctgacaaccacacatccattttttgtcctgataattttgccttctccaagctgtcatatacatggaatcatgcagtctgtagagcatttagaatctagcttcttccacgtagtagaagggttttgagattcgtctgtgctgtgtgcattagcagttcttcccttcttcctcctgagcagtattccactg

SEQ ID NO: 147170 - DNA, 198 bp, Homo sapiens
atttaaggaaaagtgcatggtaaatctaatatcttaactatcacagtgcttggcacacggtggacaggaagcattttgaatggtcaggtaataaaggagtatcttgtattagccaaggatcttgtatgcatcacttacgatgttcatatattgtacagtaagaaagttttactttagcaaataatatatatggttttt

SEQ ID NO: 147171 - DNA, 232 bp, Homo sapiens
ggatataactaaacaaaagttcagtgagaagctcttctagctagtggcaaggaagtccaaatatctcagggctcttgcaggccacttaacttctgggcctcagtttttccatctgaaagagatcacttttgtcacttcctctagggaaggaactatctattcagcatactatgccagacatgggtatttatttgttgagtggataagggaatactacgtggagacagaaaag

SEQ ID NO: 147172 - DNA, 540 bp, Homo sapiens
ctcccccatcacttcaccctggggtctccaggatgcctgcaagaggtttggcctcttccatggtggaagcaaatgattccatcacgagaatatcttgagtgaggacacagatgatgtgtgttcacatggccctgctccccatggcctccctaatgcttaatgccgtccttgcattgggtcagtgagtggaagaggaatcactccacctcctcattagtaggaaaacccaggtgacactggaccaggttacgttctagtttctccaaaggtaattcaatggacctcgtttggaatactctggtggaggtcagatctgaaatggaagcttctcccatgctttgtgatctgagccatgatctgtccgctcacctgtttctcacttttcccactccaccctgtgtctcatgatgacgtttgcttttcctcccgactcaaaatttaccttttggggtcttaccctggttgtaggagctggcttttcctggggattaaggcctcagtcttcctcccattcgcactgccttgcactgccccccatat

SEQ ID NO: 147173 - DNA, 384 bp, Homo sapiens
gagaaatgggagaaagatggagggattgcaacatagggctaatggaagttttagaaaaacagcagaaaatcacagagaagcaacatatgatggacaatcaatgagaattttcaaaaactagtctgggcatgttgactcatgcctatagccccagcactttgggaggccgaagcaagtggatcaactgaggtcaggagttccagaccagcctggccaatatggtgaaacctcgtctctactaaaaatacaaaaactagcctggcgtggtggcatgcacctgtagtcccacctacgcaggaggctaaggcaggagaatcccttgaacccgggaggcagaggttgcagtgagccaatatcgtgccactgcactccagcctgggtgac

SEQ ID NO: 147174 - DNA, 623 bp, Homo sapiens
ctcactctttctaaaattcacgcattcattcagtaaatactttttcaatacgtcttatattcagggaactatttagtatgcagaatgaaaccttggttataaaaaaaaggagagagagagagtagtaacatcttcagggctttctgtgtgatcgatatgatgcttagggtctgtatacatcatcataagtatcttcacgccagctcagtgagatgtgatcacccccagattccagtggagctatccaagcctgagagtggttcagtcagttggccaagagcagaggtagccgtgggagggctggggtttggttccagctcagtccaatgccaatgcctgtgctcttaattatgttgcctctgctatactcataactctgttaacagccataaatccagctctgtctgttagacccagtaaatttcaaagtagaaaatcatttttctaataaaactacgcatagaaaaaaagatattaatgctcatacattctaccctcattatgacatcaacctctgagccaaactattttgcacattataaagagctgtttttatgatgaatgggaattatattggcactttaattgagttagaaaccaaggtacatgaatgttagtgcaca

SEQ ID NO: 147175 - DNA, 423 bp, Homo sapiens
ttgatacgataacatttttgtaattactaaggtgacaaagctcccctgtaaatcatccactgacctttccacaatgcatatgtattatcaaaaatcacactgtatacctcaaatacatgtaacttttacttgttaatcatacctgaatacattagctggggagaaaataaaccaacttcaaatgttaggctttatttccatttcattaagttaccataggtctttttcttttttttcttctttgagacagagtcttgctctgtcacccagtagctgggattatagacgtgcactaccacacctggctaatgtttgtattttacgtagagatggggttttaccatgtggaccaggctggtcttgaactcctggcctcatatgatccgaaggcctctgcctcccaaagtgctgggattataggca

SEQ ID NO: 147176 - DNA, 421 bp, Homo sapiens
gggccttagctactgtgaagaacagcacattattactgcaagtaaggcaaatgtttcacttaaaattctctgtcctgtagtcagatcatatgtgctagttttacactggaaaatagtaatcaagaattgagaattaaatgccagagatctttcaagcaagggggagcccagtctatcctcacacactccccagttattgttctgtactgtctagacctattacctctccagcgcttcaactccgtctctgatattcctgcagaggagatctcaaagaggagctttttaatattgtaactagccatttcttctgttatcacttcttttcttctctcttggcaccagttcctattagaatgcccttctctttgaaaatgaaagatggggctgggtgcggtggctcacgcctgtaataccagca

SEQ ID NO: 147177 - DNA, 218 bp, Homo sapiens
cgagctcggtaccctgcctgtaggagacgtgagcgaggatgctggaaaggaggaagcagccggaatgtgtagggcctttgtggccatgccaaggcgcctcagggaatatctgagcgtcttaaataggtcagagggcaattctgaaaacaaactccttctacctgctgtgtaggcaatgagttgtcattgttagatagaggataaaatgaacccaatta

SEQ ID NO: 147178 - DNA, 616 bp, Homo sapiens
acagagcaaccacttggcagatatttggggagttgggagtgaagttctctttcttgcctttccctgcttaggtggtaaatttcaagtgggaaatttacactgataatagactaatgggaaatggcacttccagatgttttctcccagtgtgaagggtgacttatacttgtgagagtatttgttggtaatgggaataagtcccaaaggcaagccacatagcagaagatacgttctcattgaggcagctacacattacgacggggacactgaattgatcatcagttcatttacaagcacatttctaagtgaggtgctctctgctagcagaaatcagatttgaaaggcagtaagatctcactccactctttcagaattcatccaatgaaagcagaaatcacctgttgtcatatgtaaaatttgtgtgtatgtgtacattctgccatcttaaccctgaaatgattatagatccagctaatcattcccaggtaatgctgattagaatacttttttttttgtataggaatgtaataagaacaactgttttagacacctcttctggaaatttagcatggaagctctcaactttatttttaaggcctggaagatgctgtgtctc

SEQ ID NO: 147179 - DNA, 352 bp, Homo sapiens
ttagtcgatctgattattcctcggttcttcacagcagtaacacagcatgtattttctctctcaggcccaggaatagcgccaccatctaccatacacaggtccaaggcttcgatacatgtggaatttaaacagtacagaatattctacttcctctccaggcaatcatcatacttacaagtctgtttctgcctttttcccaaaacttaagcccagagcatcttcccaaattctacgtttgaaagaaccagcttccccctgctcacagatcgcttcaacatccatctgatactactactactcttccttaagagacatttcccttggccttgggaggaaagggtctttcacttaa

SEQ ID NO: 147180 - DNA, 399 bp, Homo sapiens
agtccaagcaaaaactcccagacggaaatccacagtgagcacttactttacaaaaggattccttgcttgactaagggattccttcaagcagcaaaatcccacctggagtgcactgtctgttttatttcattattcacttctctgagcaggaggaggagggggtcaagggagtaacttccaggggaaagtttgtgagaagagatgaggggatggaggggtggggactggactctgttcataaaacatctcctaggagaggcccacaagaaaatggagacgtggtgactttagaagagaaaggtgagcaggctaagcgcctgaggcccatccaatagggaggacatgggaacctgaacagtggagaagaatgggcggcaacaggtgtcccactaggtccct

SEQ ID NO: 147181 - DNA, 515 bp, Homo sapiens
ttccttgttaccattacatatgtatatatgcaagacaactggggcatgtctggctgacagctggagggaaggacataaggtctgtgtgctccagaggagacgctgcctctcccgagtgcgactcccctgagttctgcgctgagtctctcctgcttctcagagaagtcatgtggacatgaactgcaagagtctctgcaaagggacctccagttttgtttggtgggagataaccagctcactggggcttctccacccacacccacccatgggagtctggaaatacagccctgtggaattcttcgttgcccacatcccttacactcctgtccctaggtcagtcagccctgggctctgaagtcctgaggccctgaggccccacatctgctcaggcagagcactagcatcccggggatcaactgctcctccaaagagccactcctgcctccctgaggcagcaaagccgctgagcttctctgggcaaaagagcagaatggcacccggtgaaacctgtgcac

SEQ ID NO: 147182 - DNA, 921 bp, Homo sapiens
tcttagtgtggctaaacatgttttcctcgtcattcttactataaagggaaatgtcttggtttttgttttgttatttgtttttctctctctcttttgaatgctcactctctccccctctctcccttcattaaatatttcccaggctttaggcccgaccatacggatagaactgatatccttagtccaacagaacaacactaaactaagccgatgctattgctctaatttaccagaagcttctttaagaaataaatgtaaagcagggactgaagtataatcctaccatctcatcagcaattggcactgcaatacattatcctggaaacaactggtaaacacagtaagcccatttctgggcttttagaaaaacattgctctcttttctttccccacccagtgtattcccaaggacttaatgctgcactctgacctagccctcaatgatggttaaaactgattctgaaccaaaggtaaacagggttcctccccatgccttggagagctccagtctgcagaaagctaatgaagcccttgaagcagtatcttgtcttccatccacactttattgaaatgcttttgagtcttattgtgttgtaattacatactatagaaaactccaccaacctctatttcaaggtttgggcccatgactctcgctaaaacatttcagttccattttccagaacataccatttctaaatgcatctgtgagggccctccacaagtattttcagtccacatttcagaaaacttgaaagtgacgcaggttcctgacttagttgatggtgggtaaagggaatgccattatgagtggtggaggttgttttcttttttcttgccatattctcagcataatatttgaaacttacaaaagaagtttgataatataactgtatattttatgcctgcactagtggaaaa

SEQ ID NO: 147183 - DNA, 336 bp, Homo sapiens
cgcggggtccaatccaaggtgtttgtaaagaacttcggtgagcagagactcacatggaagcgagcctctctctcccttaggacgggcagagctcaagcccagctcctgactcagtccaccaagcagtctccagtgtgatgtcaattgaagaggacattcttttttcttctcctgaaagatattgtttggtgtggtttactcagaagagatctccactgcctccttcaaatgttctgcttttcaggaatggagggaaaatccttacagcctggaacacttttgaggtttgtcacgaatgtccttgaaagtaatattactatcccctgcttgccacca

SEQ ID NO: 147184 - DNA, 279 bp, Homo sapiens
tttaccaatcaaaaggcagcttccagagcttttaagttctatgacttaaaaagaaatctaggttagatctttccttctagtagatttagtctcaaaggaataaacatctggtgatttgtattataatgagcattactgttagaacattcttctaataaatctattttttagaaaagatgtactgcattgtcattgccatttttattgctgaggtcaatattttccagtgaacataaaatctagttttctaataaactcatctcagatggataaaattgg

SEQ ID NO: 147185 - DNA, 268 bp, Homo sapiens
agtagagacggggtttcactgtgttagccaggatggtctcaatctcctgacctcatgatccacccacctcagcctcccaaagtgctgggattacaggtgtgagccactgtgcccggccctgaattctacttcaaaaaggctcagatctatcctctctgctccacttccaatgcattagttcaggcccttattcattttccacttggacttcttacctggaatttccatccttacattcagctctccccttgtttttgcagtggcctga

SEQ ID NO: 147186 - DNA, 493 bp, Homo sapiens
  misc_feature (470)..(470): n is a, c, g, or t
tccaccagtatgtaggcatacaaacagatatttgcaagaaggaagaaatggacataagaaaaatttccatcaataaaggattgggctgggcatagtggctcatgcctgtaatcccaacactttgggaggccagggcaggaggatcacttaagcctaggagttcaagaccagcatgggcaatataatgaggccctgcctctacaaaaacatttaaaaattaggcctcagtttccatatatgtgaagtgaggaatggggactgtgttttctcttggcctccttccagctgtgatggtctgtgaatctcctggaagccagctctgggtccagtcctgtcttggggaaattagaccagaaaagcacagaacatacacaagaacccaacagcatcatctgatacaagcccatactcccactggcacacagtatctttgcttacctaattacatgcacgcacacgtacagagcctncactagtggaggaaaccgagctg

SEQ ID NO: 147187 - DNA, 444 bp, Homo sapiens
gtgaatatgctgtctcacaaaaacatgagcaaacaaaacatgaatgaagtgaaatggctcaccttccctattatgaactagaagaaaggatgaaggcaaggttggcaggaccccagccttactctgtagtgacaacccagaggtacttttcccggaatgcagggtccagaactgggaacttgtttgatattttgaaaacatacgaagaccaccaatataggtggagagagtaaagtgagaagaggaagatgcgatcaaagagaaaacaagggccagatcatgtgggaccttgtagtgactttgacttttactctgagattggaagccactggaatgccttgagccaaggatcactctggcagccatgtgggaattaaataatagaagcacaagggcagaaacaggaacccaattaagagatgttaactatttaggtgagagaga

SEQ ID NO: 147188 - DNA, 174 bp, Homo sapiens
aatgcgaataataataattttgttagttacttgatgtccattcaacaatggtataggctattgaaagttgaagatgcacatgtcttcaatggccaagcaggtatacaaatgagtgaagcgggctggttttaagaaaataaaggatagtttaggtcccgctaaaaggcattctaa

SEQ ID NO: 147189 - DNA, 352 bp, Homo sapiens
gctcatttttagttgtgcccatcccatacaacactgctttttttctaaaaataaatacttcttgactaacctgcagcagaagtacactggagcttgcttttcctccagtgctgtcaccctcgtattcattcattcctacttcttggctatgtgtccttccttcaactctctggtctctgtgcactgtgtatgctgctttcctataatgctacaccaaccccttttccccagcagccccatcaccatgattgtccactagttctttggcagttggtccaaatatttcatttttctgggaagcctttcttagtttccctgttactccccgctgtctgtactacttaagtctgta

SEQ ID NO: 147190 - DNA, 284 bp, Homo sapiens
tcagatagtgtacaggttttaggactggtacgattctctattcgtaaaccttttgtaatacttgtggatatggtgtgtgtcctagatttaaccatagaacttaattctggttgtgaattcattagactctgaaatctatacttacagctgaagggggtcttcccaactcttcatttgatcttcctaatctcattgggatatagcattcaatctatgtaacaatttgagaactgataaccatattgagcattatgatctacaaacaatttatatgtctccactaa

SEQ ID NO: 147191 - DNA, 432 bp, Homo sapiens
aattagcttgacacaggctgacaacgcttcatcctgtagatattccacttgtgctaattcacttcctctcccaaacgattgaaacggatgcctgaggctgtatgtaatggaatgtacgatggagcctggggcacacccttatcgattctaaatgggcgaactgtaaatatattctgtttagtccatctatagtgacttagtcagaaaaagggcaaaagcggcctggccgtgagctcactggtgccactgcctccatgaatggcaaaggaacggagcaagtgagaaagaggcctcctccatgtgctgtggtgcagaaggaaaagaaaccgtgatcatctgacgccagaagagctcccaggaatgaaatctgtgaaagattctggcatcactcccagcagttcacacactgactgtagagactttgaatggcaa

SEQ ID NO: 147192 - DNA, 712 bp, Homo sapiens
tgagcaccagcagggcctcaccctgacagggaggcctgtctcatcctggcttgagtcagaaagtgccccagtagaggccatgtatgagtaacataatattcaccatgttaaccgagttgaagtgttcagttcagtagtgttggacacactgtacttggtggtgaaagatggaatgctccccgagatcaggacggcggtgagggcgcactttggtgctgtgaattttctgtggaacttttctcatgtgttgcaaaaatatatataaaaaatccaaaggagattaatcttcagaaaaatcctgctaaataggggtaatctcttttaatattttgctatccttccactctacataattcagataatgtttatttatttatttatttatttatttcttagacaaagtcccgctctgtcgccaggctggaatgcagtggcgccatcttggctcactgcaacctccgcctcccaggttcaagcaattctcctgtctccgcctcccaagtagctggaattagaggcacgcgccaccacgcccggctaatttttgtatttttagtgcagacggggtttcacaatatttgccaggctggtcttgaactcctgacctccggtgatccacccgcctcaggctcccaaagtactgggattacaagtgtgagccaccatgcccggccgataatgtatattttttagctattttttttattttttg

SEQ ID NO: 147193 - DNA, 199 bp, Homo sapiens
atcagttaatagactcatcctgggttctaggtctcccagagaagcagttaagggaaatggggagaaaatctcaaggaataaggagggatacagctaaaagggtggaaggttggcatcaaaaaagagaatattagacctttagattaaaaacaaaaataaagggagcaatctacctgtagaaagtaattggtatacttgt

SEQ ID NO: 147194 - DNA, 435 bp, Homo sapiens
caaaatgtttcaaattcttcaatttcaataaagatgtaaaggacctaagggacttgtaagctaataactcatttacgatacttttttgatgatagataaccgatgttatttttggcatgcaactcaggaggaactccaagaattgagtgacatcaatttaacacaacttattcaagtcccatgtacatatttatatgaagaaggttttcagcactaaaatccataaaagtgaaaaaaggaaataaaattgatgttgtatgctctcttaacctaacaatgaataataaaaatccatggatacatgaactaattaacaatgcatcttattaagaagtgaattttcaatagtatttttatgtgtgagaaagtatcaaaatgtataacatgcatgacaaattatatacaaacagcaattgtgataataactcagtctag

SEQ ID NO: 147195 - DNA, 453 bp, Homo sapiens
acttttaccacctgccttcactacctctcccttcatgagcctgttcttcctcttcactgtcctccatcttgcctgcacactgtgacccccgtccctttgctctcagtgcgtattcctacccaggggccccctcccctccagactctccttcctctttccatcttagctcactttccatttcccctgcaaaagcttgctttttctttcctggtttttttctttctttctttcttttttttttttgagacagagtcttgctctgtcacccaggctggagtacagtggcaccacacccagctaatttggtattttttttttggtagagacagagttttcccgtgtggggcgggtctggaactcccgacctcaggtgatagctggcctcggcctcccaaagtgcggggattacgggcgtgagccaccacgcccggccaccgagtttatttcataggg

SEQ ID NO: 147196 - DNA, 261 bp, Homo sapiens
ctctggtgatacaagctttcatcacttggttataggttcctctactgtaaagttactgtttttctctccgtgttctattctatagaagcaaataactaagcctatcccataaaggcaaggtgtgattacagtggggggattccatcccctgtaggagggaatatctacataaatagaatttttctgtgagaaagatttgtctcttctccatttatttatccagtcacttattgtatggacttgtacattgatttcatactt

SEQ ID NO: 147197 - DNA, 243 bp, Homo sapiens
cgccgtgctactcccagctactccagaggctgaggtgggatgatcgcttgagtccgggagggccaggctgcagtgagtcgagaccacaccactgcactccagcccgggtgacagaatgagaccctgcctgaaaaaattaaaataaatattaaaaaagattgatgcctccagaaagagcgttttctgcaggtctttagaggacatggagacactcctggacttgggcaaacctagaagggtgtc

SEQ ID NO: 147198 - DNA, 207 bp, Homo sapiens
ctcggcctcccaaagtacagagattataggtgtgagctaccagtaccagcctccaggaatggcttctaaggcttcaggctgtttatagagaggaaagcacctgggagctgatggcactctcaggtttcccaaaatgacagttctgcatatgcatcttaatcacctactttttttccctccacccccaaatgctattcacagtccttg

SEQ ID NO: 147199 - DNA, 576 bp, Homo sapiens
gtgttagtctcaaattgttttcagaggccagtgtccacaagagtactttctaggtgtcatataggattttcatagcttgaaacttcatgttcagtttttaatctatcttgagttacattttttatatgctgagaggtaagagttgtttttttcttctgcatgtgactaaccatatagtccattatttatcagtaccatttatcagatggaaagttatttcccctttatttctgttgactttgtcaaaaataagttggttgtaggagtgtagctttatttcaagtctctctcttctgttccattggtctacatgtttatttttgtccgagaaccatgctatattggttactgccacttgtagtacagtttgaagtcaggtaaagtgaggcttccaggtttattcattttgtttaaagatgccttggctatttgggctcttttattcaatatgaatttaaaaccattgtttttaattctacaaaaaattgcattgatagtttgatagaaagagcatttaatttacaagttgctttaggcatcatggacattttaattatattgattcttcaaatctat

SEQ ID NO: 147200 - DNA, 626 bp, Homo sapiens
gttgctagaggaacccggttcgcgctgtacccctaagtgctattacctctccgtgtatagcatactagaacctacaatagtatacttccatttctcctgatctttattcatttttgtaattttccactttaaataactattcaaatagtattaaaaactctaccttaaagaggaaaaatgttaagttttccaaattcatccaatattgcttttactgcataatcaatgctgtctatgtagctttcctattataaatctgtaccacccaagccatatttaatttgtgataaaacttcctgcacaataaatagaggcatgttgtaactgggctatttctagatatggattcctaagttactaacttctagagaacactcataaatttaactatttaacaaggatcacagagctgcagcaaatcatgtctatggagttttcagttaagctttatgtgtgttcagaaacagaaaaccaaacaccacatgttctcactcataagtgggagttgaacaatgaaaacatatggacacagggaggggaacatcacacactagggcctgtcgggggttggggggcaaggggagggagagcattaggacaaatacctaatgcatgtggggcttaaa

SEQ ID NO: 147201 - DNA, 729 bp, Homo sapiens
cgtgttgattaaccagtatgtgattatagctagagaacttggggaatgatggttggaataatggaaattattattctttaatttctgcactttttggataaaaatttcagtgaaattttggtgcagaaagtacttgctgctaatggggataaataagtatacaaagttataacgtgtgataaaacttggtaagatcaaggtttctccaaaaataagaagttaagggaaaacaagtaagatggcattaaatattacaaataaaagctctgcttcccaaacaatctcagttagtgtttgctaaaaacaaaaaaattcaactcgcctctgtcttttgttcactttttcttctgaatcatctcctgatactttgcttctgtgttattctctgttgaagtatattcttgcactaatttcatattatgttgactatcccttgctacattttttgaaccattttaatgccttttacactgatatcctttttttttttttttttaaattttaagttctaaaacactatttgactttaaactagttaccttttgtttaaggacacattttttggcccttgatattatatcaatatatacaagagggtaaaatataaaatgttttataaaaatctccgtattaattcagctctagagaagtttctgaaattggtgtgcaaacagtgaaagccataatacagatgaaaaattagagataattttatcatttggaaaggcg

SEQ ID NO: 147202 - DNA, 454 bp, Homo sapiens
cgagattgtgccactgcactccagcctgggcgacagagcgagactctgtctcaagaaaaaaaaaaaagaaaataaaaaaaagattttgataaattgataccaacaggaggcattgtagtaaggtggaaagaacattggattgggagttaggagagtcaggttctgatgctggttctgccaccactcatttgttgttggttgattaattttaatttatgttttgagacagcgtctcactcccgtcgcccaggctggagtgcggtagcgtgttcacagctcactgcagattcaacttgggttcaggtgattcttccacttcagcctcccaagtagctgggactacaggagtgcaccaccacgcccagctaattttttgtattttagcagagacaaggtttcaccatgttgcccaggctgatctcgaactcctgagctcaggtgatctgcctgcctt

SEQ ID NO: 147203 - DNA, 445 bp, Homo sapiens
ggtgggagttgatcctcccacccagtctgcccctggtctctgcccatccaatcagagcccaccctcctggaagagacccccgtgttcagagtgctggcagccctgcacgtgtccagggacactgcatttcaaagaaccactgagtgggtgagctaccttgggcaaaccccccactcctgactctgactgccacgtgggtggcccgacctctgacctgctgtcatcgtagaggtagaaagcaaacaatctggggctcagcacacctgggggtgctcccactcattcagtgtgtggggcccctgagcagaggctgggcattgccactaggacctgagctcctagagaacaaggacctgggtggcctcgcttactgttccagcccaggccaagcacagggtctggctcgtggcaaaccttgaataaatatttgttggctgaaagagtg

SEQ ID NO: 147204 - DNA, 468 bp, Homo sapiens
gagttagtaaacaaagtggttctcaaaatgtaaaattcttccttgactcactaagcaaccttctgattgcaacttgctttccctttttgggctccaagacaggaattctctggccctgctgacaggagccccatgttgcacagggcaactatgtcactcattggaaattaacatgtctgccctctgacttcagtatttctcccaggagcagaggatggaagttcttcacagctggatctgctgtatcattcagaagctggcttcagagcctgtgtagctggaagcctcgggctcacatcaaggaagggaatgccactcagcctctgggcacacagctgcaacttcccctggtgctgtctctcttggtgctaccctatactagccttgtcctgaaacatctaccccattcatttcaccctctctgctactatgtcactgcctctcccatcacagtattccacccaaatg

SEQ ID NO: 147205 - DNA, 734 bp, Homo sapiens
atgaaatttagtattaaaggacatacaaggtatgtcatgaataattctctctttttcaaaattctaatggagctattttttttttttcagctgaggttttaaggactttctggtggcaaggctgatcaaacacatggtaacccgctgtggcctaatatccatgtgactattattttgcttttggctttaaacaggtttcctttgaaaaataagatacagcatcagcatacatattttaaatgaatgaatattacaagaaaggccattagcagtggtggggaattcaatcaacagtataagagactgtgattaaaaattaataaaactgtggagaaaccgttatggctcacattaagaaaaagaaaattataatacaaaagctctaggaatcctgcattttagttagggatattatttatggttttactagcctatacaatgagaatctacaggcaaatttcaccataatgctatttgttctgggtctggcctgaatttcaaagatgttataaaaattcaatttatattcagactacagaatgaatatgtacttcatttataaccaggtaaaataaacttttaaataaaatataatctatgctgaaaatatttggaaataaggaatttagcatattttaaaaagacccaaatatggccctgatttctgatttccatgaagtacacaaatatatactcacaatggtaaaacatatttgtgtctagaattggtgaat

SEQ ID NO: 147206 - DNA, 1024 bp, Homo sapiens
tgaggacagaagggataactgcagggtcctgattagagcccagccatattaattgtgtagctgttcttgctcactctgattcagcctagtgatgagggtcagagctgatgtttttctctttaatcatagtaatgaggataaggtatacagcactgggggtacaatcttgaattattctttattgttgattattcataaagtatatctcaatcaaaagtttctaaatcaaaactgggaaggggatggcttaacggcaaagtgaggcaaagtttttaaaatgtttataatgtaatgtgacatttaaagattaaaatgtgttttatggatttctcatttttcatttgttacatgaaatcttagttttttaccttcaggttcttgggcttaaaaatgtctacctgcccaaaagacaggaaagtcacaaaataatacagatagcaaataaatatatatatatttttttgagacaaggtcttgcctgtcgcctagactagagtacaggtggtataatcatggctgactgtaacttcgaactcctgggctcaagtgatattcctgcctcagtttgacaagtagccgggaccacaggcatgcaccaccacacctagctgcaaataaacattttaaaattattttgtagggacggagtcttgctgtgttgcccaggctggtctcaaattcctggcctcaagcagtcctcccacctcagcttcccaagtagccaagactacaagcacatgccactgtgcccagccacaaataaacatttaaaaaaaatttttttaattgttttttgggagacagacaaaatctcgctttgtcatccaggctggagtacagtggcatgatcttggctcactgcaacctccgcctcataagttcaagcaattcttcgtgcctcagctactcgggaggctgaggcaggaaaatctcttgaacctgggaggcagaggttgcagtgagtgagatcgcaccactacactccagcctggcaacagagtgagactccatctcaaaaaaattt

SEQ ID NO: 147207 - DNA, 551 bp, Homo sapiens
ggcctgtgagcaacaaaggccaattaaaacacagaaatcaaagatgtggcctcaatacctactgccaacgcaccagaaagaattaggctgacaccccaaaatccttacagttgggcaacatagctctggcaaaaagagagtaaaaaagggtaaaagtttgtggctctcccctatgctcctgataaactcaaggtacctgcagtgaagtctagacaaaggatacatctctccaaattaactgtgggtgtgtctgttggtgcatagatagagctgactaaagtcaaataggtaagaagctgttcacatttgtaagagttgtactgcccaaagaaccacccatctgggctcaaagggactgattacctgaaacttaaagcaacccttgggctccaggtcttctataggcaggaaacagcctgggaaatacgctcattccccaaggaaagcaaattcttcactgctctcttacatgtaaccaagaaaggtaatggaaaaggaagtcccagaaagtggagcaaaaggccatggagaacattggactaggaagatac

SEQ ID NO: 147208 - DNA, 493 bp, Homo sapiens
ccgcccgtcttctgcttttgagatccctgtgattacattggcctccctagataatctattttaagatcagctgattagcaatcttaattccacctgcaaagttaattctcctttgccacggaaggtaacatattcacaaattctagagattaggatgtggatgtctttgtagggggagggggcattattctttctaccatatatggagaagtcataaaatactagcagaatagcgatgattgacctgaagccacctaagggatggattttagatccatccttaaggtaaggccataagagttaagtgcagtaaggttggaaacatagagttcagtgctcccttccaaatatatgtataggaaaggagtttttctatttcttacctaatatttctcactcacgcttcgctcccattcataccacattctaagccccttcggaaaccccccaaaataattctcaattgctgagttaactgtggtaagagtgaaaa

SEQ ID NO: 147209 - DNA, 328 bp, Homo sapiens
caaagtactaatgcagtgtgtcagcgtcccaacacaaagccctgagaggttcctcgattcccctgctcacagtctacaaagtactaatgcagtgtgtcagcgtcccaacacaaagccctgagaggttcctcgattcccctgctcacagtctagaaagtaccaatgcagtgtgtcagcgtcccaacacaaagccctgagaggttcctcgattcccctgctcatagtctagaaggtactaatgcagtgagtcagtgtcccaacacaaagccctgagaggttcctcgattcccctgctcatagtctagaaggtactaatgcagtgtgtcag

SEQ ID NO: 147210 - DNA, 550 bp, Homo sapiens
tgtatcaagagacaattatcttaggactgtcttttaaaaaactaaaacagcattctcacttatacacagtctaagatatatagagagtcagcaaatgcaagaaatccattcttaatccacaggaacccaaggcaagcctacaggatgaattgtactggagacctgtgtttattccaagtgactcaaagcactaggcaatatctaagaacctctacagaataaagacctactcagttacacagtaagcaaactttctcacaaagctcaagagataacctccttgagctaaatgagaagacctttctgcatgtatctcattaaaagtagattaacaaaacctgaatagtgaagacaagatgccagtgggcattaggttgcagtaaacctgccagggagacaggattaaactaactacattttggcagtgtaaaagctgttttgaatcacaaggatttcttttaaaaaatcttattaccagtgttaagtatggtaccctggcagctaaaacaggtgaacttgctcactaaaagcaaacagttcattgtttttg

SEQ ID NO: 147211 - DNA, 261 bp, Homo sapiens
ttctgctcttgagcctaaaagtgtttggttacatcccacataaagaaagagagggaagaaatgaaaaaaggaaaggaaggaaggataatatggcatcaaagaaggtataatttttttccctctaagtgaggtcagaaagggcagtgaacagggattacttcgagatccagaatttggccctcagcctcctgagtgtttttaataccccaaagaagataatacagatcacagccattttggtaacagccatttaggtaacag

SEQ ID NO: 147212 - DNA, 725 bp, Homo sapiens
  misc_feature (490)..(490): n is a, c, g, or t
aaatgtatagcaaaattttcaaaaccagctcctcctaccagacaagaaaattaacattttttagggcacagaactgaaagcatttttactgaaatctaatccaggatgaaacctaacagttaaacattcttttccttctctgcttctttggctctctatcccagcacaccttgtcccaggctaacttgagtaaacatacacatgtgaccacatgagggcgggaagaacaccaagtgggggtggtgaaattctgaatggaatgcagccccagctagttagggggccccgggctgagacctctggcactggcagtagacttatacaggcaaagaagccaaaacaatgagctcatgggcaagaatgcagcctgtggggaagtctgggcagctagagcaaactggttttttgaatcaggatgggaatagcaatagttgagtctcccacgggaacaggatcagggagagtggaagccaccattcagtgcaaattnagggtccagttaaataacttttggaagctcttattaaaattctgttctgcagacagcatagtgctcttaggcaaaaccttggttcctttccctgactatgtaaaacctagagggtgaaggaccagtgaggctccagtgacctaccttaggtgatgctcttaaaagagcaactttattcaaaccaggcctgccaatgccaactccttcagtctagatccaaagatggctatgatcc

SEQ ID NO: 147213 - DNA, 741 bp, Homo sapiens
tttcttctggcatgtgttaaatttagtacagctctccataaaagatgatgtctgtccatctgtctgccctcagtcagacccctcactaggggatggcagggagctcaaatgcactgacagatgtgccaccccagaggtctgtctgccgtgagtcagctggcatgctccagcaggctccttcctgaggctgaggggcccggggctgttggggggtgttagtttcccagggctaccgtacggacgatctcagttctggaggctggagtccatcatcagggtcgtgccccctctgaaggctctgggcaggtcacaccttgcctcctcagcttctggtggtgttgccagcagtcctgggctcaccttggcctgcagatgctccactcccatctccgcctccctcttcacatgatgatctcccttgaaggacatcagtcattggattagggactgtcctaatccactgtgaccttgtcttaacctaattacatctgcaaagaccctgtttccaaataaggacacattctaaggtttggggtgaacatgaattttagggagacactcttcaacccagtacagacggtgtggccagctgtggagagggggctgccaccccttgcagggacctgcctcccatggccatgtctgcacactggccccgagccctcccaggaccccagtgtacagacacattcctcctgccccccagctcacagcacccaacactgactcaggcacacctgg

SEQ ID NO: 147214 - DNA, 506 bp, Homo sapiens
tctgagactggcaggggggtgtgaggcgcccggttggggcgtggcgtgtgtcagccgctgctcttggtggcggctgcttgggttggtcaccctggtctcgtctcttgccaggcctgggttcctattctccagccccgccgggctgcggcccacactttgtttacagtcttatggtcaggctgagcagtgatgtggcctaggtaggtgccgcctccttctccagggtcctcccacccgcctgcaccgggaggtggacgtggcttcctctgccgtcccgggcgggggtggacgctggcggtgccctctgggaaggggcccttgccggtgccaagacattggccacaagccttcagcgggcccaggatcccccagagagagcccacgcccacctgtgcccacgtgcacccgaatgggaacccagaggtcgtgggaggggcttcctgcaaggtgtgcagcggggtggggagcggcgtgagcagctctgtccttgtaaagacaccgctgtc

SEQ ID NO: 147215 - DNA, 176 bp, Homo sapiens
tactgatttgatccgcagcacatcttgccttcccagttaatggattattacatgtgtatgggaccttgactctgggcatctcttcccattgcttcaagagagggtctaatcagatgatcctgggagtctcctcggctctgaaggtctggcttcctctgcttcaaaccactcagagg

SEQ ID NO: 147216 - DNA, 375 bp, Homo sapiens
gaaaaaaaccccagtgtatcaaattgaagagtgttatgcattatagctatgataacattgctaatgacattattcaaacaagaaagttgtagtcaatcaaaatacccaccttagcctctgaaaggtctttcaataatgaaaatactttttgtaaataagggtgtaattttaagaggcatatatgaccattaattaaattgagtttaagctaagacaaagcaatggactcaccactcgtacaaaagtgcataagctcatgaattgtagctagacgtttagtgttgttccatggtgggggtagagggaattgaagaaattcccacagtggcaacttggactgcatctcctgctcaatttgaactggatcaaaattct

SEQ ID NO: 147217 - DNA, 772 bp, Homo sapiens
gccctccagtgggaagtgagtgatgaccctgaagtgaggactcatctctagatctccaagggctgcagctcagccagcactttacaagggtgatctggagccaaactggcctgttggctgaccataggtgactctgggtagcccatacccaggctcagcggcagttggggagctgcctcgatttctggttacagaattcctggaactgagtcactgcagtaattgctgtgatgaattgtgtttactttgtgtgggattccaaactgtagcagcagtgactacagctggaagacagcatgatcagcagcttccaaggcagagcctggcgtcagaaagctgcattgcgctaatgctgaagcctgtgggagcctgttggagagacacttggatgtttagcgagctggtgactctccttgtcatgagtaagcttaggactttgggcaagtcatccaaactcttctgggcaagtcattctcctgcttggatgccttgaggcagagaggcagtgaggtgaagtggtcagtgcgtcgactctgcctctagcctgctggggtttgaatccacctgtgtgatgttgtatgatattgacctttctggctctcagcatcctcttgtgtgaaataggagattttaacagtatctatttcgtagggttggtgtttgaatgagttaacatatgtaaagtgaatggtacagtgcctggcttcctggcaagattgctatcaggattaaggcaggttaagcccttggcacacactaagagctcaataaa

SEQ ID NO: 147218 - DNA, 440 bp, Homo sapiens
acaggcaaggtttacctaaagcaccagggtggactgagaagaattctcatcatagttgggagccattggatgccccagagggtaagctgcaaggctctaggtgtgacaacagcagttgcagcaagctccctccacaagaaggaagaggcattgctcaagaacagctgttccaagaaaagaaggatcctgctaacccctccccggtgatgcctggaatagccacctctgagaggggtgatgaacacagcctaggctgtagtccttcaaattcatcagctcagcccagccttcccctgtatagaacctgccaccccataatgcctgttgcttcttcatttgtgcttcactgtcctgatcctgtgcagaaaactaaccaatgcctccaaggccaaagcctcaaaacttcattgactttaaaagtggacagaggcagtgaggag

SEQ ID NO: 147219 - DNA, 506 bp, Homo sapiens
aaacatcctgaactctaagttgtaggcagtaactgggcaaaactttaagttgtttacagagggaagaaaagtgaatttttcatatataaagaagtgtgcaaattgtatttcatgagtagtcttttgtcttctggaatggtgatatatacaaagtaatctgggaagatacaatttggtaatagtagatccttcgttaacttgaattattttttgcaggaaagatgcgtctttagccaaaattacttatggtaaactgttatgtaagcaagaaatcaccttctacttggtttaagctattcagtgtactctctagatagatatgacacaaagctagcattatgatacagtaaaccaagtgttaatgtaactttatgttgattttgactacattctgaaaataataaaagtcatctggtattttaggcttaccaaagaggccaagctttgaaacttctgggggggcccagtgcccaataaagcctatagggaggcgaatacaaatcaat

SEQ ID NO: 147220 - DNA, 360 bp, Homo sapiens
aaagaaagagaaagaaggaaggggatttgtgggggatgtgttaaatttgagacaatcaagtgtgatatggagaagacagttggatatacaagactggagctcagagaagtctgggtttgaagatatacatttgggagttggtatttatcaccacaggagtggataagtttccctagaaagtgaaggagataagaattccaaggcctgaatctggagcaattcaacatttagagatctggtcaatgttaacaacttcatagggtgttcgtttctttctttctttctttctttctttccttccttctttctctttctttctttctttctttctttctttctttctttctttctctctctctc

SEQ ID NO: 147221 - DNA, 329 bp, Homo sapiens
ttggttcccaaaacaagtttgtagttggtagcagcagcaataatgtgggccatggaagtagtactgggccatggggtttttcccatggagccataataagcacatgtcaggtctctgtggatgctcctgaaagcaaatctgaaagtagcaacaatagaatgaatgcttggggcactgtaagttcttcatcaaatggagggttaaatccaagcactttgaattcagctagcaaccatggtgcctggccagtattagagaacaatggacttgccctaaaagggcctgtagggagtggtagttctggcattaatattcagtgcagtactata

SEQ ID NO: 147222 - DNA, 745 bp, Homo sapiens
gaggattgattgagctcaggcgttaaagaccagcctgggcatatagtgagatctcctctctacaaaaaaaaatttaaaaattagcccagtatggtggcacatgtctttagtcccagatacttgggagattgaggcgggaggatcgcttgagcctgggaggcagaggttgcagtgagccaagatggtgtcattgcactctaacctggtgacagagcaagaccctgtggaattgacactaggaaatgaccaaatattgctactatgaggagagcagtcaaaaggcttgaagttgtttgttttcgtactagctgtgactaaaaactttatgttggtttgtaaactgattgaatgtagttccaaaaagaagttccagaaatgtttagaatattagcagcatggccaaaatgatgagcagaagccttcctaaagagacacctcaaaaagggcaacactcttttgcatgattttcttagtacttaatgagccttgtacatccttgctcgtaggaggcagttaattactcagttcagccagatgcggtggcttacacttgtaatcccagtacttttggaggtggaggtgggacgattgcttgacttcaggagttcaagacaaacctggacaatatagcaagaccccatctctatttttagttttattttctatttttttgagatggagtctcactctgtcgcccaggctgaagtgcagtggcacaatcttggctcactgcaagctccgcctc

SEQ ID NO: 147223 - DNA, 475 bp, Homo sapiens
agtatttttaggatgcctgatttagtaaaaataacctaaagtaattctttgcctttttagtgaatttgccagcctcagatctcagagttctttgaaaagattaattcaggcaggaaatgtaatgctggtgatacttaactttaccttttcaattctttgctgaatgctctttttaacaggaccacgaaactttttttgaatttcctacaacagccctgtgaaataggtagccaggaaggttgtagccagattacgacatgctatacaaaagcaacaaataggaacaaactggacattcacaagtccctgaagttacaggagagcatagaaactgagcttagaactcttttctggcaagctctgctcacctcccttcccagcatacagaacagtgcaaaaatggccagatagtttccatgacagggtaaaaacttgcccagctgttcacagcaacacaaatttgaagtttaaaaaa

SEQ ID NO: 147224 - DNA, 306 bp, Homo sapiens
  misc_feature (30)..(30): n is a, c, g, or t
aaatgtctttaagtttttcaaaatttacancctatgggcagctttgttaaggcctgcaatgaggcaagtaatcatatggctacagtacacttggccaggttctgtgggttgggaacaaactggacattcacaagtccctgaagttacaggagagcatagaaactgagcttagaactcttttctggcaagctctgctcacctcccttcccagcatacagaacagtgcaaaaatggccagatagtttccatgacagggtaaaaacttgcccagctgttcacagcaacacaaatttgaagtttaaaaaa

SEQ ID NO: 147225 - DNA, 502 bp, Homo sapiens
tacacttttgtgcaacgcatgaaaatactatttttgtgccagtcttaccaacaaacttggatatttatcaagtgctgtgaatgcatcatctcatttaattatcataccaacatgcaaaatagtgatattattcccattgtatataactgtgctgtgcgctcacatgactgtatggaagagctggctttccaacagttatgctgtgctgcctctttaataattcactttaccttaaatttagttagttgtttctttaatcagatatttagaagattgtcattttggttaataatatattatatacacacacatactctgcatcttgtatgtgtatccaacttcattttgaaagattaaaaataagtttgtaacgcctaaatatccttattaaaatactgcaaatcccaaaaaaaaacggagtctcctttgtttcttggctgtggatttttttaaagttatctttaatttatcatcaatttctgccttgatttcagttaattag

SEQ ID NO: 147226 - DNA, 517 bp, Homo sapiens
tacacttttgtgcaacgcatgaaaatactatttttgtgccagtcttaccaacaaacttggatatttatcaagtgctgtgaatgcatcatctcatttaattatcataccaacatgcaaaatagtgatattattcccattgtatataactgtgctgtgcgctcacatgactgtatggaagagctggctttccaacagttatgctgtgctgcctctttaataattcactttaccttaaatttagttagttgtttctttaatcagatatttagaagattgtcattttggttaataatatatgtgtatgtataaatatatatacacacacatactctgcatcttgtatgtgtatccaacttcattttgaaagattaaaaataagtttgtaacgcctaaatatccttattaaaatactgcaaatcccaaaaaaaaacggagtctcctttgtttcttggctgtggatttttttaaagttatctttaatttatcatcaatttctgccttgatttcagttaattag

SEQ ID NO: 147227 - DNA, 728 bp, Homo sapiens
atcatccccagataatccacagctaccttctttttcagctattcagatataaattcaaagtttgcctcttcaaaaacacctcccctgaccatgcgaacttacctactttttcctcattccccaaccaccctagatttagtcactttatttccttcatggaagttaccactatctgaaattacctcaatctcgtgttctttcattttttaaaatgtctacctaacccactaaaatgtgacgtctcattcactatgcctatatcatgtgaaataaaatcactgattgtgtaaaatatctcaaatgagtgaaggattgggacatcctgaaatcttgtaaaatttcctcacaggccttctaaaagagggcatctatttggacatttgtggagggttagcaatttatgggaagagatgagacacatgtgtgcactgaaagttctgagcctccatatgctttcttttcttttcagtctcagtgtagtccctatactagaatgtctgatcttgctgccttgtatagatcatattctcattctacatgaatagttttgcacatttagtttatgccacctgaactagatgttttttccccctgttaatccttataaggataaaaacaatcactagcctttattgagtgttaaccacttgccagccactatgctaacagccttaatgcctcagcacctttaatccttgaaacaactttatgaggtaggtattttattt

SEQ ID NO: 147228 - DNA, 374 bp, Homo sapiens
  misc_feature (301)..(301): n is a, c, g, or t
  misc_feature (316)..(316): n is a, c, g, or t
  misc_feature (350)..(350): n is a, c, g, or t
atacatttgctcctctcatgacgttaatattctaaaaaaacaaaggtatacaccaatccaatcaatacattctgaaactcatgaccatcaaagttatggaaatgtattttttacatcttcaatgttcagctaaaaatcaataaaaatccattatctaatatttcaaccgctacacactagagaaacaattagaaataaatctctgcaaagaaaaaagttaaactgtcttacacaattactaattattgatatttatttgttataatagtatacctggtgggcacttactggtaattaagtnctaaaaatataaatntaaaaactagttgttttttttttttttggaaacngcatttcagggtccggagcccgaa

SEQ ID NO: 147229 - DNA, 1280 bp, Homo sapiens
tgtcctgagtgcctagcacatagaagatgctcagtaaatattttttgaatgaatgaatgtagtctgccttctccaatttttttttcagtgaatttcccataaagcaacacatgcatagtgttttagcatttgtggatctaacgttgacttatcccaccagcaagggagaagttcaagaacatttatagtttataatggagataataatacagagagtggttatgagaattaaatagggtgctctctgtaaagtactaatggataggaccaggtcacttaactgacaaaaaagcctggccaagtgccctgattcacatctgaatgatgtgaattgtattctagaatcttctctctttatatttcagtttttaatcaagagtaggtgtggcatcacctgggagcttttcaaaacatacctgggttccctggtaaatatcagtgatatactgttactatattttgttctttaaccagtctgcaaatatttgtcccttaatgtgggtgataactatttgctctcccccttttaatgccttcttgctgtttgggacatctttcatggccccttctagtcttttttcctatgaggttcttgctgaaataacttctaaggtgattttgaaatcctcagagccacttggatgcacgtaattgaaccttttactaaatccacaaaatcaaaggatctcagtcctttaccttctgttttccagacaagagaatgttgtagtcatccctacagcaatccttatagcagtcattttattttattgtttttaaaatacctgatttttattttttcatatgaattatattaaataattattatgccccctctagtcgtcacacaaatctgagaagtggatgagcactgtatttgatctcttggacacttccctttattttccatggctcctcatgtctcagacccttaaagtatttgcattcttttcttttctttttttttctaattgtattttatttttacttccaggatacatgtgcaggacatgaagatttgttacataggtaaatgtgtgccatggtggtttgctgcacttaccaagcagtcattttaaagttttgcttattgtgtttctaggctccttttgtgtccttcaaatccaagaatatctcaaaaacatcagactcactttcctcctctttcttaatagagcaagaaacatttgtagatttttactgttgcaatttactgtgcaagcaagtgctgtgatttgcaagaaaaaaaagatgattattttagagatggtttatgcaac

SEQ ID NO: 147230 - DNA, 489 bp, Homo sapiens
aaaaaaatattgtatccatgctacagtgaagcctctactagttttataaaccatgcaagaaaacaatttttctattttagttatatcttcataatatttcagtgtcttgagaatgatagatttctttggctgaaagggaccttttagaaatgatgaaattgtatactttcattttacagatgaagaaatgaaggaaagaaagaggagataatgacatgcttaagatcacatttttattgataaagttggaactaaaatcctgatttccttattctaacacaggcctttttccatcataccaccttaggggacagattgacatagattgttgttctattctttcctctgtcaacaatgtttcttcatgtcagtcctatagatctaatttggcaagcaattaatttcaagaataatatcagtgtttcagagaagtattgcttattggtctgaaggaagattggtatgtatcttaaacttactattttgttg

SEQ ID NO: 147231 - DNA, 266 bp, Homo sapiens
tttaagtaactatgaaagagaggctgctctaaacttaccctaacaaagcctaaaagcaagactacaaattactgaagtgatcccaagtaaatcagctgcatgacagaacaaagtccaccacttttcaaaggaatccaaaatatccagcaatcaacaatgtaagattcacaatgtctggcatcttacccaaaactatcaggcaaataaagaaacaggaaaaggtgacccataactccaagaaagctcaataaatttagacccagaag

SEQ ID NO: 147232 - DNA, 309 bp, Homo sapiens
attcacttgcttcagcctcccgagttgctgggaatacaggcatttgccaccatgccctgctaagttttgtatttttagtagagatggggtttcatcatgttggccaggctggtctcgaactccgtacctcaggtgatccacccacctccgcctcccaaagtgctgggattacagacgtgagccaccacacctagccagaactatgccctttggatttgaagttgggatgtaaggcaggacaagggtcaatggttgatgaaagtgggtaaggatttgggactgaagggacatgacgttggaggaatagga

SEQ ID NO: 147233 - DNA, 348 bp, Homo sapiens
gcagcgttggatattagatcgttatttacgtttatattacgtcccaaataaacaggttttaaaacgatactacaaaacctaaaagcaagaattgctcgcattgaattctgatcttgggtactactggggttcgccctttcaatgttctcagctgttatttttaaatctgggacgaaccattgtgacgtttacctccccaccttcctaattttaatgcattccattcgatcagccctttttctcaccttattgtcatcgctttttcagacacgacaagacaaatcacataatagtttcctggaaatgttgcattatgtaactgccgaatttgctggcagtgagcataga

SEQ ID NO: 147234 - DNA, 468 bp, Homo sapiens
taagctccgtagaaaggtttccattcctcatagcatcccctttgggtggacaaactgaggcatgaagaggttaggtaatttgctaggcagcctgacttcagaaaggcctactacagaagccctctcaagaatctccttctgggccagcgtggtggctcacacctgtaagcactctgggaggccgaggcggatggatctcgtgaagggattctaagggtgggactaggggcaggagttagggaaggagttgaggcaaagagttcgagaccagcctggccaacatggtgaaacctcatcactactaaaaatacaaaaattagccaggggtggtggcgtgcacctaatggtcaccgtgattgtcccggccactcaggaggctgaggcacgagaatcgcttgaacccgggaggcagaggttgcagtgagccgagatcgcaccactgcattccagcctgggtgacagagcgag

SEQ ID NO: 147235 - DNA, 300 bp, Homo sapiens
ccagaatcaagaacaaaaaccatgtaatcatttcaatggatgctgaaaaaacagtcaatgaaatttaacatccctttatgataaacaccctcaacaaactggatatagaaggaacatacctcataataataaaggccatatatgacagacccatagctaacattgtactgaacagggaaaaatggaaaacttttcctgcaagatcaggaagaagacaaagatgcctatttacatcacttttattcaacagaatactggaagttctggccagagcaattaggcaagagagaaacataaagg

SEQ ID NO: 147236 - DNA, 199 bp, Homo sapiens
ctgaattgcattagatttatgtactttcagaaaatagacatttttatgaaatttgttcatccaaggacaaagtatgcatttctatttgctcctatcctattttagattttcttcatataaatcctgtgcttttctgttgattcttaagtatttttgattttgtgattactatgaatggaatttcctcatttccatttct

SEQ ID NO: 147237 - DNA, 762 bp, Homo sapiens
aggaaacgtacaatcatggcggaaggcgaaggggaaacaaggcaccttcttcacatcatggcaggaagtagtgccgagcaaaggaggaagagccccttataaaaccatcagatatcatgagaactcactcactatcaccagaacagcatgggggataccacacccataatccaattacctccacctggtctttcccttggcacgagattatggggattataattcaagatgagatttcagtggggacacaaagcctgaccaaatcagcaattctcctgcctcagcctgagtagctgggattacaggcatgagccaccatgcccggctaatttttttgtatttttaatagagacgagttttcaccatgttggtcaggctggtctcgaactcctgacttcatgatccgcctgcctcagcctcccaaagtgctgggattacaggcgtgagccaccgcgcccggcccttgaaaagtttcagaattactataaatctgttctgctgtggagcttgatatctggggttcagagtgggacattggatcccagtgtggcctgcagggcacagatggcttagggggctggcccatgcaggcgggatcagaggcttattcagactgctgctctgccgaattttttcatcatccctgatttatttgggtttttgtttgtttttgagacaaagtctcgctcttggagtgcaatggcatgatcccggcttactgcaacctccgcttcatgggttcaagtgattcttctacctcag

SEQ ID NO: 147238 - DNA, 197 bp, Homo sapiens
tgaaaaaatctcttaaaataggggaaaacgttaaaggttaaatacaatagtatgtagaaaaagtactttagagaatgtacctaccacatgtagtcatgtgtgcttaggagtaatctttttttcaatagggagtaatctttttaagagcagaaacggaaattgacctgcccgccatgtgttaatatccaccgcgatgg

SEQ ID NO: 147239 - DNA, 175 bp, Homo sapiens
tgaaaaaatctcttaaaataggggaaaacgttaaaggttaaatacaatagtatgtagaaaaagtactttagagaatgtacctaccacatgtagtcatgtgtgcttaggagtaatctttttttcaatagggagtaatctttttagggagtaatcttttctcaataattcttatggt

SEQ ID NO: 147240 - DNA, 490 bp, Homo sapiens
agatgtgaatatatctcgtctcacttgcgcagatgggaaggagctgggaccgagaaagatgtggtggacgtcaggagggctagggaggctgggtctgagggaggcggtggggaacgagtgcaggatcgccaggcacaggctccggggtgagtgtccaggattcctcatgctcccatcggccccctcctgaaggttgatttgtccggagtcaggtttgctaggtgagtggggcaccgggacccagatactagtccagctgtcttctgagcccacgcctaagtaccttacaggtactgttagctcagtggatgctcgggtaacttccatgaccggatggtcagttctgaggctgagagagaggccacgccgccggccagtgcagagctgggccttgggtgggttgcagacaagaaaggctgggagtgctgcctggagccccaggtgcaggtggaggggctgagggttactctgggagaaggtggattctgaa

SEQ ID NO: 147241 - DNA, 338 bp, Homo sapiens
ccctctcccgccggtggacatcaggcggtgtccaggtaaagctgctgtgagcactccgggaggtgacccttgctggacgcatcattcttttgtggggagatgccgaggagttgccattgctgggccacgtgtccactcagcagacactgacggtttgttaaaggggttgcacccacttctgcccatctgctccacatccacaccagcgagtggcactgggagtcttgaatgtgagatgttttgttggttgtgttatctcgctgtactctttctcaattgaggtaaaaattacatacaccaaaatgcacatacaagtaaaagctactcaatgagtctta

SEQ ID NO: 147242 - DNA, 208 bp, Homo sapiens
cacgtggacatacagaatgtccccacgtgtagcatgctctaaattctgatttgtgacagccgttagagcatgcatatgtacaaaataggctgttgctttgcagtaagtttggttcctaatataagatgtattgtttttaatcttttaaaataaattactagtggaaaattcaggtcaaattatttgctatcaagcattttctttagac

SEQ ID NO: 147243 - DNA, 134 bp, Homo sapiens
gaggaaagatagagtcatgtgtcataagagaaggctagtaataggcttgagtttcaaagaaaagagtttatcagactgaggagtaaagaacgttggtaactggccttcaaaagatagttaagattgcatccgga

SEQ ID NO: 147244 - DNA, 410 bp, Homo sapiens
attggtaagactcccaatcaacagtaggctattagtagttaattctcggggagtcaaaagtgacacacaaattttcgactggagggtaggtaggcattcctaacccctgagtggttcaagggccactatatgtgcaaatcaattgtttggcaccttgaatgtgtgttctctttctcttatttatatccgtctctcttaaaaactgagatcagaaatgcaatttagtgttgaagaaatacacctttcagccaggcgcagtggctcattcctgtaatcccagcactttgggaggctgaggcagggggatcacttgaggtcaggagttcaagaccagcctggcccacatagtgaaaccccatctctactaaaagtacaaaaaaattagctgggcgtggtggcagctgcctgta

SEQ ID NO: 147245 - DNA, 250 bp, Homo sapiens
caccattgccactggacactttacttccaattttgcttcctgctctaaaagataaccccttccttcctttcccacattctccctacaacctcgtcttcttttgagttcatccactttctctcatcattgtccatctctgcttcccaaaaccttacatagtatagaaattggccaatcaagattatcatgtggaagaacatgcatttactgaataaggcagctggctcctgggggcagaaaggtgattaga

SEQ ID NO: 147246 - DNA, 290 bp, Homo sapiens
atccacgaaggcctcaaggaaaacccctgttaaccctccactgacatctcctggatgatctcattatttgaaaaatagtctcaaaagaagtcacagctgggaggtcaacaagaaagaagggttggcaagatatttcctttttcttctttttaattgcaaaaggcgtgccagagagcaacctacagccagaggcagagctcactcactgctaaactaagggaaaacgctcaggaggccgtcaagatccttcccctggctgcagaactgtacggaaagtgagctgaactgta

SEQ ID NO: 147247 - DNA, 429 bp, Homo sapiens
gtaattttctgtaaggagcatctgttgcttcttgtaaaataaaaaaaaagtggggaatttgattttaacttttcaaaaatgtcagtcagggaaaatcagggaatgtcgtttggcttcagtgggagactaggggacaaaggaaaaattcagatagggcaggggatctagggtatagaggccttggaagccgggctgacaaatttgacccatcattttgggtaagagggagctgctgtggctttaagatgggaagaagagaaagaagtagaaatctgccgtgcaatccagacctgagataaagaagacacggtcccaggtggaggcaggggtggtgtggaagacatggctaggtgaggagctatttgtaaagacagacttagagatgacgaagcaaagatgagctggttggaaagggcactgactagggcc

SEQ ID NO: 147248 - DNA, 222 bp, Homo sapiens
catggatttgctggtgcagtacaactaggcttaatagggacatgaccccaaacccaaggagcttattgaaagacatttagcaactatactaataaattgcaaaagagatgtgttttaaacaaaatgaaaacagggtgctatgaatacacattagggaatcagggagaaactgtggggaagtgaaatttaagatgagaaagaaaagataagtagaacctacga

SEQ ID NO: 147249 - DNA, 317 bp, Homo sapiens
cactgctaataccttgatttcagatttttgccctgcagaaattttgagacaatacatttctgttgctttaagccactaagtttatggtaatttgtacagcagccacaggaaacgaataccagtgtctcataggcttggcgtacattagggggtggaggattggaatcatgggggaaataacagaagctgataaattaatccaagagaaaaatcacgtggcttgcatcaacagcagtgggaatagcgagaagtgctctatttagaacattctgaaagtagaaccaacaggatgtgctgatagattagatgttggagac

SEQ ID NO: 147250 - DNA, 335 bp, Homo sapiens
caccaagcccaggaacacctggagccaccagaagctggaaatggcaggaaggatcctcccctagagtctctgcaggagcatggccctactgacaccttgatttcagagttctggcccatggggctgggagataataaatttgtattgccttgtatcgcctggtctgttgttccctgttagggcagccccagacaccagtgcaggtctcccatcacagcactgctgtgaggctgcatgagatgagaaggatgcaaagggatggcgtccagagctgcgctgctgccaccaccctcagctccttggttagatattctgaccttctgacctcctggcag

SEQ ID NO: 147251 - DNA, 345 bp, Homo sapiens
aatggaatcggaggcactggcccttcccaactggaatctaatgccaagcaaaccacgtgggtgctgggtccaaaaagaacgtgcagcagcagacagcccatggaaccacccaacaggaccccataggaccataggcacatggctcccacccagcaagccctccctgccctgggctcatggatggagttgcctgtcccctgccattcagtcactaacacattcatttattccaaagtctagactgtgtgtctaccaaggagaggcacaagagagacaaacattcaaaaggctgttctgagaaaggtgaggtggtacatgtctgtagtctcagttacttgggaggct

SEQ ID NO: 147252 - DNA, 725 bp, Homo sapiens
caattatttattttatacatcatgtctttagtgttgtgtctatttttatttatatatttgttgcatgtagatgtccagctcgtctcgcactatttgttgaaaagttgatctttgcttcattgtattgcctttgcttcttcaacagatatcaattgactatattagtatgggtctacttctgggctctctattctgttccactgattattttcccattttttcaccaaccccacactgtcttgattactgttttgattacatgacttacttcatgtaggtcataaagctgtgttgtgtcagtcctccaattttgtacttcttcaatattctgttggcaatttaggtcttttgactcttcatataaagtttaaaattagtttgttgatatccacaaaataacttcctggattttgattgagattgctctttctaaaaaaaattatttggctcctctgcttctccctcccctatgcccaaacttgcaatataaataagaattattcttcaatattacacttgtttcttctatctgtggcagggatataaactctcatgaaactgggagagggagtggtcttgtgaaacaaataatgatttataaattttatggtaaaattatgaatttggcaaataataagttgttatatgtaacttgagctctttatatacatacatgtttttaggtttagaagagtttaataactttataataaaacaataaattc

SEQ ID NO: 147253 - DNA, 352 bp, Homo sapiens
gagaggcgtaggcaggaagattgagcatagaagtttgagatcagtctgagcaacagagcaaaaccccatctcttgaaaatataaataaaaaactaaacgggcaaaggactaaacagacatttctacaaaggagatagacaaagccaacaggcacacaaaaagatggtcaacatcattcattagacaattacaaagcaaaaacacaatgagatactacctgacacccacacccactagaatggctataatttttttttttttgggatggagtctcactctgttgcccaggctggagtgcagtggcaccgtgttggctcattgcaacctctgtctcttgggttcacgccattct

SEQ ID NO: 147254 - DNA, 370 bp, Homo sapiens
accacgatgtgaagtaggcattactgttattcacattttttaagatgtggaaactgaggcatggtaatcaagtatcttgcccaaggttgtacagccagcaggtggtagaacagggatcttgagcccagccccagtgtctgtgtctaaccacttcgccaggtcggcttcgcatggggacaacacttgaaactctagtttgttagtctggtgcccctgcttccgcctgcctccctcagtctttatggcccattggaaaaagcaagccagagctgtggctcccagggtgacgatccttcagctgcctccttggcactgtcattccctcctcccatctcctgccaagggctgcagccaagaataccacagacgg

SEQ ID NO: 147255 - DNA, 334 bp, Homo sapiens
tcactgaggtctcatgatttaatatattctcctctctttagacatctatttaatatttttcccatatctgaaaaccttgcttaccttctcaccggtagcgcaggactttgttttacagattcacctgaaaaaaatagaagtaattagaagagagtttcctcatcttccctccagcaaactgtagctgagctacatcagaattcatattctgtgctgtactttctgttaaaatgatgagctatatcccttttccgaattaagatcagaattttcacttgtgttctgaaatctacttcttgtcctggtgcagtggctcacgcctgtattcctataa

SEQ ID NO: 147256 - DNA, 723 bp, Homo sapiens
gtggaaccccgtctctactaaaaatacaaaaacttagctgggcatggtggcgggagcctgtaatcccagctacgtgggaggctgaggcaggagaatcgcttgaagccgggaggcggaagttgcagtgagccaagatgccgccactgcactccagccggggcaacagtgcaagactgtatctcaaaaaaaaaagaaagaaagaaagaaagaaagaaagaaaaaaaccgactaaaatgggccaggtgtgacccattgtcctggcttgtcttgggtaactgggactataggtgtaaccactatagagaggaaattcacaggtctacagtccccattccaaataatactaaactctacaagctcacgcctgtaattccagcactttgggaggccaaggcaggcggatcacttgaggccaggagttcaagaccagcctggccaaaatgatgaagcttcgtctctaataaaaatacaaaaattagccaggcattgtggcacatgcctgtaatcccagctgctcgggaggctgaggtaggagaatcgcttgaacctgggaggtggaggctgcagtgagccaagatcgtgccactgcactctaggctgagagacagactaagactccatctcaaaaaaaaaagaaaaaaccactgaaatggactagggggcagtggcttgcgcctgtaatcctagtactttgggaggccaaggtgggaggattgcttgagg

SEQ ID NO: 147257 - DNA, 476 bp, Homo sapiens
ccctgcccatgtagcatgttatctttgtacctggtaaggagtgaaatggcttccaattttacggactggttgcttttcattcatatcttcttgccatccctgtctcatgggtgagcacatttcctggatttaaaatgtatgggacagcctgtgagaattacagattccagggaagggccccttttggcacggggggtctgacggtcagagctaatcaggtgtggaagaagctgcctggagaggatccccatctgcatggaatgcccccttcgtggggatggctggcacagctcacacacggaggcactacttcagtcctcccattaccaaactccagggcacacgtgccactgtgtcttgcccacaaacatgcacacagagtatcgatctgtctgatgtttcagggacccagccatgtcatggagggtacatgggcaggtaccatctctgcctgtacatgggcaggagcccggcgt

SEQ ID NO: 147258 - DNA, 416 bp, Homo sapiens
tctcttcctccggcccctggtaaccaccattttactttctgtttatgaatttgactactttagatacttcacataagtggaatcctgcagtatttgtctttttgtgactggctgttttcaggtagcatgatgtcctcatggttctacgttatagcgtgtgtcagaattttcttccttttagaagtctattgtatgtatatgtcttttaggtctgagtagtttatagtgttgtttaagccccttccatttccttactgattttccgtttggtcgttctatccatttttggaagggtataatgaagtcttcagctattatcatagagttttgtgtctatctctccttttaattctggtaatttttgctttaatatattttgatgcttagttgttaagtatctgtatgtttagaactgc

SEQ ID NO: 147259 - DNA, 408 bp, Homo sapiens
tgggcaacatagcaagaccctgcctcaaagagagagagagagagagattaagtcacttgttccagggtcccagaagtagactttctgatcccaactttccattttcaaggctgtcataactcctatctcccactctggctcttcaggtacctcagaacggccacagcaaaaactgatggcaacaaggacgctgaaaggagagaagactaaagagaggaggaacagagagctgccacagggagggggcacccagggccaggtgggccatggaggcactcactctatcccatttctcacacaccacacacacaaaaaactctagccggccaggctcaagctcaggcagtgttcaggaggtggggtcactccatttacataattgaattgctggagtggcttggaacagat

SEQ ID NO: 147260 - DNA, 365 bp, Homo sapiens
tgggaaaaccctttgggataaccatctgctcgagtcatctcaggatctttgtagattatcacaaccacttgaaccaggtccattctgctggtctcatactataatatgggacaggtaaaggtttgataatgtgttggtgtgtgtgtgtgtgtgtgcattctgtacccttaccatattgcagagaaaatcatctgtccttccactttgtaattccaggagcaaaagggtaaagtagcagcatatctcagtgtggatggtctagtgactgtgtgtgaaagcagtgagaacaacatgcctttctgctatcagcacaggtgtcttttttcttgactcttatcaaagggtgggaatatgaggcattttgc

SEQ ID NO: 147261 - DNA, 407 bp, Homo sapiens
gcaacaaaagcaatgtctttttgctgtgagtctcaaagcccccaaattcatagggcagcactgtgagaggatgttacctgcgcatgcagtggggaatgctacaggagagaaaaccctgaaataaaaacagagacagagatagacatttattctagagtgtaagcaaatcttcaccagggagagagagggagagtttactatcctggaatgtcctcagggaggacagcgttctctacctttattataccagtcaggaatattccttctgaccttaaagtaaacactatctcttgcattcagggatgtttgtcatgcaaacccctttgctcagaagatccagaccatgcaaaaacatgagacattcatagagaattctcttccaacacagattttcccaggtttctgtt

SEQ ID NO: 147262 - DNA, 283 bp, Homo sapiens
tgctgttttcttcccttcctcctacactgcctatggaggctacaagcaggagattcttcctgggcacctggaggtatcttctcagtaatgcttataaaaggccatctttctatagaaaaactttggtatcagaagcaggacctctctcttaggaaaagtcctgggctctggggctggctctgccacttgctagtcataggactttcagatagtctccctgtgttagtctgttcttccattgctataaatacctgagattgggtaatttacagagaaaggagat

SEQ ID NO: 147263 - DNA, 306 bp, Homo sapiens
ggcccggtatgggcaaaaacaaaggcaggtagatcagtggaacagaatagagtccagaaatgaccgacacaaacatcgactgattttttgtttagttttttttttgagacagagtttcactcgttgcccaggctggagtgcaatggcacgatctcagctcaccgcaacctccccttcccgggctcaagcaatcctcctgccttgacctcccaaactgttgggattacaggcacaagccaccacgcctggcagctaagaatttttataatcactagatgttgggttttgtattttctgtatcaaatg

SEQ ID NO: 147264 - DNA, 792 bp, Homo sapiens
gaactcctgacctcgtgatccacctgcctcggcctcccaaagtgctaggattataggcaggagccacctcgtccagccttcttagctgattttttaaaaatgatagttgcttttattgcataaaagtgtggaggactcattatagaaaacaaaatgactttttttttgagatagagtctcactcccaggttggagtgcagtagcgtgtgattgctgctcagagcaacctccacctcccaggttcaagtgattctcccgcctcagtctcccagtagctgagattacaggcgtgtgctaccatgcctggccagtttttgtatttttagtagagatggtgtgtcaccatgttggccaggctggtcttgaactcttgacctcaggtgatctgcccgcctctgcctcccaaagtgctgggattacaggagtgagccattgtgactggccaaaatggcatttttgttttatttctaagttaaggatttcttttttgctttatataaattggtatcaataaaaggattctagatttcttcaagattgacagcttgtaactccacttaataacaaaatttagtaattatataagtaaagtcagtttctaaatatatggttaaataattaaaattggggtgggcccagtggttcatgcctgtaattccagtactttgggaggctgaggtgggagaattgcttgagcccaggagttcaaaactagcttaaggggtcttgaattagcctaggcggtcttgaattagcctaggcagtcttgaattagccaggtgttgtgggcgc

SEQ ID NO: 147265 - DNA, 453 bp, Homo sapiens
acatacaattaaaaacacagatcttaaatattcaatttgatgagttttgacagttgtaccaccatgtaacccaagcaccaaacaagatacagaacatttccatcactctagaatgtagccttgtgcctctttctgttcgattccctccgcctcagccaccaccgccactgccgccttctgactagtgttgctataaataaggctggcttattcctgaatttcaaaaaagtggaattctacagtatgggtcttctgtgtgtgggcctgccatctttcactctacataatgtttttaagattcatacaggctaggcgaggtggttcattgtaatcccagcactttagaagactgaggcagggggatcacttgaggccagcaggttgagaccagcctgggcaacacagtgagactcacatctctacaaaaaaattaataaaatttttaaaaagaaa

SEQ ID NO: 147266 - DNA, 304 bp, Homo sapiens
agaaaggggcagagagcagaagctgggaggaaacggagattggaactgtccaggtgacgtgaggcatgacggtggcttagacaagggtgctggccgcaagatgtgaacgatcggatgagaacagggtgaaggagaaggcgcagtacctacaagaacagccataatcattgccaggctgtcctgagcctttctcgtgtattatctcattgaacccacaaagcaaccctaggagacttacttgttgcaacagcaacactcattttccagaagagaaaaatgaggctacagagaaatgaacagacct

SEQ ID NO: 147267 - DNA, 505 bp, Homo sapiens
aagcggtaccagcttacccttacgtctctatgactctgactcctccagttaccttatataagtagaatcatacggtatttgtcttttggtcactagtttgtttcacttagcatatgtcttcaatattcatctatgttgtagcatgtgtcagagtttccttccctttgtaaggctaaataatattccattgtatgtatataccacattttgtttatccattcacccttccatggacacttggatcacttccaccttttcgctattgtgaatacctctaagtaatatttaatacagtagccatgtccacccttttgaaaatctctgccttgtactggaccatcttccgtcatttcttttcctctctctcacccaatcttagaggctttggatttattcctttgacttagaaaacgtttcttgttcgggcacggtggcttatgcctgtaatcccagccctttgggaggccaaggtaactgcagtacctgaggtcaggagttcaaggcc

SEQ ID NO: 147268 - DNA, 121 bp, Homo sapiens
aattgatcccacctatggtataataagaaaataaactggtcaaaaaagtattgggggttgtaaaggtacagctcatgactttgggagctgagtccatggagcagtcagacacatgccaata

SEQ ID NO: 147269 - DNA, 485 bp, Homo sapiens
caggcctccctgcctatgtgcacagaagatccgagagaaaagctgactgacagcagtaggtcatgaggatgccacttgtttagatttcaaatgcattccactctatgtctcacttaagaccagttgacagccatgtgttccgagcctgggctgcctctggtgaattttcctgagacagaagtgtcattggattctttcttgtgccaagtgtaggcaccactgcctcttttagaaactatgtggacactttgaactgtgctcttttaagccagtgccggaagaatggcattcgcagggcctggtaaactggggagaaactttctgatgtttttatgaaaggcatgttttgctctgaagtcaaagagtgtgtgttctggccaaagtagcaagcatagatctgctttttccacacgcaccaggcttcagaggagaagttgactagatagccagtgtctcattttgtttgtggtgggcatgggatggtg

SEQ ID NO: 147270 - DNA, 146 bp, Homo sapiens
tgacaatctctccaatggggttttggttagggggaggcttaaaagtaattgatttatgattcttttaaccaacatgtaagtcaagaggctggccaagagtttgaagagcccgaacctgttagacagtaaaccaattatctttgtga

SEQ ID NO: 147271 - DNA, 744 bp, Homo sapiens
ctggataacatatgctttctgctcagttccccctgttccttgtggctggaccacttgtcagagaagataataccatttcattccgcttgcttccaggatttttccagaacaggctgagagtctcaaaatcctaactttcattttcctatatagcatgggcctcacttcaaaagtgtctgcattagcctctctgtttgtaaaactctggacaggatttcctaaggacctgtctcccctgaatgaacatggtcaagtccgttgatccctgtgttctaaagtgggacaggggttccaagtagacttcataaacaccctagtcattcctttggaatttaagtgttctagaattatcagtgcagctgaggcagcttcacgtaagaagtcagcagtctaggtttcctttttagggaaatgaagcttttaaatgtgtttggccctcagtgaccactttctgtgcccagagtaataatgcgagctttagttgagatcccatagagaaactggaatgcatttcttagatcacctgacttcgaagtcttttcccctaaatcccaagagagaactaggcagtgagtgccctggaatgttatgactagttcttccttgaaactgaagcagttggccaggcgcggtggctcacgcctgtaatcccagcactttgggaggccgaggcgggcagatcacctgaggttgggaattcgagaccagcctgaccaacatggagaaacccctgtctctactaaa

SEQ ID NO: 147272 - DNA, 441 bp, Homo sapiens
cagtgagtcatgattgcaccactgcactccatgcactccagccggggtgacagagtgagagcttgtctcaaaaaaaagaaaaaaaattagcaactattatttactgagcccttaattatgaaacacagactatgccaatgggtttacataaatgttttattttctccttggaactacaccaagaagtatttgttattataaccatttcacagatagagaaaccaagacttagaggttaagtgacttgcataagatcgctcagattattggtgctagtagaactaggactcaaactaagtatgtttgaatccacggcatgcacttttaaccatttgcatcagtttggattatgagtaacagaaaataaaaataatggtggcttaaacaagattggagtttattcttccctcaagtaaatgaaatccagaagtaggcagctgg

SEQ ID NO: 147273 - DNA, 223 bp, Homo sapiens
aaagtagatctgggtagggttgaaggaaattgtagatgggagtctggagtaagcagaagaccattaaagttaggttagttagttaggttagctaagcatacatttaagaaaaataattctaattataatggtaataaggctaatattaatggaagatttactatcttcagcactatcctaaactctccaagtatattaactcatttatacctttcaacatttc

SEQ ID NO: 147274 - DNA, 410 bp, Homo sapiens
ttgctatctgcctattagtatctaccccaagctacgaagacttccattccttcttattaagcattcagcaactacatttagtgcctactatgccagtgatgcaagaatggataagacagtccctacactcaaggataacgcctctagtaggtgagagacaaaccgattaattctgcataagggataagtgctgtatgtgggaagcaatccaatgagggctctgaggatggcaaaggaagggttcctggaggatttacatttaactggtgccttgaaaggctcatctcccttaccgtccctccccccaaatccaacacacccaccgcacaatcgaatctaattaagatcaggaagaaatttgcattttcttttcactgtacccccagtaatcacagaagttcttcaaattt

SEQ ID NO: 147275 - DNA, 130 bp, Homo sapiens
tccaggaggcgaactcgtcaagcatggaactggcgagtgagaccaaatcagactctttgtttcttgaatgggtctccctggtcagcatgacctgtccttttaaccactgtgccatatttggtttttccca

SEQ ID NO: 147276 - DNA, 301 bp, Homo sapiens
agatgggtgaaggagcaggggcaggtcctgctagacctcaagggtgtgagaagactgcatctgattctgacagcggctctgtcttgcccccgtggactgtggcttaggcagaggctgagaacagccacagaggaggagaatggaagggcaaagagagcagagacacttcccaggcagccagaggaggcccaagcttgaaagggggaaggctggggagtggccatggctccccacacttcacctagggttggaagcagctgctggaggcctggggaggcagctcggtgctctgggcatgttg

SEQ ID NO: 147277 - DNA, 383 bp, Homo sapiens
  misc_feature (7)..(7): n is a, c, g, or t
  misc_feature (18)..(18): n is a, c, g, or t
aggatcnccgtcctcctnctgctgctgacatctaaaattctcaaagtacagaggaggagttcctggcctccacttccattcaaaaaccatcctgtgcagaggccacttcttatctaggacatgccaatctgctgaaagcagggaaaacttggtttcatagcacggtgaagcaaatcacctccatgagtatccaatattctccataaacaggtttgaaaagagctccacaggatttgtagtttctcatttgcctgctttatggtagggactggattttatccatctgagtgttccccagcactaaagcagggtcccaagtgtacttgttgctcagtagtggttttctgaataggcttaactgagcagcaggaggaggacgggct

SEQ ID NO: 147278 - DNA, 265 bp, Homo sapiens
tgtaatttcaaggagttctaggaactgcttcttcccttcaaagaatcctgaggctggagaaggaactcaggtggggactggttttgtgcacattactacttttgctgtagctctaactcagaaagcatgagaccattcataacttcccagatgacagagacgcaacacagtgtggtggaaagagcgtgggcctgatcccagacatacctagatgtgaggcttcgcgcttgctaggctgggaccttgagcatgctcctagctagcc

SEQ ID NO: 147279 - DNA, 420 bp, Homo sapiens
gttgcaacctattagtggaccatgagatcagtttcatgagtcctgaccgtcattttataaatgaaatgagaatggaatgaaatgaagtggagtggagtgggatggaatgagatggaactagcaggaaataatagaatattccagaatagaaactatcaaagtacatcacatgtagtaaaggattagaaagcaaaagcaatctgaagattgaaagtcagaagcaaagttagaatggtgatttttttcccccaacccaacttggaagaatttgtctttggagaaccaacctaatcaaataaagtagcatcaatttactggagacataatccaacttgcataattgtcctggctggtttacaccacagctgttcatatgacgtggttcattaaataataaagtcttcatcaggctctcctgct

SEQ ID NO: 147280 - DNA, 302 bp, Homo sapiens
  misc_feature (17)..(17): n is a, c, g, or t
  misc_feature (39)..(39): n is a, c, g, or t
acacaaaaaaaaacaanaaaaaaccacatacacaaagancgccttcccctttaatttttaccgattagaaagcaaaagcaatctgaagattgaaagtcagaagcaaagttagaatggtgatttttttcccccaacccaacttggaagaatttgtctttggagaaccaacctaatcaaataaagtagcatcaatttactggagacataatccaacttgcataattgtcctggctggtttacaccacagctgttcatatgacgtggttcattaaataataaagtcttcatcaggctctcctgct

SEQ ID NO: 147281 - DNA, 1467 bp, Homo sapiens
aagtttgctttctatttaagtttagaagaactttaaagtatacattgaattttttatagaaataagaaactggaaataaatattactaatgatgacacatatataaggccaaaaatatcaacagataatttttaaaagatcaaggttgtaaggtttaagctatagattaaaaatattttaattgcttatcagaaatattttagagctaatatgtatattttcacaaacaaatggggaactttccattatgtaatcagtcatgagaaaagaattgtgagaattatgtcaaatgtcccatcatgttagctaagagataaataactttcttgaacttgttaatttgctcagtgtacatagttgttttaataattcaggcacaaaaaatacatgttagaacttgaactacctatagcatctagatagttaatgaaaagtatgtttagatttgaagatgattatgaatcagataatttaaatttttcataaaattactaacaggctgatgcattttaaacttgtctttagaaattagtagcttactgccaagcacagtggctcatgcctataatcccagcactttgggaggccgaggcaggtggatcacttgaggtcaggagttcaagactagcctggccaatatggtgaaaactcatctctattaaaaatacaaaaattagccaggcgtggtggcacacgcctataatcccagctactcaggaggctgaagcaggaaaatcacttaagcctgggaggtggagattgcagagatcgtgccattgccctccagcctgggagacagagcaagactctgtctcaaaaacaaaaaaagaaaagaaaagaaaagaaattagtaacatacttataaagtataaacaaaattaacttaagaatacaactagtagtctttaaatgaattaaacccctcccaatattagtcctggaatttctttctctgctgctttaagcacagaaccttatccttcttttatggaaaataggtggaaattaaacagcaacatctctaaaaagacttccagggaacttttcagctttgcatttcaaaggcacatcccctaagaggattaaactgaaatgtgtcccagaatttccaattaaaacccatttttcatgttttattccaacacatacattggtgattataatattttaaaacttacatttaagtacagggctcagtgggaagagaaaaaagaaagaaacatcctcaagttgtaccctgttgcttggtaatgccttagtagaccagacccttgagaaaatgtgttttcatataattataaaggaacagattttagatcttcactgtaagagaacagtaattgcagaggtcaagtgttattttcatggatctcagagcaaagctaatagtagcctattccccagccaacagtctgccctcgcctgtgggggtctactgaaccagggtaattccaccaaaaaaaggaa

SEQ ID NO: 147282 - DNA, 786 bp, Homo sapiens
tgaattgagatttgtgaatttgtataaagatttttttctacatcttttaatagacctacttatagttttatgttagtaagcatgccacattacacatgttgtaagtggcagtagtttttttttgttaggaagtaatgtactcacgtttaattctgtttgatttctgtaggtgtttatctctaaacagattgttctattatggttataaatccaacatcttatttagttatgatggtgttacaactatagtatcaaagggttgtaagagttttgtaatcctctacaaaattaatctatgtggcccatcttctggtagttatattcgaggaggcctagaaaactttttcaacattagattccttcacacacctttctcctttgaaatttaattttgttactgtgtgttcattggctgttatgaatacagttatatcaagttttattttagagccattttattttttcaatttgtgtatttcccgggaatttgaaaatctgtttctgttttaggctgccattctatatgatgaattttttcccacaaaagtatagtgtttaagaacatagagtttatattttcccaaatatgattgtgaattctgtcacttactagcaagtgcaatatttgtgcaaatcatttaacctctttagtttcagtttcctatttaaaaaattattgatttttaattgacaatatatatatattttgggtgtacaacatgatgttttgaaacatcatgaaatggctaagggagctaattacctcacatactttttgtggagaac

SEQ ID NO: 147283 - DNA, 232 bp, Homo sapiens
tgctgggattgcaggcgtgagccactgcgcccggccaagaaagaactttgttaacagtttaatctgcccaaaagagaatcattggaatctcatcattagaagtcttgtagcaaagacagaatacctatatgtttggaatattataaagtgaatttctacattaggcaaagaattgtactaggtgacttccaacatcatgtagaggatttaagctaagagaggtgcaaactaa

SEQ ID NO: 147284 - DNA, 315 bp, Homo sapiens
cttcccaggcgctgagtttggtttagaatggtctctgcagggaagtgcagtgaagcacccgttggagagctggtgtgtttgcaccgctgctcagcgactgctcctgtgtttgctgaccttgcagaagtccaggtgagtgctcagacaccacctcttccttcctaagcctggcagagcccatcccatttgcttccttagctaccctcacggagctccagaactctcgtctggtgcctccttgaatttacattcattgaatgtatacattaaatatgtacagttgttcatgtcaatcatacctcaaagcgttttttt

SEQ ID NO: 147285 - DNA, 806 bp, Homo sapiens
aagcttggcagctgtgcagacaatcagtttttggtatttgcccatttaaaatacaaggttttcgagggcagttctgtgaccctttcacagtttatatttatttttcctctttgggcatcagtttcctccgctgtaaaaagaggcctgaggagtaggatttaatgagcttctaagtactgtgtgcaagtctaaagcgcgaggattcgacgtggatgtagaccaactgatattctgagccaaggagtgggggcaatgtctattcctgttacactgggggtctgtccaagagctactccccaatcacacccgcccctaaaactgtttctaactgctgaacactgcctccttgtctttaccacatccagcctgcttacttcttcccgtgtctccccccacacaactcacgcacccactcaccctgggaccatttgaaacagcagctctgtcctgggatgacacaccaccccatggccatgtggagtcttactgtgttgctgaggctggtctcaggctggtctcaaagttctgggatcaagtgatctcctgcttcaaccttcccagtggctgcgattataggcgtgagccgctgcgcccagctgggaggactctttaaactagctctgtccagtagaaatatgacctgcaggccaggcgcggtggctcacgcctgtaatgccagcactttgggaggccgaggcgggcgaatcacgaggtcaagagatcgagaccatcctggccaacatggtgaaaccccgtctctactaaaaatacaaaaattagccgggtgtggtggcgcacacctatag

SEQ ID NO: 147286 - DNA, 250 bp, Homo sapiens
gctgctccagtagtggagcagctgccatccaaacttgaacaaaagctatggcattggaagctaagatttagcccaacctcagctgtgtctgccttgccacaagggtgccagatcctaaattaggttttgctttaatacttatgctgaaaatgggatgggagacatttttctgctctttgttctctgagtactatataaagtgagttctttatctttgggccccagagtcctcgagcagcagggaaagaca

SEQ ID NO: 147287 - DNA, 311 bp, Homo sapiens
taagtggacaagacagtgtactgggtcttcctatttccagttgtctgacattaggtaagtatcttcagcactcaggaccttcatttctacatcttaaaaatcatccacggtagcgtctgtatcataacaggcagcacagtgtagtggttaaagcatagactctggatccagagtgcctgggttccaatcttggttctgccacttgctagttgtggttacctgtgtgtgtgtgtcagatgaatcattagagcatattctctgctcgtaaacgcaaggtaaaaccagtgaggtgcggaaaccaatggcggaaa

SEQ ID NO: 147288 - DNA, 297 bp, Homo sapiens
ctgtacgtacttcctgggccctccgtgctcttctgagttctcttctcaaatacctgttttcttgggtcacaggagattaggagattaaagccattctctctggtcctgcgcctcccttgccaggcgtggctaagaggtttgtccttgtggaaggagctgagtgggttggtcgacctgtgcttttccgtgggtaccttaattctaccccatattccgtaatgctttcgttccgatttgcagttcacactgtagtttctcaggccaaatgtctctgtgaaatgtttggccagagtaatc

SEQ ID NO: 147289 - DNA, 482 bp, Homo sapiens
tgctgaggagacaactcaaaggaggccattccacctatccacccgcctcccccatctgtcaggtcaagagggcgtgctgtgttctgctgagcattcagcactgaacaaagcaaggcagaaatccttgactccacggagcttacattctagtggggaggagacaggtgatggatgattattaatttactagaaacgataagtcacatacaaagggcaggagcaggaccaagagagagagcggggaggagccacatccttttaaacaaccagatctcaggaagactcactcactatcgcaaggacagcaccaagggcatagtgctaaatcattcatgagaactccgcccctatgatccagtcacctcccaccaggccccacctccaccactggggattacatttcaacatgagatttgggcagcgacacatatccaaactataccaaacaccatctttagaaaacaaggcactagagcccaaac

SEQ ID NO: 147290 - DNA, 355 bp, Homo sapiens
agacatgtgccgctcaggatgtgtgagtttctgcagtgaccttgctgccgcaagtggtctgttgaagggtcagatgctggttgaacatgtagcaaattctctaggcctctgatttttccaaccacgttttgccttgctgtttttggttcttctgctgtgttctggcctgtagcctgctcttctgagaacctactatgcttctatttactgtcttcaaggagtaccttccctgtttcatttgcctggctgatttttactggtcttttatgttttgcttttctggatgtctacttctccttccagttcaagagttaggtgcttgacttctgtgctcccatgtaccctgcacttaact

SEQ ID NO: 147291 - DNA, 295 bp, Homo sapiens
tttttgagtatggtgtgaagtaaggatgtactttcatttttttcttacatacaaagctaattctcccagcaccatttgtaaaggtgtttaatggtttatattttttctatttatttgcaatgtcacctctattatggattaagtttctatatgcaggttgggtgtggtggctcatgcctgtaatccgagcactttgggaggccaagggggtggatcacttgaggccaggagttcaagaccagcctgaccaatgtggcgaaacctcgtctctactagaaatacaaaaattagccag

SEQ ID NO: 147292 - DNA, 276 bp, Homo sapiens
aaagactcaccttgtttgattctagtttttggcagttatgagtaaggctgctaaaaatgtttgtgggaggacttttgtgtgaacatcagtgttcagttcatttaggttaatatgtaggattgagactactgaatcagtaagaccatgcttattttcttcagagctccacagactgtcttccaaattggctgtagaattttccattcacatccatagtgaaggagagttcactgtctccagcatttggaagtgtcagtgtttgggatttaggctacc

SEQ ID NO: 147293 - DNA, 407 bp, Homo sapiens
aatgccactccatagacattgtcccagtctgttctcctatcaggagtgtcagagaggaatgtttcagtatttgagttggagagagtatttcctttagagaggaatgttgttgcagtatttgtccttttgtgactggcatatttcatggagcagaatgtcctcaaggttcacccatgttgtagcatgtgtcagaatttctttccttattaagtctgaatgagatttcattgtatatagagaccacattttcttcttctttttgtctgttagtgtacacttgttgcttccaccttttgtctattgtgaatagtgctgttaggaacatgggtgtgcaaatacagagtgcacctgtaaaattctaaattagattctgtccctctcctgctcagaccttccaaagaatgaat

SEQ ID NO: 147294 - DNA, 302 bp, Homo sapiens
actacagcgtaggcttgggcgtcagcctggctttgagttctagcactgctgcttacctatttaagtccaagtcccatttctatatttgtaaagtaggagtgttactagtacctacttcacaggacctggtgaggatgaaatcggataatacgtgtgaagcgcctggtgcagtaaatgcttatggttttgttgttactgcagcagctctcaaccagggatcctcccacaccagagtgttgtactccactatgggttgggttacaagttatgtttcttactaaaagtaccaatggttgggaatt

SEQ ID NO: 147295 - DNA, 464 bp, Homo sapiens
ttgccagatgtgggcatctgggcacctctgggtactcgtttacctttgcatgggacatcccccaagcttgatgttctgtcaagaggctgctcggggaagatatatactgatgagaaatctcagcccccaaattcatttttcaaagaagccaagcaaatctggtgatttattctctgtcattctgatcccagcatatgttccacatcaggtaagtgagatagaagggatggttcagcaaacattaagttaaaagaaaccctgtcaggcttccccacgaatagctggtttttatttaaagccacaatgtcattaattacattcagtaaaaagctaaggctctctcctgtgccacacttctctagtggactcggaagaagataggctgctcttacacatctgcagtccacacacccacgctagctggggtttctgttgcttccttatcttcttccttctgcagtctt

SEQ ID NO: 147296 - DNA, 303 bp, Homo sapiens
tgaaaaggatattagccaggatgatagactctggaccagacatagtcaaagacaaaattagtggattggcagttacttcacaaaattgacccagatgacagggacaagatggaggggcacaatgataaaattcaaggtcctgaattcaggcaggcctgtagccgactctgtactttgacttgacagttatgtgccatattatggctatttattaattattattttttgagatggagtttcgctcttgttgcccaggctggaatgcagtggtgcaatctcggcccaccggaaccttcacctccc

SEQ ID NO: 147297 - DNA, 488 bp, Homo sapiens
tgcctcctctggattcagatgcaaataaagaaaagaggaaaaaacgcaaaactcctaacttaagatcttcccggttaacgcggtccacaaggggcccttcagggtctgtgccatcatctctccccagtccagagacaagggaaaatggctaagcagcaggcctcagagatcttatttctaagatcaccaggccaaacccaatagcactgccaggttctacgtctttattttaataccaccagggctgtcctttgagggcccaacaagggcagtttctttcctcagggacatgataaccgtggtacttgaggagaatgcaacttgcacgtggaaactggactggaatgggagacagttctctaacaccctggatgaacggggggcatgggaaggctgcggtcatctcaagtgcagatgccagggatatggttcagggggcagaggctgataaacggggaagaactttgaaggaaacttaaagagaaccg

SEQ ID NO: 147298 - DNA, 490 bp, Homo sapiens
  misc_feature (452)..(452): n is a, c, g, or t
cgtgggttttttgttcatatttaaagttgagtcctctagaaccgaagagtcccagtcatctgccgaaggtgcgctcccaggccccctgcttgggcgcgcccacctggaacctgggcgtagagctatgaaaatgcagacccgcacaagcgcgaggccacgcggggagacccccgcccgccaggagttggggcaggtccggcctgggcgggggcgtcgggggaggggtggtgacccggagtcccgcgcggcaggggagcgtcccccaacccccggcaggggcgagggccaccgcaggtggcggcgttggcagacaggcaagcggggactgaagctccggggtccttccggctttgttccgtcacgagccgagccctcctttccggagaagccaattagatctccgacggaggaatcatccgacctgcgtcccccacccggagggggctcggaangggcggggcccagcgcttggtcctcgggagcgcggcgc

SEQ ID NO: 147299 - DNA, 274 bp, Homo sapiens
catctttgcttggaaaaggcactgtccagaatgtgtggctaatggattgttgaaggagctggacatggcccaggcagtccggtgaatcagtgactgatggttgtttgtagtagctaatgctgttccctccccccaaagataaaagaaccaaaaaaccatcaagtggcttgatttgactatagcagcatttgtgacagaactgggaaccaaatgaaaatcaacttagtactactcttcaagagattttttttttctccagaggcttagcgtaggt

SEQ ID NO: 147300 - DNA, 370 bp, Homo sapiens
gccactccatcttcccacactgctccctcctcctcctgagccatcaccgcccacatccccctgctcccacctgtcctggctcaccatgccatctccatggtctcctggaccctgctgtcccttccttgtctcctccaagatctccagtttctcaggggccctcttttgcctcacccatttgggctccagttgtccccaggatccctcccccgacccgggggcccccttggtgcctgctgtctcagcagctgctgccttttcatctctctgcacattcctgttcccatgtgggcctttttctgggaggaacagaacctttccacacggcagctcccgggagagcaggagagagcaggggaacaagccagca

SEQ ID NO: 147301 - DNA, 315 bp, Homo sapiens
cctcttttttcccagcacagtgtgggattctgatgggatgggtccatcctacccggtacctcctgctcacagggaggtcagggctagacctggacttgtcggctctttccctcacctactgtgggaatcacatgcatcctgaagatgggtgggtgaacctgatttgggctcaaagaaggaaggaatttctgacagtcagggctgccagggagtagcagggagcagcctgtcacctgaggcatatgagctgaggatggagaattgcagaagggaccctgtactggtgggcttatggcttctgaggcctgctgtagg

SEQ ID NO: 147302 - DNA, 259 bp, Homo sapiens
gaatcgcttgaacctgggaggtggaggttgcagtgagccgagatcgcgccattgcactccagcctgggtgaaagagtgagagttcatctcaaaaaaaaaaaagattggatgcggccaagctgaatccagcatggccccctggaagagaccattggataggaggcaccaggaagtcccttttacataagaaaatataggctgagcgcagtggctcacaccagccttctttggctcacaccatgttggccaggctggtctc

SEQ ID NO: 147303 - DNA, 137 bp, Homo sapiens
caccaaggacaaacttgtgaggaagattgttggggtcacatgaggaagaatcagtgagtatctgaattgttcctggcttgttgttctggcttagctccagtttcttccaactagttctccagcccctacagtcctcg

SEQ ID NO: 147304 - DNA, 347 bp, Homo sapiens
ctcacaaggctagcctcactgaccccatcctctttgaggcctattttgggctcaatgaactggctgagggcattccggcatttctccaccacgtgctccatctgcaggtaggaggcggctgtaaggtagttgacgatgtccctaacagcgaattccaaggcgcccgtgtagcaggagaggagcaagtcggccacgatgcgtgcactgtgcatcagggagacctgcagctccgagctggggttcagcaggaactggtcccgcaggaagggtgagcaggcggccaagatgaccttgtggcctcgaaacttgaggctgtcggccacaatggtcacgtcgcagaaccgctc

SEQ ID NO: 147305 - DNA, 186 bp, Homo sapiens
agatatacagtgtctgattgtcctatttttagtgatggagatcacagagtaggttcaggtcattccagtctgatcattccactatactattcatctgatctttcacttaatggttttagtagctaatgataatgattgtttagaaccatgatgtcattaagtattgccaaatggtggttttctaat

SEQ ID NO: 147306 - DNA, 294 bp, Homo sapiens
aaaggggtggggtaaagaaaagcaaatatataatttactcttgttaaggaacgactgtaaaacactccacaaatacagtgtaaagtacaaagctagtgataagtattaatgacagacatttgtgggtgtacctatgcatgcaaccacaacacacagtataattaaaccttgcaaaatagccattgtttcaggactagaaatgatttacatcaaataagcagtgaaaggttgttacacacccctctccccaaacttcctaagttacaaggttagggcagggtagtattttttaaa

SEQ ID NO: 147307 - DNA, 695 bp, Homo sapiens
gcgggtgggctgggtatgagtgtctagcttggcccttcactgcaagactgtgcaaattgcttcacgtcttccagtttccgcggaaggagcgaattgtgcttacctctaagttttttgaggattaaatggaccacaacgtggtggctagttattatatcctgacaaaacagccaaaacctgattcttttttcccatttaagagtttatacaggccgggggccgggcgcggtggctcacgcctgtaatcccagcactttgggaggccgaggcgggcggatcacgaggtcgggagatcgagaccatcctggctaacacggtgaaaccccgtctcttctaaaaaatacaaaaaattagccgggcgtggtggcgggcacctgtagtcccagctactcgggaggctgaggcaggagaatagcgtgaacctgggaggcggagcttgcagtgagccgagattgcgccactgcactccggcctgggcgaaagagcaagactccatctcaaaaaaaaaaaaaaaaaaaaaaaaagtttataatacagggccgagagcggggggggcatacaggctttaataattcccaggcacttggggagagtccagaaaaggggcgggactcaaggagggccagggagttcgaaaccgggttggggccaaaaaggggaaaaaccacaggcttctattaaaattccaaaaccta

SEQ ID NO: 147308 - DNA, 280 bp, Homo sapiens
aggaaagatcccccagactgagagctcttgatgggaccagagattgaatagcctaccctatagcacaagatttctaccttgggattgggttagagctggctggcaggtgagtcacagaagtgacagccacccttgacaaccctttccactccagagagctctaatgctcactcctcttcccccatgctccctctctagggtgttgtggagggaaggagagaggtaagaaagtccttcccagtaacctcaaaatagtgagtgcgcctatttaagtccagca

SEQ ID NO: 147309 - DNA, 436 bp, Homo sapiens
tttctcccacttgatattcacaggtctctgagcagtctatcctctctccttccttgcctggggctctgaggagagtgacctgcttgtaggagggtttccctatgtttttccagggcagtcagtcaattaacacctggccacttcttttggaagttactcctcctgaacctgaatgaaacttcaggaacagtcactcagcttaagcacaaccatgtacaacaagcgcttctggagtcagtggcagtactgtcctgtctatcagaaacctgtctgatcagtaagtcttcttgcctcccttttgagtctagaggctgtcatcctgggtatacctttgaatctcctggatgtttttttaaagcattgaaggaagtcctgtcaccacccctagagattgcaaggtatttgatatagcatctagatttgatctacactggta

SEQ ID NO: 147310 - DNA, 360 bp, Homo sapiens
ctcttgtattttcctaaaatcggctgaggaaagtgtcagttgagtactgagagatccggaacgacaattcagagcctccctagacaaaagaaggtgtaccaaagtgaggcgctatgggggaacccttgtctctctgctcgcctcccagttcactcctcttatcctcttgctatttatcatcaaacgtacagggacgtcaaagtgaggcagcccctggaaggagaagggaaaagatcaaacagggatcaggtttcggctcaaagactataggagaggtcaggccaagggtttcacaaggggccaagagacaagagggaatgggcattcaggaacagccgtggagcaaacaagctcccctgc

SEQ ID NO: 147311 - DNA, 200 bp, Homo sapiens
catggatttgctggtgcagtacaactaggcttaataggctcatgtgaacacagtttactggaggaaataaaatctcaacattccaaataaaaacatcttctatgattagcagatcctagtagtattggtgaattaacatcacagcactaaccagaaataagagaccccagaagaaaaatatcaacacaatgattatgaaa

SEQ ID NO: 147312 - DNA, 249 bp, Homo sapiens
cacgatttgactacgcggctcgatctgactacgcggcttgtctgactacgcggctcgatctgactatgggctcggtagatacagactgaggccacaacactttgcagttctatcaacaggtggaatcaatttctctactccttgaatgtgggctggccttttgatgaacagaacgcagaggttacaaggttgtagaggttcttagctagaactcaagaaaccgcacagtatctacttatactcttagat

SEQ ID NO: 147313 - DNA, 354 bp, Homo sapiens
tttctgtgtcggggttgtattgagaatgtagattttgtctgatgagagtgtagattttatttgtagtgagtgcatgtggatttttatttgtctagggttttaaaagttgtatagtcatgaatggacactttttaataccatctatgagaaattcaatggcaaagtgttttcatacccatatgctaactgctgatgctttttataaaacattgttaaggtgttacttgccccaggaaatacaatgttttatgacagagacagtactgaaattcagtatttaagttctttaaataccagctatgttgagtagatattactttctcccaagagcctatttttggtttatgacatatt

SEQ ID NO: 147314 - DNA, 328 bp, Homo sapiens
cacctgccggacacgtccaggccgccaccctcccactcccatgtgctgccccagcttctgctccccatctgggaaccaccctccactctcccacagggaagtgcttgcttccctctgaggctctgagggcacccggggagggcagggcacagccttttgtgtctctacttgccgagacgcctgagatctgaggttggtcacagatatggtgcaagtgtcaggatgggagttgtgaccacggcaggcctgggccctacactcacacacactgcccacgccgcgtcctgcctctccacgaagtcccccttgtgcctccacccatctcctc

SEQ ID NO: 147315 - DNA, 296 bp, Homo sapiens
tcagcctcccaagtagctgcgactacaagcatgtgccactgtgcctggctaacttttgtatttttagtagagatggggtttcgccttgttggccaggctggtctcaaactgctaacctcgggtaatccacccactgaaagttctgggattacaggcatgagccaccacgcctggataactcccttctttctgatactctatcctgtgaccttcagttgcctgaatctccctgaatgctcacttctgtctcctcaactcagagagtctgccagactccacctcaattccccctccct

SEQ ID NO: 147316 - DNA, 321 bp, Homo sapiens
gctttaatgtattagaagttcatattgctcataaagttccttcttcctcatttaggcaggaaaatgaattgagttctcttctccaggtgactttgcctttttgacctgctatggcccagtgctcactttatctggtgattcattttcaataactccaacagtatttgttctgacattttaattaaaatatgaccactacctcatcctgatgataaaaaggcctatgtgtcagtgaaaactagcttttcagtgcctcagtgcacctgaggacccttctgagcacatagttcttatcaaagaattcctctcaggttctaaaca

SEQ ID NO: 147317 - DNA, 664 bp, Homo sapiens
gtaagcattggtagtccagttttgctgatgagagatcctagtgctccaagaggtaagtaacttgctcaggaccacatttagcaggtgacagggggataccagtaataaccacgcttctactactaaatgctgtatgtgaggtatattttattatccccattttgcaggaggcaaccaggcctgagaattaaggtcatttgctttggtcacgcgtctaataagtgggagaactggagttagagcccttcctcttcagtagaacattttgactgtatttttagtgaggaaagaagggttactgctctttggcctggaagctacagggttatttcagatcccaaataggcatacgtcggagatattgtggatttggttccagaccaccacactaaagtgactatcacaataaaacaagacacataaattttttggtttcccagtgcatataaaagttatgtttacactatactgtagtctgttaagtgtgtagtagcattatgtctaacaaaaagtacacaccttaaaatactgctgaaaagtgctaatgattatttgaacctttggctagtcaatctttttgctggagtgggtcttgccctgatgttggtgactgctgacttatcagggtggtggttgctgaagatttagtgtattattattatta

SEQ ID NO: 147318 - DNA, 209 bp, Homo sapiens
actcctctgactctgcctggaggacaatcttgaggcttgggggaagatgactatagaaaggtgctcatctgtgcactgttgttcacagccaaaggaagaaagaaaacctcgaagctgccgaggccaatggctacatgtccctgggctatgcaggaggctcggtcaagggtactggagaagtgagagtcgtctctcccctcacaccacac

SEQ ID NO: 147319 - DNA, 359 bp, Homo sapiens
acacaggacttgaagcaggctgtgagtgtggaatttctgaattcattgaaagttcatgtttctcatccacatgtcacagaattcatcttgtgttgttttttagggtcaaacttcactattactagtaaatgcctctgataactggtacatgcttctactcccttttccccagtggtcctccagagagcccactcctggatttgtcaggtggggtaggtgatactgatgtgaaagtcaatcttccgctctcaggagtgactcttcccactaaaagaccatattaacactaataacatctaagagtttatgcttcccaaaacattttgcatgtgtattaccttattcagttctcacaaaca

SEQ ID NO: 147320 - DNA, 226 bp, Homo sapiens
gtcattagagggaaggttactaggtcactaacttactactctgaaaagtgacttaaggatgggggaaactggggaagatactttcatttccgggccttagttttatcatctgaatgcagacatatgtatcttataatatgtaataagtgtttattatatatacagatatagaaaagatacaaccttctacacgggaagacacacatcattacaaaatgtgaaaata

SEQ ID NO: 147321 - DNA, 416 bp, Homo sapiens
agcttgacacaggaaagtgatcttccttatcacctaaaaggctgagtccctgtaagacagggaccaggctagtgttccagggagggctcgtaaagtcaacattagttccttaaaagtaacttgtacctgtttaagtaagcatcgttctcaaatatgacactctaggtaaaacgtcagttgctcaataagttgagtagctgggattacaggcgtgtgcccccaagcccaggtaatttttgtatttttagtggagatggggttttgccatgttggccaggctggtcctcaagtgatcctccctccctggcctcccaaagtgctagaattacaggcatgagccaccacacccagttaacagctatattttatggatggatggatgtatgtatttatgagacagagtttcactcttgcca

SEQ ID NO: 147322 - DNA, 500 bp, Homo sapiens
actggtttgtagagatataattgacataataaatagcccatatgtccagtgtgtaatttgacatttatatacacccgggaaaccatcaccagtcaagataatgaacatattcctcatccccagaagtttcctcagcctctttataatctttccctcctggccttccctatttgtccctaggcaaccactaaatctgctgtcactatgggttagtttgcattttctagaaatctatataagtggaattatacagtttgtatcctttttagtctggcttttgctcagcataattattttgagcatcctccatattttttcttgtgtcagtagttcattgccttttgttgctgagtagtatcccattgtatggatataccacaatttgttttgtttccagtttttggctattacaaataaatctgctacaaacatttgtatagatgtttttatatggacatagactttcatttctcttgggtagctaagaatagaatggctga

SEQ ID NO: 147323 - DNA, 250 bp, Homo sapiens
agccgagattgtgccactgcactccagcctgggcaacaagaccgaaactccctttccaaaaaaaaaaaaaaaagtaaacggtaggcagaaataactgctctaaagtcacatcagcacactagggctgcagcattgttaatcaggctctaattagggagtcttgttttaagagaaaactggtgcttcagaggaaccccagcagtctcctaactggttctgctatctccctattactgattctcctggtata

SEQ ID NO: 147324 - DNA, 110 bp, Homo sapiens
ttttttccccccccatttgcacaattgcgagtcttctgggaacttttcttttactgacactatggttttgcatgtttaaaaaattggcagacatcctcggaggtaacgca

SEQ ID NO: 147325 - DNA, 165 bp, Homo sapiens
atgttatttttaaaccaattataacctactgctagtaattatttgtaagtacctgcttgttttattaagcactggtcagttatataaaagaataatttgcaagaatgatacttggcaatgggttaccttaatgcttctggaataaacagaagcattaacaaaaca

SEQ ID NO: 147326 - DNA, 238 bp, Homo sapiens
tatcagctcgtccactcatttacaaatgggcaaaagctctaaatagacctttctccaaagaagatcatgaggcaggcatggtggctcacgcctgtaatcccagctccttgctcacacggcatacaattaactcaaaatggatcaaaagactaaatgtaagagctaaaactagaacactcttggccaggcaccatggcttatgcctgtaatcccagcaacgatgggaggctgaggtagg

SEQ ID NO: 147327 - DNA, 521 bp, Homo sapiens
cccgctccctctgccccactccgcccctcctggtctctctgcagaacctacgattgttagtagaaacagctggaaggttcttttaatgtggccctgaggtaataccaaaaagaaatattttaataaatttttctctctatcaaaggaaaagccaagtgcaatatatttggtgtaattctttgaaaaagggcccagctgttttcccaaggagctctggtccattccatcttgtgcagaagattcattctgacagtggaatataattagaaatgcgtcgttcagcctgcccccacccccaaacacacaaacacacacagattcaagaccatggggaagtagaacacagcagatcttcctccaaagagaccgccgcacactggagtcacctattcgtgcggccagttaggacagcaggcgccctggacagccggcctctgctgtgtccctgcacccctgattagggcagcttcggacggcttataattggttccagttaatctctgccgccctgagaactgccg

SEQ ID NO: 147328 - DNA, 329 bp, Homo sapiens
ggtggacttccctacagtgtcaaagcaacacgtcatcatgctactgctgagcaaaatgatcctcaagggcttgcccggctacctccaccacatggtgtgaactctgcctccatctgtgccaatcagaccctcacattccctcatccaattttacctccactatttttcaacacttagactagctgggttggcttctagctctttcctgaatatgccacctccacctccaccacctgactctaactcctgtctggcccacatgccaggtgtgtctacactccatccatctttcatctcttgcatctctcctgatgcttgctctgcttcct

SEQ ID NO: 147329 - DNA, 189 bp, Homo sapiens
cttctcagtcaccgctggtatctaccctctagtcttagctcaattcaaaggctttagttgtcacaagtgtgatatcccaacaagggaagcaccaccctacggtagtgtccttcacctttctgcaaatggattggaggctgcaaagcagaagacaaaagcaaacagactcagcaggaactctcccttccc

SEQ ID NO: 147330 - DNA, 448 bp, Homo sapiens
cagcaaccccagtgagggaaggctaccaggggtctggtgtcacagaagtctagtatctgtgtggcagctaggactgagaaagtgggacagccactgccatgtgggctctgcacagcacaccaggactgcctgatccacccagcaacccctggatggaggtggaacagcagtcattcttcccatcctatagacaagagtctcagagaggtcaagtgacttcccaaagccacacagccaagaagtgagagaacctgtacctaaacctagctctccagactttccaagtttcccttcccgtcagtcctgttccaaggcttcaaaagctgctgcctttggaatcagcaggatccttcccaaagggtcattctctgagtgctgggagctttgccctctctctgttctgactgcccagctgttgacagtgtctttggccacaatggccaggatg

SEQ ID NO: 147331 - DNA, 355 bp, Homo sapiens
ggccccacctcttaatactaccacagtggggattaagcttcagcatgaattttggccccattcgagccatagtaggcacttaatggggtaattcttgtttgacttttcaaagccttgccagattgatccttcattttacccataaactgctgagactcaggttaagaaacttgcccagtttgcgggtttattgcagcaagacagccagacccacatactggggtaggacaggctctgtgggggcagatgcgacaagcagaaaccaaagtagcagaatagaagtgcaagtccacagaaaagagagttcaaggaggctctgcgtctccatgtctcctgccctgctcaggaactcacc

SEQ ID NO: 147332 - DNA, 565 bp, Homo sapiens
gaaatgtcttttctttcaagtggatgtcgttttttttctaaagaattgctttgggcggagttgaaccgtccctggattgggacttctgagatctgagattttatcctggccctgcccccttaccatctctgcagcagtgacttccagcttcgtgggcctcagtttctctattgtaaaatgaaggagcagtgtatgacagcagtttcaaacttcagtgtacattcgattcaatacttactgacctcgtactgtgggggccttgcagggttctaggaaacgggtttggtataaactaggctaacaaagtccctatcctcatggaatttattctaaggtggggaaagagacaataaacaagtaataaattaaaaaaaaaaaaaaaaaaaaaaaaaaaaaaaaaaaaagagaaaaacaaaaaaaaacaaaaaacaaaaaacaaaagaaaaaaaacataacaaaacaaaaagaaacaataacacaacaagccaacaaaatacaaaacaacgcaccgaggcggcccgcaccatcaccaccgcctgggccgtggcgatcattcgtgcggagc

SEQ ID NO: 147333 - DNA, 706 bp, Homo sapiens
gaaatgtcttttctttcaagtggatgtcgttttttttctaaagaattgctttgggcggagttgaaccgtccctggattgggacttctgagatctgagattttatcctggccctgcccccttaccatctctgcagcagtgacttccagcttcgtgggcctcagtttctctattgtaaaatgaaggagcagtgtatgacagcagtttcaaacttcagtgtacattcgattcaatacttactgacctcgtactgtgggggccttgcagggttctaggaaacgggtttggtataaactaggctaacaaagtccctatcctcatggaatttattctaaggtggggaaagagacaataaacaagtaataaattattgtctagtatctatgaagacaatagttaaactgtggtaatcagttagactagatgggctacttttgtttgggtgataagggaagacttctttgaacgcagatgccaaagtattaggaatcaggctcggtctgggactggacccagaaatctgcgtgtctagcaagatccctttggtgcttatgacttcacttggagaagtcctggcttctgactggctgtgatcccacgtgctcacataacataacagcctggaatgttggccatctccaaaacaagaattagagcacacgacctgctggatctaggagaagactgaatgaaaagcctcttggaact

SEQ ID NO: 147334 - DNA, 192 bp, Homo sapiens
tgaggccccaggcaaggagaggcaccctctttccctccttcttcagaatagggagtgaggagagaggaagaaagagggaaagaggactttacataaaggatacataattttttggccttttttccactatgttgaatatattttcctcacagtgacatctatatgatgtgttttttttgttgctgttttttt

SEQ ID NO: 147335 - DNA, 363 bp, Homo sapiens
atcctaagctgggactggggtgaactctcattcagcctgtttctccatctctctttcgtctcgaaactcattctcatgcccacagttattggggcataaagattccttaaatggcttcctccagagaaaaatacgtttaaggcacttccttagtggtttgagccctgggcgagcccctcctccactccgtttattttccactatgtatttaaatcttccccgatggtgcctgtcttctcgtcactaaggctgactttctgtttttggggtgaaacctgtgtctccttcaacctccagtcactcagtggattttttttttttagattcataacatattttattttgacttatctaactgatgtc

SEQ ID NO: 147336 - DNA, 536 bp, Homo sapiens
ggctcggtaccagttcgacggagactctctcagagttccagatctcagtctgcattggttgagcacccagtccatgcagtccctgggaactctgagatgagtccctagtctggagtcaggcagctagagggagaaaggtgcttccacagaggttctgcggaagtcctgcccggggcttcctgaatgttgccccagggagtaaggagtgactgagctgggtctaagatgacgccattcagtacagtagccactggccacatgtggctgtttgtgaatttcaattaattaaagggatgagttaagcttatccttggcactaaccacattcaagcactcagtagccaccgaaggctggtagccgccttgttgggcagctcagactctagaacatgtccaccacaacaggaagctccatggacgacagacagcgctgtccaggaggatagacttaagacagaggtgcagtgaggacactagctcagagcccacaagtgtaacagtgcaggagagtctccgtcgaacctggtgccgagctc

SEQ ID NO: 147337 - DNA, 182 bp, Homo sapiens
ttggatcagtgtgagtcctgaagcactttcagtgctgtgagaacgacatccactttgggtttcattcgtttgtaagcagaggagctgtcagtcactcgtgcttctcggtggcctctgagccatggtgtcgagtgaagagtagttcttgtttgttacaacctttgtgagtcagccatgcctgc

SEQ ID NO: 147338 - DNA, 780 bp, Homo sapiens
actgtttctccaagccatcacagctgatatctcctggtgctatccccaaactgccactctaaactcttgaagtaaataaataatctttgctggcaggactacgctgaatctccttaggcactctctaatcagatgtcctaggtcctcccaattcttagaccttttatacctgtttttctccttctgttattccatttagtttctcaattcatccaaaaccgtatccaggccatcaccaatcattctatatgacaaatgtttcttctaacatccccacaatatcaccccttaccacaagatcttccttcagcttaatctctcccactctaggttcccacaccgcccctaatcccgcttgaagcagccctgagaaacatcgcccattctctctccataccaccccccaaaaattttcgccgccccaacacttcaacactattttgttttatttttcttattaatataagaaggcaggaatgtcaggcctctgagcccaagccaagccatcgcatcccctgtgacttgcacgtatacgcccagatggcctgaagtaactgaagaatcacaaaagaagtgaaaaggacctgccccaccttaactgatgacattccaccattgtgatttgttcctgccccaccttaactgagtgattaaccctgtgaatttccttctcctggctcagaagctcccccactgagcaccttgtgacccccacccctgcccaccagagaacaaccccctttgactgtaattttccattaccttcccaaatcctataaa

SEQ ID NO: 147339 - DNA, 247 bp, Homo sapiens
atttgccaatgttttctcccatctgtgggttttcactctcttgatagtcatttcacaggatttccgttttaatgaaggttttttgttcttgcttgtgtttagtgtcatatccaagaaactgttacgtaatccaaggctacagagacttacctaggtttcctcctaagagttttatagtttcagctgctacatttatatctttgatccattttgagttaatttccatattaactcacacacacatatg

SEQ ID NO: 147340 - DNA, 338 bp, Homo sapiens
gatattttgaagacatcatatgtggaaaaaacagtttctccctagagcagagattgggacttctaggacaactttcccagaggagacgggaagtgtcagtggtaaggaaatgacagagtgggtggatggtgtggaaagctatcacagacaagaataatttctattaccagcattaccaattatacagcacttttcttgttttctcacttgattttataataaccccatgagcaagtaagggagctccagatcacgaaatggggctcagaggtgaagtgacatatggaagatgacccagctaacacatggagaaactgggattgacttcagacctttga

SEQ ID NO: 147341 - DNA, 131 bp, Homo sapiens
cgtgagccaccgtgcccggccgggtgtggttttaactgagtctcctaggtcttaatgagggctcctttggatattgtaagtaataatcatggttggctgtaacactcgggggggggtggcatcgataaaca

SEQ ID NO: 147342 - DNA, 269 bp, Homo sapiens
aaaaaatgtatttaaataagtaaataatatctgtgctagttggtactcggtggacatttcagaggtgtgtccatactttatgtattttatcactgtttgaaatggccaaagaggtggattaaactgggtcactgatctttcatgtgaagaccctcaaaatgcagatgaaatcagttttattttcagaaaagataaacttaaaaatatgttctaatctaaaactgagaaatcccataagtctggcacagtcggtttttctctctagcgtc

SEQ ID NO: 147343 - DNA, 300 bp, Homo sapiens
caagccatgtttcctccactccatggccatatcttgaagcttcactcttctgggtgatgtaggttggacccaggattttgagccagagcctgtggctacattggtgggtgactgctgtcagagcaaggaaaaccatcctagggatgggctcgacttacagaggtagctttgtttgtttgcttttgtttttgaggcaagtcttgttctgtagctcaggctggagtacagtggcacgatatcggttcactgcaacctctgcctcctgggttcaaacaattctcatgccttggcttctcagag

SEQ ID NO: 147344 - DNA, 316 bp, Homo sapiens
ctgtaccattttatattctcaccaccaatatatgagtaatgcagtttcttcacatcctcatcaatgttgtcactattttttgttttagccattctgataggtatgtagtaatatctcattgtgagttgaatttgcatttccctagtgggtaatgatgttgaacatcttttcatgtactcatttgtcatctatgtatctttggtgaaatatctcttcatgtcttttgttcgtgttccaattagatttgtttacattgagtttttaaagctacttatgtagtcgagatactagtcctttgtcaaatatgtcatttgtg

SEQ ID NO: 147345 - DNA, 302 bp, Homo sapiens
cctatggagcatacaagatgctggtattaagcatgtgacattatctcattaattgtcatgagccctatgagagggctgaaccttcatcatccccttcagagatgaggaaactgaggttcagaaaggtaagtgactagtccagttatgcactttgcatgtggcagaacagtatctgaaatcagctctgtccaattccatagcatgagctcttaactgttatgctccacttttataaattataattgattcatcaagattagttaaaaaatttttaaacccacaggcattctctgctgtatgca

SEQ ID NO: 147346 - DNA, 269 bp, Homo sapiens
accacaattgcaccacaaattcagaaaacacatttcaaagctacaggacaattactggcattagagaaaccttacgtaaatcacttaatctcttggtaccttggttttctcaactgttaaatgaaagttttagaagagatcatctgaacttcatcactttgatctatttccacaactctatgatttctccaaatcttttaaataaaaagtctcttagctattcctaagtgttgtcctaaatctttaacagggatctaaaatatataaaa

SEQ ID NO: 147347 - DNA, 463 bp, Homo sapiens
atccacgtgccattgtggttcgtgcccgtaatcccagccactagggggactgagtgcaggagaatcgcttaaacctgggaggcagaagttgcagtgagctgagatcacatcactgcgctccagcctgggcaacagagtgagactccttctcaaaaagaaaaagaaaaaagtggtctagagatgggcagcattttgacaagtagaggagtgagggcatttctgaggaggggttacccccattggcattgctgtagtttccaaaaattatttcacggagagaaggggagaggagcactatgaaccacttgttgatggcattgcccatggaactgtttcctctgtagatattcttcctcttacctgccatcaacaaggtgagtttaattgaattacagtggacaaaatgaaaacacatgtagattggaacagttaagtaagagaactttgagactctgtagaagga

SEQ ID NO: 147348 - DNA, 250 bp, Homo sapiens
ctgtttagaggacccccatttaggtcatggcattgctgtagtttccaaaaattatttcacggagagaaggggagaggagcactatgaaccacttgttgatggcattgcccatggaactgtttcctctgtagatattcttcctcttacctgccatcaacaaggtgagtttaattgaattacagtggacaaaatgaaaacacatgtagattggaacagttaagtaagagaactttgagactctgtagaagga

SEQ ID NO: 147349 - DNA, 439 bp, Homo sapiens
cccaactcccctttccggagggggcagggcggcctggatttgggggccggcggaggaggcgtgggggctgggagttaaggagacagggctttccttggaccaaaccaacccagcaatgccacattggaagtgggtttgaggaaccgggcctgcgtgctcatttgaaaaaaaatcagccaaacagaaaggtatgaagaagaaacacctataattccatccttccctgacttctccactcgtaacattttgaacagcaaagcttggcacagaactggcactcaatgggaggaagagagggagggaaggaaggaaggggagaaggggagggagggtcgatgatgtggacaacgtggcgtgacacgaagtgcccgcccccttgggctgaaagtcacaggcaggcccgcagagctgacgggatataacagacttggatttgggg

SEQ ID NO: 147350 - DNA, 343 bp, Homo sapiens
tcggctggccttagttcacttatacatctaacattcacacgactaaaatagtccccatgaagccaatagtgccattggtatcacgtagaaggatacaagacacgaaacaccgtgtgccagcagatgtatcctgcctgtgtctttagcaggaatcctcacggctgtccacacttcaggccaggagctattctctggatcctgctccccaagtgacacctcacgtgcaaagcagcaaggtcacatgggtgggcacagggctaccaagcttagaagcctgtgtcccaaaaagacactgagatttcttttaacagtcccatggtcaaagttttcaagggtcccagca

SEQ ID NO: 147351 - DNA, 287 bp, Homo sapiens
agcagtgtccctggtcgatccccggtagattccaataacaagctgccaatcatgacaataaaaaatgtctgaaatattgccaaatgtcccctaagggtgcaaaactgcccccagttgagaatcactgatcagtagagatgaaaacagaaaaagaatctgtaggcattttgtgacctaaataagacattcttatctccgtgttgctagcttttattttgtggctgagtgaattgttttcagtgtgaagaccaatggtacactggatttctatttaaagatggtttcaa

SEQ ID NO: 147352 - DNA, 367 bp, Homo sapiens
ataaataaacaacactgtaatcttccacacaggattctgtcacctggagaagggcaaatgaatagtccaatacacaaaaaaggctgttttgagacggagtttcgctcttgttgcccagggtggagtgcaatgacgcgatctcggcttactgcaacctccgcctcccaggtttaagcaatcctttgcctcagcctcctgagtagctgggattacaggcatgcgccaccatgcccagctaattttgtgtttttagtagagatggggtttcactttttaaaaaaagttactttggctggcctgtaagacaaatggaatatagaccaattcctaaccctatatctgtgaagcctgccctacctctgaactt

SEQ ID NO: 147353 - DNA, 184 bp, Homo sapiens
tttgaaaactgtactgttgaggcatgggggtcacctatttcagtaagaaagacaaatgaggtccaatgtagagaaaaaattgaggcaaattaaaaacagcttattaaatcaaaacctcagcttttccttctaatgtcctcaatcttgttctctaactcaaactgatataagccaattatatcag

SEQ ID NO: 147354 - DNA, 515 bp, Homo sapiens
aatcagatgggatattcctatgacataaaatgatgataataggacatgagagttaaagggattctaatccaaaggacaagtttaagaggctgctttatacctccgtatgatcaattagttttcagtacgtttatgtttatttagtctgcttctgtcacagaaacatagtaggaagaagttaaactagagatggagtccaacatttagacatcctaaatgttgatactgggcatgcatgggttagggtaggaaatgtggtatgagaatagggtgctgctgggggcatttggtgaggatggagactggagatgtcatatgggggatgaatttgaaccaggcagtacttagcaagaggtagtgggagctgaattagcgtggtagcaataaggaaaggaagttaccacccagagagaacttgatatgcctgattgggtgtggaaggtgagagatgttttactgcctggatggtgcctttcacagacatcatgataaagtgggtgggagttaggtagaga

SEQ ID NO: 147355 - DNA, 376 bp, Homo sapiens
gaacttgactacatagtcttctctttctagttgaagactggattcttcttgaaattgactgcatagtcttctctttctattctttgaaatcttatttggatttccattaagacactgatgttcaggaaatgctatcattccttacaagcaccatcagcataataatttacttgaatgaccatatgtggttttaattctgtattttcagaggctttcagaaggatgttttcttgcagttttactgctttcatgcctaacatcttagtccaatctggatgctataacaaaaataccacagactaggtagcttaaacacagaaatttatttttccatagttctgcagtctggggagtccagtccaaggtgctggcactt

SEQ ID NO: 147356 - DNA, 822 bp, Homo sapiens
cctgttctgcaatatgtggaccaagcgatatcgaggcacaggatgattctgagtgatgaggggacactgattgtgagagctctttatgagccatataccactgagatgtccatataccactgagatgtccatataccactgagatgtccatataccgctgacatgtccatataccgctgagatgttcatatactgctgacatgtccatattccgctgagatgtccatatactgctgacatgtccatataccgctgacatgttcatatatcgctgagatgtccatataccgctgacatgcccatataccgctgacatgttcatataccactgacatgtccatataccactgaaatgttagctgtcattgcttccctgaaaagttggtgtgaacccaggagggctggctgcacactgctggtgttggggggatgagagagccagggcttgctctttgttgttgttgcttgtgcttagtgttcaggtcacctgtagcaggcagagtgtggtatcggtccccgaatggaacagagtcagggctgggatgcctggtgcagatggaggagggagcccttagctgggccggaaaacctcgaagggtactttgtgtgaaaagaggagtgaaagaggaagtggaaaggtactgttgacctgtgtccttccccagtcaccttcctctgaaagctcctcccttagtatgaatgaggtagggatgccggccagcaggcaggtgtgttccccagtgaggtgaggtcctcatgtcacagcagaatgacaccctggagaataaagttcgggaatgaatcaaggctcctctaggctga

SEQ ID NO: 147357 - DNA, 487 bp, Homo sapiens
aacacaaggcaggctgaagtgccgcagggacacagcacgttgcaggtgggccctgggggcagatggggctccatctggcactaccacttacaatggaatggcaacgaggcccaaacctaagttagaacagatcaagagggccttggattcaatgcagagaagtgtgggctctttcctgaagatgggggaactgcagaggttctggaggagccatgaccatgactggcctgtgtttaggatgagggctctcctggctgatggagaagggactagatgaagcttttcccccagtgttcttggctctgggaattttccgcctcctccttccatggataattatccttcctaagaaactgatcagatgggaaactgcaggaaattgtttgggacggggattgtgtaggagttgaggggagagtggagaggatgtagccggagaggggtatccgtgccaagcagcaggtggtggctcccttcagaggggagg

SEQ ID NO: 147358 - DNA, 295 bp, Homo sapiens
gagtctggagtcagttctgtccctcggtcctcgtcccacaggcggttggttcaagcccccctgtaaattcgactaagctagatgaagcttttcccccagtgttcttggctctgggaattttccgcctcctccttccatggataattatccttcctaagaaactgatcagatgggaaactgcaggaaattgtttgggacggggattgtgtaggagttgaggggagagtggagaggatgtagccggagaggggtatccgtgccaagcagcaggtggtggctcccttcagaggggagg

SEQ ID NO: 147359 - DNA, 215 bp, Homo sapiens
caactttaagttcttttgggtacatccccacaaatggtattgctgggtcatacggtaattctatatttagttttttgaggagttcctatactgttttctacagtggctatacaagttcacattcctgccagcagtgcacaagaattccttttcctcgcatgcttgctaacatttgttctttctagtttctttcttaaaaaaaaaattgccatcct

SEQ ID NO: 147360 - DNA, 391 bp, Homo sapiens
ccactcccttcgcctgtgccacattcgtactggggcgaagggagtgggcacaggggcgaagggagtgggcacaggggcgaagggagtgggcacagggaccagctgccgggtggacagtactcctgggggctgcctctccggtatggggtccgacccccttctgcaactcactcccatgacacagcatgagggcctcagcaactcgctctgtcgcccgggctggagtgcagtggcgcaatctgggctgattctcctgcctccgcctcctgagtagctggtacaggtggacgccaccacgcccagctgatttttgtacttttagtagagacggggttttgccatgatggtcaggctggtctcgacctcctgacctcaagtgatctgctcacct

SEQ ID NO: 147361 - DNA, 687 bp, Homo sapiens
tttgtcccatgtacctttttaaaattctgtctcacaaaagaaatataagagctaggtgtccaaaatttataaaatacagaaggtgatttcctaatgaaaagagagatagtgagaaagatgtaaaagaggataggcagtgtgggttaatagattatgttagcaaagtagtttgaataggaaaagactttagagaggagcccaaacattgaggagttatgaggcccaggagatactttatgcctaggatctgattctagctctgtctcaaatgcatgtctctgtgggtccacctataaaaatggaggagctaaattagataatccctgaaaggattttccaggtttatgatggaatgaattgggcaaaacaggaagttgcaatttagaaaagttctgcctaaagcaaatagctgtggtactgactgcccacattctctgggatgattttgatgtcagatactgttcaatcatccctctgagaatatttacatttaccaaactgtttccctgttctgctttagaacccttggctgctttaaagtctgtgagatcccataatttatctgtaaatttcattctttgagtctgccttatagaaatgtttacagttacagttctgatgttatgataatttgtaatgtaaatttgaaataaattatggagtatttttgttgtttaaacaagatca

SEQ ID NO: 147362 - DNA, 343 bp, Homo sapiens
ggctccttgttgtgtgttgttcccttccatgtgtccatgtgttctcatcgtcaaaaaaatttgtttaatgcagaggaatgttgaagcaaaatctgaggttataaataataattttaaaagaagtaaaatttcagtcaatagaaaagggaagtataaagcgttgagagagagagcatcaggaagaatagctaatggatgctgggtttaatacctaggtgatgggttgatctatgcagcaaaccactatggcacatgtgtaacagacctgcacatcccgcacatgtaccccagaacttaaaagttacagggaaaaagttttttgcatgtcaaacaaatgaaaaaa

SEQ ID NO: 147363 - DNA, 452 bp, Homo sapiens
ctttagtcagcttatgactaaacaggtgctgataaacagaaagcctgggattgttagaagtctattacttcattctatccaactgtgtctataaatgtcatagaaggcagccgccgccgcccgaccgccgggaggatggagttcagcgggcagcggagctgtctcagtctttgccgccgcgccggcgagcgccgcccgggaggcagcggctggaggagcggacgggccccgcggggcccgagggcaaggagcagccgcctgccttggcctcccaaagtaccgagattgcagcctctgcccggccgccaccccgtctgggaagtgaggagtgtctctgcctggccgcccatcgtctgggatgtgaggagcccctctgcctggctgcccagtctggaaagtgaggagcgtctccacccggccgccatcccatctaggaagtgaggagcgcctct

SEQ ID NO: 147364 - DNA, 475 bp, Homo sapiens
acacaacccctcacacacctcaggaacccatataaggaacccacacacctcaggctcatacacacaagccctcacacacctcaggaatccacacacaacccctcacacacctcagggtctcacacacaatgttgacacacctcagggtctcatacacaaaccctcacacacctcaggacccacacaattcatcacacttctcaggacacacataaaacccctcacacacctcaggggcccatacataacccctcacacacctcaggactcacacacaatcctctcacacacctcaggactcacacaacctctcacacaccttaggacccacacacaaccactcacacaccttaggacccacacacaacctctcacacacgtacacctcatcatgtgatcgtggggatgtaatacaaccccacgatcacccctccccaaatcaagcccgaatgatatgacctatacgcctacacaa

SEQ ID NO: 147365 - DNA, 378 bp, Homo sapiens
ttttaatttttgaggaatctccatactcagatgatcttatttccttatttttcaagtgtgtgggtctatgtgtggttttggcagggaagcgagtctctgttattcccacatactccccatgactgttaagtgctgtgttagaagcatatggtttgatgagaattctaggagagacaaatgtttcaaaggatctctgtattttcaccggcaataactaataaatcatctggcttcgctgttccccctgtaaaaattataaaatggagaaaataatgcatgttttatcatcttggtaaaatggtcaacataaatgcagaatatttgaaaactccggggttttcaaaataagattgtcaataaaaatttataattgctaat

SEQ ID NO: 147366 - DNA, 504 bp, Homo sapiens
ttatggtcaacagtgtggatgttccttaaaaaattaaaaatagaacgaccacatgaccaagcaattccacttcttggtatatgtccaactcaaggaaatttaatcagtatgttgaagatctgcatttccatgtttattgcagcactattcataacagccagtttgtttttcttaaaaaatagttgtccttgaccatttttgaaacgttattcttacatcattttaattgcattacttcttaactcatcctttcacaatttctttagctaactcttcctcctgtctgtcaaatatctgttttcctttaagtgcagttcttggttctgtctctttctattctttctctcaagtcttagtcacttaaaaaattatatgttatagacaatttccaaatctatgcatctattccttaccttttttgatctagttataactccaaatctaacttacctaaaatctgtaaatgttatgtactttcgttctttgagcttgaaaccttatttt

SEQ ID NO: 147367 - DNA, 189 bp, Homo sapiens
ctacctgggtacttagctagatgacatgtcccagttcctagctggaacaggtgaccatgtgtcagttctcattaatggaagtgagcataagtgaagtgtgccacctccaggttagaacttggaagaaggtgtatgcctcctccatgctttctctcccttcctgccagctgcaatctggacgtagctgcc

SEQ ID NO: 147368 - DNA, 184 bp, Homo sapiens
ggaatgtcatgatcagattcgtgcttttgaaaactcaccagctttgagtaataggatggatttgatggggaaaaggctgttaggaagcagggaggttggataggaagttgctgcagaccaagtaagagaagtccttggggaaaaggtcagcttttgctgaccatagaataagaattttgcaaga

SEQ ID NO: 147369 - DNA, 457 bp, Homo sapiens
gatcgccctcccatacacacttcacagtattttaaaaagtatagtctgtggactatctgtatcagaatgcacagtctgtgggctctgtaacagatccacttaatcagaagatttgaaaatggtaccgaggaatctgtaattttaacaagtacccaggtaattgtatatccatatgaagtgttgaaaattactgtttgtaaccttgtcgatagaaataatcttcaacccagtcttagtaggcaggcaggcaggcaggcaggcaagtacttgcttatttaagattcgttacttttcataattgacattggagcttgcatttccttttgcattgatttaacttctggctttaatctctgatatactgtgtcctccatgttaagatgtgtcgatgagacagcagaaaatgaaacctttgtcctctttccttacattattttgtgttttcactattagccac

SEQ ID NO: 147370 - DNA, 351 bp, Homo sapiens
gggcctggctctcttgcacctgtggttttgctgggtgataatcttctttctccgttttaaaatttatcctcttctttcattgtcatatttactcatttctttctcttttttctcccttttcattgtgaaggagaacttagagcagtgttttctgttcttctgccaccggcaatggcttttataggcagaaagaacattggtgtctctagtgtggaacacttataaggcattttaaaaacatttacgtctgtaattggaaaagggcaccataggaaaatatgagctttaatcattaactttctagaagtttataagatgggagtattttctcctgaaagaatacctatggtc

SEQ ID NO: 147371 - DNA, 450 bp, Homo sapiens
gatttcaaaggtttaagagaatagatctcgagcagattaggaaagtctggatattaatagcagcaaaatatatggaataataggaggtgagatcaaagatattttgctatgcttaagcgcaggagaagattgaaaaacaaaactatggagtgaaaaacttggaggtcaaagatacatactctattttctccaaatcagcttttttcattcaaaaccagcaatagccaaacagcttcaaaatgactttttaaactttttccttaagttatactttaaaattaaataaaatctccacaggaaaactactattagatatttcccttttgaaatgtgtaattataatgtcttatgttacaaataaataggcactaaaatggcattaatggtaaactcaatgttaatccaattaaaaataataggccaggcttggtggctcccagcactttggga

SEQ ID NO: 147372 - DNA, 317 bp, Homo sapiens
ccatgcaatgagataggttggtgttacctaagtgcataataccactatgacattattctttatggtagaggtcaacataagactgaattgcaatggttatttctgctaagaaaatactttctctggacaaaagagggcatttggagaaatgggaaccaagagggtatagaatggaaattatgctgtgttaatatgtctccagctatgaagccccagccattcctattaaccttgtgtcaatttgtattatttagagacagtcaattatgtgaggtacattataatttttttaagccagcaatagttggaggttgtca

SEQ ID NO: 147373 - DNA, 518 bp, Homo sapiens
tcaaaatgatgcatctcacagtctaataaatgcagcaatctgtgtaaatctgcatactgtagtctattttcagaaaaatttccaactcaaattatgttgctgattcctgttcggccttcttccttggttttatgctgaacctgtactgctgatcagggatgaagtactgaattgggggtaagaatggagaagaggcactgagggagacagacatggctatgcctggagtaggatcatatagttccagaaagactgaggaagaaagaagtcctgaaatcttcacataggttatcagtgatgcacaggttatgaactatagaaaagtaggctgggcgtggtggctcatgcctgtaatcccagcactgtgggaggccgaggccagcggatcacctgaggtcaggagtttgagaccaggctgaccaacatggtgaaaccctgtctctactaaaaatatacaaattagccaggcgtggtggtgtgcgcctgtagtcccacctactcaaaaggctgaggcagga

SEQ ID NO: 147374 - DNA, 296 bp, Homo sapiens
ataaataaggaacttgccccaggtcacgaagttagatagtattagaaaaggaggaagatattgcagcccaggttggactgctgcaccccacagccctacccaaagtccacctacacaaggaggcctttgcttcctgcttctttcagttggggtcctgactcatggacttcgtatgttcccttttcctttctcactgaaatgaaaactctcacacagtatacccatgatcatgctgcaagagtagaaattaagtttatgaatgacacccttcacttactgcccctttctctcataca

SEQ ID NO: 147375 - DNA, 742 bp, Homo sapiens
gatgggacttggctttctggaggagcagccacattagccggggtgacctcggtcaatgctgcggggacttcagttggcaccactgtgactgtgctttccaaatgcttttcatgttccccctgcttctcatctatacccttccttaccccacccaccccaagcacagggctgcctgctgatgtcagatggaagacttgaatcagaattgccacctggtagaaaagtagaccatccgaaaggtggccatttattcattcattcagttggtggttatttactgagcatctactgtttgccagatgctgtgctgggtgttaaggagacaaaatgtacaagctagcatccctgcccccagtcacctgtgtgcagggaggcagataagaatatcagcttgagagctggaaggtgcaaaaaacccaaatgtccaacaacagatgtatggctaaacaaggtgtggtcaatccatgcagtggattatttttcagccatacaagaatgaagtacttaccaaacgtggtggcttatgcttgtaatcccagtggcagtacaaggttggaagaagtctacagccatctcccaggtacattagaagcccagagggtcccttacctcaacctggaggtttagtggcttccaaaaggagaggaatcttgactagcatcatgaggaaacaatcggtgcaggaaatgggagagggtgtgccaagcagagggaacagcacaaggcacagagacaaacgcaa

SEQ ID NO: 147376 - DNA, 802 bp, Homo sapiens
ctcgtagacatggacagatgcagtggttaataatggacagtgggcatgtctgaaatggtaccaccctttcttcctagcccagtagacagacctgcacagaatacgctagttctttctgctgacttagcaagcctgtaacaggatagaggcttctaatcaaacatgatagaaaaagcagtcacggtagatatctacaagcctgccaccagggctgaagtctacacgtgcccagttcttgccccactgagcaactgacactgaagttaccaccagggcaatgtggaactcaagaatgggaaagagctgtccctctcaaccctccccatccccaagcctgcgagccaaaggctcacaggtacccggtgaaaggccaaagaatggatcaggagcctgaggctgcaggctgagatccagaatgaccctgaccacctgtgggccctctggccttcctgagcctcagtgtgctcacctgtaaaatggagacgattgtacctgttctttatttttagggctgtgacaatgaaaggagatgccaaagatctttgtaaactggagaatggttctacaaagtcttatgctcacaactgcttttagatttgatatttttgatctctctcttcccactttagctaaattaagcaaagactttcaggggaaggccctgctggaaagactctactgtttgaaagcaaattgtttccctcacccaggtctccatggattatgtacagaaaagcagtggactctgcctcctatttatctgggttttctctgctctattttgtttttattttcttctatt

SEQ ID NO: 147377 - DNA, 460 bp, Homo sapiens
atctaataagagttcactcacatacatgtaaaatcagcatattgctgcccattaacatatttaagctgtaagtaatggatctgcccaccttatcctctttttggtttctcagtattcactttggaccccctaaaatcccttgcctttcccatatttctgtatttacagagtacaaacccaattagcttaatagagtcttggttattgctttattatttatcaattttttaaaattaaataacaattgtttatattaacggtgaacaacatgatgctttgaaacatgtatacatttttgaatggctaaattgtgctaattaacatatgcattacctcacatatttatgatttatttgtggagagaacacttaagatctaccgtcttagcaattcgcaagtatacaatacattgttatgaactatagtcatcatattataaaataggtatcttagatttatt

SEQ ID NO: 147378 - DNA, 519 bp, Homo sapiens
ctgtctcctgctaaagaaataccttctgtctatgcaacttttctttccccctttctatacctctcttataagggcaaagcatttatagcctctgagttctaagaaaccatgggagcacggtgatctgctggtgagataaccgagataacagggcccatggtccaggtgccaacaccgaggacccttgttcctttatgtgcacagaaagaagcattaaagagagttgtctcatttctggttgggcgcagtggctcacacctgcaatcctagcactttgggagtccaaggcgggtggatcacctgaggtcaggagtttgagaccagcctggccaacatggtgaaaccccatcactactaaaaatacaaaaattagctgggcatgttggcgggtgcctgtaatcccagctactcgggaggctgaggcaggagaattgcttgaacctggaaggcagaggctgcagtgagccgagattgcgccgttgcactccagcccgggcaacaagagcaaaactccatctc

SEQ ID NO: 147379 - DNA, 335 bp, Homo sapiens
agttccattattcaaggaatcgaagtaaaattttgttttaagagagggtggtgctaagaaataaagtccatctgtaggccagggttaaaagaaaagaaaataaagtgcgaataatactgtacggctgccttggtgtatagtggtgagcatagctgcctccaaataacaccgtacaacaaagtatttacctttttaaaaatacatatacgttttgcactgaggctctcggcttcaggaggctgataaaacttcaagttcctttgctacagaccaccagggatacacctgtccacccacaaagaagtgaggtttactagctgcggcaagggagacac

SEQ ID NO: 147380 - DNA, 394 bp, Homo sapiens
tccctgaagagggtgctgaggaccaggtggctgacgaggggaggagagactggtggaggcaagagggacagggtggtctggatggggacccccagccacagacctaagagcttgagaggggatcactatggccagtggcagggagggggtcatttggcctgagaccagcccttgtcttgtggtggctggaagcttaggaaaggttttatagagaaaagagactagattgccgaagcttactcagaatggtagggacaagagtggacacagaagccggttgggagtgtggcactgagatccaggggagatggtggcagctggctgagacagtgtgggaggtacaggggacagggcatggtgtgagggtgaaggaggcgaaggaggggctggggag

SEQ ID NO: 147381 - DNA, 451 bp, Homo sapiens
aacttaccaagcaatgttagtgtatttctctagttaacatctctcctcttctctgcttattctagaccttcttcaccttttttcaaccttggaacctcttccattctcctccctcttagccgtctcccctgtaccttcgaactctttcaactggattatttccatgagtattaattaaaacgtgctctaattatcttctatcttttaaaacaaaccaacagaaactctccttgggctcgtttgccatctaccagtgccttatctctttcttctcattcacagtcagccttcttgagtttcagtgtccagctactacttcatcaccaattacccatgcaactctgtgaagtcaggcgtatacatcactgtttcattgaaagagctcttgttaaatgaacagtgaccttcatatggctaaagaacatgaaatgtctttggttcaacttacttg

SEQ ID NO: 147382 - DNA, 295 bp, Homo sapiens
ctctggatcctagagatcagggctctcacctgcaggggtttaaaaataatccacacatgtgtacatctcgtggggccaggtcttttcaatgaaccacaggtggtcctgagaagcatgctgcctctatgccgcattggaccatgtgagtggccagagtaggcaagatactcgattaacgggcattttaaagaactgacagttaggatgaatcaacagcaattcaaagcaaccaagacctcctgtgtacttgcaaacagctggtgctcctggatacagagaagagcaagtttgccag

SEQ ID NO: 147383 - DNA, 372 bp, Homo sapiens
ctgttccactggttgatgtgtctatttttaaggaagtactatcctgttttaattactatatcttcataatacagtttgaagtaaggtagtgtgatgcctccaggtttgttttgttcaatgaatcccatgctcaagtgtgaaaaaaacaggatacatgcccgatgtaggactgggatcaaagagaggacatttctgtccactgtacttaacaatttggctaaccatctcagaagatccaacccactccccttgtcacccacacccacaaactgtcacaaagtggaagagaagaagtagctgagacctcaacaggcaaggaaagcttaagacagttccgtgaagtttccggggccccaggtgcaaaggagaagc

SEQ ID NO: 147384 - DNA, 215 bp, Homo sapiens
aatgaatgaatgaatgatgaatgaatgaatgaatgaccaaagtgaatgggaaatgagaaaatctggggacagaatccagaaataaaaaggagggtaggcatgtgtcccaattctgaccaaaaaagattccaggaaatggttgttagaggtttctggcaaggctcttctccattcttagaagagagtcatggaaagcctttctgtctcctacggga

SEQ ID NO: 147385 - DNA, 356 bp, Homo sapiens
tactttatacatatcattaaaataagatgttctcacgggctataattttatgaatttaaagcttcatttaaaacttatgtacatataaaaactgccagaaagatacatgttttccttacatgtaaagaaatactgaacaatcactgagtaacccctatgggatattgccacatactgaattgtgtacccttaaaactcatatgttgaaatcttaccccctgggcctcagaatgtgactgtatttggaaattgtaccttaagtgaggtgattaagattcaatgaggtcctgtgtgtggggccctaatccgatatgactggtgtcttcgtaagaagaagaagaagctgtggatgcccc

SEQ ID NO: 147386 - DNA, 345 bp, Homo sapiens
caagcagatgcttcatagatgtctagtaatctcctaatcctttcaaagccagttattgtttctcttttctaatttaaataaatttgtgtggatattaattagtaggagtagtatcaagtttctgaatttgcccaacagaagtatgtcttggcgaaaactatttttaaggaaattgagaaagaacaaggaggaatacagagtctcactctgttgaccaggctggagtgcagtggcacaaacatggctcgctgcagcctcaatctcctgggcccaaatgagcctttcgcctcagcctcctgattagctgggaccacaggtgtacactaccacgcctgaccaacttgt

SEQ ID NO: 147387 - DNA, 315 bp, Homo sapiens
ccagccatcttttagggggtcatcttcccagtcactcattctggacattcttttctatcccctaaaagacaagtgagcattttcctttgagctcctgctgacattgttcaggcctttggcatagtcttgtcatgatttactgcccaatttgttcccctgctcttctcccctctaggctgtgaactcttgaggctgtctgaacagtgatggcatgccatctcctatagggaatggacatgcaaaaaggacacacatcacaagtgtgcagcttcctggctgtaaactgtaaactgaacctactcatgtcaccagcac

SEQ ID NO: 147388 - DNA, 363 bp, Homo sapiens
acccagcagtgggctagtagatgccaggcctgtggtggtcagggtttttcaactgtggctgtgttgacaatccaggctggatcattctttgctgtgggggctgtcctggacactgtgggatgtttagcggcagccttggcctccagcagcccttccctgcccagttgtgagaaccaaaaatgccttcacacattgccacatattccctggttgagtgccatctgcctatctggtggtgtgaaagagcatagctggccttgggctaggaggatgcgaaatcagagcaaggagacgaaggctcagggcctcacaaggcagtgtacgagcaactgtcagcatttttctgcctgcctgcctccaatc

SEQ ID NO: 147389 - DNA, 602 bp, Homo sapiens
gtttctttttaaaatcattttaaagagcagcatagtatgattttaaactccatattttgtttaatcagtttcctattgatttgctacatccaacaatgctgcaaggggtaactttgtacgtgtattatgctcacacgtgatagtgccatgtgtgatgaatatggaattaccaggtgaatgcatatgtgcatttgtacttctcacagatgttactccagctgcctttcatggaagctgtgctaacttatgctctcacaggcaaggcatgaaagcacttgtttctttatatcgttgccagtacagtatgttatgacatttcttaatctttaccaatctgttaagtaaaaaatggtatctcatctgtttttaatttgcatttctcttaggagaatgagcatattttcataaatttataagagctgtttgtatttgtgtttctgcgaactgttcatatcctttgccattgggctgttaccaagttgtatgacattatacctaagggaaataagcccctcatgtgataagaattggagttgtttgcagtttgttcatcttttgattcgggttatattacatttttccatgttggtgaatttattagc

SEQ ID NO: 147390 - DNA, 670 bp, Homo sapiens
tcttataccaaggagacatcccattgctttttaaacatgaaatattctttaataactccattcttttgtgcttactcttccagccaactggaatgcctttctcccattctctaacccaagttaaatcttcgtaagatgtctgattcccttagagcagaggtcagcaacctttctgtaaaaggccagtcgtaaatatttcaagctttgcaagccatattgtctctgccaactactcaattttatcattgtagtgcaaaaacagccataggcaatatgtaaacaaataagcatggttgtgttctaaaaaaaatttctttacaaaaataggtagtgggctggatttggtccttgggctgtagtttgccaacccctgccttagagaacctgtcactcttctactactgccatcctagctttttctccatgattatctgtttacaagcacattttgccaaaatactaaattctttgaagtcaacacttttattcctattccctaaaagctagaaatctggaaatagaaatgattcaataaagacatattattgaatatcaagaattatcattatgttgctggtggaaaaaagtggagaaaaattcttcggttgggtacaagattaaatggcttacttctaagatttatctaaaataaaagattatataaaaatac

SEQ ID NO: 147391 - DNA, 192 bp, Homo sapiens
gaagcccttcagaatcaaaaatcaccttttcagcctatttcccagtactctcctttatactccggccatagataagtatttcatacatctgagagatgccatgcactctcatatgatctattctttttaaactctcacttcttcaagacccagcattatctgtaatcttttgagtgacatcatcctcaactt

SEQ ID NO: 147392 - DNA, 299 bp, Homo sapiens
cagtggtgtgatcttggctcactgcaacctctgccccccgggttcaagcgattctctcgtctcagtctctcaagtaactgggattacaggcacacaccgccacggccagctaattattttgtatttttagtcgagacgagaattcaccatattggcctcaggtgatccgcccgcctcggcctcccaaagtgttgggattatgggcgtgagggcacacggtgcccggcctgttttattgtttgaaaaacaagtacaggttgttattatccaagaattgttgatagagtatatactgtatt

SEQ ID NO: 147393 - DNA, 183 bp, Homo sapiens
cattggtcttaagaaagtaactctataccagttggctatccaagttattaattcttttaatcactttaattcacccctacaaataaaatgatttcgtttttcgaaaattaaaatctaaaagtgtcttaaaatttactttttgggccaggtgtgatggctcacacctataatcccagcactttt

SEQ ID NO: 147394 - DNA, 407 bp, Homo sapiens
tattcataatagacaaatacagggaacagcttaggtgcccatcagtaggtgaatatataggcaaactataatacatatcaatgtactactacttaacaataaagtagaatgaactgttgatttacacaacatggatgagtctcagacattatattaattgaaagacttacattgaaagtacataccatatgattccatatatatcaagttctacatcatgcaagataacctatggtggggggaaaaagtcagaacactggttgcctctatatgggaggggaaggactaaccggaaaagggtaggagggaactttccatgtgaataataattttctatatccttttttttttttgagaaggagtttcgctcttgttgcccaagctggagtgcagtggtgcagtcttga

SEQ ID NO: 147395 - DNA, 515 bp, Homo sapiens
taaaaagaagaggagtgacaaaatcctgtttcttgacctttttttataaaatgaccaatgaccaaaaataattaaattataaaggaggagcagctaggcagagtttccagagtttcctccagggatgaatcacacaggacacaatgtctgcaaggagacgctcaagccatgagccatgagccatgagtgagacctgaacctagctcacccgctatcctcagctctcccccaaaggagaggcaagtgctatgtgagaaggataaagaggccgggtgtggtggctcacgcctgtaatcccaacactttgggagtccaaggcagatggatcacttgatcccgggagttcaagaccagcctgggcaacatggtgaaaccccatctctacaaaaaaaaatttagccatgcatggtggcatctgcctgtaatcccagctactcaggaggctgaggtgggagaatcaactgagcccagaagttcgagaggctgcagtgagccatgatcacgccactgcactc

SEQ ID NO: 147396 - DNA, 298 bp, Homo sapiens
tgactgatgtatatacagatatgagagttattagaaagcaccttcattttagaaggaaacaggagcacatagcactggacaaaaacagctattattattatacagctattattattattgttattattattattctgagatagagtctagctctgttgcccaggctggagtgaagtggcacaatctcagctcactgcaatctctgctcccaagttcaagtgattctcctgcctcagcctcccgagtagctgggattacaggcacctgccaccacgcccagctaatttttgtattttta

SEQ ID NO: 147397 - DNA, 299 bp, Homo sapiens
  misc_feature (273)..(273): n is a, c, g, or t
cctagttctaaatgtagagcaaggattgcaagggattatttagacaagttcatcaattaagtaaaattagacatgaaggatataagaatgaatgataaagcaagctaaaaatggtgaaacaagggatgtctgattggaagtagaagatatttatttaggttctaggacattagtatcagtgaggacagtaatttcctgctctctagtaatatacaatctagcattagatcataaaaaataaacaaataaagaatatgctacaagagaaaattngtgataaggaccagtgattactttag

SEQ ID NO: 147398 - DNA, 193 bp, Homo sapiens
attgtcattaatactgcctataaaatcaaaaacaaaaacaagtaattccatgcctctgccaaactgcatcaggctatcaactatatctggctttcactgagtttgaagaaaccttccctacttttcaactctagctggaaacatgagaatggcctgtcagttctagtgacttccctaaaactgtaatgagtta

SEQ ID NO: 147399 - DNA, 300 bp, Homo sapiens
caaggacagcatggacctgtcagatgaaatatcgggataccgtagcgtcgacattcattatctcatggatcatatcgtgtaaccggctgcagatattgtagatcagtcctcttgtcttcttctgttaccatgttaatagccacacccttatggccaaaccatccacctcgaccaattctgtggatacaggtgggaaggtcacagttgataactgaagaaacctgctgcacatgaatgcctctggctgcgggtcagtggtaatcaatactctgtgagagccagaacaaaactccctcatga

SEQ ID NO: 147400 - DNA, 469 bp, Homo sapiens
ggctgtgttgcccaggctggagtgtagtggtgtgagctctgcttactgtaaactctgcgcctaaccccaggttcaagcaattctcttgccttagcctctcaagtagctgggattacagttcaacatggctgccataaactggatattgatatctatgagcagaggagtccctccctgtgtccaccaccatcacaagcccagggcaagtactgctagagggctgcctatgatcagatcttctgagaacatcagagaaagactgtccttgcaatctacactacagcaagacttcaggaccttgaacttcaggttcataatctcacaactgagaaggatccttccacactcttggaacagtgcacccattggaactctgaaggttaagctcaccaggaaagtttctctccagaagaagataacacccttaatgtgaacagcttttcccaaaatcacggattgaaacttctct

SEQ ID NO: 147401 - DNA, 194 bp, Homo sapiens
aggggctgcctcctaacatctgtacaaggctggggtgggggcggcgttcccctggccctggttgtgagttgagttgagcttccagccctgtcctggaggagctggcctcagtcatgctacagccaatgcccttttgcagctgagacttacaggaaagagatctcattcagtaggagtactgagacctgaggctg

SEQ ID NO: 147402 - DNA, 576 bp, Homo sapiens
tgctttctgaggtttcacatacccaagatccactgcaggctgaaaatattaattaaatgggaaattccagaaataagtcataaattttaaattatgtgccattccaaatattataattgttccattttattattagttattgttgttaatctctgactatggctaatttatgagttaaattttatcataggtatgtatgtataggaaaaaacatagtctatatagggttctgtactacccacatttcaggtatccactgggggtcttggaaccaattctgcatggataagcggggactaccatactggcaacaaaaaaaaatcacgaagtcctcggcttctaaatccaatttccccattagcttactgtgtaactttggacaagtcactcattctccctggacctcatttcctgactgtaaaaagagcggattgagttagataatccctaaggtgctatttagccccttcagtggttgtctgctggccatattgtccatattctggattaggcgtcatctgcccctcaattctcatttcccccccaagagccactttgaggtttggaaaaaaaaaa

SEQ ID NO: 147403 - DNA, 378 bp, Homo sapiens
aggaaactcagaacagatacgtttcggcaaagagcaagtcgactgggattttttctatagtgggtgtgtaaatttcagactttaaaatccactcagtaaaactgacatccctgcttattcacttttgccgactctgctagaagcctcctgagttttgtttacaaggtctccggcacacagcctgccttctttgaaaggccaggccaggaccagcctgcccatcccttctgttctcactggatttcgtggccagtggcctggacgtgactaacagatggccattgcagagctgatcacctgatttcatggcttattcttgggaaagcctctgatctttttacagaaggttatccatcccttggtaaatccttccccttg

SEQ ID NO: 147404 - DNA, 480 bp, Homo sapiens
aggccccattcacataatctgcagcaagcgtgtgaggaatgtgcatgagagtgtgaaggtttctggagtaccaggagtctctggagattgcctgttctcagctcatttgtcattgcctaggtttcctggagcatttccatcctaggaaattttttcttggcctcaggacagaacttctaagaacatgtcccaggattgggccctctggcaccgagtccctctcaccccaccacttctggccagcctctgctgtgtactggatcctgagctgcttacagagctgagcgcactgaggtatggcccctgctctccagggactaaggatccagtaggctaaactggatgagggcagaagcctggctagacctgggcctatggcagggctggaccaatagacgggaatcagctgatggcaggagaagaaggttgcagggacagggaaacaggcagacctcatagatgggtcagctagagaggaat

SEQ ID NO: 147405 - DNA, 342 bp, Homo sapiens
ctatggagcaaggacatggggactgaatgaaagaggggaggcagacgtccagcccaccattcctcacccaaggagatgatcccacaagctcacaaatgagcagaactggaaaagacctcaaagtgtggctggataatggcaacacaggcctcgagtgctcactttgtgctgggtgctatgccaagcaccacgtgtgtaccacggcactggcaccccaccacggcccttgttcacagaccaggaaaccaactctcaccacctaatcagtatggagccttggttccaacccacatcatctatctgtgcccagaatccaggttggttccatatcaggctgcctga

SEQ ID NO: 147406 - DNA, 435 bp, Homo sapiens
ccactgcagtccacaacagatcaagaccctgtctcaaaacaacaacaacaaaagcatctgaatccagagtggcccaaaacctcagttttccagtccaatgataattccccgaggaaaagaagctaagatctcagggatgtcgctgtgcccaggctgtttcaggccagtcggccactggtacatgtcttatgaaatcagtctcttagaaaacacacgcccaacatcccatgtagctcagaacagaagcctgcgtggtgggtgctgccccgaccatgtcaggggatctgcatggatttgagtgcggtatcactgcaggggctacatcaaccagtttcccaggggcttggagagtggggatctggtcttgaccgtcacagggttaagtacaggtatcagtatctacgggcaattcactccccagcacccaggggcata

SEQ ID NO: 147407 - DNA, 149 bp, Homo sapiens
acagaagctgtaggtcagaaaagtgagagcttagagcttgccattaactctgggccaagttacattcttagagggagccttatctgctatattgttgtgtgggacttgtctgattttctattaccgcctgtttcccagtaccctgtgat

SEQ ID NO: 147408 - DNA, 553 bp, Homo sapiens
aggtataggttgaagttctttttttttgcatatggatatccagttgttccagccccattgatagttgaagaaactcttttctccatctaaatgcttttgtacctttgtcagtaagcagctagccattcttgtgtgaggttacctctgggttctctattctgttctattgttctttgttcctgtcccttcaccaatatgacacagtcttactgtagctatgtagttgacccttgaacaatgtgggggttggaatgttgaccccctgcccccattcagaaatcaaagtgcaacttttgacttcccaaaaacataattactaatagcctactgttgactagaaggaaaccttacagataacataaacagtcaattaactttgttttgttttgtttcttcttcttctttttgagataggatgttgctctgtcatccaggctggagtgcagtggcatgatcatagctcactgcagcttcgacctcccaggctcaagcaattctctcacctcagcctcccgagcagttgggaccacaggtgcacactaccactaccatg

SEQ ID NO: 147409 - DNA, 335 bp, Homo sapiens
cttgagttacttaattctcaccatgaccccatgaggaagggaggtactagttaagggaggtactagtttacactactctagagataaggaatcctagatccagagaggttaagtgacagctccagattcacgcctacatctctgggaccccagaggctatgcataccagctgcagaggttaccccactccagtggttatgtccctgagcacccaccatgcacgggccactcactgagcaagggcatcaaacatcccctttcatcctaccccatcttacacagggcgcacctggcctgctgggtttggtttgtttgtttgtttgtttttgagacag

SEQ ID NO: 147410 - DNA, 489 bp, Homo sapiens
cctgaaaccctcagcctggaacctggagcctggagcctggaacccggaagctgaaacccttagcctggaacctggagcctggaacccagaaccaaaaccctcagcctagaacctgggactgggaacctgaggcctagagcctggaaccaggcgtgcagcctagaacctggagtgaagctggggacagaagccaggcctcggcctctgagtctgaaagtctttgagcacaggtggcagacagcagcaactgcacacacgcggtccttggccagcatgattccctgaaggcccatcctaagcctcgtgtctgcattgcctcatagactcctcacagccacccagtatcgcctccccttgccaggtggaaacactgagactcagagatgcttgtcgcttgtctgaggaggtcgcctggccgcagcacccaatgctgaccctctacaccacactctccctgggtaccccaaagattctctcatgggtgtgcga

SEQ ID NO: 147411 - DNA, 429 bp, Homo sapiens
gttctaatcccatttctgaaagaaagagcataaatatttgccgttagaaatcatggaacagtttttagatgtgttttatgttatttgataggttaatactttatttcaggatttctttttgcattatccttggcagtggctaggtactgtcaatgaccagtattttttgttctatctggggatgtgaatccaaaacaaaggatagaattgcttgtgctctgtttttctctcagttaattttttcaaaatataatcccaagtacaaatcatgcttttgagtattataggggatcatatttttttcttataaccttgaataagatgcagtaaaaacagtgaagctgaccacttttcttccctatcatttaggtatgtagcttctaccagatattttgacatcctgtttcataagaatctttttctttaatt

SEQ ID NO: 147412 - DNA, 250 bp, Homo sapiens
ttgttttaatcagtgctcaaagacaatacaaatgtttcaagtaaagagggcagttttgtagataggacctgaagtaaatctgagcctcgtggggggaagtgctgggaagccaccagctttaactgctagacaaccaagctaaacacttggaagttgttcttgattctcccttccgctatttatcaagctcctcccaatttcaaatcctgaatccttaatccgttccctcccctccaacattcatactgtg

SEQ ID NO: 147413 - DNA, 393 bp, Homo sapiens
tactacgtgctaccaaaatacaccacattctacagtaaggtcagctaagctaagctatcgggcccataccccgaaaatgttggttcatacccttcccatactaataaatcccattatctacactacccttatcataacagtaatatccggaaccatactagtaataatcagctcacactgactactcatctgaatcggattcgaaataaacctattagtaataatcccagtattaataaaaaattttaacccacacgcatcagcacaacattcaggccaccacaggctatggctccactgggtcttccatcatgcctcccacatttcaccaacacacatgccttccggaaaccagcctgattccttgcacacaccctgcctgttccccaccag

SEQ ID NO: 147414 - DNA, 494 bp, Homo sapiens
tttatcctcctttcacctccgtggtgagcttgggacacagaatattgttaatgtattttttgtatatttcatgtttctaattccatcttcttttggtaattttgttttatttatttgtttgtttgtttgtttgtttgagacagagtttcactctgttgcccaggctggagtgcaatggcgcaatctcagctcactgcaagcacctcttccctggttcaagcaattttcctgacctcagcctcccgaatagctgggattacaggcgtgtaccaccacgcctggctaatttttatatttttagtagagacagggttttgtcgtgttggtctcaaactcctggcctcaagtgatccgtctgccttggcctcccaaagggctggtagtaaaagcatgagccaccacgtctggcctatttatttttgagacaaggtctcgctcttgtcccaagctcaccatggaggtgaaaagagggtaacgtgagaatgggttaagag

SEQ ID NO: 147415 - DNA, 414 bp, Homo sapiens
gttataagctttccccacgggagatcgcaattgtggttttcacgccacacccttccctgtcctgcaaagccggcacccgaggttcctgcacccgcggcttctgcactcacggccccctgcactcgcagcccacttttcactctcccacgcctggccctggccaagggagttggtccccacccaaggttatgtatatatatcatgaaacccctcgggagcttcgttcaacctgcgaccgccgtctaaactttttgcctgtcctccacgggggtcccctgtgaggaacagtaaggaacggctgccctcctgtgttgggatttgggagtgcacgcaagtgtcttctgccactgctcctatttttatattccgccaccctccccgagttggtccctttgctgggtggggttaggtctg

SEQ ID NO: 147416 - DNA, 111 bp, Homo sapiens
tgctggaattacaggtatgaggcactgcagctggctctttctaaaacacagatctaaccttgtcccttgactagctcctctttgtctatgtaataccctaatattgagcaa

SEQ ID NO: 147417 - DNA, 669 bp, Homo sapiens
tgtctccccagagttcgtatgctgatatattaaatgccattgccacaaaatgtgactgtatttgaggataaagcctttaggatggtgattaagctataaagacatctttaaggtgggtcctcatccatgacgatttttattcttatatgaagaaatcgggacacagaaaggcacaaagggatgacctttgaagacagagggagaagacaggtgtctacaagccaaagagaaagacctgaggagataccaaacctgctatcactttgatctccgccttccagcctccagaactgtgagaagataactcttgttatttaagccacctagtctgtggcacattgttatggcagccctaaggaatgcatacaacttccaacaaacacacctacacacgtgctacctgattctctgattctacctttaaaatatatctagaatcatccaaattttccatccctaccgcctttaatttctgtgaaccacaccacttacctcttactacaagagtctcctcctgacaatcatgtctccaatataccccttctgagccattctcaacacggcatcatgagtgatttattttaacacaaattttgtccttggccttggctgttgaaaatcgtttgatagcttccaattgctcctagaataaagttacacaaattgctc

SEQ ID NO: 147418 - DNA, 767 bp, Homo sapiens
tgtctccccagagttcgtatgctgatatattaaatgccattgccacaaaatgtgactgtatttgaggataaagcctttaggatggtgattaagctataaagacatctttaaggtgggtcctcatccatgacgatttttattcttatatgaagaaatcgggacacagaaaggcacaaagggatgacctttgaagacagagggagaagacaggtgtctacaagccaaagagaaagacctgaggagataccaaacctgctatcactttgatctccgccttccagcctccagaactgtgagaagataactcttgttatttaagccacctagtctgtggcacattgttatggcagccctaaggaatgcatacaacttccaacaaacacacctacacacgtgctacctgattctctgattctacctttaaaatatatctagaatcatccaaattttccatccctaccgcctttaatttctgtgaaccacaccacttacctcttactacaagagtctcctcctgacaatcatgtctccaatataccccttctgagccattctcaacacggcatcatgagtgatttattttaacacaaattttgtccttggccttggctgttgaaaatcgtttgatagcttccaattgctcctagaataaagttacacaaattgctcggaaggctttcaattatctagttttggctaaactcttatctcattcctcaaccaacacatctgttgtatactaggcaggctcagcttagtgtctgggt

SEQ ID NO: 147419 - DNA, 556 bp, Homo sapiens
tgtctccccagagttcgtatgctgatatattaaatgccattgccacaaaatgtgactgtatttgaggataaagcctttaggatggtgattaagctataaagacatctttaaggtgggtcctcatccatgacgatttttattcttatatgaagaaatcgggacacagaaaggcacaaagggatgacctttgaagacagagggagaagacaggtgtctacaagccaaagagaaagacctgaggagataccaaacctgctatcactttgatctccgccttccagcctccagaactgtgagaagataactcttgttatttaagccacctagtctgtggcacattgttatggcagccctaaggaatgcatacaacttccaacaaacacacctacacacgtgctacctgattctctgattctacctttaaaatatatctagaatcatccaaattttccatccctaccgcctttaatttctgtgaaccacaccacttacctcttactacaagagtctcctcctgacaatcatgtctccaatataccccttctgagccattctc

SEQ ID NO: 147420 - DNA, 595 bp, Homo sapiens
tgttccaagatgtgttgctctcccaagctttccctgctgaaggttttctattaattgtactctcagtccaatagtgggttctctgactctagccttcacttgtctaccatagctgtgatggttaaaagcttctccagtttgtcacagagtttaatatgcaccctacataattatgcaggattcactgtgctatcaaactgcaattcaaattagttcaggattaaaggcacagaacagtactgcttccttaattgcattgtactgtgctgatcacattcaaatacccattactcattccctctgtggagcaataagtcagggggattaatattcaggcaggtgacagggccaagccattaaaaggcagttatgcagaaagcatggctggttttattcacgttaatgaaatcagtgaaatgaaactgtaatagatttatcaaagctcagatggatttgctgtaaatcagtttgattcaagcaatcaaactggacaatagagatagttttcagctctagcaatgggtgtcagaaagcagcatgtgaaaagtgctgatattcttcatgtatggatttgatatccacctcatgcacaggc

SEQ ID NO: 147421 - DNA, 272 bp, Homo sapiens
gtgattcaaacccaggactcccaagatcctgtgagctttctccactttgggctgctcccaccaccccactgggtctcctggcccccaatccagggccctttcccatgcccaggggggcctcggttctgctggccagccatgcggggggcttctgaacttgcccagctgggcagctggatgagtggtagagccacacgccccctccccttgccctgagactctgggaagaggcgcaatcaggaggaacagacaataaagaacaaagaggccag

SEQ ID NO: 147422 - DNA, 204 bp, Homo sapiens
cgcagtggctcacgcctgtaatctcaacactttgggaggccaaggagaagagcaagtaaaatgttgaacaagaagacagaagtgtcttcttgcagttcctgtaagaaggcagaagtatttgcagaggggagaatgtggaagaaatagagaataattatctcttaccaaatgtaatggcttttgttgtgttttttcttttctaat

SEQ ID NO: 147423 - DNA, 736 bp, Homo sapiens
gtagaggtgggatttcaccatgttggccaggctggtcttgaactcctgacctcaggtgatccacccgcctccgcctcccaaagtgctggatcacaggggtgagccaccgtgtccggcctcatcagtatatttttaaatgccaaaaatgattccatatgcagtccaggttgcaaagggaaatgcctgactcttttgttggtggtggtagaagggagggtcatctttaaaagctatgtgattaggaagtagagtgacaagccaggaagtgaaatgacaagccagaaactagcagaagggcttgaacatgtagctgagtctcccaagatttttaccctggtggttgagaatgcccagagagtaaccccatttttctctgaaactcctcagaatgaggctaatgggaaaacaactacagctactgccacaactctttaccccatttgtccaagtgtccagggtgatcttgatgacaactgtcgtaacatctccccgctgccactaccagatgggtttagatgcagtagcagacattgtgtgcaattcagagtcgccccatagtgtctctgtcaagtttggttccaaacagactaagttctgctcttttcctagcaagttagaagccctagtacaatgattctaaatcccgctgctacattagaaacatttgaagagcttcgtaaacaccagcagcccacccccgggcctgtgtatgctatccagggtgaacaataaccac

SEQ ID NO: 147424 - DNA, 597 bp, Homo sapiens
acatccacctaatgacagagcatcaaactacaagaggcaaaaactaatggaactgcaaggagaaacagatgaaactactattatagttgtagactcaaacacccctcaaatcagaaacggaccgatctagcaggcaagaaatcattaagaacatagctgaattcaacaataccatccgttgattggatataattaacacctatcaaccacttcatccaacagcagaaacacattcttctcaagttcacatggaacactcaccaagacagaagacattctgtaacataaaaaacaccttaacaaattaaaaaaaaaaaaacaaatatagtatttactctcaaacaagggaattaaatgagaaatcaataacaagaagaaaactgaaacatcccaaaatatgtgaagattaaaaaagatacttctaaataacacaagtcagagaagaaatctcaagagaaattttaaagtattttgagctaagtggaaaaaaaaatgtacatcttatcaaaatttgtgggatgctgtgaaagcagggcttagaggaaaatgtatagcattgagtgcatatatttgataagaaagatctaaaatccatac

SEQ ID NO: 147425 - DNA, 416 bp, Homo sapiens
cctcgtgatctgcccacctcggcttcccaaagtgctgggattacaggtgtgagccaccgtgcccagccttctctgatgttcttaaaacaccctgcccagtcagcctcccattttctctgctcttgacagacatgttactttcctgcttactgtgtagtaacaacagtggtccaagtgtgatggcacctcgcatttggccccaagggaagggagtcgattgggagtggtgaggactgaggcaacagggtatcagctgagttcatgccctggctgaagagggcagcttcacctggttccagccagttgtggcccagtgttgccacatagttgggttttttaaatagaagcccattctggtttttgtgagtagtctcctggtttttaaatgttggcagctaattcagaagttttaaaaa

SEQ ID NO: 147426 - DNA, 326 bp, Homo sapiens
gtcattaccgcatgaaggccttcttgctatgccctctcacagctcaggacatgttagtcagctattgtcagtcccaaacctatagtgcaagcacacaaggaaagtgagatttgttatctaaacaggaaaacaagagctaaaggtaaaactgcttgcactcacacacatttaagtgttcagatatacagtatttccaaatataatcgctgcagatatctaaggaagaaaacaataagttagcttaaatagaggacctcagatttgtaaacacaataaaaaacataaaatagaggcatccagaaacaaaaccaatacaacaccaatta

SEQ ID NO: 147427 - DNA, 182 bp, Homo sapiens
cagccccctctgggcctcttccctagcctttccttattttgtgttgctttcctcacacccaggaggaacacatatcccaattcctgaggacagtcctgatttgcaactggcatcgtggcacaactgccaatagtaccacctttaaaaagtttagacactgaattatggtcatgctacttaac

SEQ ID NO: 147428 - DNA, 218 bp, Homo sapiens
caaacagcaacaaaaacactagttcgggggccactaaaaagtggtgaatatgtaggctaattcttctgagtcatggaaataagtgaattttacagttcaattgtcagttacattcaatttccatttacatcaaattgatcttaagaatcatggacataatcaaatcgtttttgttgttggtcaaacactgctctaagacttcacatctcttagctttt

SEQ ID NO: 147429 - DNA, 613 bp, Homo sapiens
aactgggtagaaggcactcaccctgcttcatggatggagtggaggaggggagggaatctttcctctgaggggagaaggtgctgggttgtttgggttcccagctgggttgtttcctggctccagccagactgctcttgtttgctcctgagttttattttaaccagattgtttaattgagacttcactagcctttaacttctggattgcctttggtgttcaagcccagaactctttcgtgtaattagagtcttactatttctacctagcaaactttttttttttctttttaaaaagattgatgcatccacatgttatgggggcacatatgatactttgataaattgatataatgtgtaaagttcgaatcatttgagaggccgaggtgggtggatcacttgatgtcaggagttagagaccagcctggtcaacatggcgagatcctggctctactaaaaatacaaaaaaattagctgagcttggtggcgggcctctaattccagctactcgggaggctgaggcatgacaatcacttgaactcaggaggcggaggttgcaatgagccaagatcatgccactgcactccagcctgggtaatggagtgagactctgtctc

SEQ ID NO: 147430 - DNA, 286 bp, Homo sapiens
  misc_feature (24)..(25): n is a, c, g, or t
  misc_feature (28)..(28): n is a, c, g, or t
cacccaggcgcacttctgcacccnngcnacttctgtcatcctctcatttgacagagaggatgacagaagtgtgcttaggagcttcttgccagtgctgttggggcagtgctgcagttgccctgactggtggcacctagcaagggggccatttgccctgggcccatccttggtggggtcatggatacccaggtcctgcatacccagcagtaggtcctgcatacccagggcccccggagccacggtgccctgactgtgggtcgggggacagtttctagaaagcagatgg

SEQ ID NO: 147431 - DNA, 216 bp, Homo sapiens
tcaagcactcgggggaagataatcagaacagggcagtacgtgtctgggtcttgaaatggctcaggaaaggtatggaggcagaagaggcgccacgctctccattgaccaagatgaggagtggaggcagtcagctgtgttggcctgcgggagggagactgttgggggagctcactgcaccaatctctagctgggctggacagggtccatagttgagag

SEQ ID NO: 147432 - DNA, 438 bp, Homo sapiens
cattaggagctcatcatctaaggggacttgctgaatgcagttctactcagcctacacttgtgttatgtctccctccagcttcatgagtggtaaactcatgaaaatataatacaatataaatattgtaagtaaatgacatccacttagaagtctacaaggaaaagaggtgggttgcttgagtgaatttggtcattcaataaaaatcataccaagacatttaggcatgaatgtgaaatgacatgagtactttgaaagttaggagcaccacagaaatatactttggaaataatgaagccgcagcagctgggaagaaggatggtagaatcctctctgggcagcccagagtttcacagtctcggtccaccctatgaccccaagccaagcccaaatgcatagattctgttccttgcacccactgtacatacatatattaaatac

SEQ ID NO: 147433 - DNA, 429 bp, Homo sapiens
accatcttcttttcatgccactgtccctctcattctgaacttaagcccactggcctgcacgggcctgccagcatggacaaagaaaagagtgaaggcatttagttgcttcggatcatcaaggaacagtgagaaactccatgtggttgaacataaacgttgattccttttactgcctgagctgctaagtcttgaaactgaagcctctgttatatgcagttagagtatccaaagctgggttctcagccagtagattaggatctggttgaaagctaggattcttgatgccttgtctggtacatttccaagctgttttgctccaccatgctcttccctctgtgtttggaaattaccagccggagcggtagaagccacctccctgctccacttgggcactttattgtcagcgcagctcatgcgcccaagatccat

SEQ ID NO: 147434 - DNA, 560 bp, Homo sapiens
gtctatacctcactcccagaaaaggctcagcgtgagataaaacagtgcaacaaagatattcagaacttccctttcccctccacctctaagcaatcaactccaactctctttcccttaagggaagtgccccttggagaaggaagcatcggctttgttaatggtcccttaactagctcagaagtccaaagtttaaaagaggaactcagatcattattaaataacccctatgggactgcagatcaaattgatcaattcttagggccacagctgtatacttgggctgagtgaatgtccatcctgggcatcctcttttcaggggaagaaagaagcatgatccatagggccgctataatagtctgggaatgtgaacatccatccaaaacattcctgcagcagaccaaatatttccagcccaagaccctcaatgggatggtaacaatacagctcacccaagaaaagcctgaccctcttctgtggacttctgatgaaatccactaggttgagcagctaaaacacctacccatcgctattcctgtcttagcgctgccatccctagaaaa

SEQ ID NO: 147435 - DNA, 350 bp, Homo sapiens
ctgtagttccagctacttgggaggctgaggtgggaggatcacttgagcccaggaggttgatgctcctgtgagctgagatcatgccattacattccagcctgggcaacagagtgagaccctgactcaaaaaataaaaaaagaaaaggctgctttaggatattgcgttcttggccctctgaaagggtacaagtcacacatccactgtcctctgttgctacggcggcctcacagtggaaagctagggacatactgataattttcatctgctgtgcaccaaaaacggcccaattattttcctagccaaggtcagtcatggagcaagggaatctgaagaacgctccagagaactg

SEQ ID NO: 147436 - DNA, 390 bp, Homo sapiens
ggatgtgtccagtgtggggtgcagttctataccaaagcattagacagagtttggtccatgtttgacttagaaaataactgcagaaatgctccacctttttgttgccttctgagatgtaaaagggattattaagcctcccaaacaggaagggaagtttaaatggagtaccatggattataatcttccccaaggtcttgctcaaggaaaagatgttcaactcttacataatgctatgcttcaaaaagactttccaattcatcacgaggggccgccagcagagttagggatcaggatccctgcgttaaaatatagattctacagtgatttgctgcagacactgggacagccacccaactccgctgggctttgattactcattctgtaaaacaa

SEQ ID NO: 147437 - DNA, 195 bp, Homo sapiens
cccagggtctattgtttccatccttatgtccatgtgtacccagtgtttagctcccacttataagcaagaacatgtggtattttattttctgtttcttagctatttcacttaaaataatagcctccagctcatccatgctgctgcaaaggacgaaaaggattttattctttttcatagcggccagtatactgtttt

SEQ ID NO: 147438 - DNA, 521 bp, Homo sapiens
caaacatgtatttggatgaatgacaaatagctactgaatatttgccctgttccaagcattgttagaggtacatgggacagggcagtgaacaaaacaggcaaaacctcctgctgtctcagagttcacactctaatggggagacccaggcaatgaggaaataattaaaatatacaatgtgtcttatggcaataaatgacaaagaaaaataaagcagaggtgagaaacagtggcagtgttttggtgatcatttgctttgcaacaagccactccccaaagttagtggcctaaaacaatttaatcacagttcatgttctggctacaacaatacacatccctctcatgtgcaaaatacactcattcctccctcagagcctcgtaccattaagggttcaggttcaaagcttaagatcttatcctctgaagtaggtttagggacaaacaagtcttctcaggtacttcttctggggacacagagacttgtgaactaaaagacaagttacctaccttccaacacaactggc

SEQ ID NO: 147439 - DNA, 523 bp, Homo sapiens
ataatagttaacttggggagtcagtaaggaatcaagtggaaagacaaagcactttattatgcttcataacttctgataaggccttattatttaattgtagttggatttgaggatttgaatccacaaagatttttcttttgccctttcaagaatctttatacttagatctatctgctacttgacaatcaaaacaaaattccagaactgtcacggaggtaaacagtaaatagctcgtgatccttgttatgaaaccataattaggaatttaatggccctaaatttgtctcttttccatacgatttttcataggctactgctaaattttaatatcagagtccagcaaaaagaactagaagatgattaagtctaaagaattaatgacatgctttaaaatagaatttccaaagtatatatccagaggaataactactgataggccataagcagagaatttccaaacagaatattcattcaagatcatcattactgaagagaaaactggcacattttaaaaaatgattta

SEQ ID NO: 147440 - DNA, 323 bp, Homo sapiens
gcaaagtgtaatctaagttttgatcaatacaatacatgatattttatgaacataatagatttttttgttttattttttgggaaaattctaagcaggtctctttttcatcattatgaaatatggtctttgttaaagagaaatggctgtgtggtcttctccctgtgaggcactaattgctattggctaatgaggactgctgtaattcctttggctgcaggatttttaatgcaacgagctaagaaaagctttcggtgtgtttcctgtggctgtgaggtaatgccccaaaaaagtcttacaagttttattcacacctttaccttgtc

SEQ ID NO: 147441 - DNA, 280 bp, Homo sapiens
cacttctccttcctgctgacatgtgaagaaggatgtatttgcttccccttccaccatgattgtcccatgtaaaatttccctgttcaacacgaagaaaaaagagaaaggccatctcttctataacagaatggacatttaacactctaagttattctttggtttgtcttcagtataaatgtttataatgtcaataatattgaaattggtcattttgtttctcccacagcttgtgctctggggcaaaagataatatatctttcaaataaatcaggatcggccg

SEQ ID NO: 147442 - DNA, 451 bp, Homo sapiens
agcttgctactaattctttccctagaattcccctagagcaatggatctcaaactagtatacctcagagtcctggagggcttgtcagattcttaggcccaaccttggagtttcagattcaggaattctgggctgaagacctgagaatgtacatttctagcgagtttgcgatgaggtctggggactaacttggagaaccattgctctagagaaggagaagaacagatctcctgggcaggctaactagacagccagactacacttgggcggttgctcagaaataaaagttacttgcttatggctctatgtccagttttcagggacgttgaatcccagtgcatcaccttccatacctcctcattttctgaagtgggagcagcatcagattcctagctcagttcactgtcttccctgaatgggcaaccaaaccatttttaactagcagctttcttt

SEQ ID NO: 147443 - DNA, 288 bp, Homo sapiens
taggggcaggagctggggagaggcagaggccgctgggaaggaaagggcgagcggctgcgagagggtggccactctgggtggagggataaggatcccacttgggtatgactctgaatagctacaagtgttcgggacagggcaagagactgaacaggaccaaggacgccctggggtgaatccaggcaccttctgccacactggacctgcagcaaggtgtacctgctcctctggcaagagaaaaagacaaagatgccagcagggtcattagtttacacacgttccttttac

SEQ ID NO: 147444 - DNA, 169 bp, Homo sapiens
accagtcaaattagcatgtaaaattaaccatcatgtatacattataaattagggcaggttatgccattgtacagaattcacatcaagatttgttggactttgaagaaaggaatagtgtgaaagtgcctggcttgagattgatatagacatgtatacatagatcattcat

SEQ ID NO: 147445 - DNA, 341 bp, Homo sapiens
actcccaggattaggcactctagtccaggaaggtggtgggagtcatattgactggcaggtgcccccaaaagttgtctcctaaatgagagggatgggcaggttcctttgggacagtcgcagagggaagtgtgtgtgcagcagctgtgctggtggaggagtgtgttcttcgagcgaggcttcccgaggacatgcatgctgaagcgtgaggtggtctgtagggggcgctgccccagcgtggtggggaggaaggtgagaggaggcctgcatgcatctgggtcctcactggcttcctggagtgggttgctgccacaggctgagaccccagcgggtgtctagagcct

SEQ ID NO: 147446 - DNA, 238 bp, Homo sapiens
gaagcctagctccttgcccacccagagacagatactcttaagtggttggctccaccacttaatgtgaatccccagaatgctgaatacttttaaccaaagtttattgattatcggacgccagctcagaaggagtttctgtgactctgccatgtgactctggctcagtcaggttcattaacttagatgacatctaaatggcatgcttactaatctgctgatgactaaagtgggagggccc

SEQ ID NO: 147447 - DNA, 350 bp, Homo sapiens
ttttcaaaataaaaaaattgtttcaaaacaaaaaaattaagagaactttaatgtacaaatcttgattggactgtatctggaaagaaatagaaatataaaagaaattgaagggaagataatggggagaatttgtctactgtgtccttccccagtgaaatgtaaaccatatcccaagcacttacaagaccgctgggcataaagtaggcactcaaaatgtatttgggcagtaaatgaaacaaacacattgcaaatcagtcctaggtgctgggttctcaaaaaaggataagactggctctttgtcatgaaggaatttacagtctgcagataaaaaagaaatgttaagcaagagc

SEQ ID NO: 147448 - DNA, 257 bp, Homo sapiens
ccaatttttcagctttgacccttatgtgatgtccttaaactaaatgtttctcgaaacccctggctctagtttttcagtcacggcctctttctagcttcagtgccccaccctaccattcaatcaaaagccgccatcccgttctactccaaccttccttctcagattgcagttcacttctttcagtgagtcaacctgctgccttggatcttcctctcccttactcattccactcatttcatgccaatgtcttgagccaa

SEQ ID NO: 147449 - DNA, 433 bp, Homo sapiens
aggaaagaaaatagtgcaagcatctaggttgttgtctagcatgtctagcacatagtaggtgcacaaccaatgtttgttaaagtggcaatataagccaacaaggtgatatagctacagagcaaagctagcatatccttaggtgacattaacagaagcacagagtctacggtgaagaaggtggcccacattccaccatccccaatcctccatcctgggtttactcctgggtcctgcatagaataagttctggacagacaaagagaatccagaggatgtagcaggtacagagactacacccaagagaagtggcttggggagcagggcacttgacctagggatgagctccacatggatgggcctagtcactgaccccaagtctctgcagaactactccaggactccaggacatggggagcaggtagggctgtgagct

SEQ ID NO: 147450 - DNA, 405 bp, Homo sapiens
aatttaaaaagcttactgtttagtctaaaaggattttcctagatcaaaaacaactgtacctatttggataccaaaaatgaaaaagaaatagtgcagaatctttagattgcctaatgggatctggagaaacagctcttagtcccagtctacattctaatgagttatgtaataaaggctaattcgcttagctgtattacacctcagcctcctcacttataaaacaaaatgagtgacaaaggtgctttccaaagtccctttgacctcctaagtgtgatgactctataatcttggcctttgaagtcccttggcaataccacccaaggatgtaatgatgcttgctgatgttaatgtttgggtgtttgtggttgtatatgtcttgaccactgtcccactccaagcagggga

SEQ ID NO: 147451 - DNA, 276 bp, Homo sapiens
ggacggactggtgggcagtggtgggaatctggaccttctgtgggtctctttacaagtctgtggtggtctatgctgggaccatcctaggtgctactgggagtagggagaagccaagggtggagttcattctgtgcgtgggggaagcccccgagctctggctgagcacaagctagactctctgcggggaaggaggggtgtagtccctccttcctgcaggagaaggaggagtctggagagtggtccctgtttaacacggggaggagagaggtggggaca

SEQ ID NO: 147452 - DNA, 233 bp, Homo sapiens
gagggttctaataacgctccagaatgaaacaaaagacctcagttgaatttataactccaactaccatgcccaaactcccccaagacactcaccatgggaatagcaaccccatttcaaaaaccagcatcataagctgggtgcagtggcatgggccaggagtcccacctacgcaggaagctgaggcaggaggactgcccaggagctggagggtgcagtgactgtgacagagccta

SEQ ID NO: 147453 - DNA, 402 bp, Homo sapiens
cgagcacagccccgttagccgggaggacccaaagctgccatgccgggcacctggtcctgagcccataggtcagccagccacagtcggaggcttctcaccctcccaggagagcaagctggggcagggatgagtgcggcagtccagggctcccaggtttgcaccctggatgtggagagggcttccctctggccagcctgagcctgcccaactgtggctgggcccccaggactggagagtgaggatcagatctttctggtcagaacccaggatgggctcaaaaggagcagtcctgtctctgagggacagaggaatcctcaggctccaccctcagaggcctggccacacccagagccctgattgatcagggggagccaaggccccatggcatcccctggcccctgc

SEQ ID NO: 147454 - DNA, 491 bp, Homo sapiens
caagagaaatggaggtttgggggcaaaagtgaatttctcctattcactctcctattaactctcctattaacccccagaacaagtccctgaggaaaaactggcatctttttccggaggaaaaaatgaagaatttcatccaatagacttgcaagtcagtacccctaattagaggccgataagagacacaaggagagaaagcaggagttggagaggatgtcggaggaagagtctgccttctaaaaagctagactctgccccagacatcagtcatccactatccccaagggccagaggaaagaacctgagaacagttttccatttgtgcttgtcaaactcagctcactcccttgaagccaaggaaagagatttaaactacaagtgtccaccagttccctgtaactaaactagttatttggtattttgagagcatctgagaatcacaatcacagaggcaagaggggctcatttcttcagctcgccctcaccttgca

SEQ ID NO: 147455 - DNA, 329 bp, Homo sapiens
aagtggctgaagctcagagaggttacctgtaaaatgcgattttgttacattacaactaacatttatcgagcatttattatgtgcctattactgcacatactatatataagttctctcatttaatgttcacaatactgtggaaaagattctataattatgaccattttccagaggacaaaactgtatctttgaaaagttaagtatctagcccagcatcataaagcccagccatgacttcaagccagtttagtaagacaccaattcagtaacacgcagtgcgcacagagaatagtcatgcagtaactgttgtctctgatcccaagatcttg

SEQ ID NO: 147456 - DNA, 484 bp, Homo sapiens
gttggggtggcttggggtctgggtgacccctgaagtcagaatcagaagtggccacattcgtgacttgtggtcttctgagtataagaaatgtccccatttggatatcctcacagcctcatgaaagtaagattttattgagtagacctgctcatggaaggtgggtagtttccaagtagcactggtacacaccaagtgaaataactggtaatcctggctgtcagcggagccaggtcaacatgctggtatacgtgctgtttttcctttgagctttaagttcttatgtacacataaccaatccaacctacttttcattaacaccatgttaggtattattttcttagattgatatttttcttttaaagaaaaaaaaatcatagggtggattttaaaatattattattgaaaccaatgatttcttctttgattttagatggaaacccagaagggaccttccccatcttctctctctctctctttctctctc

SEQ ID NO: 147457 - DNA, 189 bp, Homo sapiens
aaaattaaaaagctgtttttaaaagttatatagaaatgcaaacaatctaaacaaaattagaggactcactctacctgatctaagacttaccactgagcttcagtaatcaaaacaatgtggtactggggaaaggacagacaaacggtctatgagaagagcacagaaatagacccacagttaaatggtctt

SEQ ID NO: 147458 - DNA, 260 bp, Homo sapiens
attttattagagtgaaaatttcatagaaaggcaagactgtttttcaaaaggaaaggaaggatattagacatgaaccccaacagcatggggcaactcatatctcctgtaatttataacatctacttctatctatctatctgtattttaattactggatgctgatttacacagcttgatcaatgctgcaatgctaatgtcttgaggactcaggatttattttattgtgaactagttatgcaaatgaaataaaatgactcagg

SEQ ID NO: 147459 - DNA, 242 bp, Homo sapiens
acgctttgcgcaaccggagagaaataacagctttcatgtaatagtgcttacatgaacaagacaaacactgattgagtgcctagcactgggaaaccatgctgctggccaccttgccctctaggactccagatctggtggggaagtcagacaaggcacggaagtggttgggaggacataaactctgcaggctccacaacctctatcctctatcctcaagttaatttcataaacattcagttcgc

SEQ ID NO: 147460 - DNA, 140 bp, Homo sapiens
caggaccccaactggctttttctcctcctcttctcctattctcaggcccatccttctattgtccctctaatatttttcagattttccataatacttgaagtaagtgtacaagggtacatttaggagacgggatgtgtcaa

SEQ ID NO: 147461 - DNA, 269 bp, Homo sapiens
gtggaataacaaatatcagtcttcaaacatttaagcaaatgaaaataaaggtcaaatatccttgtttgccctttgcagctgaaagggcaagttacacaattcttatgtatttttccatctaatcttctgaggaaagaaagagaatctgaatttacgttttgcaaatggctcactttttcttactttgccaatagtggagaattttctgtttcaagactcagtgcgttagtaggctaatggacataaagaattccaacactgctagttct

SEQ ID NO: 147462 - DNA, 1284 bp, Homo sapiens
actcttcatttctaaaccatggttcattgctttgagaggctgttattttagtgttagtctttgaatattggtttgaaaatattacagttactattttttatgattggtattaggacttatggatttgctaaaacaaaatcatcttgtctcaataacgttttctctctttcccaccacattcttccttcctgaattttaatatgtgttataccacatcatcagttatatcttgctttccaggattgttgtgaatgcttgtatgtgagatgcttttacataagggctaggatttggagataattctgcggtggggaaacaactttctctccttccttctccatgccagcctcttcccctacccccatgtataaaatgtgatttgtcagatcctttctagatactatgaatcgtggatttagatatggtagtcttcctctaacccccttttgcagaacataaacatttctcatcctctgttcatacaattttttactttagtcacatgaaaacattgtgagaatggaatcttgttccattaacgttaaccttggtggtgtagaaattaggacatgaagcatgtcactttcagtgtaaaatatgtcaaggaacttcatttctttcatcaattcctgacaattgctaatgtagtaatgcactttagttgctttgagcactttgggctggtgagaagggaaatacatagtgtctttgttaaaagaatgagtgaagagaagagaaaattttaaaagaaattggtgaaaggaaaataactttggcttttttattgttatttttatactgaagtagacaaacaattgttcctgttcttcctgaaggaattgttgtcacaattttattattattagataattacctaagcttctgtgttacaagctgtggcctcagttctaggtggtggtgcttgagtgaacattttacattttgttcctgacagctggccagcattgtgtttatattggcatggaaaagagatatctgattcagagaacagtgttttccaaggattgtgactgaagacttccttaatggtgtaataatgtacctcctcataaaaacaggtttgacagctgtagctcattttttgttgttgaaggaagttttatttgttttgtttttaactacttttaataaagaattgagatccagtgtatgattaagatttgtaagaaattgcagattccttaataaagctcgcatctacagacatgactaatcattgataataataaatgcaaaatattttaaattattaggggtagagtt

SEQ ID NO: 147463 - DNA, 652 bp, Homo sapiens
gaggagatgctgccacctaggttacttgtaggaccctatacggcaacctcctttgccaggaactatttataaacatcctgcaggaaaatgcagtgaagtagaagagacagggatatcccagaaggttatgcaaaacatcaagagaagatgagaggagtctatatgtcagaatacacatttcccaccttgcccaacagtagaaaaacataagaagagaaaaacattaaaaaatgacaaggaagttaatggaagtcagcaatgtgatggtgtttggaggtggagccttcagaaggtaattaatgcccttgtaagaagaggccagagagcttgcgcaccttcttcctgccatgtgaggagccaagaagccggctgtctgcaacctgcaagaggaccctcactagaagctagccatactggcatcctcatcttggctttccaacttccagaactgtgagaagtatatgtttgtggtttagtcaatggtctatggtaatttttttatagcagtcccagccaagacagtgcctcatttactacataccatttatattattatataggctcctttcagaaacccatgttcaaataagagataagatactgaaacacataacaccttcactagtttttagtatacaaatattgagaaata

SEQ ID NO: 147464 - DNA, 1223 bp, Homo sapiens
gaggagatgctgccacctaggttacttgtaggaccctatacggcaacctcctttgccaggaactatttataaacatcctgcaggaaaatgagtcaaggaagcttttcttttgagctatttacagcttttagcaattgagtaaagtatactcctgtgaacaaaatttggaacatatttgtttctctctaactgatttctccagaatttggaactagttaaccaggaaccctctcttggggtgtggatcgagacccctttctggtaacgagagcacagcttggttttatacattttaaggagacatgagacatcaatcaacgtatataagatgaacattttgatctgaaaaggcctctttaaatatacacttctctgtagtgtatgctagaaatggagtggctggaataaaagtggctgaatcatcttcaactctagtagctgagaccaatgatgctgacctccctcaaaagctgcatttctgaatttctgaaggcaaactgtctgcctatattgtacagcaaaataatttcctgtattaaaacgtttttattgctctaaatttctagattaaactctgcttaggtattgctaagagggtagccaagtatagaaacttaaatttactgacagaaatctagagaatgcttaattttttttccagcagtgaagtagaagagacagggatatcccagaaggttatgcaaaacatcaagagaagatgagaggagtctatatgtcagaatacacatttcccaccttgcccaacagtagaaaaacataagaagagaaaaacattaaaaaatgacaaggaagttaatggaagtcagcaatgtgatggtgtttggaggtggagccttcagaaggtaattaatgcccttgtaagaagaggccagagagcttgcgcaccttcttcctgccatgtgaggagccaagaagccggctgtctgcaacctgcaagaggaccctcactagaagctagccatactggcatcctcatcttggctttccaacttccagaactgtgagaagtatatgtttgtggtttagtcaatggtctatggtaatttttttatagcagtcccagccaagacagtgcctcatttactacataccatttatattattatataggctcctttcagaaacccatgttcaaataagagataagatactgaaacacataacaccttcactagtttttagtatacaaatattgagaaata

SEQ ID NO: 147465 - DNA, 275 bp, Homo sapiens
aaccgtctctcccagaaaaggatggagttatcggtctttccctattcctgtcccccaccattatttgtgtgtttgtcttccttacctcttgtagattaaattcctctgcagtactagcctggtaccttgtaaaagcagttgcacgaatatttctttcctgagttaaactgagaaagtctaatggttataattctctaatttctcatacagaaatccttttagtgtccctgtttttaaattaagagcaacttatcttctgctatttttggagtttt

SEQ ID NO: 147466 - DNA, 238 bp, Homo sapiens
aggatggaatgggaaggtgatattcccccagagtttggctgccccacagccgatctcctctctgactgtccccagctgaactcctgttgatgttcagacgctccttctcttctcttcttctatgccatgccactctgctgctctgtcgttctgctactcttctgttcctctgctcgtggagcttggggtttatgtgggcacagaataggggcatggcaggccagagtggtcttagaaa

SEQ ID NO: 147467 - DNA, 239 bp, Homo sapiens
gaggcagaaaggactctgtcatcattctgagtctctttctctcctttgtcaaaaacaatttttttctttgtaaaaaatttctttggggtctcgctatgtttaccaggctggtcttgaattcctgactctactaaaaacacaaaaattccctggatgtggtggcgggtacctgtaattccagctattctggaggctgaggcaggagaatcacttgaacccgggaggcagaggttgcagtg

SEQ ID NO: 147468 - DNA, 442 bp, Homo sapiens
taggttcttctccgtgctgtaaagtaccctgaaactgtgaaggtgccctcaattagagaggctgagaaaacaaggatcccagagcaagctcttcaagcctcagacagagagcctgccaaaccagtctgaatatttttagagtaaacaatcattaataaatatgagctacatttatactcacaggaatccagattatactcatacttttttaaaaaatgggttgcctctaagtgtattcaattcacccatgaagaaattttgttaacatttaatggtaggtgtctaatgaacatctgtggaatatggaattaaaagaataagttgatggttcttaacatactattataaactaaatatgtattacaacattttccttttgtagatggaaattattctatacttcacagatgttgcttatatagttaataaatactctacaaac

SEQ ID NO: 147469 - DNA, 333 bp, Homo sapiens
ataaaaatgttaccattaaaaataggattagtattatagaataaggatttccccattagtcactggttaatacgtaatccaggttggcagaaactgaaaggcagttgcccagatgaagcaaattcaccctgactcacttcatccagttctctctggctttaaccacatcattttcccaatggtagccttttatccagtggcagtaatttcccccagaggtgccaaatgtctgatagctgtgtaagtcattcactaattaattcatccagctggccaagacaccatgagtgcctagtatgtgagtgtcaggcattaggctgccctctactaatg

SEQ ID NO: 147470 - DNA, 581 bp, Homo sapiens
tcaaaatatacttttatcatttaaatgtcttatttgctgctatgaataggaaataacattttgtatagcaggctctgttttaccctaacattaaaaaatttcactgatctttctttcattaacagggtagaatctcctaatttccactttcttgggaatatacttttatagacaatagaagcagttctcaatattagcatatactttaaaaaatcaaagtgataacttaattcagctttggaagtatctcaaacatatttttactttatagtgcattaacttgcttctagagtacttaatgcaactgctctagccacttaattttttatactaatctcaacattaagaaatttggattaagtaataaattagttatgtaattcaagtaatctgaattacagcagtacttttagtgatcattcataggactatatattaacccagctaataactcagtttttttacaaaatgtttcgagtattattggtaaaacactgttctaggctaagcacattgggactgtaaagaaatgagtagatccttggcttcaagtttacatctggacaatttataatctagtg

SEQ ID NO: 147471 - DNA, 385 bp, Homo sapiens
aagaaatctttttttcagaaattgaattactatttctttcactggaggatttttgatgatagaagataattgtaagtaaaggtaatagactgaggtgggcggcaaagaggacaggcttcgagtcagcctcttctggtttcagattctggcctcaccacttaaccagcttgaccttagtcagagaggtttttttgagctaagactcatttttcttctctttaaaaccaaatcataatgaatccttcatagatttgttgtacagattaaatgagatggtataaaagtgcttagcctaatcagtgatatataaacaattggtagttgttgctagtgttattaacaagatatgttttcataatttgacagaacttttgaacttcatgat

SEQ ID NO: 147472 - DNA, 278 bp, Homo sapiens
tgtgacaggaaaaactaccagaaaaaaattctcctttgaccaccatgttacactaatggacagatatagaaaaataagtattataaaaattctaacaggaatttttttaacagaaaaaaattgttggcgaaggattgataatatacacacaagcaaaccgaggcactataatttactgattgctctcagagtccagaattctgaatcaataactttagacttttggtcaatatggactaagcagatccaagaagcatttctactctgcttcaaatgca

SEQ ID NO: 147473 - DNA, 256 bp, Homo sapiens
atcatgctccatcctgattcttttggaagctcagagaatttccattcgtaatctttattttgtctttagcatccccgggagagaaaagggcgtagaagtattctcattttacaacttagcaagttgtccaagcaaagctagaacatacaccaggacaatttttgcctagtgctatttccacttcttcacacctccaattgccattgatctatgatgtcatcacactcaatgtgtattaagaaatggggccggcgtg

SEQ ID NO: 147474 - DNA, 714 bp, Homo sapiens
gtttctcttgcatttaactcacttctgcaaacatttatagagtactattctatgcattgttgagatcagtctcagtacaagcccctgtttaatatttctttctcacagttggaaccatttgatcccatcttaggctcagtcttatcttccactcagcaggcccatcttacactggagaaacaggactttggtccagctataaccccataaccttgagcttgacaccagcatactctggctgctgatttagctccactgagatgtccagttctggttcttatgagtccctgtgaacctactctgtaccctattatggcaccaattcttctgccttggaccgtgttcctgcctcatctcttctttgttctggacagtctcctgtatatggagaagacatttttccagaatttcattctgttggctgaaaatcacctatttataacaaattccccaatgctatctgcaagttttatttagcagtattgtgctaaccttgtatttctgtgttctacccactttaaggttctgagttataaggctagatagattaaagttagaataccagttctaccattactagctatgtgatattgagaacattctttaagttctctaatccttgatttctttatgtgtaaaatggaaataattatggtacctgcttgatataaggattaagcaaaattatttttggaaatgagcacccacaataag

SEQ ID NO: 147475 - DNA, 523 bp, Homo sapiens
gatctgaggagctccccatcccctcctctctgtacacttgcaaactcaagtgaaaatgattatccagggagaactcgaggggaataaaagtgatgaggggagccttaggaggagcatggagaaggggcaagtggaggcttgctctgcaataagaagcttttgagtgagaaaattatttgctgtatgggactgccctacatattgtgaaatgtttagcatctttggccctgtttatgagaatttcatgggatctgttagtgattgtgacaggcccagaagtattgtgacgatacacacacacatactcatatactcacaggtccacatacccttagttctcgtttttctggttccttatttctctccatccctaactacctggagagcaattctagagccttctagaggcctggggcagtgacctgcaggagcatatgtttactgaggaagtattttgcaatggttgatcacaggactcaggaatcaaactgcctggtcaaaccctgactattgcacctgctgg

SEQ ID NO: 147476 - DNA, 318 bp, Homo sapiens
gagtgctatgatagagatatacacagggtgttgcagaaccatacccagaaggcttgcaaaaggctttccaaaaggaagtcacgcctacgttgtgttcaaaggttaggaatctgggcaaggatgtccgggaagggtgggatttcaagtttaggaacctgagtgcaaaggaactaccagtgattattgctgcagtttagagcttgaggccgggcgcggtagctcactcctgtattctcagcactttgggaggcggaaggaggcagattgcttcagctcaggagttcgagacccctctgggcaacatagctaaacctgtct

SEQ ID NO: 147477 - DNA, 142 bp, Homo sapiens
ctctagttttttcatctgtaagaagagagatgtggataattgacagtaatgccaaaactaaactctaagcctttctaaaactaaccagctgtgaatgttggtaagtcacttagcctagacttccactatcacacaggctcac

SEQ ID NO: 147478 - DNA, 284 bp, Homo sapiens
ggatagcaggaatggaggagagtggatatgtttgagagaacattcactgggagaacaaaagtagggttcatgtgctggaaacttaaatcccaatgcaacagtgttgagaggcagaatctttaagaggtgattaggtcatgagggctctgcccttatgaatagattaatgccactatatcaggggtgtgttagtgattttggaagtgggtcctgagaaaaaggatgaattctgcccccttgttgtctcttttgtgctcttgctatctgatgccttccaccatggg

SEQ ID NO: 147479 - DNA, 753 bp, Homo sapiens
gcgatttcaagtgcaaggattcagagagcctgtccctctctgcggtgtacttagagggcagagttggcatgtaagactgggcagagctggaaggatccatccctgtgttaagttttgtgggagcaggatcttcgtttttcttccgactagattcccagtatgtagaacggtgcgtgggcaaagtgtgaactcattcattcagccccttcccaccttctgaacatccagagtcctggctgtccagctgtttcctggaggagtagccgagaatggacaagccatcacaggatacacacttccagttccctgtcgtcagggcagggccagaaggagtggcctaggttagcagcggggatgggcagtcctggacagcttcctgaattaggaggcactgggtttaggtcctcgtggatctagacctgagaaccagattccagatgctccaagaaagcccagagaaaggaattctcttttctgaattttcttgtgaccttccataaaccagggtggggcctctcctatcacacttggcactttttttctttttctgtttcattttatttatttttttgagacagagtcttgttctgtcgcccaggctgaagtgcagtggtgtaatctcagctcactgcaacctccacctctccgagagtgattctcctacctcagcctcccaagtagctgtgattacaggcacgcaccaccacacctggataatttttgtattttcagtagagatcaggtttcactatg

SEQ ID NO: 147480 - DNA, 784 bp, Homo sapiens
gcgatttcaagtgcaaggattcagagagcctgtccctctctgcggtgtacttagagggcagagttggcatgtaagactgggcagagctggaaggatccatccctgtgttaagttttgtgggagcaggatcttcgtttttcttccgactagattcccagtatgtagaacggtgcgtgggcaaagtgtgaactcattcattcagccccttcccaccttctgaacatccagagtcctggctgtccagctgtttcctggaggagtagccgagaatggacaagccatcacaggatacacacttccagttccctgtcgtcagggcagggccagaaggagtggcctaggttagcagcggggatgggcagtcctggacagcttcctgaattaggaggcactgggtttaggtcctcgtggatctagacctgagaaccagattccagatgctccaagaaagcccagagaaaggaattctcttttctgaattttcttgtgaccttccataaaccagggtggggcctctcctatcacacttggcactttttttctttttctgtttcattttatttatttttttgagacagagtcttgttctgtcgcccaggctgaaaggtggtcagggaaggtgagagaaggacactgaagattcaggaagggcctgagagacgagggagccagccaccttgggaaagaacattctggaccagcaggggtcaggaggacagtcccgtgcaaaggccctgtgcccaggggacacaggagcaaacagaagggcaggaaatggggagga

SEQ ID NO: 147481 - DNA, 687 bp, Homo sapiens
tgaacccgaggaaggctgctgctgctagcgcatccgctttcaaactacatctgagcactccacaccttcttctaggaggttccccagattgctgctagcgcatctgctttcaaattacttctgagcactactcaacttattctagcaggtcccccaccttttctgccttcctaaggcattttccttggctaagaagtctccatggatcaatgtgatcctaaggcctcgcgctgacacagggaaggactcggagagccccgagtcaagaccatcctagagattctcttccccgatgcctttcctcctcactatggcaaaccacttcccttcactgacccacgagagagaacttcctgattcaggagggacaggaagagagtggagatggggacagttcattttcttaacccctggaatgatgggagttgacagaggaaaggcgccttcccttcctttccagcagcacaaaaccaggtctgcactgggaagatttggtttaagctatgaacgtggacttctccatcatctaagtgatgaatctgtctttcacaggattcttctataaagccttcatagccagaagtgatttcgaggtccctgccaacttaaattaggttaaaaaccttttcctaaagagatatgacaaccaaacgcgatgcatgatcctggcttgaatcctagatgggg

SEQ ID NO: 147482 - DNA, 535 bp, Homo sapiens
gcctgtgccgagcacatcgtgtacctagtatttccttccaccacgggcttccatttctggagaacaccgacggtcggcctgaagaatggagctgtagaaacggcgctggtatcaccgcccacctgctccagccgtccctcctggctgggaggcccatcgctcactcccggcttccaatttccctcctgatccgagcacctgatctccttgggctcttggcgctaatctgcagccatctaacaccctgcgcccccgaacgaatgtgccaggaaatcttacagacacaaagaaccaattctgcagcatttccgacttccacctcagctgttttgcatctctctggactgagggcctggcaagacacctggcagggaaaatccatctcgtggagggcttcatcagaatacccatcccaggaacaccagcagttaacaggaaagcagtttcagctgtgaaaatagatgcttccttctctagtatggggacagggacacaccttggggacacacactgcccccacctcataggaaggtgc

SEQ ID NO: 147483 - DNA, 207 bp, Homo sapiens
aaatctgttgagttgactggctgggctgccttctgtctagtctgccacagtgagctaggctcctcctgaagtgaactaggatcagtgagggactaaagtcaatctgtagcatgaagatttcacagggcactcactactgcacacaccaaactcccacaaaaggaagagggggagctaatatgtgttgggcataaaatttctgcaagc

SEQ ID NO: 147484 - DNA, 167 bp, Homo sapiens
cctggccgctccttcctttttctatcttggataatcctaccactgtttctgctaccactatgaagctgggtgtatattcctactctgtttcctttctgactcctgactctccttaagtctctacatttttgtttctatttctaatattctactcattctgagatctc

SEQ ID NO: 147485 - DNA, 226 bp, Homo sapiens
  misc_feature (13)..(13): n is a, c, g, or t
tacttagaggacnccattcagagtagccagaaggtacatttccacactcattattaaaggtgatgtgattactttggcaagtttccagacttttgcatggtgtctttttcacaacttgtgtatatttcacagcttcacaacatatttataagcaattggttcaactaatagaaaacatgctatttacttcccttatctttgggatctgacactaactctggaaagt

SEQ ID NO: 147486 - DNA, 374 bp, Homo sapiens
gagttgggggaagagatgtcatgagttcctgggctttggaggcaccagacctgagtttaaatcctgggtttgccttttatgaggtggatgacactggccaaattcccctccctctcacatatggagcaaaatgtgagcacttcagtgcaggagcattgtggcagttttttaaaggcctccatgcctttccctgggtatttaatgctgacaacagctttcattagagctcagcatatccagttttatgaaacatgcagtaaagactttgtaagagtccttaccactggaagataaagtgtctttatcttccacttcagcaaagctccagaacctgggactgccaaggaggatctcataatccatgtcctgtgtct

SEQ ID NO: 147487 - DNA, 408 bp, Homo sapiens
gagtgctttggtgctttagcgcttcagtcaaattaccagtggctctaattagtgttcctgaaatctggagcaatctatatctgcattccaaaaaggggtggaatgtttccctctgataacacattagtatgagtccttcctagatgggtgttctgaaattataaggacgtgatagtgtggaggagaagcagttacgatagagaaacctgttgctttgaaaatcagcagtgatctttgcaatcagctgattaataaatatttatacagtacctatcaagtgctacactctgaaaaaaataagtatgcaatgataaatcacagtacgggcaccaatgtggttctgacctggaagcgagtagacctgagccctgacagccacttacgattgctgctatctttggtttaatc

SEQ ID NO: 147488 - DNA, 484 bp, Homo sapiens
tgtagcttaagaacagacacattttgccaatggtgttagaaataagaaacatggttatctctacaagtgagtgttgggtgatgggtactaaatgaagcagcctcacccaaaagtggacttgcaaaaatgcacgtgttcaggtggatcctttgactcactctaagcagagtaaacaaagaggtggaaccattaggtactgagattttagctgttggctggtcaggtctggcagttaataaacactggccacctcaacaaatggtcaagtgacattggccttgtgtcactgcacatacatccaaaacacattgcactggactctcctgttttagaagtcaattttcaaataataaatataaattttgtaatggtcatgtctctctagccatttggcttacagggatatatcctgtagaaatacatcttcacaggaatattcagtgcagtattatttataatattatcttcatcttacatgtgagga

SEQ ID NO: 147489 - DNA, 918 bp, Homo sapiens
gaatccatatctgtggatgccttatacttaggcaacactgtcaaaaatgaaataaaatgaaatatctgtactttggagcagaaagtatgattcaatgttagttacagccagggctacttaccaatcttggtcttttatcatacttcactacttctatcatacttcactactagggatttggtagtgaagtccacaagttgtgtggcttagaaccatagaaaaatttattgtttcacagttctagaggctgaaaatccaacatcaaggtattggcagggttggttccttctgagggctataaagaagcatctgttccctgttccttccttagcttctttggttttctggctgtatttggcattcctaagcttttagatgtattacctttatactctgacttcatcttcacctggcgtcctccctgtgtgtatatctgtgtgcaaatttcctctttttaagaacaaagctggaggcatcatattaccagacttcaaactatattacaaggctacagtaaccgaaacagcatgaggctggtaccaaaacagacactagaccagtgcaacggaatgaaaagcccagaagtaaggccacatacctacaaccatctgatctttgacaaagttgacaaaaacaagcaatggggaaaggactccctattcaaaaaatggtgttgagataactggctagccatctgcaaaagattgaaactgaacccctttcttacaccatacacaaaaattaactcaagatggagtcaagacttaaactaaatataaaactggaagtattaggaatacctttggttagacgggaggttctggaaagaccaaatgggcaacaatgggggcctttaaaaggtggggaataataagggaggaacgcgggaatggaaccgaggtagttgggattggaaaa

SEQ ID NO: 147490 - DNA, 417 bp, Homo sapiens
gggcttcttgctcttctgctcttgctctgtgttctgcctggaatctctgggatcttgaatcctttttccctgtgattccttatcacatccttcaaaatgcagagcccccaccccacacaacaacacagcaacagcagtgactgcaacagcaaacgctggtggttggtgttcaggagagctctttggcctggatggtggttgagtaactgtgcgccttcaagtcagcacccagatgccttttctttctgtggttctgctgctccatggaatctctcggcagctccggtcctggtttgcttggccatgggcctctgtctcttttctttccttgggcttctacctgaagcagacccagggtgctgagggctcctctttggtgtgcaggtccttgcccatgacttctcgtggttgatgatg

SEQ ID NO: 147491 - DNA, 263 bp, Homo sapiens
ttcacattcacagctgctcactgcacactgaggtatactgggtccccaagaacactcagccctgggcctggacctcaagcatacagagcctgacacaggcacccctaacctccctgggggcagggtcaaggtgcagagagggccacaggacaaagggagactggactgggggaagcaagctagcgaggagaagggggttcctggaagaggggacattggttctgggctttgaagcatgagtaggagcttctaaagcagatgga

SEQ ID NO: 147492 - DNA, 304 bp, Homo sapiens
gtcaatgacacaagatggaaatacatttcctaggcccagtaactgatgactcatgaaaaggtaaaactgctgaactgtctctcaatgataaggaacagctgtttccaaaatctgagtagctccaatttcatctgccttatggaacagaaggcaaactgttatagccgttgcccaggctgacatctggaaaccacggatggggcaataaattaacataaaagcgatgatcaaagtcaaggtaataagaaggtaattctacagaaaaacagtaaaaggaattatttcatatatccttgcctccatg

SEQ ID NO: 147493 - DNA, 199 bp, Homo sapiens
  misc_feature (17)..(17): n is a, c, g, or t
ttcactttgtctctatnaaaatataaaaattggcagtcacagtggctcacacccgtaagcccagcactttgcctggaacagctttgatcttctttacctactaactcttactctgccgtcaggaactcgtccggacgccatctcctctgagaaactactctgaggccaggcgcaatgtctcacacctgtaatcccagca

SEQ ID NO: 147494 - DNA, 178 bp, Homo sapiens
ggagacatgagtgtagattaatcacagttttattttggagaatgagatgttgtaagtagtgtggttgtctatgactggggaaatgtatttgaaaaacgtggtgggtgcacatcattgaggataatgcagcaagagtagatagtggtcatatagacgtagacagagctaaagaaggaaa

SEQ ID NO: 147495 - DNA, 182 bp, Homo sapiens
ctggctccctgctggtctagtacagttccatcctcatggcttctctgcttccacctatgctctactgtctgtcccccacacaacagccagagggacccttttattttattttattttatttgtttgagacggagtgttgttctatcgcccaggctggagtgcagtggtgctatcttgtgctc

SEQ ID NO: 147496 - DNA, 227 bp, Homo sapiens
ggagccccacagaatgacaccattgcaggtggcaggagaaaggcacccccacacacgacaggctacagggcactaggcagggctcccaggagcctggatttgccaaaaccagcagttctggaagaaagcaatgggtcaggtgctgtccagaagctaacatccagggccacgtggcgcaccatggaggggctgctggtggccttggcagagcagctttgatgcgatgg

SEQ ID NO: 147497 - DNA, 343 bp, Homo sapiens
tgtccctcccccatcccagttgtgacaatcaaaaatgtctctaaacattgccaaatgttccccgaggagtaaaattgcctctagttgagaactactaatctaatataaaatgcttaaatagtggttaaccttatatcttggtatttaagtgacaggatctcaaagggggagtgtaactcagctagtagaaattaaacataatccaggatggataaagtagactgttttttttttgtttttttttttgagagttagttagcatgtcttcagtcctatgaaggacagttacaccttgttaggtggaagcatacttttacttctgtctttatttggaagctaaata

SEQ ID NO: 147498 - DNA, 187 bp, Homo sapiens
gcacagacacgcagtgtcacagggcagttgagactgtgttactgagcccagcggacaacctgggaacacatcctggtgtatcaccttactggctgcaggagctcagggacagccgtaatcactctgtgcctcagtttcctcatctgtagaacgggaccagtttgcatgaggctcccgggcagagcct

SEQ ID NO: 147499 - DNA, 428 bp, Homo sapiens
ttccatacaagggttgacttaatacagactgaatatgccctttggtcttctcccagataaacgctctagaaagtcatcatcattgccagacagcaaggtactttgttgtgtatcagggtccccaggaaaattcaaacatgcaaaataaattcttaaatggtttgcagagaaaagtaagcaacttgagtgtagcatgtaaactgaggagccattttggtgcttggcagttaagtacttcttgaaggtccccctggtttttccttgaagtcttttaaatctgatccttcagcatgtaagtacttttacttttcaatagagttgtagaagaataatgattatattcatgagtttgaatgtttattaaataaaaaaagactaaaaatggtaacactttcttagtgaaccttttttgttggaaacagaggcaa

SEQ ID NO: 147500 - DNA, 144 bp, Homo sapiens
ccagaactccgttaaggcagatgtgaattccagtggctgtgaaggatggggaagagactgcagtgattctgtaacttttaattgctccatttacctgctatggtagcacatgaatgctaccactccttacatgacatggagggg

SEQ ID NO: 147501 - DNA, 372 bp, Homo sapiens
cacaactctactgcataacacagttgagataatccattcagtcagaacaacatgatcagtgagcatgggccacccagcctcgaagatcgcctttctggcgactcattcttgatccagtaagtgggaactgttgtaggagtatgtagcctgcctacatgagggagagtgttgtaagcagtgaaacatacaggattattctcaagtgatactcatctgcttaagtttttcctaccatggtccttggctctggttccagattaagtcagggagctatttttagcttcttaatgtgtcttttatttgaacctaacagactcataagtttatcacccagtgttaagtgctgctaacgttttggcatattttctttct

SEQ ID NO: 147502 - DNA, 303 bp, Homo sapiens
tccaaataaggtctatacattgtacattagtacatctattaagtttggtaaagcctctttttcagagtattggcatgaagagttactaggattggggctgggcatggtggctcatgcccaaaatcccagcactttgcgaggcagaggcggatggatcacctgaggtcaggagttcaaggccagcctggccaacatggtgaaaccccatgtctactaaaaatacaacaacaacaaaaaaattagccaggtgtggtggtgggcgtctgtaatcccaactactcgggaggttgaggcaggagaatc

SEQ ID NO: 147503 - DNA, 769 bp, Homo sapiens
gttatgtgatattgacagatttagtgattatctggtttttcaaccttaataaaagcttatttcagtatcttatagctacacgtagcctttaccattcaatatgtttttgacttctcttcaatatgtgtacaatataccttattaagaattacatatgcactggggacagtggctcacacctataatcccagcactttgggaggctgagatgggatcgacctgagatcacttgagcccaggagttcgagaccagcctgggcaacataggggagaccttgtctctacaaataataaaaacaaattagccaggtgtggtggtacatgcctgtggtgttagctactctggaagctgaagctagaggatcgccagagcctagaaggttgaggctgtagtgagccatgatggtgccacctcactctagtctgagtgacagagtgagaccctgtcttaaaaaaaaacaaaaaaaacataagaaatcactgtctgtgctttccaatgtggtagctatgggcaccatgtggctactgagcacttaaaatctgggtagtccaaactgagatttgctgtaattatagtacaaaaaagaatgtaaatttctcaaagcaattttttaatactacatgttgaaatggtcatatttgagaaatataatattactcattatttcttgtttgatgagcttatgagaaaattaaaaattgtataagcaatttgagcaatgtatcttttggatagtgctgatctatatgattaaacatatcaccggga

SEQ ID NO: 147504 - DNA, 205 bp, Homo sapiens
cagttcatcagctcagtggtatcatggactatattagttaggatatagctttggctactataaaaattacaacggctgaaataagacaaatatttattttggtcttatgaaataatctgagcataagccatccagggataataccgtggcttcaaaatatgaaggaactggctggccacggtggctcatgcctgtaatcccagca

SEQ ID NO: 147505 - DNA, 709 bp, Homo sapiens
ccagcagtgtgatggaggcagcaaaatgtgtggaaccgtcattatgaagaaggcaatgctctcctgcaccagggagctcttcaccccacaactacagagctcctgtcttccaaggttcccgaactgttctgggaagtgctcctaatcacctgaggtttacatacaaacaaccccaggacatttcatttagctaccaatgtcatgattaccaaaaattaattaacaatatggtggtcgtcatcacatctgagtcaccaaatcaaaattcaggacacatttccatgcaaagtgcagccttcttcttacgtttcataattgtcatttcaaatgagatcttggttggaaacaattgcttaactgtttcaaggtatactgggttatcactaactcatttctgtaaagcagaatacaagacctcaacctgttagagatcctttgttgattaacaagctgattaataagctgattgttctcctgatttaaggcctataccaaaattcttgaagctcaatttgcaccacagagtacgccaatatgtttgagtgaactggctctggctctccgaagctgttttgtaaagacaagagactataagccatggtgagtagttatacatgaagaacctcaattaatgccttacatatggcatgaggagactagaaattttcttgttaatggggcaggggtataataataaatatcttggcaa

SEQ ID NO: 147506 - DNA, 220 bp, Homo sapiens
gctgtaacttttattcatcctattggtctcagcttaaagattatacatttagggtgggtgaatgtgcacatgtgtggtaagagagggggctccctgactcactcctagactaggttagagactacctgctttatgttgctagaccacctatattttctttttattacacacactggactttattgcacttgtttgtttaaatgactatgagctccacaaa

SEQ ID NO: 147507 - DNA, 387 bp, Homo sapiens
ttcaatcttagaatgctaaaaatgagaaaacgaactatatgaagattaaattacctacctatagtcatgcttatgaccagaagtcaaatatcatattgttcttgtgctgtatacgtgtggtgttagataaacgcaacttttgttctcatgcgtcacttcgccatcaagcgaaagagctgttggatagattagatttttgttgtcttacatacagagtcctacacaattgttcctgatctcttctaacctcatacctttcactgattttgctctggctattggccttttcttttctcctaaaggttgtcatattccttaccatttcagagcctcataaaatgctgaatctttctacataatctattaatctttgtgtttctagcacct

SEQ ID NO: 147508 - DNA, 359 bp, Homo sapiens
cttgactctatgaggatccccaattagctggggcacaggaggggtaaaaagctgttattgactgagatggcaaaatattatgagagacgtaggtttgggatgatgaaaatcaggagctccacttaggacaggttaagtttgagaaccagacttaactgttggataaatcagtctacagttcagagggcaagagctgacgatggaaatagaagagttgtcaatagacagagtcctggggcatttctgacatttacagtaaactgagcatttattaaaactaacttgctttactgaaccataaatcacttgttgtatttacccctgctccatttatagttatacatctggaaacatagcct

SEQ ID NO: 147509 - DNA, 524 bp, Homo sapiens
tgctgatgagcatttaggttggttccaattattttccttttgttttttgttgacagtaataattgcacaaatttatggggttcaagtgatttttttaatacacgtatacaatgtataatgattaaatcgggcaattaggttatccaccacctcaaacatttatcatttctttgcattagaaacattcaagatcctatcttctagcttttttgaacatactaataaattgttaatcttttgatactgtgaaagattgttcttgtaacctcatttattttctcagaataaattcctaaagctggaattgctggcatgcacatttatagtcttcattgatatggccaatagccaccacaagagaaccagtctgtttcttcgccactctaagttcgggtcattgttctttctctctctctctctttttttttttttaaattcttattcatactaaatgttttacacatgttttaaagttgactttcattggagggttgagcctctgttcacatgcttggtaggctcta

SEQ ID NO: 147510 - DNA, 371 bp, Homo sapiens
tggaactgctggatgaaagcaacactgaagcaggttgggaattagataagggcaggtccagatatggcggtttaagacaaagggagactaacacatattccaatgctaattggagggagtcccgcactgaaggaaaaatttgaccatgcaggagaaagggagagataatctactgcatacagcactcagtaaatggctactaaccacttagaatgtgtcaggctttgttgtggacatgagagtacagcaaggatggaaacatttctgcattaatggactataaaataacaggttaaataataatacagaggggactgtcagccactgtggagtaactagcactagatcagtccttcctgcagtcaacaacc

SEQ ID NO: 147511 - DNA, 358 bp, Homo sapiens
gtggtatttggagccaccttgcacggctgatgacagtcaagtgctaaatattccagaattttataaccagattcccctggcaccttaaattgggcaacagaggaaacagtcacaccatggaaaaccagcaaatgctgactcccccaccctgcttcccagagcaggcttaccagcacacccctagctcactccctcaatgtttttaaggagagaaaacacttcttccagactagaacaggaaaaacgcatatactcaccaatataccaagaaaatgcaaataattaaccacatacaacagataagaaaacaactgatatagttattccttatcacaaagactgacgcatggaagaaaaa

SEQ ID NO: 147512 - DNA, 200 bp, Homo sapiens
cctaatcaacagagccgtcgtttaccaaaatgctgtcagatttgatgaacgtcatcggctcttagcattaaattgctagtgaagggattggccttccagcaatttactgtggggtgggcgttccttaaaggtctctaaagcaagttcattgcaattattaaagcagaggctttgctctcactcagccaccatatcctgtg

SEQ ID NO: 147513 - DNA, 786 bp, Homo sapiens
taaggcctaaaaaatcaccatggagaagttccacttcggtggctccgttggggtagctcccaacaggcaggacctgggctcccggtgggggaatcctcacgtctcaccctccgagagcctgacatccccccctgcccctttccattcctcagcatgtgacacatctgggctctcaggctggacaccgggtcacccgccagtcctttgctcccagactgtaaactttgttagggagaatccttctctgggctggtgtctaagagatggctggttgggggtgtcccctgggcctgtgagagatcacaaagctgccaattttactgggccttttttttccctccaatcttaaaataattttggttaggtctgggcacggtggcctatgctttcaatcccagcagcccaaggcgggagattgcttgagcccaagcattcaagactagcctgggaaacatagcaagatcccgtctctacaaaaacatttaaaatgagccaagtggcagggtgcggtggctcatgcctgtaatcccagcactttgggatgccaaggcaggcgattgcctgagctcaagagttcgagaccagcctgggcaacatggtgaaaccccatctctactaaaataaaaagttagccaggcatgctggtgcatgtctgtaatcccagctactggggaggctgaggcagtagaattgcttaaatccgggaggtggaggttacagtgagctgaggtcgcgccactgcacttcagcctgggcaacagagcaagattctgtctccaaaaaaaa

SEQ ID NO: 147514 - DNA, 751 bp, Homo sapiens
agtatgaccaggagaccagcgggatatgaggaggtagacagggagaccagactgcatttgggacccccaagggagagagtttggaagaatgcaggggtcctagactagaagccaggagcttgagggagactgagccccttctctgccatctgctaactgctttgggcctcactgtcctctgtaaaagaagggagttacccctgaaactcacatgttgtatcctgtgtgctgaggctgtagaactgagcagcttcagaaaggagatgagagctgggagtgcagcagaggcagggacctttacgttatgcctatttctgggggccctgtcctttcctgcggccttgcctgcgctagctagtcactggggcttttacagacccatagcagaagattctgctagcctcttctgaagcatgttttcttgttcttaatgatagttaacttggctggtcataaatcctaaatctgcctcctctgaggtggggagcagttaaaatctccacttgattttcttgtttttccaactgtccccttctgctggtttccttggagtttcctgagcacatgcacagttggggtcctgaagacctggctggggtttacacatgattttggaggcttcccctctgtgactccctcctgcctgccctctcttttaagctcctctggctgtccccgtctctggtatccaactccccagggtgtcagagtgagcttttctgcctgagctccagccagcctgcactgtgcc

SEQ ID NO: 147515 - DNA, 209 bp, Homo sapiens
atcatagcccttgccatcactgacaagatcaacatatgtgaagtatttgactaatagtacaagatcatatgtgattaagtaccacagtaataacatggaaaattaggtggcagaggcattcagagatgggcaagacaggtttggaaggatcatggtcagctttatgggacgtggggtgacttactgtgtctactgtaactgtttttgcc

SEQ ID NO: 147516 - DNA, 496 bp, Homo sapiens
gtctaagaatggaggagctgaacatgagggtggctctaaccccggagacagggaaggacaggaggaggggccccaagtcaggccctctctgggctcccctgagggcagtcagctccatatcacaccagagacccacctggaagctgcctttcccgcatctctccccaggccccctccccaggagtccagatgtctggagccccacagccttagctggtgggggtcatgagttccactctgagaggacagtgccgggttcaaatccaagtcccacgttttatgggccgtactatcctggtcagtcatccagcatctcttaggtagcagtttcctcatctataagtctgggcacgaacccccagggatgctgggatggctctagctggtgtagtaccagcattggcctcacataaagcacaggtccaggcatgaaagcactcatgcccaatgcacagctttcccctccctctggcaactggagtgttgctgctgaggc

SEQ ID NO: 147517 - DNA, 524 bp, Homo sapiens
ctgctgagacctggctgataatggagcgagctgaacatatacgagtgggtctaacaccgcgacgcacggggatccgtactaggagtcagaggcgtgccaggttacgagctctctgtgtgtccgttgttggccaaatcgtctcgatatcaaaacaacatagcgagctggaagctgcctttcccgcatctctccccaggccccctccccaggagtccagatgtctggagccccacagccttagctggtgggggtcatgagttccactctgagaggacagtgccgggttcaaatccaagtcccacgttttatgggccgtactatcctggtcagtcatccagcatctcttaggtagcagtttcctcatctataagtctgggcacgaacccccagggatgctgggatggctctagctggtgtagtaccagcattggcctcacataaagcacaggtccaggcatgaaagcactcatgcccaatgcacagctttcccctccctctggcaactggagtgttgctgctgaggc

SEQ ID NO: 147518 - DNA, 126 bp, Homo sapiens
gataatgaaaacaaggctgagaaacaccgccataaacccaccttcagacaggaacaatgattcagactgttttccatagtgctttctaaactgttgtatattgttttaaaaataatttatcatatg

SEQ ID NO: 147519 - DNA, 477 bp, Homo sapiens
ctttccaccctcgtgcctgcattccgcctgctgtctgcctcataaagaatcccagctcccgacacctccaatttctctcatcacacctccgatttctctcatttcatcagctcctccctggctttgctttcagcctccgaggcgaatcccctcaacataccactcacttgcaaatataataccttcatccttgttcttctcccacacctggccagcaacactgcagccctggggcaggccagccatccacccacaccacccctgcacctgggtgctgaaaagtcctttggccacagagcagtgaccacagcaacggcactgcctccagcgcccagcggagtctcccacccccagcagtgtgtcatctagatgcccacggtcagttctttccccacagtggctctgttcatgtttcagagtcctcttcaaggtccccatcaggactcccctcccccaatgctctcatcagatgctctg

SEQ ID NO: 147520 - DNA, 674 bp, Homo sapiens
aacgatggtcctcagctcaaccagcagaaacatctcaccaatttcaaatcggagtcttgttctgcaacccaggctggagtggagggcagtggtgtgatctcggctcacttcaacctccgcctcttaggttcaagtgattctcctgcctcagcctcccgagtagctgggactacagcagcctctctacaagtctcctaacttaacctgatgggaaaacacttcctaccactaacagcatctacttgactactgatactttgatcatggagtttgggcatgccacttgatagaaatttgaagagcaattatatttttcaaaaagagttttgaataatgttaagatagattgcaacatgactatcaattcttcccttcccatcaaaggagagagtccgtttatccagcctttgaatcttgattattcaagtgacttgcttcacccaatgtaacattaataagcacaatacaagcagaggcttgccaagaacttggtttgtttctaatgcttagaagaagaatggtgtatgccatatttctgcatttagaactcacgtggagacatgtgtggcccaattgcttctctttcatctcaggcaataaccagacacgggactgaggccatccatgaccagccagccctagccaacacacaacacacaagctgatcacagatg

SEQ ID NO: 147521 - DNA, 368 bp, Homo sapiens
ttatgagaccctggctactttctagcctatcctgtaatgacaaaaacccgggtatcttcagtacctcaggaatggctaagtaacaagatcttcacttggctctgccaaaaacagcacataaaaactccagttggacaggatgtaaccagtgtatatcacaggggttctcggccaggatgtcattaactttccacatgtgtcctgccaaattctgatcaacatacaacatgtatttttactgccattgaatggacctactgctagagtcgtggtaccagatcaggcctcatgagcatccaagagggcaccatcagggaagtttgcagctcccatcatctggagatgcaggactacagggcccccagggg

SEQ ID NO: 147522 - DNA, 362 bp, Homo sapiens
agctctacctcctggagagctgtgaccttgagtccaagagacaatcccatcaagaccccacttaacagtctacaacatggagaataccactaccagccccccagagaaaaattaaatgagataatgtgagtaaatggcctggcctagtatcccacactttgcactcgcatacacctcattaaattgcagttggttaaagagagtcaaaaacaatttcatacagttagaaatgtgtgtgcacagggggtgtacacatgtgtgtgaatatacttcatgcaagtgtgtgtgtgtgtgtgtgtgtgtgtgtgtgtgtgtgtgtagcgtgtgtgggacacactggattccttgttgagcatctagct

SEQ ID NO: 147523 - DNA, 229 bp, Homo sapiens
aaaagagagcatgtgaaggaggcaaagggggaagagccccttataaaaccatcagatcttgtgagaactcactatcacgagaacagcatgggggaaactgtccccatgatccatttacctcccaccaggtacctccttcaacaactggggattctaattgaaaatgagacttgggtggtgacacaaagccaagccatatcattccacccctggcccctcccaagtctta

SEQ ID NO: 147524 - DNA, 357 bp, Homo sapiens
tcaatgaggatgaataattactttgagttttgtttcaaaggagagcaaaggaatggggcatacctgataagggtatgaggtccataggggatttctagaaagataaatgaataatagcatgttcgtatgccaacagaattttccattagaaagtgaaatattgataaagagaagcaggggagaccttctaggtgttgcctttgagaggtagggggaataggacttaattaatacataagtggaaggtttggctttagataggagcatggatagttgatctatggttataagtggaaagacagagaatgtaacccgagatgtgtagatggattgatatggcggtaagagactgccagt

SEQ ID NO: 147525 - DNA, 707 bp, Homo sapiens
ccagcaatcctaccccttgataacctcagcaagagcaattctcccttctcgctaaggccacattccgtgccatggccttcgtggcatggtttgtggcacaccaggagctgaagccctggggttgcatcactcagggtgggaatgatcaaatgtgttgcatccaagctctgaaatcctctgcaggagcacaggagtcaactgtacgtctccagggccacagacaaagagctgagaaaccctgttgaatgacggaagcagtcagcagaataggaatgcagcacagggacagttacggtgggcaaaaccatacacacaaaaaatccacaggtgcagggcagtggctcacgcctgtcatccaagcactttgggaggccgagacgggcagatcgcttgaagccagaaataggagaccaacctgggcaacagggtgagacctcgtctctacaaaaaaataaaattagctggcgtggtggcaaaaaaaaaaaaaaaaaaaaaaaaaaaaaaaaaaaaaaaaaaaaaaaaaaaaaaaaaaaaaaaccaccgaggcactaccaggggggggggagaaaaaggaggaaacaaaggggacacagggccaagagagcgtcagacagacacaagcgttggcgcaacacacgggggacaaaccagcggggccccacacgagaggcggcaaaaacatatgagaagcggggtcacgccgcgaa

SEQ ID NO: 147526 - DNA, 1027 bp, Homo sapiens
ccagcaatcctaccccttgataacctcagcaagagcaattctcccttctcgctaaggccacattccgtgccatggccttcgtggcatggtttgtggcacaccaggagctgaagccctggggttgcatcactcagggtgggaatgatcaaatgtgttgcatccaagctctgaaatcctctgcaggagcacaggagtcaactgtacgtctccagggccacagacaaagagctgagaaaccctgttgaatgacggaagcagtcagcagaataggaatgcagcacagggacagttacggtgggcaaaaccatacacacaaaaaatccacaggtgcagggcagtggctcacgcctgtcatccaagcactttgggaggccgagacgggcagatcgcttgaagccagaaataggagaccaacctgggcaacagggtgagacctcgtctctacaaaaaaataaaattagctggcgtggtggcacatgcctgtagtcctagttactccagaagctgaggtgggaggatcacttgagtctgggacatcaaggctgccgtgagctatgatcacaccactgcactccagcctgggtgacaaagcgaggccctgtctcagaaaactaaaatacaattgaacaaacacattccaaatgacaccacattttaaatgacccctttgggagggaggggaacaggactaggaaacagggaagaaggaaaaagcgaaaagctacagttctcccatctaattttcagctacctaaaaagctgttagcccaaaaggtgctggtgaggctgtgggtaaacgctgagggtacaatgcgagggacggacagtatcaaaggtagggtctttaggggaggcaattccctagtgtctcttacaattttaaatgcaggccacacaaggtgggacacatctgtaaaaccagcactttgagaggccaaggagggaggacttgagcccaggggttcaagaccagcctgggcaacacagtgagaccctgtctgtacaaaaagaagttttctaaaaaagc

SEQ ID NO: 147527 - DNA, 296 bp, Homo sapiens
agaaaagcatttgctgccttcaaagacccaaactttgcatcatgatccctggccattctgcccacaatagcccttgttctttagagtaaatggaaccctaaaacaactcatcttaaccactcaacactgaatatgatgctatatcgtatcctgctgtagttgacagggacatgtcttgggtactttattttaaagtgatagtaagatatatattccttgctatacccaatggaagtgtgcctggaaaataccgcatgtaagcctgaatttatttacctcgaaaatatgtccttggc

SEQ ID NO: 147528 - DNA, 373 bp, Homo sapiens
atcagatcacactccctgacacccagctctgggaatgggcatatgacccaagacagtccaatcaaattcaaccccaggacttccacggaaacttttaacaaagtgatctctgcccaggggcttgctgacctgaggaacgtaggcaacgagctgcttccagccatatttccaccacctggggagagactgcctgagaatgaggctaacatagaagaaagcagaacagagagaaggcaaagggaggcaagtcctgatgacatcacttgagcgcctggattcaaccattcctgaaaccatcattcctggtcttttctggttaaggagccaatagtgtccctcttcctagcatacacctacttgagttgggttccat

SEQ ID NO: 147529 - DNA, 481 bp, Homo sapiens
cgcatggagaaggtggcctagtaaacaaatgctacaaggcaaggaggggaagtcactaccagagagaaagtgcaggcaagactgaagacaaggaggtgggcattccaagcaacaagaagagcttgtgcacaggcagagaagcagcaaagccaacctggatgagaggtgaggggcaggagcctctgagtctagagaccaaggagagtggtgtgggaggagaggggaggctctgaggacctacagtccatgctgaggggtgcagattttactcaagcaccctcagaaggttttttgttttgttttgtttatttaagatggagtctcactctgttgcccaagctggagtgcagtagtgcgatcctggctcactgcaacctctgcctcccaggttcaagctattctctgcctcagcctccagagtagctgggattacaggtgcacgccaccatgcccagcagatttttgtattattagtagagat

SEQ ID NO: 147530 - DNA, 529 bp, Homo sapiens
tcaaacctctttccttcactatttaccttgaaattttgattctttcttccctaatcttagtagccttaataattcctctttattaagagaaatggcctagagtatttataacgttttcacatagcagaagagaacaaaaatatctctggcacagtggtgtttgtctacaaagttattaacagtctgctcttagctatcacaacattcttaatatccttcagataggcacgtctttcccatggcattccagcttatcaaaatagacaggaactgcttacactacttcaactggtaatacacaaacatttaaagaattttacctccaattgtgtcaccacaagttttggctcctcttaaacactggcactggctaacatttcattggaagaggagtatgagtgagacggtagcctcctgacctttcaacaaaagatcttttcaacgtgtgtgaaaaatatgtgtctcagtacataataccaggcatgaagctttatggatagaccatccaaatcccagagtggttagtatc

SEQ ID NO: 147531 - DNA, 443 bp, Homo sapiens
ttgatagtaggctaactatgcgtaacaactctgttattcatgctctcccgctgacctctgcagatgcactctgtctagaatatgccctccctccttccctggctaaggcgaagtcaggcaaatggagaccatcctccaggtctcacgccggctatcacttctctgatgtcagccttggtgccccctccccagtctgcagcaagcgttcttcttctccatagtactttgtagtcatctttcaggattaaccatcttggattctaaccacctacatcctcaactagactctaagctcctaaagggcagagcagtttctatcttgttcattttcatacaatcccagtatctgcaatgcagaagattctaacaaatatgtgtttccaaaacaaagaaagatataagcctgagaataaaagagcacagggaaagatctctcttacagt

SEQ ID NO: 147532 - DNA, 444 bp, Homo sapiens
gattgcacctatgcagttcccatcacttcctccttagtaatgctgccactaccctagtgaaggccttttgcacctcttgccttggttgctgaattagccttttagctggagtgcctactataattctcttcctcttcttgttctcttacgcatggcttcatgtattttcccaaagcacaactctgttcctcttactctttttaaaaatatccagtctccaaacccctgaaccttctgttggaggccttttccatctcaacctggtgcgagtctccagtttccttctcccttatcctcatctcctgttgtatttgctgggttctctttgtcaggagcagtcttttcatcctttcagtccccttgttttagagtgcttttaagtcagcatgaaactacctgatgaactgtctttctgtttaagctactttctttaaattcccttcc

SEQ ID NO: 147533 - DNA, 448 bp, Homo sapiens
gatacccggacctggttgacgtgcttaagcatacaaccattatccaggcctcagggtacatttataacagtaacagtcaatctaatactgtatatggtattagttacccaggagcctgacatcaagtcagcagtcctccaactggtgggacaggcagacttgcagagagcactatgaaggacagcaggctccaattcaatagaatagaccaaaagagaacagtaagggagaaagggacactggcagccatgtcaatcaagactggtgattaggccgggcatagtggctcacacctgtaatctcagtactttgagaggccaaggcgggtggatcacctgaggtcaggagttcgagaccagcccgaccaatatggtgaagccctgtctctactaaaaatacaaaaattagccgggtgtggtggcagactcctgtaatcccagctacttgg

SEQ ID NO: 147534 - DNA, 535 bp, Homo sapiens
ccttaccccaacttccagaggcactttcacttcaatgtaaaaagaaatgcaataaaaaccctcagactcatatttccactaatatcctgctttcttagctacaaatgtattgttatatgaaggcatacttccctttctctctgattaagactgattcctctacctaggcccaagatctcacccctgctcttgcatatttattcatcactatctacctttagaatctttctttttttcctctttttttttttaatcttcccaccttcagaatcttgaaggcaagaatttttgcctttacttagctctagcacgatacctgtcacaaaggtgggatgaaaaatagaattaattaagtgtgaacagtgcctaattctctcaaatgggtataaaacccaaacccaaacacataatatttttggactcatctatttcttggaggcactgggataaagacaaaagcctttcttataggtgaaaggaaattcattcaccttgtttagtgctgtgtttataatacccatgggatactttaggt

SEQ ID NO: 147535 - DNA, 452 bp, Homo sapiens
aagcctagatcaggcattaagaggactctgaccatggcttgggatgagcagtatattaacttatagttataataacctagtagttattttagtgaaagaatttataactacttcaggaaataaggcaaaacttcagattaatactatatgtaaatgaaagttaagaagccaaaaatggctaaagccaaactatggggttgtcaagtatcaaaatcatacgtctatttacatttaatcttctaaagactggtcattgattatttccaataaaatggcagttcatcaatccagatccctagaaaggaaagtattaactttggtccagaaacctgctgtgaaacaaggcagggaacattcaattattacattatataacacgttccctttgaaataaaccctaccaattttaattaaaaatcatttccctcaaaataaacaaataattaatcatg

SEQ ID NO: 147536 - DNA, 209 bp, Homo sapiens
ctgaattccaacctaatggatggagagagactatgtctctaaaaataaaaaataaagagattaggaactgtctgcactaagatgactttactattccaagaaatccttgcctaagaaagtaaagttgaaattacttttttgtcctggaaactttccgatctatgtatctgtactcatacagcctcatcgggctaaacagccttcttttc

SEQ ID NO: 147537 - DNA, 466 bp, Homo sapiens
tgtcttccattaaaataccagttccttttgatttatggtaaatcccaaagagtacaagttgcctctgagtttgtatcaggaatagaattgtctccaagcagcccttacagcttgcttctaacacaattgggatcatttgagtttggttcaggtataaaagatgaagaacccttagaaagaccaagagttcttagacgacttgtacagaattacgatttccaaacaacttcagggggaacaaaaagaatccattttctcccttaaattccctttttaattttatcgcccaaaccacatctgttttatctcacagtggatccagccatcaggtatgttcctgccacctaatggcccgaggcccgaggttagtttcctactataagtcactaaaggaactttgatacagaaacataaaacaaaatgtccgaaatctacgttgtagtactagccctgttaccagttagat

SEQ ID NO: 147538 - DNA, 320 bp, Homo sapiens
cattcccctagcccagcttgaataataataacataagagcattaacaatgcctggttctaacactggatttcatgactctctgtgattactttttagaaagatggagaagcaatgaagagacattcacgtggatacccacatatgcagggaaagtgcccacacatgtttggactggagacaaactacaagagttgatgtccttgaggagggagactgggactatccaaagatggcatgagtcccccacacatgctctttcaaaactttgccccaccttcatcaggaaatggcatctaattccctttcccttgaatccagg

SEQ ID NO: 147539 - DNA, 746 bp, Homo sapiens
tattaggtccgtcttaataaaaggaaaatagagtagtccattaggaattatgtttcatagagtcattttggtcattgtttcacaatatatggtattatatatttaattatatctgtacatttatgattagtaaaaagatatatccaaagtttaaatttctgggttttcctgttttttttcttgctgctttaattaatcaccagtaattttctgcaacatattttctaaacatatcaaagagagtttatagatcttacttaaaagtctctcagtaagattagtctcccagtaagattcatccatcaccttcctgacagactctattcagatatgaaaaaatggtgtaagaagctgcagtatgcttggggtgaacacattcaatcttaggcacacagaaatcctccgcttggaatatggcaactcagtgggtaaaaaggttaggagacattagtgttctttgttatcagaatttcctgtaaactgagcaatagaacaggaataaaatgacctgaaaagggaggatatggaagcattgatttcccaccaagttctttataagcagtttctaccgacaatgaagaaaccttgtttttggcctacttctgtagctaatcgtattgtgttgaatattgtcaaagcaacattcttttccctggtactttttccatttcccagggcaatgttctttgtgtttgaagcaactccagtgatacatgtagggagaatcacatatttattttacaaat

SEQ ID NO: 147540 - DNA, 453 bp, Homo sapiens
ctgctcaggtctggagtgccacttcccccctacctggtccctgatcacctgctggcccctctagaaaccttccctgaccaccctgggtcttgggtgttttgaggaggcaggaggaccagaagcacaggtgtcccatgtttctctctgggccaggaaggtggagggactagggactttggagaggaagaaacatgcctggggaaaggagttccattttaggcatgttgagattgaagtgcctctgggacatctaggtttaggaggatggtcaggattagaggtggagtaatagttgaatcaggtggaataatagtaatagcagatcacctttatcaagcacttgcatgagccaggtctggcttcctcaggtatggtaattctctttttctgcccctcgactgttgaaagtgcaaaatgtgcccagcactggcctagatccttagaggaaaatca

SEQ ID NO: 147541 - DNA, 398 bp, Homo sapiens
atatgtgattgcctgtggatgtaaacacaataataataataataatagaataataacaaaagggaactaatactagcagggttttcataccttaacagtactttgacaacaaatgttcatatttcatttgaaatttatgaaacctttgtgcctgtaatcccacgagtagtaacatggtaaatgaaagtagcaggcagtctagatcaataatattttgcttcatattggaagagcatttgaaagaagcagcttgcttcatctattccctgtgtttacaatcctggtattggaatagactggggcttctaagactggctgggaaatattcatagatgtgttattaatttatgggaaactgaaggacctacctcaaggtttaagtaggccatttagaaagt

SEQ ID NO: 147542 - DNA, 285 bp, Homo sapiens
cacctgtggttgttgcccatagaaaaggcaaatcagagcaacaaaaataagagcttcataatagtagctgacttcaacaaggaggtcaccttgaaactcagattatcatggaaacattcacattaaaaattctcaagtctatctatctcagtcattctcctgctaaaatgttatttcttgacccttataggggtctgtataaatttttccttgctggacctttttgattatgaaaattagaggagacaacatgttgtgatccaggagacgctcctttttttatga

SEQ ID NO: 147543 - DNA, 346 bp, Homo sapiens
gagacctattaccattccaacacctctgctgctggacctataaacaaaatgtattcctacttatccctagcgggaaatgaacataacatttcgggcaagaataagaagccaaatattgaggccgggtgcagtagctcatgcctgtgatcccagcactttgggaagccgaggtgtatggatcacctgaggtcaggaattcgagaccagcctggccaagatggtgaaaccccatctctactaaaaatacaaaaattagccgggcatggtggcacatgcctgtaaactcagctcctcaggaggctgaggcaggagaatcgcttgaacccgggaggtgggaggagaggaa

SEQ ID NO: 147544 - DNA, 466 bp, Homo sapiens
ctcagctcatctgttttcctttcctctaacccctctcctccatagccttctgaggcttcacctgctagctttacccagtctgtttcttcctgttgggtggcaattaattaatcctgtgaaggttacattgctgctgctagagagggtggggattgcaccttccaaatctgtttctgtaccaatatttgggggatggaggggtgactcaaactgcttctagtgttctcctaatcccttaagactagaacctataggaaactacttggagcaaactcaaaggacagattagggatcgagattgggtcaggttagcatggggttgtggttgaaatatcttggtatccaggataagggtatgtggaaaaacaggctttaggcaagtggaaaattcaaaatgtgctgtgaaaggacaatctcaggctgaaatcccataaaggaacttggagggaatattatgatggaggga

SEQ ID NO: 147545 - DNA, 325 bp, Homo sapiens
aaatgacatgatttatacaaagcacttctgtgagaattagtttggggcctggaaaccacaggtagagatgaacaggcctgtttctgcagagaagtagcagagggctgctccgccactggcccactgagtgatttcatgtccctgagtctcagtttccctatttggaaactgggtctcataatagcacctatcacaattaggattcagtgagatcttgtacacatgtattaatacagtgcacagaacagggctgggcaaacagtaagtgctcaatgcatggaaatgggtaatgtttgagcagagctcccagggtggttgcaggcca

SEQ ID NO: 147546 - DNA, 586 bp, Homo sapiens
gagtccccagtaagaacccgggacaccaagatctgaggagggtccctggctggcaacactccctgcgtgccgggaggagtgaagggagaggacagctgataactggtctccgtggagccttccgggccctcttcctggctgcttccagcgcgtccttctctgtgataagccgtgactgtgaacatggctgtgagtccttctagagaactcgcaagtatgccaaggtcttgggggccctactgacttgcagctggtgttggatggagccccacatggactgtccctccttgctgcgccatggcctccccaccgtgggtcacactggttttcgggggctaagcagcggttttccctccgcttcctcctggcttccccgctcccctgcctcctcccctcccccgtcgcagccccgtcaggctcacccagaactcttccagcagggccaccgcctcctcccagcttagcggctgacggctgcacacccaggcctgcgtgtcggctggcagcgcgctcagaaactgctccagcaccagcagctccagcatctgctccttggtgtgcacctcgggccgcagccggtcccggc

SEQ ID NO: 147547 - DNA, 269 bp, Homo sapiens
gggcgaattcctcctcctcctgggcgaattcctcctcctccttttgtaatccgaatcctcctaatctaggcaactaaaactctgctgtcaccataggttactttacatttgtagaattttatgtaaatgaaataatataatgtgtattcctcgtttgtctggcttcttcgagcataattattttgagagtcacctatattgtgtctatcagtagttgtttcttttttatagctgagaagtattccactgcatatgtatccaagaattgg

SEQ ID NO: 147548 - DNA, 546 bp, Homo sapiens
  misc_feature (515)..(515): n is a, c, g, or t
ctgctactgaatgacttctggctaaataataaaattaaatcagaggctggcatccacagccacacccttctgaccgtgcccaatctcggaagctaagcagggtcgggccttgctgggacttggaggggagaccacctgggaataccgggtgctgtaggctttggctgggcatggtggctcacacctgtaatcccagcactttgggaggccgaggtaggcagatcacctgaggtcaggagttcgagacaagcctggcaaacatggtgaaacacaccatgtctactaaagatacataatattagcccagcatggtggtgggtgctggtaatcccagctacttgggaggctgaggcaggagaatcacttgaatctgggaggcagagattgcagtgagccgagatcgcgccactgcactccagcctgggcgacagagcgagactccgtctccccgctgccaaagaagaaggaaaaactaatattgcacggtgttccctcatttgtgtaccaggtctgtntgctctacaacaagggggaagccctgtatgg

SEQ ID NO: 147549 - DNA, 394 bp, Homo sapiens
tacagagtctttgcaactcggcagtttcttgcaggttatcaaccacaccttgactcgtctttgtgtgtgtgtgtgtctgtgtgtcttgtgtatagttttctgtgattggaaaaccctctgcgtgatgacataggagaatctgttccattagtcttgtctcctaacaggataagttgaggcaatgtgaaggggaatgtgtgcccttagagaaactgaacataatacaagttgataggcctgcaaggctggaaatgagcagatccctctcttctctggcctagctgagcaacctgtcatgagctccaaggttatgcctagaagtgttctggactccttctgcatggaacaaaaactgtgatccctttatgggagcaactacagcccagcctggaat

SEQ ID NO: 147550 - DNA, 318 bp, Homo sapiens
tagctgggattacaggcacataccaccaggcccagctaatttttgtatttttagtacagacgggatttcagtatgttggccaggctgctttcgaactcctgacctcaagttatccactggccttggcctcctaaagtgctgagattacaggtgtgagccaccatgcccggcctggttatttggttattcttatttttatgtctatgtatgtatgttatgtatgtatgtatgtatgtatgtatgtatgtatgtaagagtctcgctgtgttgcccaggctagagtgcattggcaccatctcggctcactgcaacctccgc

SEQ ID NO: 147551 - DNA, 217 bp, Homo sapiens
gtggtttatggtctgagacttatttataaatacagttactagtttcaaattgaaatgaatctggcttccaaatggtgtgtagtgtacttaccccaacaatgctgccattgtaccccaaggtcttctttaggatttgaatatgttcattggtcataaatctttatcctttgatgttagaatcaatttttggaaccagctaaaagtcattaagtgccga

SEQ ID NO: 147552 - DNA, 170 bp, Homo sapiens
aatgaaatgcccatcctgaggtggggctatcttgaactcagatgccaggccctttgagaagctggagagagctccagacaatctactcagaaacatattgcacctcttcagggctttctcagagcctcggacgcctgtctggagacaatgggttaagaacccctgcccta

SEQ ID NO: 147553 - DNA, 207 bp, Homo sapiens
gcaggctgggtgggctccctgaggaggcaccgtcttacttcttgaagctcgctggcggctggatgttgccctgggcatcgagtgggggtgctcttgcctcactcctcaacttgagcttctccacctccttcaactccttcactgtcctgaaaatcacctgcttcttccttttcatgtccacaaacgtgggataacagtggatgaagg

SEQ ID NO: 147554 - DNA, 252 bp, Homo sapiens
ccccagttctctcccccttgtcatccactcaaggcaagtcttggagaagggaaactgagttactgacacaggttggggcagccaccggatctctcagagtggctacatttctccatctggctcacagctggcaacacgtggatccaaggcagggtggagcgaggtgcttccaagaggtaaagctgctgagatgagcccctctctgtgccagctgctggcggggcaggagcaggacgagagaagcctgtttgt

SEQ ID NO: 147555 - DNA, 525 bp, Homo sapiens
ggttgaagctgtagttagccatgattgcaccactgcactccagcctgggcaacagagtgagactctgtctcaaaacataaaaaaggacaccatgagaaatcacccaaataggagagagagtagcagaccagggaaaatccctactggtgtgactggggcaaggagttcaagcagggaagaagagagaaggagctgaggcaccaccagcctgggcaacatgttaaaaccccgtctctacaaaaaatacaaaaattagctgggcatggtggcacacacccatagtcccagctacttgggaggctgaggggggagaatcacttaagcccaggaggcagaggttgcagtgagccaatattgcaccgctgcactccagcctgggcgacagagtgagatcctgttacagaaatgggcttgtccttcttttcaccaaactgaaaagaagcctttgatgttggcagactattaagaattaatgcagttcccacagcaagccatttattctccaccagagtgtagggcagtgcc

SEQ ID NO: 147556 - DNA, 467 bp, Homo sapiens
tccctgcctctccgtcatccctccttagtctccttgtctggcttatccttgtccttcttcacttagcaattcaatgtcagagttcctcaaggctaagttctgggcccttcatctacagattcctcagagaggtctatcctagccaccatgtcttttttttttttggatatggagtctcgctctgttgcccagggtggagtacaatggtgcaatctcggctaactgcaacctctgcttcctgggttcaagccattctcctgcctcagcctcccaagtagctgggattatttataaatgcccaccaccacgcctcgctagttgttgttattttagtagagacagggtttcaccatgttggccaggctggtctcgaattcctgacctcaggcgatccacccgcctcagcctcccagagtactgggattacaggcgtgacctaccgcgcccggccaccatgtcttgagtag

SEQ ID NO: 147557 - DNA, 543 bp, Homo sapiens
ttttttatagatgggttcagcataccatagctcatctataactctaagctgagttaataaagtctaaatgccatatctttaatatgaagtttatatttagctcagtattaagttattatgaatacttagataatttaattgacttttaaagtttttctcttattttactgtgtgttatggttcatcttcccacgtaattttttggtggagatgctcggaaggagagaagagtcagagttgtctgtctgaataacatatttgatgtttccccctcacttctggggccttcactgataattaatcttttctaaagctgttaaagtagttgcattctgctatggttttccttagaaacttcaggcagtatattatagaggtggcttagttttttcttttttggcagtaatcaaaaggcgaggcacagcatagcactaaacattcacctattacaaagcaaaccaaaaatggattgtataatggcattggagcagtattggttgtgtcaggatgacacagatgtctcttaatgccttagaaatgcta

SEQ ID NO: 147558 - DNA, 358 bp, Homo sapiens
tggttttgatactatgctatagataagatgttagatgttaacactggagaagttggggtaaggataaacaaagtttccctgtacatttatttgcaatctcctgtgaattcctaattacttcaaaacaaaatgaaatttaaaaaaaagctttttttgagcagtgagggttaggagtagagaaacagtactggggctgtgataatttaggaatatctggcaaaaacaaagacagaaactctgagggccctgccctcaacctcatagaattaccatggataaatctttgacaaagatgagttcactccaaacttaaaagaacatatgatgatttccaatttcatccatgtccctacaaagg

SEQ ID NO: 147559 - DNA, 200 bp, Homo sapiens
tccacccgtggaacttctgttctactgcagtggcctcaggcagaaaaggaggacctggctgcccgctctcccttattctgtcttcagtgcctgaatgtctgacccagtaggtgtggttggaggtgagggaatgagttggttcacgcaatggtccacacacctctggttcctctccatttttttttttttttttttttttt

SEQ ID NO: 147560 - DNA, 154 bp, Homo sapiens
ctatgaaataataagacttaggtttatagcaacagaataatatagtacagcactagtctgccttggttttctaatagtcctgccaccatctcagccagagagttttctttccaccataagatcaaaacagtaatcccatcatctgattcttagt

SEQ ID NO: 147561 - DNA, 545 bp, Homo sapiens
gccagatgcacaggtcacaggggactgaatctcatcaccccacaaacataccattcaggttttgccaagaatgacactgtaaatgtaacaaagcttccgtgcttgttagtgaacaccaactcagctcctctcctgtattcagaaatcaggatgagatgaaaacaacaagcaggccaggcacggtggctcacgcctgtaatcccaccactttgggaggacgaggcatgtggatcacctgaggtcgggagtttgagaccaccctgatcaaaacagagaaaccccatcactactaaacatacaaaattagccgggcatggtggcaaatgcctgtaataccagctactcaggagctgaggcaggagaattgcttgaacccgggaggtggaggctgcagtgagccgagatcacaccactgcgctctagcctggacaacaagagtgaaactctgtctcaaaagaaaaaaaatttaaaataaaagaacaaggaaacaaaagtaacaaggcttgacaccagatgagcctgaatctaagcaagaaaagcccaga

SEQ ID NO: 147562 - DNA, 409 bp, Homo sapiens
atggaagttacatgagtttttatcttctcaattataattgctctgtgaacttccactttgataattatggacccagtttctgctaccagatctacacctcttttgactgccttacttggctggaaggatggtcttgtaactgctgatgttggttttacctactgatattgtcattctttctcaaatgtaaagtgtttttattttattgttcttgttgttgttttataatttctattataatttcagggatatatgtgcaggtttgttacgtgggtgaacttgtgtcatgggggtttgttgtacagattatttcatcacccaggtattaagctagtatgcattagttatttttcctgatcctctccttcctccccacctccatcctctgaaaggccctagtgtgaattgt

SEQ ID NO: 147563 - DNA, 420 bp, Homo sapiens
cgctgtgcgcgctgcgatcctcggggtaagaaggggatgatagcacggatcaggaagggccccactcccagcagcacctgagagacttttcagaatttctctttacaccaaaaggcaaagcaggagatggagacaaaatgaggaaaatgggctcaaggccagctccatgccccctacaattctcttccccagaatctgcaagacttaggaagagtaagttctatcctgaaattataacattctaaaatggtacttttacaatctgctttttcattttcaaagcactgtcacagaaaccacttctttgggtctttgcaacaccactgggaggcaggagtaacagatgccatcatccccattttacacaagagggaaagctcggggtgtgtgcaatgctgcacaatgttgtgagtgcatcag

SEQ ID NO: 147564 - DNA, 554 bp, Homo sapiens
atttgagcatatattattctaatgtgtataagctcactttgtctcttaatcttttttagtttcttcttcccctcgtgagatatagcctgaatttctttataagtttttgtttttgttttaatttcccagaatgaatgacagtgagctctttttttcttggacttgtcaaagctttttctcacttgaatgactagttagtctcctggtcattatcgcagtgtgttgcagacattagccacagaagtttctagatccccaactctcttgtgcaactatagcctgggctagggaaaagtttgctccatgaaattttcctaattgtttctttcaagtttcttcaagaagcttatgttctggtgggagacatataaatattttaaagtttaaattaactgacctaatggtggaactattcaggacttccatattcatcctacagttattggcttttaatttctttaggcaattttgttaaatgttataggccacttgtgttgtccatgagcagatatagtatcacttacattctggagggacagagaggtatgagttta

SEQ ID NO: 147565 - DNA, 391 bp, Homo sapiens
gcggccgcctactactactaaattcgcggccgcgtcgacatctgttaaaaaatctacataaaatctacagtaagcataattactaggtaaatactgaaagctttcccttggaagtcaaaaatgcctgctcttaccacttccatgcaacactgtactagagattctagccagttcagtagggcaagaaaaaaatatataaagataaggattggaaagaacttcacaaaattattattattggcagatgatatactactatgtaattaaagaaattcaaaaatcaacagatatgtcattcaaattattaagaactacatcaaaacaaaatttttaagtaaaaaaactaagaataacagctaagaaagatgctgtcgacgggccgcggtcgacg

SEQ ID NO: 147566 - DNA, 639 bp, Homo sapiens
tatcctcaaaataaggagaataaaactccagacaaataaaattgatctcacattttgttgtgttttcattttcatgtagttcaagatattttaaatttctcttgagatttttttttaacccatgtgttatttagaagtataaagcgttgagctcaacgctttatacttccttgcccaaacagtggcaccagaggattaaattataaaccacttagagagcacaaaggaggtggttactatttgggcaaggagggataaaggagagatatgagccaagcctattttagggagggaagtttttgaactggtgcgtgaatagtaagtagcagttcagctggtggaagagagagggtagatttgagagaagtttaggagaatgacaagtcaggatttggcaatttactaggcgaggtagtctgtaggaattgaggggaagaccagtttccagcttggcctactggttgggtttggtttaatggctcttactgagatagagaatacaggaggagatcgtttagggagaaagttttatttaccttttgaacatacaaattttggagtaactgggatatttagttggaagtgtctaataggaaattagatatacagaactgaagtataaagcgttgaggggtaccg

SEQ ID NO: 147567 - DNA, 916 bp, Homo sapiens
tcaacgctttattacttcgattatagggatttcacatcattcactatttactaatcgaagtagaaggcaaaatgatatgctgaaagcagagatggaggcttaatgagaaaagtgtatgggttgggaagagagtaccataaaagttactgcacagctgtgaagtctcaggtaaagttcttttgcatggtttcttcatggtctagtattgtgaatatttcttccttctacagttctggtgctggggtcactttagaggggccaggtagacaaggtagacaagacacagtctaggcccttaagttcacaggttagtgtatgaggtagaagacatagaaataaattaagtatgttgagttaagggaagtaaaattgggagtcagtggaagacaaatcagaggaggcttcctagagaagtataaagcgttgagctcaacgctttatacttccttgcccaaacagtggcaccagaggattaaattataaaccacttagagagcacaaaggaggtggttactatttgggcaaggagggataaaggagagatatgagccaagcctattttagggagggaagtttttgaactggtgcgtgaatagtaagtagcagttcagctggtggaagagagagggtagatttgagagaagtttaggagaatgacaagtcaggatttggcaatttactaggcgaggtagtctgtaggaattgaggggaagaccagtttccagcttggcctactggttgggtttggtttaatggctcttactgagatagagaatacaggaggagatcgtttagggagaaagttttatttaccttttgaacatacaaattttggagtaactgggatatttagttggaagtgtctaataggaaattagatatacagaactgaagtataaagcgttgaggggtaccg

SEQ ID NO: 147568 - DNA, 483 bp, Homo sapiens
aaaattgaatcaaaccctggtggaataataataatagtaaatcaaacaaagaaagggttggagtttggtataaatatgcaaattctaatatgcatatttagaactctgttatactaaagacctatttcttctcccactgacacagttgtccatgtcagtgtaagtaaattatgttttcatatttttattggttgaaccactaacaaactggtatgctacaaatatagctttttagaggaggaagtttgcttccttgggagaaaaatgaattgaaacgggacggttgtgttgcagatagctaaaagctctacagaactgttctatctaattattatgatgaccaatgaggatataactatttagcatatgagctagagaagatattgtcaagagaagtcatgaaggtatagatgtgcagaggatgggaggaatagcaaaaagcttgggatacaatgggtttctctgcatcatctgggtaccgag

SEQ ID NO: 147569 - DNA, 311 bp, Homo sapiens
cagagatcatctatgttcttcttagtagttgcattgaatttttttttgtagatttgtcatgattgtattataccttactctattgatggggcattttatttaggaaaacagaaactgtcctatgagtttcaacagagataatttattgtaagaaattaactggtgtttgaaaactgaaaaagtgaaaaggagatcctgagataacagagataactataggaagcagttttcacctaggtctggaggaacaaagagtagagattaggggttatcagaacctagaaacttagagaataggccccgtggatctg

SEQ ID NO: 147570 - DNA, 1582 bp, Homo sapiens
tagctgggactacaggcacatgctgccacacccagctaatttttatatttttaatagagacagggtttcaccatgttggccaggctggtctcaaactcctgacctcacgtgatctccctgcctcagcctcccaaagtgctgggattacaggtgtgagccaccacacctggcccacaaggaaattttagaattaaaaaatacaaccaaaatgaaaaactcaatggattcaatgtcagaatagagaagatagaggaaagcatcagtgaacttgaagatagaacaatagaacttacccaatctgaacaaccaagagaaaacagacttaaaaaaaatagatagaatctgactcctcaacccctttggccatggcaggcaccttttggactgggctgccactgcttgggcagagtaaaaggtgccaggaggagcatgggggtggaagtcctgtcagccaaaaaataaaagtttacctcagagctgcaaaaaaaaaaaagaaaaagaaaaaagaaagaaagaaagaaagaaaagaaagaaagaaagaaagaaagaaaagaaagaaagaaagaaagaaagaaaatagatagagtctcagggacctataggattattacaaaagatctaacactcctgtcatggagagagaggagaggggagatgggcttaaaaagtacttgaagaaataatggctgaaaactattcaaatttagcgaaagacataaatctccagattaaagaaagtgagcgccaaacaggataaagccaaagaaatccatatcaggacacataataatcaaacttctgaaagttaaagacaaacatagaattgagaaagagatgacaatctcttatgtataagagaaaaacaggatctctcatcagatactacaaaggccagaaagaagtggcacatttttcaagagctgaaagaaaagaactgtcaaaccaaaattcaatatccagcaaaagtatacttcagaaatggaggggagatcaagacattctcagatgaaggaacacttagagaatctgtcaccaacataactactctaaaagaatggctaaaggaagttcttaaaatgtaaaggaaatgataaaataaggaatcttggactatcagaaagggagaaaaaacaactgaaagaaggaaaatgtgggtaaatgcgatagactttaatgcttctggagttttttataaatgctgattgtatatcattgtctaaagtggttctgaaatatataaaggaaatacttaaggtaattataaatgagggaggataaagggacttaatagtaggtaaggtttctacacttcactcaaactggcaaaatgtcaataccagtacactgtgataagctatgtatgtatagaataagaaacactttatcaacaagagcacaggaaaaataaaacagaaatgaaccaggtgtagtggctcatgcctgtaataatagctacttgggaggctaaagtggaaggattgcttgaggccaggagtttgagaccattctgggcaacatagcaagaccccatctctaaaaaaacaaaacaaaacaaaacaaaaaaccaagaagaaagataaag

SEQ ID NO: 147571 - DNA, 122 bp, Homo sapiens
ttctgaggtcccggaagatcctggtggtgatctcagatggggcccctcagatgtcagcctttttcctcttgataccagtgagacatctagcccagccagagctttttcagatcaggttttgt

SEQ ID NO: 147572 - DNA, 525 bp, Homo sapiens
catgttggccaggctggtctcgaactcctgacctcaggtgatccacccgcttcagcctcccaaagtgctgggattacaggcataagccaccacgcccgacctcacctggtttttcttaagtgcctttaactaaaaatactgaatatgccagagtggtgtattttgggatgccatgttcttaactcgttcataagtaaagttcatgaaagcatataaatatatttaaataataataaacacactgagagaaatgacacaaaaaataattttgaattttctcatgtcattgttactaaagctgagaaaccagatattacataattaacataaagcggtattggaaacaaatgtggagacaagtcttttagattactggcattacatgctgctgactctcgcatcttcatgaaatctgttcctctttgccttctgtgacactggaagcttctgatttaccttcagtctctctgattacatcttctgaattccacttacaggtgcccttttttttttttgcccaacctt

SEQ ID NO: 147573 - DNA, 421 bp, Homo sapiens
cacagcaggtacctaatatgtgcgtgtgtcacggcactgttttaaccagccagggtgcattgattgaatagtgcaggagcagctcacaaagtcagaatccctgggtacaaatttgagttctgggaccccagcagagcacttcccctcgctcctccctcctgtggagctcagtgtcaccgtctgtagaatgtgcctaacagtccctgattccattctacctggtccttgtggcactcctcgagaagccatcaggacagctgtgaccttctgtgacatgaggataaggaccctgtgttgcctcccaccactccagacacccacaagcaggaaggtttagcaaaataggtaagagccagccacctgggttcaaatactggctctgacatctgctacctatgtggccctggacaggtgactcacc

SEQ ID NO: 147574 - DNA, 615 bp, Homo sapiens
gagaggtcccagctagaatcacacagttctgtactcagccatgtaacccttggacatttggccaaggtccctcaaatgcaaaggtgcaaacttgagttaataaatttcttccacacaccctgacatagatcattcatttacttttaaacaaatgtttattttctttcttcctcttttaaattacaagagaaaaacattcccgtagtatatgtagttggaggtgaagctggggcctcctgagttgagatatgactggccatggacttaggtacatttccttgcccctgcctgccccacctgtaaacatccagttgcacctcgaattgacttgggggatgcaaaacctttccaaggaaggcactcagtcacatatgattcagaaatatgagagcatgtctagcaaactgtgggaaaggatcaagaaggaagagacgagaaactgggatcagccacaaggcccgagggtggttccaggaagagcaaactttccctggacactgtcccagttcactcagtatgagttggctctggccaagcttcggtttgattacactgaacaagcaggctcacaagtctctgtaacttgttggggcaagaaggtgtgcctgacacaga

SEQ ID NO: 147575 - DNA, 676 bp, Homo sapiens
gttactgtgtctgttgagaaagctggaagtacaagatccaggtgtccacaaggatacacgccctctgaagcctctgggggaggatacttccttgcctctttcggcttctggtggctccagacactccttggcttgtagcaacgtcactccagtccctttctccctttcacggggccttctccgtgcctctgagtcctctcctcttctttttttagtttttgagacagagtctcactctgtcgccaagctggagtgcagtggcatggtcttgactcactgcaacctcagcctcctgggttcaagtgactcctgcctcagcctcccgagtagctgggactacaggcgtgcgccaccacacccagctaatttttgtagttttagtagagatggggtttcactgtgttggccaggatgctctcgatctcttgacgtcgtgatccgcccacttcggcctcccaacctgtcctcttcttataagagaaccaaccgttgaatttaaggcccaccctaaatccaggaagacgtcatctcaagattcttaactaatcccatctgcgaagatgcttttccaaataagttttccattctgagattccagatggatgtgaattttttgtggacaccattgaacacactctggctgtttactccatctgccagctgggatactcacagg

SEQ ID NO: 147576 - DNA, 477 bp, Homo sapiens
tacctaaacggtgttgaagaaaaccacaatgtcatcccaaaacatgcctcttcgatataaaaacaacaacaaatttgagctgaagacaagaggcagcaaatgaaggaaaagctctctctatcctccccctcttccgcccaaagacaggatataaattctttactggggataactttagacttaccagaccagttaaggtaccaggggaatctgcaaacaattcttactccattagtttccgaatatgtatctaccttcccaatttcctgccctttgaagcctaaaactgctctcctgtgtcctgtcacttctctgcaaatctacagttctttgttgaagatggtatacaaatgtagttctaagccaccatttcaagttacttctcattaaggtttatcccttgtgatgtgtactctgtccaagaataaacttttttcttgttatcctttcatttgttaaaggggtcactccgaacta

SEQ ID NO: 147577 - DNA, 460 bp, Homo sapiens
catgtgtttaacatcgaaggtgtcgaagtggcctgcttctccccaaacccaacaagtctaattcagtctctagctcagagtactgtaaggtcctttcaggctcattatacacagagctgtatggaaacgatcgttgacactgtggaagagaaaaagtctggaaagattacaccactgaagatgcattgttgtcatataaaaagctgtgaaagccatcaagcccaaaatttgtgctggagaaaactttgtctggatgttgtgcatgacttcacaggatttatgaaagaggcaaccaaggaaatcatgaaagagattgtggatttgacataaaaggtggagtgggggttgaagggttttaaggtacggatcttagaggaatccaagagcggatagacaccacacccgaggaattaacagaggatgacttgatgtagataaatgcttctgaattggtgccaga

SEQ ID NO: 147578 - DNA, 535 bp, Homo sapiens
aacatttccttgccccattcactacactatggtgtccaaggccctcataacatgctagttcatgggcaagccctccctcaatccatcctaaccttatgctactccagacacaccctttctccagaccctagacaacctgccactcctaaacacacttgctctttcttgattatgttcataccattcctctcatccaaagcaccttccactccacggggccctgccttccacattactacattcctaaagggtatggctttatttatttctctaatcctcccagcaacttacaccatacttttatcctcccagcaacttacaccacactttttatttcttaaatgtgctttgctgtcaaacagacagcaaaatgatacaatgagtccacaagagagcaactgtttggcaagcatttcccctctatataggagacaatgctggaccccatacaataaaattacttgggcctgataaacacggtgtcacctttcagcctacagcacagcattcgggatgtgccagtggtgcaggagct

SEQ ID NO: 147579 - DNA, 207 bp, Homo sapiens
tagtagttaatatttaaatagagagacgttaatcgtattaaattaatgtttgccggctcgcgtaccacgtttattaatatttactagcttcacagagctgctcagaggaataattaataatgaacgatgggtaaatctacttgcagacacaaagcatggtggacacggaggcagggtcttggcaaggcacctggtaacccatgtgca

SEQ ID NO: 147580 - DNA, 280 bp, Homo sapiens
cgggcgctgggtgaggtcccaccgtggtgcgcttggctgtgccagcagtctgctgcactccatcctcccacaatggccccattgttcccagcagccaggcagtttggaggaggttcctcggccacccctacccccctaaataggggacagattaaccccttggaggactgaggccaggtgagggcccacagggagctgccttgcccatctctgcctgttctgggaacccaggcttgggaagttaccttctacccatgtgaacccagcaccacaccacctc

SEQ ID NO: 147581 - DNA, 356 bp, Homo sapiens
aggagaatggtttgagcccgggaggcagagccttgcagtgagcctagattgcatcactgcactccagcctgggtcgacggagcgagactccatctcacggtgctttattatgggtaaagaagagaggcagaacgtggttggtttagcgaggaaaggttcaatttgggtctcattgattgacagcagtagttaacttgcactgaggactcactctctaattgttttaccgtatgaactcatttaattacagcagtaggtgctgttaactcccctgttctgcagatgtgaacaccaagtaactcacccagacttaagcagccaatctcccaaccaggattggggtccagacagcctga

SEQ ID NO: 147582 - DNA, 375 bp, Homo sapiens
catagaaaaaaaccatataattgtctctgtaagtattcagaacaaaacttagtatatgaatcatacagtcagatgagctaattataaacttcataattacattaatatgcagatatatttctagtctagcagctagatggaccttgctaaccactttgtcacaacctgttgttctagggtgggtgaccgccatcttggatactcaccaagggccacaaagcccctttgcaatatgtccatttcgtggaacactgatgcctaaaaagccatctgtgctcaacagcttacttgtcctgtctgtattctaagctcatccctttttacttcttactcaatagaaacccagaactgtagcagtcagctatcactatgtaa

SEQ ID NO: 147583 - DNA, 111 bp, Homo sapiens
agtaaagaatttgatgaatacaaatgtaaccacaaaggttgaagggtctacttcaagttggatatcttcaaactctaatgagccaaatcagcaaatcttttttaaaaaagt

SEQ ID NO: 147584 - DNA, 524 bp, Homo sapiens
gaatcagctcgttacctctacccgggtgctggggtaagaggggtggcgggagccccatcacgcagccttttgtgggccatggtaagggtcggttttcttctcactgcaattgggcagtcgctggtagttttcaacagcgaagtgatgtgatctaatttggattttaaaaatattccactgctgtaggggaatggattataatgacagcaggcaaaccagtttaagaggctgctacagtgctccaggaaagggctgatgggaaccggactaagccagtgttccaggaaagggctgatggggaactggactaagctggtgatggacgatagaaaaaagtgtccatcggatttggggcacagttaggaggcagagccaggaggctttgctgagagagtgagaacgagggtgagggaatgaaaggagtgaagggacagtcactttctggtctgagcaactgcacggctgatgttgcccttaactgagatggggcaccctcgtgtagtggcaagggcacaggctccgta

SEQ ID NO: 147585 - DNA, 415 bp, Homo sapiens
ggtggctccctagacacaactctcaaatgacgtgagcttggagtcatgcacatcatgagagctatggctcactctttcctctcaccttgcatgctgtgctcaccagagaaatggatggatttgtggatggatcacccaattaattaattaatggatcagactctatcaccttcctctcccacctgtgagtcagtccagacattccagaattttatagctccagcaccatgccccagagaaaaacaaaaaacaacctcctgggccttgaaccatcagccacttttcaaagaaagtcaagactccgtcaacatttttttcttccctcccaaaattaaaatgtgcctccagtataacttgttatcaaaaatagaagcattttatctatctttattgcagaacagagattacatggaga

SEQ ID NO: 147586 - DNA, 805 bp, Homo sapiens
ggtcagaggaaacccaatccacattggaacaaggcttcttaagacatggatgtaatttggtggatcccaccgggctgggattacaggtgtgagccactgcgcccggccaaacatggatcatttcttcgtgttacaaacattccaattatactttagttatttttatgtgtacaataaattacaaagatagtccctgttggtgtcagaatgaagtctacttcttactgaaacatcagacacaatggttagcaatttacaagagtatcttatttcatcattaaaaacactgttaaagagaaaatatattgttaattttattaataaaagaaaccaactattttagcaattaaataataaccagaatgcaacttttaacatcacaatgccattcatatatagagtaatggacttccagatccaaccaggatgagaaaaacctgaaactatatttttcctctatcttaaacaactatgaaaatagtcaagatagacaaaagaatgattttcagacctacagcaggctgcgcaaaacaatgatccctggaaaaagggaaacaaacaaggtgactgctgattgccctaatcttgaaccttaggctggtccaggttcttgactttgctggcaaaaaacattttgagagtccaaagtagagtaggggaaaaagcttattgcaaagcaaaatatactctgataggtgggtcaaacaagctgctgaagatgaaaacaccactctggcatggggaaattctttttcctttatgggaagcttatatgattattcataagaaggtgatgatgggcatt

SEQ ID NO: 147587 - DNA, 276 bp, Homo sapiens
ggcatggagccaggctagaatcgcagctccatcattcccatctgggtgatcctgggtcacatttccacgttagcatttccatgcctcaaacattctcaccttctgtgaggatcactgaatatgacagaggtaaaacacctggcatggttagtaagttaagaaggtgagggaaggagtagagctgaccaggaaacctggaatgcagctcctctgagtcagaggaaaacctagatctttcactccctctcctgccccaagtcccgctgaatgtgattg

SEQ ID NO: 147588 - DNA, 391 bp, Homo sapiens
gaacgcagcaggactatagaggagcccctgccagttgtagtagtgatgtactgggtgtatgagctggctcactaccttctacagggctggggttgcagaggtctcaggaagcttgtctcattctccagtgctgtacccttttgtcagcggctttgtattgggttgtgtagtttgaccttcaggcctataggtggcactattgtcagtagggtgcagatatctctgatatattgatttcctttcttttggataaatgtccactggtaggattgcttaatcgtatggtagttctctttgtagttttttgaggaatctccatactgtactccatagaggttgtgctagtctacattcccaccaacagtgcatgagttcctgtttctctaccttc

SEQ ID NO: 147589 - DNA, 266 bp, Homo sapiens
tgaagccaacctctgtgcctccttgctctgtggatgtcctcttgccccgttctgatactttcctctggttttgtccaattagaggtgtaggattccattccatgccattgttttaaacttcagctctggctttctgtcaggagccctcacttggggaacaggagaaaaaggatttgcctgggtagcagtgctgctgccgatggcagagagaggagatggggcttcctggcttcttttggctcctgggtcctctcctgtggctgagt

SEQ ID NO: 147590 - DNA, 358 bp, Homo sapiens
ctgcaaagagcctcgctgagcatgcactctctccccaccgggagggatgaaagcattccacggtgggagaaggcctagaaggcatcgtgcagtgacaccggagggtccctgagccaaacatgctgcagccaacagccaatgtggagaaaacccaaagagataccagcgtgcagagagaaaggcccacagggtgccagaacatgcccggtcaggtgggaagatccagaaggaccccagcttctgacaagcagaaccaacagaaccacgaccagaggtgccatctcagcatctgcacctgaccctcctccctggctccaaggccaacatcccttagaatgcactgggccaggtgtggtgg

SEQ ID NO: 147591 - DNA, 285 bp, Homo sapiens
tgtctttccagtgtccagagcttgttgagttgaaccaatccagcaggtggtttgcactgcggtggaccctggggttgcatgcttggtctctggtgtcagagagacctgagtttgagtcctgactccatcacttacttgctgtgtgaccccgggcaagttccccccgcctccgttacctgctggggaaacagcagcgcctacggcacagggttgtgtggagggtgcaagagaagtggccgtgaccatccttctaaatgggacaggctgtattccatggtcatgatg

SEQ ID NO: 147592 - DNA, 450 bp, Homo sapiens
caatctccaattccagagtaggtaaggataaggcagtaagtgtagatagagtacaccgacaacagatggcagcacttgaacatcaagccccgatgataagccctccttttcacatccatgttctgctgtgacttgcagatttgcataacctcaatccaggtgggcaaaagattatgtctacatactacagtaatgagaagggacaacatgacatgaaactcgtctgagacacagatgagtctatgacttgttgaagttgtaaaggtaatagatacgaagctgggttctgcaatctcgaaaatgggggtacccacaaaccattagagcactggaaacatataaacacttaaaatgtcactcagctgcacccacacaatgtagctggaagttgattttttaaagaaatgaaatttatactcaagtgtggttcatataaattagagttacaag

SEQ ID NO: 147593 - DNA, 292 bp, Homo sapiens
agggtcaagtacttcccctggcttaacttcctgagtagctggtactataggtgtgtgccgccacacctggctaaatttaaaattttttggagagatgaggccttgctatgttgcccaggctcgaactcctggcctcaagctatcctttgtttttgcctcccagagttctgggattacaggcatgagccactgtgcccggcctctgcctagttttaacagttgctaagaggaggatgttgaagtagatgtcttcttggtgggttaatccttttgtcattaagcagttgttatg

SEQ ID NO: 147594 - DNA, 398 bp, Homo sapiens
tagcctcctgaggacctgggatataggcctgcaccaccatgcctagctaatttttgtattttttgtagagacggagttttgctatgttgcccaggctggtctcaaaactcctgggttcaagcgatctttccgccttccaaagtgctggaactacaggtgtgagccaccatgtccggccagggcacatttttaataggcgtgaacaacaacatgctcacaagttaagtaaaatatttcatttaggtttaaaataatggtttaggagagcttttttatttttttttcagttgtttcctaagtgatctctttttatattatgaatttatgtgtgactactgtttactccaaagtaatacaatgtgcaaaacattgataactgatttctacataaaggtcag

SEQ ID NO: 147595 - DNA, 289 bp, Homo sapiens
gagtggaagtttatttaaaaggctttagaacaggataaaaaaggaaaggaaagtatgcttggaagagacccaaccaggcactgaggtcaagcgctctgtttaacagtaatctttataggctggcccctttctcatgattcttcccttagggtgggctgcccgcatgcctggtacccccctcacccgttggaggtgagcatgcgcagcgtgtttaagaagttgtacccatgcccatctgagactttcttccctattctggtggagtaaccctggaaagtcatactccgcc

SEQ ID NO: 147596 - DNA, 797 bp, Homo sapiens
gccatgcagccatgggcctgaggttgtggtggggcatgggggcagaggcaggcagtggggggccacaggaggggctggctggcaccgagggatgggagaggaagggacccgcctgcaggtcccttcctgaggccggcactgacttggtcactctctggctgccctgaccccaggcagagcagcgactttcctgttttagagctgagcagacagagcccctgactgcaggccaaggtgcctgccagctgctcctggagggccatagcctctctgtgcttgctggaaggtcccaggcaccgtgcaggtgacagtggccggcctcaggttccagcagagccagcatcgggcccagccacttcccttgtgctttgtgaccctatggtcacttggcacaggatcccgggtcaaatgctgcggttgcggcatttgccccaccacttacccctgggggcagcggagaaacttaatcaattgctaaacaacaaaaataatctggccgcctgccagctgggaagccactgtggccaggctgtttatggccttgggatctgcgcagtggacagtggcctgcaccgtgaccccgttcatcctgcgtgccccaggcccaggaggtggctcaagccctctgcctcctgtaagggcacctgagaaggaggccctggagctgggagcagagctgggggtgggcgtccgggcagcagaggccgattctcagctttccctggatctcagctttccccggatctcagctttctgctacccgtgtgaaaagaagccaggagaacacagctatcctg

SEQ ID NO: 147597 - DNA, 359 bp, Homo sapiens
gttcatcttttcttggctgcattcattttccctctttactgctgtagtttattgctctttgctgactcctttatttttattttccagacttgcctgaaatgcatcttgattctggcatctttagatgtttaaagccctgcactttgttactaatgatttccctcattttgcagaattccattcagttgcagttctatttggcaagaccctgcttttcttctttcttaaatcattacattttaatattcttctcttcctgctcttttatagaaatttgtatttcattttttaggttgtaataatggaccttcaacgccctacagtttgacttcttatcatacttacttgttttcagaatc

SEQ ID NO: 147598 - DNA, 237 bp, Homo sapiens
atcgtaatactaaattacattttctttctcaaacacttttttgctttagagctcttgcatatgttgtgctctctacctagagtccttgtcttcttcccctccccttttttttttttttttttttttttttttcccggaaaaaaaattttttttttttttcgggggggggggaagggggcctttttttgttaaaaaaaaccttcaacttcggggtttttcaaaaatttgggcccccgg

SEQ ID NO: 147599 - DNA, 349 bp, Homo sapiens
ctccatgttggtcaggctgatctcgaactcccgacctcaggttgcagtgagcagagatcgcgccactgaattccagcctgggcgatagagcgagtctgtctcagaatgaaatgatgtgacatgacatgacatgatgaaatgaataatgaaatgccgggtgtggtggcacactccagcctgggcgatagagcaagtctctgtctcgaaatgaaatggaatgaaatgaagagaataaatgaaataaatgaaatgaaataataaaatgaataatgaaatgccaggtgaaatgaaatgaaatgatgaaatgaataatgaaatgccgggtgcagtggtgcactccagcctgggc

SEQ ID NO: 147600 - DNA, 285 bp, Homo sapiens
aagtgttttcttggctgggtgaatgaatgcataaataaacaaatgaaggcacagtggttaggatattccagaaactcaaggtgagtctgtgagtggcgtgaaatctggctatggaccaatctgcccattggtaccctgagccaaatgccttgctagatttgtctttttttctttttgagagaaagtttccttcgaccaggctggagagcagtggcgcaatctcagctacctaagcctcccgggttcaagcaattctcctgtctcagcctcccaagtagctgggac

SEQ ID NO: 147601 - DNA, 607 bp, Homo sapiens
tcccaggaaattatacagaaccattactttatacttcaaatagcaatgaaatacacaattacaaatctggtatagatctataatttactgtttcaatatatcattttcactgttagttttagaagctatggaaaagcaaaagaaagcatgaactagaactagtgctccttctattttcacaaacatctattaacaatagaaaaaaactataaggatgggataaaacaaacagaagcaccaataagcttttgaagtacctttaaactgcaaaacagaatacagctgttgatcaggagacattcataactttcctgagcatagtttccatagtgtgacatgtacagacaccagattatggagggctatacagaacagatggtggggaaaggaaagcagtactgatcccttacataaggcatttactaatgaaatagttgctgggcactaaggactagtaaagggcatatatatatatttttaaatgatggtgacaatctaggcatttttatagtcagatgggaacagttacagaaagatattgtggcaagagagtactaaggagcaagtaatgactggaaataaggcatattatgaagaggttagcctg

SEQ ID NO: 147602 - DNA, 478 bp, Homo sapiens
gctcggaccgaaattaagagaaagaaggaaggcatacagaattaagggaagtgaagaacccggcacacccaagacaggaaacaggcatctggaaaatccgtcttgagcaccctctcagaaacaaacaggtaaacttaacaccaggttttggatgtacacatcaaagtcttaggaaaagaaagctttttggctgaacttaagattagtcacatgcctgccccttgtccctagcaaggcactgagaggactgatctgaccaagaagcctcctctgagttccatggagggagctagggcaggcagagccccttggggttccacccagacttctcaaagtgaggcaagagggaagttcccagcaggaaatccaagcactgtaagaagggggaataatctctgggctgccaaatatgaatgaatgagtgaaagaacaaataagacaaaggttcactgcactcttctactattttaaaataatg

SEQ ID NO: 147603 - DNA, 363 bp, Homo sapiens
tgaggatcccgctcccggggtaagcggctccacccgacggggtggaactgtaaatgcaaaacaaaacaaaaacatatattcatgcagaacaggtgcccagcacattgagaagcttctcccagcttttctaactgcaaattgaaataaggaagaccaactccctgcccaggacaccctgaagatgcgaagtggccagaagctgctagaaaacagatgtcttctgctaaagggcttccaaccaaagaactatttcttatctagggtcagcattccttgggatttcctttataagttggtcttttggcaccacctacccccccacccccaccccgtcgggtggagcgggtacctctagatcgtcac

SEQ ID NO: 147604 - DNA, 709 bp, Homo sapiens
  misc_feature (371)..(371): n is a, c, g, or t
gcggggctccgacatgcccgggcagctaatttcagcgcacaacccgcaagagtaagacgccacgcagcctctgaaagaatcgggccccaagaaagcgcgctcgtgttatcgctcccaggaaggcgcgcgtcgtgcagcagcaatagctcaagaagaacctagaagtcggaatccggaagaagatcgaacatgacgtggtgatgaaagccagcaagcagcctgcccaagaagctggcactgctgaaggccccagccaagaagaaaggggcagctgccgccacctcctccaagacaccttcctgaggacgctggccccagtgcaggccaacatcgcaccccgtcgggtggagcgctccacccgacgggtggancgctccacccgacggggtggaactgtaaatgcaaaacaaaacaaaaacatatattcatgcagaacaggtgcccagcacattgagaagcttctcccagcttttctaactgcaaattgaaataaggaagaccaactccctgcccaggacaccctgaagatgcgaagtggccagaagctgctagaaaacagatgtcttctgctaaagggcttccaaccaaagaactatttcttatctagggtcagcattccttgggatttcctttataagttggtcttttggcaccacctacccccccacccccaccccgtcgggtggagcgggtacctctagatcgtcac

SEQ ID NO: 147605 - DNA, 680 bp, Homo sapiens
tctttgcctgtacattctcgatggtgtcactgggctccacctcgagggtgatggtcttaccagtcagggtcttcacgaagatctgcatcccacctctgagacggagcaccaggtgcagggtggactctttctggatgttgtagtcagacagggtgcgtccatcttccagctgtttcccagcaaagatcaacctctgctggtcaggagggatgcctcccttgtcttggatctttgccttgacattctcaatggtgtcactcggctccacctcgagagtgatggtcttaccagtcagggtcttcacgaagatctgcatcccaccccgtcgggtggagcaccccgtgctccacccgacggggtggaactgtaaatgcaaaacaaaacaaaaacatatattcatgcagaacaggtgcccagcacattgagaagcttctcccagcttttctaactgcaaattgaaataaggaagaccaactccctgcccaggacaccctgaagatgcgaagtggccagaagctgctagaaaacagatgtcttctgctaaagggcttccaaccaaagaactatttcttatctagggtcagcattccttgggatttcctttataagttggtcttttggcaccacctacccccccacccccaccccgtcgggtggagcgggtacctctagatcgtcac

SEQ ID NO: 147606 - DNA, 184 bp, Homo sapiens
gtacaattgcttctggtgtacttggcattttgagttacagagaatcaagaaatatgattctcacagatgaatggttacaaatggtaattttttttttaatcagctcaccttatcataggaacagatacagcaggagaagctttatttaagagacacaaacaaatatatttaccaacaagccatc

SEQ ID NO: 147607 - DNA, 506 bp, Homo sapiens
cagactacatgaggcagggcagtttcagggatgtggattcagcccccgccccggctgggcttgcctctgattttcttggcttttgctttatgatttcaagacaggtttagatcgtcagatctttgttgtctgccgcaaaagggacatttccgcccagtgtcgtgtgtgtgcgcgcaaacctcccctaggagcccacagtacccttgacattacgacattatgtctttgtggaatcgtgacactggcccctgcccaggcctgtcgctagcagagcaggtgaaaggactgtggttgtctagaccagtggagatccctgggacccctgcacccagcccggcatgttggcgtcatctctgagtcatttcttctcttttattacatgcaattgattcacatttttagcaaaattcctctttcttgataacgtcccagctcttggtactccacaggacttctctttagaacgcaaaaggggctcatctgcccatcccaccattcagcggttg

SEQ ID NO: 147608 - DNA, 811 bp, Homo sapiens
tgttaccagtgtttcggtataaaatttgagaactaaatacaacaatgtattaaataaatttctaattttattagcctcacaattactcccgttagcaatgaaatgtggtgaaaccaatctctgaaaactatctaaaggtttctcactatgacaaagtatcattaatagttaatccagcccctcaacagaacaaagcctcttttaccctgactctgtcaagtagacagtagaagtaacacaagttcttagataactgtgagctgttaccaaactcaaggtgaaacccaatgctgtgttcagcaggaggccaagttttaaagcttttcctgcattattcttaatatatgaatatcatttattttactgataaaatacataaattttacagattatatcatagagtaatattcagaaaaaataagtatttttataatcttaagagacagttttttcataccagatattaacagacaactgaaactacttggttcactgatattgggatgtacaaagtcaaaaattaagctgagcgcagtggctcacgcctgtaccccagtactttgggaggctgaagtgggcagattgcttcaggtcagaagttcgaaaccagcctggataatatggtgaaactccatctctactaaaaatacaaaaattagccgggtgtggtggtgcacacctgtcatcccagctactggagaggctgaggcacaagaatcgcttgaacctgggaggcagaggttgcagtgagagcgaagactgagatcacaccactgcatgccatcctgggcgacagagtgagactgtcttc

SEQ ID NO: 147609 - DNA, 566 bp, Homo sapiens
actgatgccgatccttgaggtgagagatttcagtttgttctgtttgttgaatatatccccagtaacttgcacatgacaggtactcaatagttctttgctgaattaacagatgaatgactaaataaaggacatccaacaacagtatattacatagccattgaaaataatgcagtagatgtccatatacaattacctaaaaggatgcccatgctacaataattgaaaaaaaaaatgcaagcaaaataacatgattgttttaatgtgtgagaacaatgtttatatagatgtatctgctcatacttggggaaaaaaacggagaaaggtgcataaattttttttttttcgttttttgagacagggtctcgctctttccccaggatggagtacatggctcactgcagcctcaccctcaggcagactcaagcaatcctcttgcctcaacctcccaagtagctaggaccacatgcgcatgccaccacacctggctaatttgtgtagtttttgtagagacaagatttcctcatgctgctcaggctggtctcaaactcctgagttcaagtgatcct

SEQ ID NO: 147610 - DNA, 249 bp, Homo sapiens
tcttgattgtagcatgaagtagatttgtgccgaaaagaatgtccgtttgtgatcaagccaaagatccagagacccaatactacacaagaaggagaggaaatggaaactgatatggatgttgcagatgtggctatggaaagcagtccaggctcatccatctctatggagcacaggctggatgttgaattaagggcatcaggttccagcagcagcactaacatctcttctggccccagccctggtcccagt

SEQ ID NO: 147611 - DNA, 594 bp, Homo sapiens
tcttgattgtagcatgaagtagatttgtgccgaaaagaatgtccgtttgtgatcaagccaaagatccagagacccaatactacacaagaaggagaggaaatggaaactgatatggatggagtccagtgtattccacaacgagcagcacttctgaaatccatgttgaatttcctcaagaaggccatccaagaccctgctttctcagatggcatacgacatgtgatggatggttctctgcctacctccctgaaacacatcatcagcaatgcagaatactatggcccatcactcttcctcctagctactgaagtggtgactgtgtttgtatttcaagaaccatcactgctctcctcactccaggacaatggattgacagatgtcatgctgcatgcactgcttatcaaagatgttcctgctacccgtgaagtccttggctccctcccaaatgtattcagtgcactctgtttgaatgcccgaggtcttcagtcttttgttcagtgtcagccttttgaacgcctcttcaaagttcttctgtctccagattacctcccagccatgcggaggaggagaagttctgatccccttggtaagttg

SEQ ID NO: 147612 - DNA, 283 bp, Homo sapiens
tcttgattgtagcatgaagtagatttgtgccgaaaagaatgtccgtttgtgatcaagccaaagatccagagacccaatactacacaagaaggagaggaaatggaaactgatatggatggagtccagtgtattccacaacgagcagcacttctgaaatccatgttgaatttcctcaagaaggccatccaagaccctgctttctcagatggcatacgacatgtgatggatcgttctctgcctacctcactgaaacacatcaccccccggacttgggaacctctga

SEQ ID NO: 147613 - DNA, 430 bp, Homo sapiens
ggcaaggtagtttgggatcctggagctctgaaggacgggggaagtccttattcttaaagaagagttagggctatttctggctcccaagagatattgggggtggatgccgggataaggaggacttgcagccagctggagcctgagctctgcggggtggagttccagagggtcccccaggcgggaggactcgggattatgcgccccccctacacacacacacctcaagggagctaggtcttcttgggctgggcactcccttccgcccgccccattgcgaggatggaagattggggtgaccaggggtggccagggtagatccccggcgggacaggcttccctcccccgggagcaggaagcagagccccgcccagcagacctgttactggaagtccgagggctgggtcgcccctcccgtccccacttcctccag

SEQ ID NO: 147614 - DNA, 415 bp, Homo sapiens
gaaatcgtggctcacatcatccagaaaatcttgctcagtggctctgagactgtggatgtcctaaaggaggcctacatgcttctcatgaaaattcaacggctacatccagccaatgccaagacagtggagtgggactggaaactgctcacctatgtcatggaggaagaggggagttcccctacacaggcctcttgcctactgccatgtaagacgtgactttgctcctcatccgccttggcctcccaaagtgctgggattataggtgtgagccactgcacccggccaatacatagttttttttgttttgtttttttgagaaggagttttgctctttttgcccaggcctgagtgcagtgagccaagatggtgccactgcactccaccctgggcgatagagcgagactctgtctcaaaa

SEQ ID NO: 147615 - DNA, 393 bp, Homo sapiens
ctctgtcacctaggctggagtgcagtggcatgatcttggctcactgcagcctctgcctcctgggttcaagcaattctcctgcctcagcctctcaagtaactggaattacaggtgcgtaccagtaattttttgtatttttagtagagaaggggtttcaccatattgcccagtctgctctctaactccaatttcaggcgatccacccgcttcggcctcccaaagtgctgggattacaggcatgagccacggcgctcagccacggctgggtcttaactgctagtgaggagctctccgccagcccactgttgggtgtgggttgtcaggagcacaggagactcccaccctccagggtggctggctacactgccacttggagctcacacgtgtagcccc

SEQ ID NO: 147616 - DNA, 145 bp, Homo sapiens
aagtcttaatttatttagattttcccagtttttaacaaaagttatttttctatctcagcatcccattcagatcactacattatattcaattgtcatgtctccttaagatattctttgccatgatagtttctaagtctggccttgt

SEQ ID NO: 147617 - DNA, 158 bp, Homo sapiens
tgagttgtcaaaagccagttacgcaaatggcattgaccttcctagctgtcttctcatgcagcatgtcctggtaaagctgtcgagtggcaaatgagaatccttttctggtctcagtgatggagatgttttcattttcacccacacccttaatttttact

SEQ ID NO: 147618 - DNA, 358 bp, Homo sapiens
caggccagctgaggcccaaaaagtgtaagtgacaggactcctaaggtgtttagacgtagagggagagtgagcaaaaccaaaaaccaaacacgaaaccaaacctttcaaacttgggtgagaattggtcctttcacataagattctttggcaaagtatacaccaccccacctatacaaaaactgagactttattttgaaacaccaagtcaaatgtattgcctgcttgatcagacatcagtaatttcacatttgcttttcttagatttctatcccatttgcttccaatagatctgaggcagctcatgcttcagactctgtgagaggccagaagcccacctgtgcgtggagagatgatcaca

SEQ ID NO: 147619 - DNA, 275 bp, Homo sapiens
atatataaagtccactggatctgttcatatttttgttatgaatatatcttctcctattattacacaaacattataaaactaataaaattctacataagagttcatcataatctcactactcaacgaagttttcacttactcattttctcctccaattctgatcaatgttcacaacatttttacaatgattgtaactgatgccaacatgacagtttgtattcttttttgccctcagcacattcagtattttccatgtgatcagagtgcttatattt

SEQ ID NO: 147620 - DNA, 140 bp, Homo sapiens
tgatccttccacaaggtctggtgcagacatttccccgctgggagactctccacagtacctcatgatcttatcatctctgactgtggcatttgtggataatgttttacttgctaagggttggaactgtctcctcctgggtg

SEQ ID NO: 147621 - DNA, 147 bp, Homo sapiens
gaaagaatgacaggtttttactggcaccttctgagaccaattcagttgccttcacaaggacttttaaacaatcggtatatcagggactgtgaggcccaatttccatttttgagtttttttggggggcaattgtaactatttataagg

SEQ ID NO: 147622 - DNA, 445 bp, Homo sapiens
gctgcttgaatcaggtagcattgtgaacttgtgtcaagccagtggagaactatagagcctgatgtggctggactgtaacagtgaaaggtatttgatctgtgagattacaaagggactttcaagaccagagagacagcagaaaaggaataggtactcctgttatggaagaagaaactgtacctgtcagggatttagcacaaagactgggtggtgctgagtaggctgcagaggtcaagacagggcaggcagtacctactctcattgctcaccatgtgtgagttcaggcaacataaaaaacattggtaaggggattacttgaatgaaagcaaaaatatatttttactggtcatttgggtttatattatttgaaatagtgtaatggtaggatttttcaagttttataagaaaaataggaccattaccctaagttcagagccagggggta

SEQ ID NO: 147623 - DNA, 295 bp, Homo sapiens
tctagaggatccggcacagcagacgtaccaccctgtacatctttggctgcttgaccgaagcaaatgcctattgcttttggcttttttatgtttgttgctgttagagaactcagcagaaacctccagataaacgctttagttgtccaggtaggaaaccaaagtggaccctgggcagttttatttggagacctcttctgcttttgtgattgtgtgtgtgctggtggtactggaatacaggtctctgggttggagagcttgtgttccggatgctggcaatttgatgtgaatgtgctag

SEQ ID NO: 147624 - DNA, 742 bp, Homo sapiens
cctggcctccagcttctgtctgcttattcctgggatgttgttaagagcaccactcagcccctcagcccctaagcagcctcttccagtgttagccagtgccccaggaaagatgtatcatctttcttgctgcccttgaagagtggtgtccagtgaatctttcaaagaatgatactgagcttcattgttgatgaacaaaaatgcaaatctcacccagagcatgcaggaacatgctataatcactacactcctagaatgtgatctctttcaatattgactgcatccatgccttccacacacttgcaccagttgggaggatggagatgtcatctgggcagagggagaagagcagtaccattcagaggtctgtccctcttaagatatattctctctgtcaacctagaccatagttgttcaacataatacttacacatttgaaaaaagaagattgttttattggagtgccttaagatgttttcaacatatggattttacagcagggcagttcaagaggcatgaggaatgtttcttttctctatttgttggagcactggagtgtgagctgaagcagcctaatcctgacttgcagaaatggagaggacatgacttaccggaattgttcatggaattggtttggctaattctcattgattctgccatttctccagaagccattactacagctgttgaaacaggggtagagaaaaatgacaggtgctaagtggtatctaggaggttaataatg

SEQ ID NO: 147625 - DNA, 179 bp, Homo sapiens
ccaagatcgccccactgcactccagtatgggcgaccgaacgagactccgtctcaaaaagaaaaacaaagtgtatgtatacatatacacacacacacaacgctcataagtgtaatcctttatgactattgattatagttctctcccattgctgagttgctactatttatacaactcctat

SEQ ID NO: 147626 - DNA, 109 bp, Homo sapiens
tggttacactcttgttttctttttcctttaaagcagctttaggtttacagacaaattgcgagaaaggtatagagatttcccatataccccttgctcacacacatgaata

SEQ ID NO: 147627 - DNA, 390 bp, Homo sapiens
gagttgggctagcagacaggtggaggggtacataagcagtgatccattttgggcagggtcattttggcctgtgtagctttatgccaaccagaagtgaactgaattagcaaacaccaagttttctggactcgtaatgcttagagttgcatcttctcatctatggcacatgcatctcccttagatgaggttctgattgtgtgaccctcccagtcctagagagcctggaacaattgctctctccaaactgcagagctcatgaaatcagtcgcatgaaggcagatcagaagggaacatacaagtcatcaaatctgcaccagcaattctcctttcaatgtttgcatttcctcactcccattggactcattctgaggttccccattcatgcttgaa

SEQ ID NO: 147628 - DNA, 757 bp, Homo sapiens
agactagagagagtcatcttggaaaagaggtgtgtgctctgaggctggctcttttatttgaaccgacagcttttagtaccaagagctggagctgtgattctcaaactcagagaggagaagaatcactcagtgagctgattaaaaataccgactcacagtcacctccagccccgtctaacggatttagcagatagaaataagacccagtaatctgcgttttaaagaaatgatacagttggtccatggaccagatattgagaagcattgcacagatggtcagtgactcaggagggctcgatttacgatctatccactttacgatgggtttttggagacgttagccccatcgtaattccaggggcatgggtgatccagcttacattgccgggtaagggctaggttttactcccccctcaacggcgcctactgtcttaacagggtccactttgctaaacaccgagttggaaaagcagcttcctctctttcccaatctctgatggtgctgcttccaggtgtaacttctacctgccctctgccttaagggtccctagaacccaggatggctccagagaaagtaagcttgtcatcgacccgtcacttcccaggtggttaacgtccacaccctgcccccagcggcgggggagccgggcctacgggctaaaggacggtgttgtaagaagctggacgagcccggttccagaaaccaaacagcagttgttatcatgccttttaaatcacgcgtagaggtttcagtttc

SEQ ID NO: 147629 - DNA, 309 bp, Homo sapiens
tcagatatgcccccaaaaaagggggggggaggggcacctctaaataagtttgtgaagaagtaggagatggtagtgtaagaaaatgcagatgcacccaaatgttacttcctggggagattattctgtcccattccctacccaatggcttacttatttaatatcctctgctataaactccccaagtatccccaagctataaactccttgaggctaggtagtgtccatctccactgttgtatcctaatacagaattcagtacatgtctgttgaatgaataatgagtgatgtaatcttcataggaggagagaa

SEQ ID NO: 147630 - DNA, 643 bp, Homo sapiens
gtgttgccgtggtgatctagaggatcccggcgctagtccaatgtaaacatttctaagtcccaagatggagtaattagagagatgtttctgcatggaattctataaattgtcacacctgtttagttgaacaatgaatgaaaatatgcagacttgaacagaattcaagaaattattaaaagacttacactttaccagcagaaattacttaatataggaaaaacatcagtcatttttcagggagtcatcaagggatttttaaatcactaaaaatgacaaataagaagcggaaaattatcacaattatataagcagtattactgcgatgtacagaacatctgtcaccagtgatagccattcaacattctacaaggggagccaattgacgcattcaatattacaaggctaaaagcagttattactttttttcacttttaaaacaaaacgcaatcatgtaattttcagttagtataaaaattgaatgcaccctgagtcaaaaataagcaggtatcatattttccatatggccatttgtagcaaatcatacatttcatttttgagaaatggtatatttttcaaagtatttttctgtgtgttaataaaacatggagagaaagctgtgattctttctttctatacatggcaa

SEQ ID NO: 147631 - DNA, 238 bp, Homo sapiens
ccccaggcgcacttctggtgaaagactctggagggcagcaagtcctcagttattcagcatttcagtcccagccccaaaaggcattcaggggaaactccagggtctgagtggctgtgcaggtgacaccaccctcaaccacagcagcttctttgggtctgtctcctgttgggtcggctgaaactacctttggagaaaaggagttttactttttaaaaatgagagaagtgcgcctggtgtg

SEQ ID NO: 147632 - DNA, 234 bp, Homo sapiens
gctagtagcaaccaccctacgggtcacaggcaagttttcgatgttgaataaagaattatatagagtcaatatgaaaaggacaaaatttaatgtgccactaatggtgcctagtttatgttgatgtgcaggagaattcatttacttaatcatttccgttttactcagtgcctcccaccagtattacagtcacagtaagtcatgaaagaataaaccacagcctaaattattcatata

SEQ ID NO: 147633 - DNA, 397 bp, Homo sapiens
gcccctttcccaggtcaaaccatagagcagaggctttggaggtggagctgtcggcttcactactatgggaccttgtatttaatctcaatctcaatttcttaatgtacggggtagggtcactaataatctatttcacactgttgtctgtcctaagcatcgatgaggaaaaaatatacacacatacatacacacacataaaatgtatatatatgtgtatacttttttcctcattgatgcttaggacaacagtgtgtatgtgtgcatatatatgtgtgtgtatatatatatacactttatatgcgtatgtatatatgtacatacgtatatgtatgtatatgtaggaaacctctgaaacactctggggacataataattgctcagaaaatggtgtggaatc

SEQ ID NO: 147634 - DNA, 485 bp, Homo sapiens
gtcatctgggggctggaagtaagtgagaaacttctccttctggatgagatgtagaagctaacagcagtccaacaatcccaaccagaactagaaaagccatctaaaatgcaggatacagaaggcatctgtttgaagggtctgggattctgaaaatgaaaacaaaaaatttggaagaagtgatttgacctctacagccacttttaccctggggacctgtgcccattctgggcaaaagaaggatgcaaggatccagactttatacacatagaaagctgatgctgaaggagaaagaaaccagcaaaacatttggaggaaacttggagaacctcaggcacaccaccagttttcccactggggatattttcctcaagagaaaactacaaaagcctactcaagtaattggtaacacagactggcccactctccattccttcttcccctctccatgaaaaaatttaaaataaagagctagttaagttgccaga

SEQ ID NO: 147635 - DNA, 283 bp, Homo sapiens
agctggggccagaatgagaggggaagacagctcacttacagagagctaaggtgggagagagccctgtgttcttggatgcagcaggctggagtggagtttccatttccctgagctgggaggtagcagaagagtagatcttgttttaaatgccacagactattactgttcttactcagttttagtagactttcttgaataactatattttttatcttgctgtatacagaaaaatagcattttggagactttactgttttttaaaaaatagttttcagcagtctta

SEQ ID NO: 147636 - DNA, 353 bp, Homo sapiens
aaaaaaaaaagaaaagaaaagtagcacaggacctggtaaaggaaacaaagctaaataataaatataaaaatgaagtcgagattgaggtacacaaatctgcttttatatcatttcagcgagcaaggttttaaaactgccatttatagtagcatgaaatacgttggaataaatgcaataaaagattggttcaggacctctgtaccgaaaactgtagaatattgcaagggaaaccaaggccggcctgagcggtagctgagctctgccgtgtgtgtggaggggaacacacgacattgtacagacagcccttctctccaggctcgtctgcagattccatgtgatcccagttggagtca

SEQ ID NO: 147637 - DNA, 162 bp, Homo sapiens
ttctattctgactactcttcaactctaggtcttttggatacttcctcagtcaagcaccttgcacttactttgttcaaaaccatcctcgttatctgtctccccaaattcgtttttctgttttctgcttccttttaagctttataatacacatttgaaaaatac

SEQ ID NO: 147638 - DNA, 435 bp, Homo sapiens
gagaggtggtcacatttttccagttctttatatgtttagaaatgtatctgatacatggtgagcgttctgtgtagagactgtagtctgttttctccaaagagcaggaatggatttgtttcagcaggcagttaacttggtgccactcacactgcagacactcaccagcagatggcagaagctccaatcccagctcagttcttgtggcctcagctacaggctgcctcgagtccccccaggcttgcgtgtgcagaggccagcctgagacttgggggagagtggatcatgaagttcagggcttgcatctttgcatctctgcccctccatcccgattccccttcctttcccctgggagtggttgtctctgggctccatcctctggtggtcagattctaccagaatcttaggcaccctcactgtgccttcctgctgtagctg

SEQ ID NO: 147639 - DNA, 880 bp, Homo sapiens
tcagaaggctgtaaatagcaacagaagtagccaggaacatggtagagaaatcagtgggaagacctagaatcctctctctgtgacctctagataagtgttcgccttctctgaacctcaatgtcctcgtctgaaaacaaaggctgctcagtgagatgacttggaccaagcttcctcctggctttgaggatctgattctaatgctgattgagtggtaggagttgggcatctctgtttagtgctgttttattaagagaagaaagaaccctgaacccttaacttggcccctgccctccccactctgagaccatttcatgctatacctagatatctccttggccagagaccacagcagggggaagagatggaccatctgagcaaaaaatgaacatcaccaagcaaaaccaagatttgcctccatcccctaaatactgaccataaacaaggatgtttaactttgaaagactcagtgaccatccttcaaagggctaagctggtagcaaagagaagacataggagggaaatagagccaagataaattacaagttgcctcagatacttatgtcagtggtcatgtgaggagaaaagacttcatcctataatccttaatcctgtagaagagagaatgttttctatagttcctgggaatagagaagctctgttacctgaggcattcaagcagaagtatggctcctatatgaccaaattgacacagatagtgtagtggagaaaccagctctgtatgcagggtggtctcagcgtccctttaatttgctccaagggcctgctgcatgcccccagtggggaaaaaggcaggcgccctcctccgagggctgagttaggacatggtggtgtgaagtcagctccttggactctcctgggc

SEQ ID NO: 147640 - DNA, 274 bp, Homo sapiens
ccctttccaggtctctttttcctgatccaggagagatttaactacaagtcaccttttaaagtcccataggagacatttaccatctattctctctgaagcctgcttcctggaggcctcatccacataacgagaatctccgcttatcttaactcaaacatttttttatgctgacatcaactcttcagtcagaaaacctttcagtctgcctaggatctgtgaggtcctcaccctacttcttcaagatgttctgggccaaaccaatatataccttaca

SEQ ID NO: 147641 - DNA, 340 bp, Homo sapiens
tctccttttccttcgtattattttctcattcattctattttttatgtctttcctgtcaggtgatctgcgtcatctggtgcttgaacaagtttctttgtcatctggtcccaggctttttattcatctgaagattaatgaagagtagccctaaagaaaactttgtagaggaaagttgaaccattactttatctgattttttttggcaactatctatgaatctataattatttgagagtaaaagttttatgaaaatattggtaaaactggggtcccatcctttggtttacaacagtattacattacatgaggttttaaactgtaagggaaaggcgggtaatgg

SEQ ID NO: 147642 - DNA, 827 bp, Homo sapiens
tggtaatgagctttgaataccctactccaaaacagcaaaaactgggtgaagactaataacctaaatgggaaaattgaaactacacaaaaatccagcggcagttctaatccttggaagtaaaggattttggagatccctgccctccaacaccacaagaaaattttgtctcaaaaaaaaagagttcatagtgttggtaatgagctaacccagctaggggaaggcagcagatgatataaaaatgtaattggaccagtggttattataaagcactgacaacctctctgatttccctgtatcttgcaagtttccttttattctttttctccaggtcaaggcatgcagctagtgggaagaaaatgcatcttgaataagttaaaggatgactggtgttctggattaagaattgaaatttatgtttactttctacccccatgagccagttatccaaacattgccccatcagtgatgctggatggtgtatgagtccataggaaggtgtcattaaacattaaataactattgcataccaggcatggaggccctgtttagtgggggagtcagacaggtccggcagcaccttcaggaagaggcataagtggggtaccatggctggatcagagaaagtcttgtaaagaagacgatgcctaagttaagatttgaaagatcagttgaattaagcagtggtaagtctgggagaggcaggtagagtgtagggccaaagcaggcatggatgaggaggccgagagacaaatacacagcattgggagggctacaagtatttccttctggctgaaggggagagggttggcagggttgagtggaaagag

SEQ ID NO: 147643 - DNA, 382 bp, Homo sapiens
tatcacattctaaccgttgtccattgtatggtgttatttgtctcagatcgaaaacctggtatacgaggcactcatattaaattatcgtcatcattgctttctgcttaataaaaagagaggccttcttaactatcagaggaaacacagtcctatgctgatacacaagaaacacacaaagcgattcagaaaagttgaaatcgacttacggacacacagaaagcatgccaagaatgcatttgtaaaacctgaaggtggaattcagggccaaaagcatcaagtcagacaaataatggtattacattattccaaaagacacagctcacaataaggcattaaacagttatgaatatctatgcactaaaacatagcatcgacattaatg

SEQ ID NO: 147644 - DNA, 509 bp, Homo sapiens
gtaggtgtattgctagtgataggaacttgcttgctgctcccctgtgtattacccttgttttttcaaatgataagaggttttgtagctactttggttcatcagaaaacttcaacacacgtgtgttatataaatcagtatcgctctatctcacaaatagactcaaaaagtaaagatgagagtgagaactcccactaaaaagtgaaaatgctcaaaggggggaaatatggtatgagaccaccacttctcctgttgtccttcccagtttctccccaacctccccttttccctagtttgtaagacagcaaaaaagggagaaagcaaaaagttggaaaaaacagaagtaaaataaatagctagacgaccttggcgccaccacctggccctggtggttaaaataacaataatattaacccctgaccaaaactacctgtgttatctgtaaattccagacactgtatgagaaagcactgtaaaaactttttgttctgttagctgatgtttgtagcccc

SEQ ID NO: 147645 - DNA, 301 bp, Homo sapiens
gcacccgctactcccacgaagcccccaaggggaagggtcaccctctccagctgacagaagtcaagggagaattaagtccctgtgcaagaccacacagtggcaagtgccaggtctctgggcaagtccagatcttttcccttcaaagtctgcactgtcaacatatgttgcctgtaggttgcttcgaatgctcatcaatacctcgtcatgtgcagaaaatctctccctactctacgggcatacaaactgaccccagcagcactttaaacacggaagcatgtcaggcctttaaagtgaagtgaat

SEQ ID NO: 147646 - DNA, 172 bp, Homo sapiens
aatcttccctatgttactgacttacgccatgtattcagactaattgatcaccttaatggcacaagaactgacagctacagacaccaacccctcctccatcccatctctctgtggctttgccacagaaaatctccatgttctattctattccacatcttgttgcttttgtgtt

SEQ ID NO: 147647 - DNA, 343 bp, Homo sapiens
gtcctcttcccatggtgtagtgagagcactcaggaccacctaggcctttcctagaaaactgaacccacaccttcccagtgctgccccaccctggtcccccaccccctgcaggacaaaccactcctcccttgttttggggccaggagtcagatctgcccctgagagcagcaggggcccctttgtcctttgacgtcatacccacaccgctcctggagacagccaccccttcatgccagccccaggaaggcttgtaggtggggcgagccagggtgagagtgtagccctgttcctcggccagggcagatgtttcaccatttttaatggagcaattatgagtcagagg

SEQ ID NO: 147648 - DNA, 911 bp, Homo sapiens
ccttgctgctcactgagcttgttgggattgggcctgggctggcctggaggccacagagagggagccctctcagctggacacttgcctccatggcaagtgctgagaagtggggaagacccttgctggaggggcccttgctggagggtcttgctggaggggccctcaggcacccctggagaatacccaggttcctcagaccttaagccagtccgtgggcttgtgcatgcctcagtgagaggacccaggacagtgcatggcagactcttcctaagaaaggtgtaggagtgtgctgatacccatttccatggccgtaataatcccaaccacttgtgctgagttttctcagggccggggcctgcactgagtgagttccatgtatcatctgatttcatcctgacagccatcctgggagccaggcaccaatattatccccatcagacacatcaagaagctaactccaaggggtctgatgactgcccaagcaatggaggaggcagtggagctgggattcacagccagggctttctaagtccaccccacaccttaacaaacattcattacaggaggaaaataaaggacttttgtctccaatctttgtgacatggtttggctctgtgttcctacccaaatctcatcttgaattgtactccgataattcccgtgtatggtgggagggacctggtgggagatggttggatggtgggggagcagggggtggtttcccccatgttgttctcgtggtagtgaataagtctcacaagatctgatggtttgataaggggaaacctgtttcacttggctctcattctctcttgccactgccatgtgagacgtgcctttcaccttccgccatgattgtgaggcctccccagccacatgaaactgtaacaataaacctctttcttttgtaa

SEQ ID NO: 147649 - DNA, 237 bp, Homo sapiens
ctactcaagggaggcctactctgaccccacattataagtcaggatcctttgttatatactcttgaagaactgtattcctctccttagagatttatctttttgttactttgagtgtgtgttattatttgcttctaccacttcacctcagtgaaaagcagagaacatacaagttatttagtcattatcaactgcgctttgtgtaccttgtgggacttaggtactcaatacatttttgtt

SEQ ID NO: 147650 - DNA, 509 bp, Homo sapiens
tcggccgccgggattccttcggccgcgggattccttcggccgccgggattccttcggcctgcgggattcctagatatccacaaagtttgctccatcacctcctgaggtctcttcaaatctcatgttcactcagtttagaatttgcaacccctgatacacacacggacacacacacacacacacacacacacacacatcacatatatggtggttatttgttcagtgtctgtccctcccaaccccccgattagaatgccagctccatgagggcagaacttatacctgattcaccgcggcctcccccatgcctagaaccgcgcctggcacctcgcagatactcaaggaatccttgctgagttctcagtgtgactcaggccaaggtggggacagtccagggcttctcaggaaactccccagctcctcccagcccacacagtcagggggtctggcagctcacagggaaggaaggagtgggacagaaggaagttggcgcttgcagagatcccctg

SEQ ID NO: 147651 - DNA, 876 bp, Homo sapiens
ctgtttcaaccatatcctttcaaaccagatcagtgaggtcatgaccagaaaacaagccctgccagcctcctacctcaaatctaattaattataattttcttccttatgacaacccacacaaaagacagagataagaaaaacaaggacttcctgggaggctgtggatcaattaccaatggacacccagaagcaaattcacaagactcacaattcaaagaaccaattttttacaattttttttttcctgtcagttgaatttgggaaggaaggaacacgcaaaaatttttaccttcttctttcaattggacactatggacggaaatccaggagagctgaccttggaactgcagacactgcagataaaacagagccagaatgctttgctgccagctggacctttgacccaaaccccagtgtgactgtctccggtgctcactcaactgcagtgcatcaatgaaggaaaaaagaactgagcattggcaaaaagctgaggatgacaagcttaggggatgaaaggctgccttttcccccccttctgagcgtttctgacagctcccagctgggagaaaccaacatgacgaaaagacaaagaatactggagaagagagagggtgggcagagccacaacctcatcctcccagtggttcctcttgagtttgatttgacaagatgccttcccacccaggtaaccccgtgggaacgtgccagtacctcaccgcacgacctcactgagtcctcacaacaaatccaggctgcagatttttttccccacttggagatgacaaattgaaatgcaggaaggttaaagagtttgcctgaggttgcttagataataaaagaatctggattagaacccagacctacccagctaaaaaa

SEQ ID NO: 147652 - DNA, 897 bp, Homo sapiens
ctgtttcaaccatatcctttcaaaccagatcagtgaggtcatgaccagaaaacaagccctgccagcctcctacctcaaatctaattaattataattttcttccttatgacaacccacacaaaagacagagataagaaaaacaaggacttcctgggaggctgtggatcaattaccaatggacacccagaagcaaattcacaagactcacaattcaaagaaccaattttttacaattttttttttcctgtcagttgaatttgggaaggaaggaacacgcaaaaatttttaccttcttctttcaattggacactatggacggaaatccaggagagctgaccttgccttcttccctctacatacaggaactgcagacactgcagataaaacagagccagaatgctttgctgccagctggacctttgacccaaaccccagtgtgactgtctccggtgctcactcaactgcagtgcatcaatgaaggaaaaaagaactgagcattggcaaaaagctgaggatgacaagcttaggggatgaaaggctgccttttcccccccttctgagcgtttctgacagctcccagctgggagaaaccaacatgacgaaaagacaaagaatactggagaagagagagggtgggcagagccacaacctcatcctcccagtggttcctcttgagtttgatttgacaagatgccttcccacccaggtaaccccgtgggaacgtgccagtacctcaccgcacgacctcactgagtcctcacaacaaatccaggctgcagatttttttccccacttggagatgacaaattgaaatgcaggaaggttaaagagtttgcctgaggttgcttagataataaaagaatctggattagaacccagacctacccagctaaaaaa

SEQ ID NO: 147653 - DNA, 311 bp, Homo sapiens
aaggagacctgggaacaccagccttcttccctctacatacaggaactgcagacactgcagataaaacagagccagaatgctttgctgccagctggacctttgacccaaaccccagtgtgactgtctccggtgctcactcaactgcagtgcatcaatgaaggtaactttctgtccagatcatggagtctacatgaaaagaaatcaatgcaatcctatttttttttttttttactgctttctctctctcaattcttggattaaagaaaaacagcagaccctgatggtgcccagctcagaccccctctgaagcc

SEQ ID NO: 147654 - DNA, 137 bp, Homo sapiens
cactttagaccatggtggtgaggcttgtgggaactcaagttcttaccactgggattgatgagaacttagctgatgctccttccttgggtgggtgatcagctaagtttggactggttttcctttctgttataacaaca

SEQ ID NO: 147655 - DNA, 360 bp, Homo sapiens
ggaataaaactcattaggaagcccagaaagctgtaccatattagatgttattttcaaaaattatacatttagtaattcacctcttttcttacttctcagctttatttgttcataattcatctactaagcatgtacttactacaccaagatgcattgaaatttcgattgagatccgtcccaaaacatgtgccattattatggggtgaacgggatttcctccaaagacgatcctgtagcagaggaacatacggatgttgctgttctaaggtttcataaatcacagtgttagtgatgataggtggtccttgaacatgaaaaatgtttcctaggattatctggaagaacttccctttaacatta

SEQ ID NO: 147656 - DNA, 231 bp, Homo sapiens
tcacgccatgtccacaacagtgtataactcctgctttacaggtgtgtgtgtgggggggtgagtgtgtgtgagtttgtaggggtaggtgagtgtgggtttgtggggtgtgtagggggtgtgtgtgggcttgtaggggtaggcgagtgtgggtttgtggggtgtgtaggggcgagtgtgagagtgtaggtatgtgggtgtgagtgtggatgtgtgtaggcggtgagtgtgaaa

SEQ ID NO: 147657 - DNA, 338 bp, Homo sapiens
tgaaggagtcaaattcaggcaaatatctgggaatcagggaccacatagaatcagatcaaactggggctgtgggtagaagacatgtgagcagtgaggactgcagaagctatgaaagaactagagatacaaagttctgaaactatcttcgccttaggaacagactttctcttctagctgtagcaaaagccagtaatggtttcccaggcaacatccagtctggcataacctggaagctcatgtgcttctgcaatgcggtatcatcttttgatgggcaaattttgacataattttccagacttttaaccaatccaggaatggaagcttagaatgttctattg

SEQ ID NO: 147658 - DNA, 451 bp, Homo sapiens
aggcactcaccccactgctaagcaactctgttgaaaagctgatcaaaatgcttccctctggaagccctaacttggtagacttacaaaactactctcttgcataataaagagcaggttcttctattctctcacctccggattccttacactattcaatacgactagtgtagtcaaggaacatgtgggtgtctgccaagtgctaggcactgggggtacagtggtaaacaaggagagaaaggagaggcagataattacaagatgatgaggaatgaaggcagtgactcgtagagaggatgaagatgatagggggaggcctctctcagaacgggatggccgtggcgagccctggagaatgggagagtcaggtgtccaaaaggcattctagacaggaggaagggcaggcagaaagactcagggaacacacctgagcctccagtacagaaaggaggca

SEQ ID NO: 147659 - DNA, 789 bp, Homo sapiens
actagataagaggaagcaaactttagccagactcttcttgcctcaccaactaagagaaacaaagaccaaggtatcacattctgccattagctgctacctctcccttccccattttcagacagattgagcccactttttgtgtcctcctctgctcttaagctgtttctcatcgtgggtgctcagcaacttgtctgctctcactctagtttctatttgcttccctgaaattagcctttaactatgcccagacaagccagagccttgcctaaacttctaattcctctgtgcttcttagtgtatcctttctgcctgcttgcctgcctgccttcctgcctgcttgcctgccttactgaccctttgccccacctctgatattatcatttcctgtgtttttctgattacttacctaaacctctgccaaagagctcgatctgtacaagagctgtcttttgctttgccctttggatctggtatttatgactcctgcccttctgcctggctacacgcttctgctagacatacataggtaccacctctgttatctgggtgcttactggccctccccctttcctatatccttgtctccacactaccctaccacttagagtcctggcccaactgaccatgcacttccgatatagcaggtagtcacccaaagctcagggagatttcatatcccattaagctttcctacctaagttgagactactacttttttctccaatgttttattttaaaaatttcaaacctacagaaaagttacaaaaatagaacaataagcaaccatga

SEQ ID NO: 147660 - DNA, 363 bp, Homo sapiens
gacagaatggcatatttaaaatgtaaagggaaaattcgcttctaatgtagaccaatgacagtttcattacaatgatggtgtttgtttttatatttttgactaaaaagctggagaaatgttgcaactgagttttattttacttattactaatttttgttaaaattccagagaagatagaaatagtctgtgtttttcgtgccgtaatttgaagtgcctgtggattttaaatgatactcattttcaaagtattaacatattaatgtaatatactgatattgtgattataactatattttgctctcattttgtcatatcctacaaaatccttaatacagaatttcttatctgggtaactggttacat

SEQ ID NO: 147661 - DNA, 686 bp, Homo sapiens
gtgtgggttccctttgtggaggtctgcagtaaggggaagtcagggcatgtagaggtgaggtttttcgggcacatgtacggtggcttaagatgctgcttcatacaacatatgtctcattagcatcttaaatctccacctgtgggcatgatttttagtactaaaataaggaaaagttcatgatgaggtgaaagttaagcctagctaggcacgtagggcctcagaaaggtccttagttctctaaagcaaggggttaattaatttgtggttaatagcttcttgggcctttgatgctgactggctgggagttacagcttgagtaaagggcttttgttcttttttctccaaaccacatcacaacaggaaagcagccagcttgcccatctcatgcttgcctgtctcatttccactcctttctctcaccttgcatgtttccgtgaagggagagaaagcaagtacatggagtcatccagcggagttttctcacttacagactatgtaattaagccatttagactccacacaaaagttgctctgtttaaaaaatctttttgaaagaaaagaaaaaaaaggaaaccaacagcaaatacactatagaagatactctttacccccatccagttatctgtcactttacccttatccagttatctgtcattattttctgagtcataaattgactaacccct

SEQ ID NO: 147662 - DNA, 322 bp, Homo sapiens
aaatcttgagggtaggaatatacaaaagaagtgacagataagtttatgtgggattgtgttgctgtctttgttaggccatccttgatagctgttgtccaatgaataaacagttgtgaagtatacctctaaagcatgattaaaatataggtgtatggaaacatcaaatgagcaactatagaaaagcaagtatttgcctataagaacaaatgttttcaggtatctgacattcttagttttaggtactagcagtagttttattctttatttgaaacaaaacgttaatatctttaaaataaatattttattagtgtatgtgttatct

SEQ ID NO: 147663 - DNA, 747 bp, Homo sapiens
ggacggcgtgggtgacccacgcgtcggtaagtatgtgtgtgtaaaaatagcttagattttgaaacttggtttataagattaaataattagtaaatttggccaggcacagctgcacgcctgtaatcccagcactttgggaggccgaggcggatggatcacctgaggtcaggagttcgagaccaggctggccaatgtggtgagaccccgtctctactaaaaatacagaaaaaattagttgggcgtgatggtgcatgcttgtaatcacaggtactcaggagggctctgagcaggcaggagaattgcttgaacccgggagacagaagttgcagtgaattgagatcatgccactgctctccagcctgggtgatagagtgagactgtttcaaaaacaaaacaaaacaaaattaaataattagtaaatttgcagtgatgagggattaccccaggccttttttcctgtggtttgtttttatttttactttaatatttacttttattgagacagagtcttactttgttacccaggttggagtactgtggtgtgatcttggctctctgaagccttgacctcccaaggcacatgcttgtagagaaaatagagtcatagggtctccctatgttgctcaagctggtctcaaactcctggcctcaagcaatcctctcacctcagcctcccaaagtgctgggattataggcgtaagccaccatgcccagtttatatattgctattttataacctagtttttt

SEQ ID NO: 147664 - DNA, 475 bp, Homo sapiens
ctaacggaactggccaaatcaccccctagaaaatcccaaattctctgataaacatcaacaggcttagcagccagcaatctccaccacaatccttccccatgcctggcttcagcataaacgtgcaaactcttcaaactgagtttacacagccattccatccaagacttcctccacaaagggcaagaaacagatagtgcaaggcatctcacagggtcaccaccaaaacagaacatacatgacatcattcctgctcaaagcaaaattacatccaagaacgacaaaggaagtgcttgatattacatctctgaatcaccttcagcaccaaagatagtaaaagatgacaacatggggaagaggaagactttctccctgttgatcatccacacaaaagtgtacttccccgccacctactgactccacatgcccggtcagttacacctgaaatcttttttttttttttttttttttttttgag

SEQ ID NO: 147665 - DNA, 201 bp, Homo sapiens
ctatacagcaaaagagtacatttaaaaaatacttttaacaataccactataggtacgtaggtgtgtttgtaaatatatatgtagatgcaacacatttcacccaaggatataagcaatgtgattatttaattcatgaataagttgtagatgatatgactcatattaaagcctaacctaataaaatattcaaccacagtggaa

SEQ ID NO: 147666 - DNA, 204 bp, Homo sapiens
ggtattaatgctccaaggccaccacaaatcagttgaaacagaatctctggaggtggagcctacatatctgtagagccactgaactagtaaggcaattcaggaatcagaaatacttatccctagaaagttaaattggtgaacctaggccagccatggcagctcacgcctataatcagagcactttgggaggctgaggcaggcaga

SEQ ID NO: 147667 - DNA, 583 bp, Homo sapiens
  misc_feature (1)..(1): n is a, c, g, or t
ntccggccgcagagctccaccgctgaggccaacgaggccaatatctttatgcatattttaataataatgaaagttaggaaagtaacttctttaacagaatacagatgtgacattagtaattaggattccaaataccacatattggagttaagaaaaaaggagttccctttcaattaaactgattgcttaaatttgtgtatttacatattttcttagtgacatccaaaataattttaaactatttataattttctcattttgttagttgttatttacattattactaagatgaacatgcatatacaatttcttcttttttctccctctggccccataaaaacccaattttcttagccattagcattgatgagaggattctaaactagattttctctgtaggattgggtacaacgtaggcacctaacagaatgaactattttatgaatagtagaaataagttataagtagtatgagaattatattacttcttctgcatttctaatatccatcacatcttcagttttagtggtagtgtcttagttcccatcttcattttctctgcttttcatcaatccatccctgt

SEQ ID NO: 147668 - DNA, 317 bp, Homo sapiens
tcgctatgctgcccaggctattctctaactcctgtgctcaagcgatcctcctgccttggcctcccaaaatgctggtattacaggtgtgagccactgcacctggcctgctctcagcttaaaagtcacttcttcaaggagggcttccctgacatgccaccctcaatcaaacctaggctgcattagcacttttctggcagtgggtacgtgtccttcttagcgcttgtcacgatgtgagtcatgatttgtttagtgtttttcctgcttgtgtaagctccaggaaggcaaggcctatgtctgttgctctccaggctcttaaa

SEQ ID NO: 147669 - DNA, 236 bp, Homo sapiens
tattggagaaaaatcctgtcatgcttctgccaggggaaggggaaaagaactatttaaaaatacaccagaacactctgttcttctgaacgtggtctgctcttaggaggaactgcttagccagagcctaaacttcaggggttttaccaacgcctaactgacctggaagaagggaaatacccaattctaagtaaactaggaatagagggaaatttcctcaacttgataaagaatatctg

SEQ ID NO: 147670 - DNA, 111 bp, Homo sapiens
cctccatgactgtcacaccctactcagaataaaatccagaccccttccatgtcccatggccccacacaacttgccccacttgactgccctaatcatgccccgtgctccctg

SEQ ID NO: 147671 - DNA, 361 bp, Homo sapiens
tttaaatagacgttttattgaaatataaacagaaacgtttccaaattggaagcatatcactttctgatttttcataacataaataggaatgcgcctctagacctggctataaagcaagctggagactggcagctctcccgacttgtctttgtgcctgtcccagccacgactctacgaagggtaaacatcttcagtggctttggaaagtgtcacttggcgatgctcagctgtgtcccagacttccctgtgtgtgtccagttaaggtgagccaccagctttccttgcaagataccaaagcaggatgcagtgagaggtgcccatctccatggctggccctgtggaccccaagtgccagcattag

SEQ ID NO: 147672 - DNA, 869 bp, Homo sapiens
tactctcggggatttgcactaaatctcctctgtccttgcgaagccgaggcgaaaaagatagagaaacagcacaaagtaacccgcactcctaattgtccagagcactgcaagctcatcagaagaaaggaggaggaagggagaagagcatactccagcatacaaccaaaagctttgtccaaacatccaagagagcaacaaggctttgttggcaatcaatcaatgaaataacataggaaatgtacatgaaaggaaagtatcttgggcacccaagatcactaaggaaaactcaagctggaaactgcttagggcaaacctctcccattctattcaaagtgacttctcggctcactgagatagatgcatatctgatttgcctcctttggaaaagctaatcagaaactcaaaagaacgcaagcatttgtgtatcaccaatctgtgacctgaaagctccctccccacttccagtcttcctgcctttgcttcaagttgtcccgcctttccagaacgaaccaacgtacttcttgcatatattgattgatgtctcatgtctccctaaatgtacaaaaccaagctgtgccctgaccaccttgggcgcatgtcaacacgacttcctgaggctgtgtcacgggtgcgtcctcaaccttggcaaaataacctttctaaattaactgagacgtgtctcaaattttcgaggttcacatatattttctgtggatataaacagcataatgaataaactatctgaaactgttctgctgtgctaagttaacaaaaaattttaaaaaacaaggccttaaaaaagtcaatgtaacagtcttcttaccactttggataaaacaatgaagccacatttgtgcatattataggtt

SEQ ID NO: 147673 - DNA, 255 bp, Homo sapiens
ctacccttccccaatatgcacatggttgagcacatacactcattgcaagtaatagtaattccattttggaacatccctttgattttagccataactatcagatgatttctttggtatctagtattattctatattttgcttttatttatttgcaaaaattgagtattatttcatgtgagctgaatgtgtgaatttttgtcttttaaaaatattgatgtcctgaaccattttcttactctatttggagctttcatt

SEQ ID NO: 147674 - DNA, 324 bp, Homo sapiens
aactggatcccttccttacaccttatacaaaaattaattcaagatggattaaagacttaaatgttagacctaaaaccatgaaaaccctagaagaaaacctaggcagtaccattcaggacataggtatgggcaaggacttcatgactaaaactgatttcttttttatcacatcgtggtcagagacctatttgacgtactttcagttttgttttttttaattttaagactttttgtggcctaatagatgctctgttcttgaggatgttatatatgctgaggagaagaatgtgtatattctgcagccgttagatgaaatgttctgta

SEQ ID NO: 147675 - DNA, 228 bp, Homo sapiens
ccagtcctgtgctggcacatggccctggagttacagaggacagttctgcctacccagtgagaacatcccagcttctagtgctgctgagttcctggaaggaggagcatctgattggcccaacttgggtgtgcatttccctcccactccagtctgtctctgtgaacatggaagcagagtgccttagaaagtggacccgaagaagtatcctccaactggagagaagagcca

SEQ ID NO: 147676 - DNA, 691 bp, Homo sapiens
aactcactcattaatgtggggagggaaccaagccattcatgagggatccaagaccctaacaccttcaatcaggccccacctccaacattggggatcacatttcaacatacttggaggggacaaaacatccaaaccctatcaccttctgttcacagttttctgagtattttaatctgaattttaaatgccattaaaattttatttagattacattgaaacttaattacacatggctagtggtattggtttatgcatttttagatcccttcaagttatcttcctgttctacctttttcttgggttttgtaattagtctccttcttgaaagattattttggtactggttgttagtaattcctggatttcctttaaagatataagaaatactggggaggggacaagatggacaactagaaatagctgcaatcagaggcttccaacaagaagaacgaaaacggtgagtgaatcctgcaccggcaactgaggtattcaccttctctcaatgggactgactaggtggttggcatgacccatggagagtgaggaaaagcagggtggagcgacagcccacctgggagctgcaaagggcaaggggagctcccaccccaagccaagggaggtggtgagtgattgttctaccctgtccaggaaatcatgctttttccaaggatctgtgcaacctgtgattcag

SEQ ID NO: 147677 - DNA, 711 bp, Homo sapiens
gtctcagcctcctgagtagctgggactacaggcgtgtgctcccatgcccagctaattttgtatttttagtagaggcggggtttcaccatgttgcccagggtggtctggaactcctgagctcaggcagtctgcctgcctctgcatcccaaagtgctaggactataggcgtgagccaccatgcccagccgtgcgtgaagatttttaagaatttcagtgactaaactttaagaaggaatgaagcccacgcaggaactctgtatgactttcaacccgaggggctctggcctgggcttcccagtgactgccggcatcgggacatccactgctgtggccttggccccgtttcccgtgctgtgccccccacttgctgcagatgccctgaggaaagggtggccaaacaaggggaggagctgtgagcacagatggggcctgccggtcaacagggcgggtagagccagcctggtgctgagcttgcagcttggctgggggagacgcctagagccccagtaccacacagaccctccaggactgccgggggtcagtgagcaggaccctctgaggtgtcagacctgccccacatgtgaggggaggacagcacaggtgggacgcatgcaggctgagctgcatcgggcggtgaggctgggaggttgcagtgagctaagattgtgctactgtaccgcagcctgcgtgacagagtgaaactgtgtctca

SEQ ID NO: 147678 - DNA, 329 bp, Homo sapiens
cactgtattccgtcctgggtaacagagcaagaccttgtctctataaaaaattataaaaaataaacatcacacttactttagctcctactatgtagaaagcagtaaaacacaaggctaagaatttgggcacagttgcagggtatattcaaggaagcagcgggtatggtccctgccctctggcagttcgccatctacccagaaaagatttaagcggcaggtggttaaagtgagggaaccctttttcagtttgggtgtcacctctgattattttgctgtcgctttccctatgacatgattattttgctttccttcccctcccctgagtatct

SEQ ID NO: 147679 - DNA, 804 bp, Homo sapiens
ctgaaagggtttttgcattttttttggttgggagacataacagcatgtttatatgtcgatgagaaaaagtccagcagagagaggcaaagtaggaattgcatgaaagagagggaaaagttgttagagttactatctttgagtaggccagagaggatgtgattaatccagatgatattagaaacacggagagttcacatagagggaaagcaggaaacagtggccccagtgctaggagggcagatatcaaagtaggagcttgtggaagctctattctaactgcttctgtcttctcagtgaaaaacgaggcaaagtaataagctgagagcaggatgagagcaaaggtgttgggattattagagaggcaagctgaactaatcataagcaccaatttaaaaaattcgttttgttcataggttatacccagggatggatcatcagtgagtatcttctgagtacaggatttacccagcattaagtcatcatttttaatgtcaataatacatagtttggtttgctttccaaagaccacatgtacaacacacatcaactaaaaacctagattttgtctttacttatcaaaatgaacatgtctttccccatatagaatgcttttaaatagaaattatcatctaattgattgttgccatataacaagtcaagatacagtactagttcttttgctaggtaagtttctacctgtttctgacacactctcatctaccaagataaccacatcctcaacaagaggcttttactgtacctgattttaaagttagggggaagaggttgttttaagcgtagaaa

SEQ ID NO: 147680 - DNA, 184 bp, Homo sapiens
ctacgagttgaggggagtgaggcctgcctgtagacctcttgattgccctgctctgcaatagaatttgctagacttccacgctgtttgactctgtctctctgctttttggttctcaggctgaaattgtccatcctagaccttcacaacctataggacaccctccaacaccacttccctgcacagc

SEQ ID NO: 147681 - DNA, 165 bp, Homo sapiens
ttcaaccgaaagagtgaagaaacagactctactgagctgctttctccacagaaacaagagtgcagtacagccaagccaggatggaagtgaatacatatggagagggggagagggtggctagctgttcaccaagacttttttgttgttgtttattttttttttttt

SEQ ID NO: 147682 - DNA, 414 bp, Homo sapiens
aaggaccgggggaaaggcaggcatggccagggtgccagatgcagggagggctccagcgagctgaaggcggaggtacggctgttgggcttggcaaaaagagggtcaggggagccccagaagagtgaggtcagtgagtccatagggaggtggaagccagactgcctggcagggagggcatgcaggcgacatgctgcccagggtgtggctcactgtgcccctgcccgctgctgccgtccaccccaccctctcccgaagcaccacatcctcccggccctagcgtctccctgctgaggatgcctacacaccctcccgcccaggcctctccagcaagccacagactcgtgtatctcatcctcttcccctaggtggccccagggcaccctagatcccactggtctataacaaacgggccct

SEQ ID NO: 147683 - DNA, 405 bp, Homo sapiens
  misc_feature (4)..(4): n is a, c, g, or t
cggncattcgcccgggtcctgacctggcccccatgcgagcccgtccgcccctcgcgtgggagttccgccgaggcccgccctcgctccaagccccgccctggccgcccccccggagccggagccccgtggaaaacgccacttcctcgacggaattggcctgccgtctcgccgcgccgcccgtcggagcctgcacccagggccttttctgttcctaggagactcgctgaattttgggacgcgtcccgctgacgataactccttttcccctgctattgtcctcccgcgacggtgcgaagcccaaacgaagacgccatcggcctcggcggggattttccccagacgctggacccggcctccggttgctgcgggctccttgtgcgcctgcgcagtcgagaagggggccca

SEQ ID NO: 147684 - DNA, 330 bp, Homo sapiens
cgttcgacatctcaaagagagaacaaccgtgttccctctccaccccacagttcagtgtgcccagcttggaaactcacatctttttggggattagttaattgattggagatatgaactgtatctagtggaggcatgtctttatcttctagagaaaaatctttagatggtttatcccttttaactttggttataaaagtattaaaaaagaatacacaaaagatctgaaaaagaaacaaaatcatctgtaatcctatcacacagagttaaccactgttaacttttaaagcatatcttttcaaacttttttttctatgaaaatatggagattcg

SEQ ID NO: 147685 - DNA, 776 bp, Homo sapiens
caagaaaatagatgaacccacgggcagggtcgagcaactctggatgggaggaatgaacaactctggacaccacctttatgaactgtaacactgtaacactcacctggaaggtctgcagtttcagtcctgaggccagcgagaccaggaacccaccggaaggaacgaacaactccagatgtgccgcctttaagagctgtaacactcaccgttaaggcctgcagcttcactcctgaagtcagcgagaccatgagcccaccagaaagaagaaaccccggacacatctgaaaatatgaaggaacagactccagacacaccatctttaagaactgtaacactcaccgcgaaggtccgcggcatcattcttgaagtcagcaagaccaagaacccaccaattccggacacaatcacaaaattaaacctcctcaaatagagattgacagtaaatgtaatctgtatttctgttcatgccatcattggtagtgaattatttaaatatataaaacattctcaaataactcataacaggacaattacctatctaatttttgctctttataaaatgaaatgtaatctccgtctaataatttaaattgtttttacaatctggtctaacaggaatgtttcttattcttccatatgttcttaacagacttactttgtttttactttttgtcatctttataaaatcacaaatctctacattatgtatttatgcaaaacatacacttctcttggattgtcaaaacgaactctctcccttaaaaacattgtaatat

SEQ ID NO: 147686 - DNA, 884 bp, Homo sapiens
  misc_feature (27)..(28): n is a, c, g, or t
  misc_feature (56)..(56): n is a, c, g, or t
  misc_feature (65)..(65): n is a, c, g, or t
  misc_feature (70)..(70): n is a, c, g, or t
  misc_feature (72)..(72): n is a, c, g, or t
aaaagaaaattaacaataaaaaaaaannaaaaaaattttattgtaacgactctctnattaccacngctanangcccatccggaatcacacttttcacctgcagaaactcatcaggctcgtctccaccaatgatggtaaatccaaagcccatgttgctcttttttagggtggtgctgaggaatgttcccttcaactgggatgcatcccgggtgaagagtggtttttctacattggccaatataagttaaaaaagaaaaaggcatgttcaagtcaagttctcagacaagagaaagccagcccctgagcagcgacaatcccaggggtaaatgtggggggtcttatacagcaaatgcaagcaggtggtgactgcaagaggagcaaaactattagaacttcctacacacgaagagcagtcccaagcatccagggaaagatgaaaaagctgtttggtttggagacagactttttgtcaaatcagtttccactcattaagttagccttcttgtgcttaaaaaaggctgtgtcaacaggctgccagagccttctaagaaagaggacaaggagcccaaatcatccagacaacatctggatctgttcctgttgttattgtgaaagattccaggtaggaggtatgtgtcagtggccgatcctaaactaagccttgaagaaataagggtagagaaatgaaatggacatggacttgtgattttttttttaagtgaataagagcacaatatttcagcatgtgcaatatcacaaacagagaaacagtggaatgtgatcacatactcaaaggtccagattgcttagaaagagtacctgtatgtggaactgacttttgtttacactgctctattgtgagatactataaagataaccagata

SEQ ID NO: 147687 - DNA, 703 bp, Homo sapiens
gccatatttcagttggtgaaaagtgaagcagaggaaggtgggggttgtgagagccgggagggggtcccccactctgtggcacagttagcttggggaagtcagcagtgggaacatgaggagatcaagctgtggggcctgagcagggccagcagcaaagggggtcccagccagaggcaaggtgtgtgctgggcatgtgtgggtgtgtgctgggcatgtgtgggtgtgtgctgggcatgtgtgggtgtgtgctgggtatgtgctaggcatgtgctgggcatgtgcaggcgtgtgctgggcatgtgctgggcatgtgatgggtatgtgcaggcgtgtgcaggtgtgtgctgggtatgtgctgggcatgtgctggtcatgtgtgggcatgtgctggtcatgtgtaggtgtgtgcaggcatgtgcaggtatgtgctgggcatgtgccgggcatgtgcgggtgtgtgctgggtatgtgccgggcatgtgaaggcatgtgtaggctgtgctccctgagctctggcaacaagaaagcagctgtgtttgggtgcagggagtgagggggacagtgtgcgttatcctgacacacataggggccccttctgcatcctcccaactcacatttagtccccagatattcacagcctgtgtggctgctgatcccagcccttccagatgccactggtgaggaagacagggatgggggaagg

SEQ ID NO: 147688 - DNA, 223 bp, Homo sapiens
tattcctggccctcatcttactgggtgtcccagcaacaatctcccctcctcaactctctgaccttgctcctccaacacttagcatctcagtgtctcctcagacctctccaactgctcctctcaggcagcctctgcccctgactccccatcctctatctgttcatctctgcatgcatgtgcagtggcacaatcacagctcgctgcagcctcgatctacctccca

SEQ ID NO: 147689 - DNA, 334 bp, Homo sapiens
tcaagtttttccctatatgtttgcatatatggttttcatattgttatacactttcatgatcagatactccatagtagatgggttggctgatatgaaaggattttttgttttgttttattcctttaatatgtgtcatcaacagtttaaaacttacagggatttttaatactcatttagtgccagttgtctttgaaacaatatttttatcaaagattgttgtgacagagaagaatatcttcatggttttgttttggtcttcacttgggtaacaagttactggtatttggagaacaggagagactattttcctcagatttcgaaatggcaaagcata

SEQ ID NO: 147690 - DNA, 130 bp, Homo sapiens
cccacatcctcaaatgagggtggctgcctctcctatgtgtgcccataaaaacccttatttctatctaagcactcagtaaacagcactgacattgttttctctgtatctgtgtcaccagatagtgatccca

SEQ ID NO: 147691 - DNA, 121 bp, Homo sapiens
gcctcgagtgctcctccactccagcttggtgttgaaccagccttctcttcctgagtgcgtgaatcgggttctttcaggttctgagaaacagatgtgttgagagctcctcttcaggggaggg

SEQ ID NO: 147692 - DNA, 195 bp, Homo sapiens
caaatagaaagtttttcatttaaagaaataaaggcaagatggcagtttcccttagtttaaaaggtaatataagacctaagaataaaagcagctcactaactggttaatacagtctacttacataataaaatgcttccaattgtatgttaaaaaatgaagaagctctttatgtgctgatacaaaattgctaagcca

SEQ ID NO: 147693 - DNA, 307 bp, Homo sapiens
ccaccacatccaacatggctccttgtttccccagcccttttccctgtccttttgcagaatgtgaaacacaccatcgcatgcaatcagtgtgcatgtttacctgtggatttcccatgttcctactggaatgtgagcaccgtaaggactgatatttcatgggtctctctctgttgcatttccaggacctagaataacacccagtgcataggaggtgctctatttgtagaatgtagagtgtttgtagaatgcaagtgtgctctcacagcacgactgttcacgccatcacggtgctctcttgctctattct

SEQ ID NO: 147694 - DNA, 335 bp, Homo sapiens
gcaaaagtagtgtttccctcagaaaaatcaaagtatgatcaaaacaaacatttagaatacacataatttggcctttcaaggcagccgttattaacaccttggtgtacatcttttcacaatagagtgggacatttcaatttaagattttcagaatggaacagttccaagccgtggccatggaaataggtggctgggaatgagtggaggtcaaggtcattattgttgaagaggtcagggaactgtgagactaagttattgcttaggctagttatctgcttggatatggatgtcagtcaagatgatgacagcatttggcatacagaggaaaactgtga

SEQ ID NO: 147695 - DNA, 416 bp, Homo sapiens
acagttggataaatgagtttggaagtaaggagaaagatctggcaatagatataattttggattttatagtggtgttttgatagcaattgttgctatcgccaaaataattcatcaacgagctccctgacagctccctgacctttctttttaaagaaacagggttggccgggtgcggtggcccatgcctgtaatcccggcattttggaaggcagttcacctgaggtcaggagtttgagaccagcctgaccaacatggagaaaccccatcactactaaaaatacaaaattagctgggtgtggtggtgtttgcctgtaatcccagctactctggaggctgaggcagcagaactgcttgagcccagcagccagaggttgcagtgagccgagatcacaccattacactccagcctgggcaac

SEQ ID NO: 147696 - DNA, 359 bp, Homo sapiens
tagacacagcagaatgtcttttcaacgtccatcttttaccagctgttcatgttgatgcttgttgaggactgggctctggacttcctgtccttgtgctattctcaatgacttgagtttcccctagatttgtcttttgcttttcatttgataaatcacatttctaagtggtaggtttcgtaatgcctggtaataagataggctttttaattagaagtttgttttcattaccaatttaatatttgtattaagagtgtcagaaaagtataacatttaaaaccataagccctaaagtaaggctgcctgggcttaaattccagattccccacttactaactagggcatgatcttgtgatgttgta

SEQ ID NO: 147697 - DNA, 248 bp, Homo sapiens
tctattgtgattttatgggtctgttggaagagagtctctgcttgggaaagcagaggtggacaatggacttgctatcttcagcccctcagagccttcccaaaggctaaccaccttggggaaactgaggctgtatatggaggagttagatgctatatgctgtattcagaaagacggcttgctaatagcagctgttgcaggggttgagagaagatattaaccttgagcttggagaccccaacaaggctagt

SEQ ID NO: 147698 - DNA, 369 bp, Homo sapiens
tataaagtggcaataaacttggctgaattatcctcatgacagaggacgttgtgggaaaaataattaaaaagcaatgaagcaatgcactgaccaggcatggtggctcatgcttataatcccagcactttaggaggctgaggcagaagaattgcttgagccaggagttcaagaccagcctgagcaatatagtgagactttgtctctacaaaaacaaacaatcaaatgatagatagatgatagatagatagactacatatatatggtatatatgtacacatgaatatatagacaaaaatattttattaatattttgcttagatatttctgttatatatatacatacacacatacacacacacacacacatat

SEQ ID NO: 147699 - DNA, 100 bp, Homo sapiens
ggggaagcatcttcagtagtgattctaaatgtgacttagaaaactgcccatggtctgtgaggctgacagtgtcattgcctccgctctttataggacgggg

SEQ ID NO: 147700 - DNA, 221 bp, Homo sapiens
ttctgattattgcatttgattagattaaaagagggcactgcactattgggacttgatactgaaaagagatgttgcagaacacagaatatctttgtgtgttttggtacaggtagcaggttatgtttaggctaagcaccctactctatgactttgctaagattatctactgcttatttcttaaataaatttgactctcagtgactttcctttccaatctattc

SEQ ID NO: 147701 - DNA, 193 bp, Homo sapiens
tcactcactgaacatgatatgatgttctattcctagcctttcttcaacacatggattcattctgcaaagcaggagagagaggaggcaggtcaggtcttcactagaaagcctcacctgacaccagaagctgtagagaaacccagtttctagaaggctgtcattgtccacaggtctggggagaactctttttttc

SEQ ID NO: 147702 - DNA, 328 bp, Homo sapiens
gatagccctatcctgacttcagtctttccttgcattgctttgtacttttaccacctgattattcattcctaatcaatatggtttggtttggtctgtattttgagtgtacattaagagaattggagtataaatatactttcatgttgggctgttaaaactcaacattggttttttgttttgtttttttgagatggagtttcactcttgtcgcccaggctggaatgcaatggcacaatctaggctcactgcaacctctgcctcccaggttcaagcgattctcctgcctcagcctgccgggtagctgggattacaggcgtgcgccaccacg

SEQ ID NO: 147703 - DNA, 473 bp, Homo sapiens
tcaatatcctttaaaacaattccaaactaactcgctgtgcctttcacagaaattttccacaagaaatatgatttataagctgggcgcggtggctcacacctgtaatccctgcactttgggaggcagaggttgcagtgagcccagatcgtgccactgcactctggcctagtgacagagcaagactccatctcaaaaaagtaaataaatttttaaaaaaataaacaaataacttgataatttcaggttgtgatgggtgctgtaagaaagacaagacagtaatgtgatagagtgacggattggggcagcagaggtgggcagtgacttcagattaagggttcagggtaggcctcagaggaggcgacacttgagatgagacttgagggagccaaccgctgagatcaagaaggtaggaagaaagagcaagtccagaagtcctgaggctggaacaaccttgagtgtttcaggaacaaagg

SEQ ID NO: 147704 - DNA, 313 bp, Homo sapiens
actgagcatttatctagaatctagagctcttagctgctgtgctgtctaaacactgttggaatttcagaatgaatcagagactgctgacttgtcttcctataaaaaatttaaaatccaaaatcaagactggcctttgtgttgctgggccatgttgtttttgttcatttattcacctgcatacaccgtggggcacatggtcccatcctttaacgctttcctatgaattagctgtgtgagacccacagtagctttgtaagagagtttgagcccagtctaagcagacaagtgactggctctcccactggctgtttgc

SEQ ID NO: 147705 - DNA, 390 bp, Homo sapiens
ccagagcgtcggaatttatgtgcaatggtagaatgttaacttcaccataggaaactcttaattcattactgtgaattatgagaagtcgtgattctagttactgacatctcactttgagatgtgaccacactatttatgttcagccagttccagggtgggaacaggtgattaaacacaatgaaagaaatcaagactttgtaattattcatgcacgaaaggtttacctcacctgggtcacagcacttgttgtgcgcccattgaatatcttagacatcttagagagcttttcgtctcagttaaatgattgattattagcgctataaaatatattttaaatttgcttttggttttggcttctctaggctctgctattatacttgttctttaaaa

SEQ ID NO: 147706 - DNA, 481 bp, Homo sapiens
tcttttaaaatgatgagggggaaccttcagacagtgtcctgattagggtgggtggagaggggggtttcccagaaagtcaggcagggcagggcagaagccctctgggttaactgtgtgcttttgatatgaaggcaggtaagactggacaggtgggggtgttagtgaggggatggactagggtgtgctgaagaactccacttgggctctgcacaccagggaaaatgaccacaaaacatcccatcttcactgctcagagaaggctagatctgctgtgagctaggaagccatgtgggggcagctgatgagtcatcaaatgggagaaatctgagagccatgtgttccacaggcctctggtccttgttcaggcagcagggcactgtgagatgtggctccttggccctttccagccaccaccttgattgcctgctacaaggaaagagactgaagcccaagaatggggtcttgctcaccataggatgat

SEQ ID NO: 147707 - DNA, 748 bp, Homo sapiens
gatattgaataaacagaagaaccccaaactagttggtacattttggttcaatgtaataattattttttactttttatttttttaaagagacagggtctccactctttcacctggactggagtatggtggcatgatcatagctcactgcaacctcgaactcctgggctcaagtgatccttctgccttggcctctcaaagtactgggatttaccagcattagccaccatgcccaaccaaacataagaattttctaccaacactgtcagaaagtggaattagggttctgcagtgatcatgagtttcttaataatgagggatattcaaggagaggctagatgacttagtggctttgctatagaggagatggaatgccagatgtaactctttctgacctgtaatcccagcttgcaaactaaataacatcagtggtactcagctttccttgtgtgtctacaccatccatatactcgcatcagcaatgtgtagcaattttgtgctggggtgtattagagaatagtatactttttgttctctttgagtattcatggactggactttctttatgtcccttttagtttaacagttccaattttcttggcatcctttctgatgttgtcgtagggccttatttcaagagcatgctggtctgtaggatctggctgctcctccactgaaagcccccagaatgctttgttacattgtcaggaatttctgtatttcttttatcttgtagctttctctatcatat

SEQ ID NO: 147708 - DNA, 456 bp, Homo sapiens
ggttaaaggttagtagagatagatagagatccgtgagcacataaatagtatggctgtaggcgagagaggagatggaatgccagatgtaactctttctgacctgtaatcccagcttgcaaactaaataacatcagtggtactcagctttccttgtgtgtctacaccatccatatactcgcatcagcaatgtgtagcaattttgtgctggggtgtattagagaatagtatactttttgttctctttgagtattcatggactggactttctttatgtcccttttagtttaacagttccaattttcttggcatcctttctgatgttgtcgtagggccttatttcaagagcatgctggtctgtaggatctggctgctcctccactgaaagcccccagaatgctttgttacattgtcaggaatttctgtatttcttttatcttgtagctttctctatcatat

SEQ ID NO: 147709 - DNA, 344 bp, Homo sapiens
aactgtgactttaaatgaaacgacatataacaaaaccaattttaccacaggctaattgatagaaacaagagttcagttcctgtgtcatatttctgtcacaaagacatcactaaacctctatttaagagacaccaaattgtctcttaagtaaagactcaaaacacttttaatattaaatgttgaaatgaaatgtgtagctttacacatacagttaaagattaacaaagcaagtatgaaagcttccccaatttttggtaaagcagtaagtgacagtggctgttgttgtagcggctgtgggttaaatcaaggaataagagttcacaaagtaaaaattgtaaggagca

SEQ ID NO: 147710 - DNA, 817 bp, Homo sapiens
ctgtaagcgtaaagcttggaagaacaaataggaagtactttcctctgatatgttctaggaagaaatgtttctctttctagggcaggaaacactaaaataaaaagcttctggtcagagtgttgatacctgacctcaaactggccctcaatcactgtttggcagacctagcatgaattcccactgctgccaagaatggcagggtaaacagatcagctgaatgtttcacatcacgtgttcacctttcaaaaataatttcagttcaagatcatagagctttatagctcacacaagattttaactttctaaataactgtaaactttaaaaaatgttttcgcttgcaaaaacagaaggatataataaaatgtagagtgatttggagtttccaagtattttcacatcccttatccaatttaattttcttgataacccaaaaagagcattatcattaaacccatttgatggacaaataaagtctgctgggatcaacttgctggggatcctggactgtaagtcattcttctgaatcttagtgtggtgctctaccaggcaacactgttccgagtaatgcaattctcttcttttccttatttagtcaaagtgtaattgaattaaatactggagaaagtataaaaatttaaagctacataaagttaattttagaaaaaaaggttagatgatatactgaagtatcctattgaaaagcctggctcttggaaacccatttagtagaagaaaatataacacttagaaaagcagaactctcttccttgaaaatatatttaacaaattcttcctatgtaatgaaactgttagggc

SEQ ID NO: 147711 - DNA, 493 bp, Homo sapiens
aagggtgtggcgggtgcaatgctttggccagtggcaggagctccttggggctggagccctggacaccagtgctcccccaggtctctgaggttcccagaaaggcctttgccatggctcccagggtgctattaatgaggggcagtggtatccctggccagggagcttgtttccaggatcctctaatgcgggcgcaggtggctcatgaccatctctgagggctggtttctcttaatgcaccggttaggagcaatgggcaccttaaaggggcaggcaggcagaggtcgggggtctgggccttgctgctcctggcatcatgtcctaagacccatgttctgagtgtccaggtccctcctctgtccccgttcatccttcctctgagctgtgcacctgtcccacctgacagtatgtcccacttgaaggcagctcaggggtcctgagccttcctacggggctgctgtgctgggaccttcatacgcacacacacgcgcacacg

SEQ ID NO: 147712 - DNA, 170 bp, Homo sapiens
tcacacacttgcccactaggagaagatgaaaactcttccacgcccagctgctgctgtcctgctggtccactgagctttcctggtgattttgcgaggtcatggggccatcacatgctgtgttgcttccttttacttctcttgtacagatggtgatttcaaattggtcttgg

SEQ ID NO: 147713 - DNA, 129 bp, Homo sapiens
agagatttgtttctgtgaaggatgctgtgaaaagtatgagaaccaggtgtcttctctttacaaaatggtgctgatgtataaggcaatgaaaatattttgatgatttttttaaaagaacacataaagtaa

SEQ ID NO: 147714 - DNA, 133 bp, Homo sapiens
gaggccaactaagcctgatttgactccccatggtctttgttgtgatttttaaaatcagattaaacttacttcctcagcagctggttcctacaggctttggggagataaaagtgtcagcatgtttctgcagcca

SEQ ID NO: 147715 - DNA, 329 bp, Homo sapiens
cacaatagggcttgtgctcctatgagaatgggaggcctctgctgatttgacagggggcggagctcaggctgtaatgcttgcttgcccgctgctcacctcctgctgtgcggcccagttcctaacaggccacagaccggtactggtccacagcctgggggctgggcacccctgctctatatgtaccctggaatgaattctttttttatcccaagatagaggaatgtcttctgattggcttgcatgtttttttttcctaatgaggctgtatgtacctcatttcccaacatgctcatttgtctgacgtggcttttgtgaactcagagctcctt

SEQ ID NO: 147716 - DNA, 367 bp, Homo sapiens
gagcccacagaaaaaagcaaatagacgcagaaacgggcacgtgcagtagttctggccacacatgttccctaggtatccacagaatggcatgggtattgtatattcataaagatggagatcagtcatggaggccaaggacaagtaggtgcactggttgaactacagtagagaatggcatggaagtggtgagcaatggacctgggcctgtttctcaagtgtgtatttgatttctttacaattccccggagaagttgtcatgggaggccagccgcctgctggcaaggaagatggttgattcttctgatcaatggaggccctgcagagtcctgtagtcactgtggcctggcatccatggtgcacccaatgc

SEQ ID NO: 147717 - DNA, 271 bp, Homo sapiens
gtttcattatacagttgtttcattactcatcatttttctcttgtatactaataggccatgtggtgagctggggtgaaaagcaggtgcttcgaattatacatcacaatcacctttttcactcatttattaaattgtaaaacccgcaattcattttgcaccaacctaataatttctttttttttttttttttttttttggggagagggggtttaattttgccccagggggggggggcggggggggaatttggtttaattgaagcccttgcctc

SEQ ID NO: 147718 - DNA, 378 bp, Homo sapiens
gctcccggggatgctggagatgttttacttctgatctaagtgttggttccatgggtttgttcacctgtcaagagttactaggttcagtacttacaatgtgtgctttcttctctggctatgtctgagctaacacagaggattaatttttaaaaaatacacaaatctgtctggtcgtggtggctcatgcctgtaatcccagcactttgggaggccaaggtgggcagactgcctgaggtcaggagttggagaccagcctggctaacatcgtgaaaccccgtctctactaaaaatacaaagattagctgggcgtggtggtgggcacctgtaatcccagctacttgggaggctaaggcagggatatcacttcaacccaggagt

SEQ ID NO: 147719 - DNA, 256 bp, Homo sapiens
ttattcagggtacgctgtagagatgagaaaggacctgaccaaggacatggttccgtctcagaggcaattgggcaagaccagtcaaaagtacaaatgtgcgtgggcacagtgggtcacgcctgtaatcccaacactttgagaggccaaggctgaggctctgcagacaccccaaataggcacccccaaatacaaggtctgactgcaaaggccatgccctcactaggttgctgttacatgtgtttagaaggtgcattca

SEQ ID NO: 147720 - DNA, 317 bp, Homo sapiens
ccacccttcccctccgatcccaccacccttcccttccgatccccgtcatccttcccctctgatcccccacccttcccctcctgtcctccccagccctcccttcctatcaccctcacccttcccctcccgttctccccacccttcccctcctgtctccaccagccctcccttcctatcacccccacccttctcctcccttccctcaccccaaacccctgggtcctccaccccaatctctgacaaccgccccaagtccctcttccttccccacgaagtcattcataagtcaccatctcatctcattttgagtttgtttt

SEQ ID NO: 147721 - DNA, 103 bp, Homo sapiens
atatttaagacagccttaactctaaataccacttttcaccaattgccgcaaaaccgtttgctagcgtccttcctccagattaacctgatcaggagagaaaaca

SEQ ID NO: 147722 - DNA, 246 bp, Homo sapiens
gctggcctgggctgtgtgcttgcctgacgtgggcccagtgggctgcaggcctttgtggaagaaggctcaccagcaccttcccacagcatcctcctaccctggcaggcactcttgtcttaatctcaccgtggaccctgacctgaactttcagccctgctctgaggcttttctgaaatccctgctctacacgctgaggccagagccctaaggggtttgatgcttttctgtcttccagcacaaatccta

SEQ ID NO: 147723 - DNA, 239 bp, Homo sapiens
ggccttctccaagagaacatgcacacagtaggcgtgcagtcacccgggagatggtgtgcaatgacaggcacacagtaggtgtgcggtaacacgggagatgtaggtgcccagtgacaggcgcacagtaggtgtgcagtcacccgggagatgtcggtgtccagtgacaggcgcacagtaggtgtgcaattccctgagagatgtgaaccagtccagggccccgcgtgggagctgaaggggag

SEQ ID NO: 147724 - DNA, 380 bp, Homo sapiens
cttggttcgagtgcagagattcctccacagattgcagtcggccttggaggtcgcagagttcaccccgtgccaggtgaatttgattaatgtcactaatctccctgttgctctgaagtttggtctcactccttgaaagagaggatgggagatgattacttcctggacaatttggaaactccagtgtgtctgactcggtggggttgtttgccgtctgctcctgacacccaggggcagatttcgatgcactgttagttttgagtgacaccagattctggtgattgttacttgatgaaggacagtctgaggctcttcctgggtgggctggctggctgtgggagccttgtgagggggaactgtgagtccgtggagatgaaggaaca

SEQ ID NO: 147725 - DNA, 238 bp, Homo sapiens
gtgaatgcttcctgctcgttggctttgctgctggctggtatatgagtagcactggctgatgtaacaaacgtacaccaacgttccagtggcttcctacaagagttctattcttcctcatgaaaaatttcagactacattcctggttgtcaggaagctcccctccacatgatgactcagggactcattttgttcctcatggctctgccctgtcttgtgcatgttgttggtgaagttgata

SEQ ID NO: 147726 - DNA, 169 bp, Homo sapiens
ggaccacaggcacacaccaccacacctagcttatcattgtatcttttggagagatggggtttcactgtgtggcccatcccctgggctcaagcaatcctcttgccttggcctcccaaaactgggagctgtgattacggacgtgagccattgcaccccgctgcttgtgcag

SEQ ID NO: 147727 - DNA, 474 bp, Homo sapiens
tgcaactgaggggaagattagattattagcagctgctgctaccatttattgagcacatactatatgccatatcttatttcatttaacctatacttcagctctgtgaggtaggtagttattttcattttataggaaggaaaccaagtattggttgttccataggtaagtggcagaaccaggattcaaacccagattatttctgactccaaaactagactctttttacttgtgctgcatcccctactgtaatgtgtttcttgatctaaagttttatatttttctaagaaatttacctttatattattaactttcagaatttaaaaaatatatacattttgttttctgctaatagtacttactgttctgtcagagtatatttcttgtgcattttctatactcataaaaagcatttctgtgacattcacatttcttcactgtgtattaaatccatttttagcaccgatttgtttgatg

SEQ ID NO: 147728 - DNA, 453 bp, Homo sapiens
tagggatgttcattttctgttttatagggatatgctttgttttttagtttaataagcatgtattttttgtcttaactatcacaggttaggggctccagaaagcagaatttgagacacaacttaatgtgcagaatgttaagtagtgctcttctgttcaactcctgtggaagggaagaagcaagatttggcagggagaagttgagctgtggtacactgtgaacaacaggagctgactccacagggagctctggagctaacgtggacttttagagttgccctgctttgagcagaaatggctggaccatttatacctttgtctccgttggttactggatgagggattgtcttgggaagcacatgaccttgggcaaggtagctctgcagaggtaatgtctacaggagctgacagtactcccagcaagttctttcttgaagggagagctgggtgacaca

SEQ ID NO: 147729 - DNA, 195 bp, Homo sapiens
ctttcctgtgcgcaccatatgagccctcacagatgtttaccttagggcccttcactggcaacacaaagccttattaggatccgaggagaagacagccatccacgaaccaggaacagaacccaaccagacaccagatctgccagcaccttgatgttaagcttccagcctccaaaaataaatgtgtgttgtttatcc

SEQ ID NO: 147730 - DNA, 226 bp, Homo sapiens
ggctgggtgaaagcagcctttcttgctgtgtttgtgaggagtcagagtgagtcccccatgacctttggctgtgcaaggaatggcagccccacccctgcttccatcctccccacagtgtggccatttgcttagtcataaatcaggtggtgctgactctaatcacgtcagcaactgtgtgctgctgggcaggtgcaggtgtgctggggactttggtggggtgttgggc

SEQ ID NO: 147731 - DNA, 280 bp, Homo sapiens
cgcccctttacactcaggggtactggtccatctatgccatgctgagagctgctgccatgaaaagacccctggatctcaccccctccagcagctacctcttctctttctagagaaaccacctagaaggacttcctacacacaccagccccacctcctctttcctgttgtctcttaggcccaaggcccaccacagtgccctttgccccccacagtcacccctgccagggcaccggcggccagcacttgctccaccaacccttcctccagaagagcttttttg

SEQ ID NO: 147732 - DNA, 243 bp, Homo sapiens
attcacttcacagcattgttaccgtgggccaggatggggcccaagttcagttccatggaggccccttccctcttctcatgacaagtcaagactttgtttttgtacaaagcaaaggatgggccgggcgtagtgcctcatgcctgtaaccccaacgctttgggaggctgaggtgggcggatcacttgaggtcaggagttggagaccagcctagccaacatggcgaaaccccatctctaccaaaaa

SEQ ID NO: 147733 - DNA, 246 bp, Homo sapiens
acactgtgaagaataaaactttcttttatttaagggctgtattgaaaataatcagttatttttatgtaatttgaaagtaagattactctgtagtttgcagaggtgctgttcagactcctagattgaagatattaaccctgtgccctcttgcaggttctcacctttgttacctcctgagcagtggagggctggaggcctgggtaggagtgcctggtgccctcttagaagatttgatgtgtgcgtgtg

SEQ ID NO: 147734 - DNA, 242 bp, Homo sapiens
ttccatgcttcttagataatccatggatgataacatcaaaattattgggaagggtttgatttatcttctcctacctttctgttttcctctccagatgctttctgtgtttgtgtcctccaatttgagtgagggttgggagtgaaaatgtttggagttactaactaccattaatcacctttcttacacttagaatgactgtttcgtctttggtctcttacattgagtggaaaagtgttctccag

SEQ ID NO: 147735 - DNA, 207 bp, Homo sapiens
gtttacttgctctgtggctatagataaggttcttaaattctgtttcctactctgtaaattaaagactaatcctgcctgaatagatattgtttgaattcattgaggtaacatatgtaaaactcctatatcagggaggctggtatacagatacatgaaaaaattgcaataataatatgtatcagcacagaaacctatgtttcaactcaa

SEQ ID NO: 147736 - DNA, 504 bp, Homo sapiens
gcagtggaggtgtcaggatgaactcgggttgggaatagtttatatgtagatctgacacagtaatgaagtaaatatgagtgtggaagaaattaaaaaggcaagaatacatctgaggtttttacctgagaaattggaaagacagaatcatctttcctggaagggggagcctgcaggagaagcagtttcacgggggaattgggagtctgttctgaataagtcaggatgggatacctagcaagcatccaaatgaggagacgtccagggggattctggatgcaccgtcctgggactcaggagagagagacccaggatggaggtatagatctgggagttgtcagcatataactagtatttaaagccatgaggctagatgagatcaccaaggaagtccacataaataaagaagaaaagatattcagacagtgaggtaatgttcaggcacattataatcctcctcatgcccaccagatggccagagcccctttatatggatgtagggagcca

SEQ ID NO: 147737 - DNA, 487 bp, Homo sapiens
tttttataattatatttgtttttaatatctggcagacataaattctataccagagttaaaagtgatttatccgcatcattatagtattctgtatttatctgtatatatacctttatctacaagctttgcgctttcatatgcttttgtgttgctatgtcatgcccttttcatttcaactttaaaggctttcctgtatcatttcttgtaagtctagtggtcatgaacaccctacacttttatttatctacgaacatctatttctcttttgtttctgaaagacaatttttttccttttttttttttttttttgggtggggaggactgagtctcactctgtcacccaggctggagtgcaatggcgcaatcttggctcactgcaacctccacctcccaggttcaagcgattctcctgcctcagcctcccaagtagctgagattataggcgtcccctgccatgctgggctaatttttgtatttttaatatagg

SEQ ID NO: 147738 - DNA, 375 bp, Homo sapiens
gagtgaattgagcattgtattactgctctcatttttgtcttaagttgtcacaactaacagggaggctgagtactctgtccactgggagctggtggttccattgagggttgtgtgtgcctgctggtttgagttcctctgtccaacatcagaattgtttgtattcagatatgcaacaagatgggacttctcagtttcacaacgtaaggaagattgacaccaaactgagtttggggcttcctttgtacagttgaccattgaacaacaagggtttgaactgtgcaggttcactaatacatggattttcttctgcctctgccgcccctgagacagccagaccaacccctcctcctacttttcctcagcctactcaacatg

SEQ ID NO: 147739 - DNA, 106 bp, Homo sapiens
gctcctctataccgctgcttggtttcctgctcatctgtcaatgtggaaggccagaccccctgagaggaaagcaaaatctcggagtcttgctcttgttagcagctgt

SEQ ID NO: 147740 - DNA, 515 bp, Homo sapiens
gaggtctgtagtgcttggagagatattactggcttattaaaaattatatggaaagaaggcaggcggccaagtctgattgtcctcatagactgtaagcagctcccattagtcctggcaccagaacagctaaggcttttcacacgcttgtgggtgaggtacaaagtgtatacaacagattactgtatgcgaaaagaggagcggggtcttggtagaaacacatgggggctcccggtcaatgaactggcaatgacatttaccagcaggtggccttcaagaagccttgttacccaggtgaatcacctgagtcaaccagtggacaccatggtggacaaagtgctgagacccagatcaaagtccctgctttgctacatatgagctatgttatctttggccactcaccttgtttgagccactatttctttacctgaaaaatgggcatcatgatgtaagcacgacagagctaacaggagaagtcagtaatgtctgtgaataaagcatatgaaggctttatcatc

SEQ ID NO: 147741 - DNA, 337 bp, Homo sapiens
tcttaaaaagcacagctggtcatgtcactccctttgggataggagggagacaaagaacatcagaaaatcttcagtagttcccatcatacttagattaaaatctggagttttccttatggcctacaaggtcctgtaagatctagaacctggcacctgtcttctcctccagcctcagacaccactttctttcttgtgtggtgtggtgtgctctgcctcagccataccagccctcgggatgttcttcaaaccaccaagcttgattctgcctttggacctttgtccttgcttcttcctctgcagatggcatcacggctcagcctctctctcctttcaggtc

SEQ ID NO: 147742 - DNA, 364 bp, Homo sapiens
gctctccaaagcaattacaatggtaacatcaaagatgactgatcacagatcaccataacagatgtaataatttttttaagtgtgaaatactacgagaattaccagtatgtgacagagacacaaagtgagcacgtgctgttagaaattaggtgtgctgtgctttcaaacattggtaccttagaaattctagttttaacatctacctctccaatcctatttaccagtttatagtggccagtattttagttctaatttgttttaacccgtccccaaattagtttttttcccctcacagttattatttatttagacttacgaagtttatccatttcttttctcaccattacttgatcctactcattcc

SEQ ID NO: 147743 - DNA, 116 bp, Homo sapiens
tagtgtggtgtccccacctgatgtgttcagacagggtagagcactggttctcagcaagaggcgattttgccccccaacccctacaggacacttagcaatgtctggagacatttttg

SEQ ID NO: 147744 - DNA, 692 bp, Homo sapiens
gagataataactttatggcctctccttaaataggcaggagagaccatcatcttcacagtcctacaagactgagattctgaaaagaaaaatatcaggagctgaagcacttcttttccattttggttgtgtttagacgagactaatctctagacgttcgatgttgctgctgtcagctgttgctgccaggctgtgtgctttgcttcattgtctcatgcctcctccctggccaggtgcacctgctagggcttgggttgtttgctaacagacagtccatccctcgttctgaaataaccctgggttgcctggtttccctgatccaactgtgggtagcttgccctgtccccatccatcgtcactccggccctttgctccttcggctccctgggctcctggcagcctgcctgacactttgttttctttccctctgcttccatctgccccttgtggttcctggctccatcttattgcctgacctctcacttgatacctgtcttagccctcactcccctcactgttcacatatgctctgatcacacatatgctgtgatctattctttaaaataagaatcctcccattcttattttaaattcttgttatttttattttatttatttatttttgttattattattttgacatggagtctcgccactgcactccagcctggcaacagagcaagactctgtctcca

SEQ ID NO: 147745 - DNA, 183 bp, Homo sapiens
tgctgggattacaggcatgagccaccacgcccaaccccacactgctaaatctaaaggttattctatatctcatttttctcaaattcacagcagcattcagttgacttatcatttcttattaaagcattttttttttcttggaggcttttctcctatcttacttgaaacttctacattttcttt

SEQ ID NO: 147746 - DNA, 420 bp, Homo sapiens
gcctcccaggttccagtgattctcctgcctcagcctcccgagtagctgggattacaggcgcccaccactacgtccggctaatttttgtatttttgatagagacagggtttcaccatgttgaccaggctggtctcgaactcctgtcctcaggtgattcacccacctcagcctcccagagtgctgagatgacaggcatgagccaccgtgcttggctgcttttcttttctttcagttgcaagtgctttcttgcacatgctgttctctctgtgccaaattccctggactccttcccctaaagcccatttgtttagcctcagatcaaacatcactttcttggagaagcccttcccccattctggattaagctgtccagctttatgctgttacagcagcttaactttttatcacagcacttctctc

SEQ ID NO: 147747 - DNA, 286 bp, Homo sapiens
cccagaggaatcattttactgtgaggcaaactgtcagtcaggtacacagaaacagtgctggagaatggatgacacgtggtgagcattgaagagttaggtcaagaagagatctcaagaaactaaaagtaacaaaggcttcccctaaaccagcctttcttatagttttcagccaagttcagcttcaaactactctaataggagagactaactttagggtaggtcctaggaacatacccttggctgaagccatcttttcctggaaagttgctgcctcacagctttcaaa

SEQ ID NO: 147748 - DNA, 274 bp, Homo sapiens
gagccccttgagggcagggatgttgtgggatcccagagccttcctggtgtggagctaggttcctgggagatattcactaaccaggctgcctgggaataaccctgtccaagcaacagagcccagccctagcctcagggagaaggggtggcctcccagcacccttagccccagctgaggactttgtacacacagccagggttgctggctgatacactggccgtgagtgacctcagtccccctcaaggctaccaaagggccagctggcatcgtgcag

SEQ ID NO: 147749 - DNA, 426 bp, Homo sapiens
cactgaacaggggatgggattgtgtgtgttagaggggctgctttggtgggtagccagagaagcctcttttgaggaggagatggtcatatggcagaggcaggactgaggagaaagtgagggccacacaggatttgggccagaaagccgcaggcagaggagcagctggtgcagggtgggaacagggtgacctggcctttgggcgaattggggatggtgggtgactggccgccttgtttctgttttcatcgccttgttactgctttttctaaatggttcctcccacacagacatcttttacttgcagcttctgctatggaaggttttgtccactgctgacaggctgtggggagttccatccttgagtatgtttggggctttattttcagtctgtgtttttgaaacttgagccctgacttcctcttgttc

SEQ ID NO: 147750 - DNA, 306 bp, Homo sapiens
ctattaagtccaattggtcaagtgtttactttaagttcagaatttctttcgaagcctgtattagtttagttttatgtcttagtttaatgttgctattgtaatagactaccacagactttatagcttagaacaacatgaatttattctactgttctgcagctcagaagtctaaaatgggtctgcagggctgtgtttcttctggaggctcaaggggagactgcttcctgactcatgccctgtcctccatctgcaaagtacatcactctgacccctgcttgcgtcatatctcctgtgactctgactcct

SEQ ID NO: 147751 - DNA, 371 bp, Homo sapiens
tatctggcatgtaacaaatatttgttgaataattaatggaatcatttactattgggggtttctgatagagaatactagttgatttgtgatactgtaaaacactttcagagactttaagagtgccgtgactaactcttagagtctgaactaaaagttgtgttaataaatatctggttctttcattttatttgaagttaaacagcataaagcagtgtgaggaaaacaatagttgcactgctgagttaaagagggtcggtggggagagcttaaaggagtctgattctaatcacaaaagattgtgaagtatttgtcctgactcctattttgagcttggctgtgggctaatgtgcaagccttccctggacacagag

SEQ ID NO: 147752 - DNA, 134 bp, Homo sapiens
ttaaaaacattagatgggcaataactcacagcatctgttcacatcttaaccacaaaaatgacaaacgacttgagataaatggacaaagcaagtcttacaagagttattcacagatttttttttttttttttttg

SEQ ID NO: 147753 - DNA, 460 bp, Homo sapiens
agttcgacggagactctccagtctccgtctgagggtagaagcctggctaccagtgtcttaggaaacagctggaagaattactatgtagacatagaaatgaatgaatcaccaagtagacattcattgaaccttttaacctttaaccttctgctggggtgagggagagccagagtgaagaggaagctctttataaagactttcaaccaatcttgtttctggttctatcctgaccctccagcttcagaagtaactggatgcatccagttttgagcattacaagatttctgcagcatgaatcagctggcttcttatggttctctacccagcctgattttctgcagtccctaggtttgttaccagctgacctttgctttctaaaatcttgatttcattatttgtctactgttgcttcctctctaactctctgtgtgtgtgtatgtgtgcacacacagagagtctt

SEQ ID NO: 147754 - DNA, 236 bp, Homo sapiens
tcttcctgctataccctacactttgcccatgggagctgagccccagcgagggagggaggcacagaggaagccccttcggcgggaagcaggtgttgtgaggccgtgaggagtcctatgtcccaaggcgggagggaggcaactggagcttttcaactcgaagggctgagcaggtggcccctctgcagctgctttctctgcctccatagcactgatacaactcccggccacccctccac

SEQ ID NO: 147755 - DNA, 547 bp, Homo sapiens
cagctactcgggagtctgaggcaggagaattgcttgaacctgggaggcagaggttgcggtgagctgagatcgagccattgcactccagcctgggcaacaagagcgaaactgtctcaaaaaaataataaataatagccttgcttatgctaatatgattaatttacatttcttagtacagttttgtagttaaagtaaactcctcatgataggctgtgagaagataatcttggattcagaagtttgtctaaaaattcatggaggatgaacttcctttgtgctggtaagagctggctgtagggcagttgtttccaagttgttcctctggccagtagtatcggtaccacctggtaatttgttagaaagagattcttatccctactacaaatgtgctgaataagaaactgggtcttgggcccagcagtttgtttaacacgtccttcagctgattttgatgcgtggtaaagttttagaccattactatggggtattataataaaagagacccctttcttgatttctagtgaatggcgtttgggacagtaattga

SEQ ID NO: 147756 - DNA, 1112 bp, Homo sapiens
tgttttgatatgtttagatacacaaataattaccatgtgttagaattgcctaagtattcagtacaggaacatgctctacaggtttgtagactgctatgtaccatatagcctagctatgtagtaggctatatacatctaggtttgtgtaagtatactatatgattatacagtgacacaattttcagaacctactcttgtcattaagcaatgcatgaccatattttttattactcaaaacattgcttactataaacaatgtctgcattttgctctcttcatatatcctatagatctctcaagtatgtgaagaagttcatcctttttctttttttaaacaattaaacagacttcttaattaattttcagaatactgtgacagtcccatttggacttgaatgaggtgggtttaaagtaagtaccgtaaatcctcacttaacattgttgataggttcttggaaattgtaactttaagtgagatgacgtatgaggaaatcagttctaccataggctaattgatatgagtaagttgagttcctacagcatatctctgatcacaaaaatacccccagacttctagataaagactaaaaacaaatgtgagttatagatacatttaagaaagattaataaaaacaaataagataatgatttatgcagttattccaattcagggttgtgggtggctgaaatctatcccatcagctcagtagcaaagtggggaccaaccctgacaggttgctattccattgcagggtgcattgcaaccacacacacacccatagtcgttcagactgagatcatttagacaagctaagtaacctaacatacacatctttgggatgtgggaggaaattgaagtgcccagagaaaacccacacagacttggggagaatgtgcagactctacacagaacagtaaccccaactgggaataatttttttttccttctcagtgttttaacgaaacaatgtcgaacaaaagatgttatttgaggatctgctgtgtaaaaggaatcttgtgtagagatataataaacctctgaaatttttaactctagggatgtttttcaaaatcaatttatagcagtttatgaaaacatgcaaaaaaaaaaa

SEQ ID NO: 147757 - DNA, 364 bp, Homo sapiens
tcatctaaatccaactcaaatgacctcaaatggccatttctctccttcccccactgaacttctgtcagagcactgggccaacagagagtctgtcacacaaaataaagccttagttttctttacccaataaccaggtcatatcctctccctaaacattatacaagcttgcctttcaacaggatagtgtttgattttgacacatttgagcttgacgttcttttctcatagaagtatcagtacgatgcctccgtggtgaaaatgcagtcgaagaatgatttttcagcccgtgtggaaggtgagtgggatgggaagagaggggtgatggatcggccagctggaaggcagtgtcagcaattcagacatg

SEQ ID NO: 147758 - DNA, 994 bp, Homo sapiens
gtatgatttttttaaaaaaacctcagtaaactaagaatagaaggaaactccctgagtctgataaatgaacatctatgaaaaacctacactagacgttgtacttttgatggcgaaatattgagcattttatccctaaaatcaagaacaaggatgacacccattctcactcttctgtccaacattatactcaaagtcccagccactgcaataaggtaagaaaaaaggcaaattgaagtcacaaggattagaaaggaagaagtaaactgtatttatttgtagatgacatgattatttatgcagagggtcctaagaaagctacagagaattgctagaactattaagtgaatttagcaagatttcagatatcaaggctaaggtgcaaagtttatcgttatatagtagcagcaaactatcggaacatgaaatcagaaattacattctatttgtaataacaaaaagtaaaatcttagtaattatcttaacaaaagatatacaagacctgttcactgaaaactataaacactgctgagataaattgaagaagatgcggagggatgaagagagacagcatgtccgtgatgaaaagactcaatcctgttaaaacatcggctctgccagtcaaaatcgcagcaggcttttttgtaggaattgacacaatgagtctaaaatggaaacacatgtgacctggaattgccaaagcaattaatcaaagtggagctgatacgtgccctgatttcaaagtttctattctacttacagcttcagtaatccagtcagccgcagtgtccctgaagaatagacacacaggtgagtggaacagaatagaaagactggaaatagaccccacctctatagtccattgattttcaatgaagatgtcaacgtaattccacatggaaagaaaagtctttttagcaactgtttatacataaggaaagaaatgacgcttgacctgcatttcaccatacacaaaggtgactcagaatgcaaaagc

SEQ ID NO: 147759 - DNA, 598 bp, Homo sapiens
cagcgtgcgcctgtagtcccagctacttgggaggctgaggcagagaactgcttgaacccgggaggtgaagggtgcagtgagccgagattataccactggacttccagcctgggtgacagagcaagactctgtctccaaatatatatatatgaacgtaaatattaaatcttggggggtgtctgttggatcattttgaataaaagtaaattaatagttgaaaaatgttgctattagagaaccatagaagtagatgaaaaaatctgggagcctggaggagctgtgcaggaatgatcccagccagcagctgctacccaggtttgaggccacctgtgggaatggaagactgtggaatctttatggtgcgacgtagatatgttggtgccttgtgcatagctgattcaagaggccacaagatgatttcatggacagtgaaaagagcctcctaagcctttttagaattattcactcagtgttttgtgtcgtttctacttaattgtatatgcctagtcaacagtcaaactaatcattaaatttattaaaagtaactaacataacctataactatacttcaaatatgtataatagtttcatagtcttc

SEQ ID NO: 147760 - DNA, 555 bp, Homo sapiens
cagcgtgcgcctgtagtcccagctacttgggaggctgaggcagagaactgcttgaacccgggaggtgaagggtgcagtgagccgagattataccactggacttccagcctgggtgacagagcaagactctgtctccaaatatatatatatgaacgtaaatattaaatcttggggggtgtctgttggatcattttgaataaaagtaaattaatagttgaaaaatgttgctattagagaaccatagaagtagatgaaaaaatctgggagcccaggtttgaggccacctgtgggaatggaagactgtggaatctttatggtgcgacgtagatatgttggtgccttgtgcatagctgattcaagaggccacaagatgatttcatggacagtgaaaagagcctcctaagcctttttagaattattcactcagtgttttgtgtcgtttctacttaattgtatatgcctagtcaacagtcaaactaatcattaaatttattaaaagtaactaacataacctataactatacttcaaatatgtataatagtttcatagtcttc

SEQ ID NO: 147761 - DNA, 271 bp, Homo sapiens
tccagggcccattccctgcttcctctcatgccattgccttctcttcctaaccaagcacgccccatcataggtcagtgaagaccccgatgtcaatctctcctctctccccattcactcaccctttagaggggtcatctcaggcccaggatgatgtttctttctctcataatcgcatggctcccttgaagaagactgagcacaaagcaggtattccaaaaagcttgaggaaagtaccggggtgaaatgtgctggagtgagactaaatgagatg

SEQ ID NO: 147762 - DNA, 402 bp, Homo sapiens
caggcttcctttgctcaatattatgtaggtaggatccattacattgctgcaggtagctgttaatcattcattctcatggctgcctggtattcaactattcaaatatttcacagcttattcactcattctattgttggtggacatttgtgttgtttccagtttgggattactatacgtcagtgttgctatgaacaatctcatgtgtctctttatgtaaacatttatgtagggcatatacataggagtggaattgttgtgtcttgggttatcatgtgttcagctttagcagactctgcaaaacagtgtccaaagtggttccacctgcaggcactgcatggctgccctgggtgccccatctcacctccaacacttgctattgaaacttctaaaaggggatcctct

SEQ ID NO: 147763 - DNA, 605 bp, Homo sapiens
tgtttccttctttttaattttttggaaagatttgaggataattgttgttagttcatgtatcaatgtttggtagaatttactagtgaagccatggttccagatttttttcttactcagattttggatactgattcaatcttcttagtattcatagcatattcagattttttatttgtggtttagtcttggtgcattttgtgtttcttgaaaatttccctgtcatctgggttatcgaattttttgccacacacttgctcatagtactctcttaaatcttttttatttctgtagaattgttagtaatgcccctacttttatttttgtcttttgtagtatgattttctctgtgggtttccatctgtggcttttgctatgttgagatagttttcttctattcccagtttgttgaatatttttcttatgaaaggatattgaattttgtcaaatgcttttctgtgtcaattgagaagataactttttttccattctgttaatataatatataaccttgattggtttgttgagtatccgttcgttacaataataaatttcacttgccatatatatcaactttatatgctataaattacttggataccttccag

SEQ ID NO: 147764 - DNA, 539 bp, Homo sapiens
tgtttccttctttttaattttttggaaagatttgaggataattgttgttagttcatgtatcaatgtttggtagaatttactagtgaagccatggttccagatttttttcttactcagattttggatactgattcaatcttcttagtattcatagcatattcagattttttatttgtggtttagtcttggtgcattttgtgtttcttgaaaatttccctgtcatctgggttatcgaattttttgccacacacttgctcatagtactctcttaaatcttttttatttctgtagaattgttagtaatgcccctacttttatttttgtcttttgtagtatgattttctctgtgggtttccatctgtggcttttgctatgttgagatagttttcttctattcccagtttgttgaatatttttcttatgaaaggatattgaattttgtcaaatgcttttctgtgtcaattgagaagataactttttttccattctgttaatataatatataaccttgactttgctcttcgttgatatcccctcct

SEQ ID NO: 147765 - DNA, 484 bp, Homo sapiens
aggatcctttcacttcagaatattcaaatggaaaaggttcatattaggaatagctcctccaacaaaagaaattgctgtttctaagcactgatagcatgagaccaaaactcaatagcaattctccactaaagaaaattttttaaaaataaagcactaacacaatgagcacttatccattccatttccaaaaacaacttaccttctgcaccttccttttgcagatttgaaatccagattctcacacaatcactggccatctcttctgtttcattcaacagcatacacaccagagtgtctcttactattatatacatcagtagaggccgggcgaggtggctcatgcctgtaatctcagcactttgggaggccaaggtgggtggatcacctgaggtcaggagtttgagaccaacctgaccaacatggtgaaaccccatctctactaaaaatacaaaattagccaggcgtggtggcacatgcctgtaat

SEQ ID NO: 147766 - DNA, 323 bp, Homo sapiens
ggtcgcaaaatgactgaggaggaggggcttactacttggaagaaagctatgaccgtgtgatgaatcacctgagagacataattcagtccactattgtgtcaaactaggaagtgcctaaaacactgaagaaaggaaggggaacataaggggttaggtacaaatcattttcatttccagaagtgcctctaaattaaggtaaatttgggacttttttctccttttgttagaagacagttattttttaaagagccctgacttgcacagaatttttatcctgaaccaattcagtcctgtttctttcagggatggagagagggaaggat

SEQ ID NO: 147767 - DNA, 478 bp, Homo sapiens
agtggcataatggctctgtgcctcagtttcctcatgttaaaatggagacaataaaaatacctacttatcagggcttttgagggggggttcttttgtcactttcttagaatctagtgatgatgacagtgaacctgaccaatacctaattcattcttctgttcagctgcacatgtccacagggaaaagaaatggttttcattaagataaaggtgaaaaatatatttgtaaatagattaatacttctgaagcagtggaaatagcacatctattgtgtttttcatttctttatttgaagaccatttaaaattattttgatactatgctggctgaactataatttttggaaatgctctttattttaaatttaattttaatcagtgttaatttttgtgtatttttttacagtaaagaaatgttctttttttcccattgaaactccatctttgttaagaagcaacaatttcctgcactggcaatg

SEQ ID NO: 147768 - DNA, 1050 bp, Homo sapiens
ctgccatgtaaaagacatgcctttcaccttccaccatgattgtgaggcctccccaggaacctggaactcctatactcttcctgcattttcagtgacctcactgactggaaactgggcacctcgttccttctcacaagtgtcataatacaccatgaggtggttgggtcccatttccagaacaaccagagtgacgtctgaacaatgctctctaaacaagatcttcatgtctgctcccaaagagggttgctacattcttagcttccctcaatttaattcttttatgataaaaagaagggtgaacagaaaatgttcagagcaatcatcctctgaaaattcatataaatgacagcagaaatacaagaaggagattggatttcaatcctcttggaaacaattgatttggaagtggtctgtggtctaaagattttgacaaaattttaggagcaagtaaagatgatataaatatataaagagacagaacagaagggagatagccacatttcagaaaacatggagaaattatacaagtgattcttcccaggaaattcttcagaaatgtccaaagaaaaaattatggacttacaaatctgactgtgcgatgactgcaaaatcctcctttatcttcctctccctgacatgcatgcaaacacacacacacacacacacacacacacacaccctgagatttgcatcatttgtctttaggctaaaataagggaaaacatttcaaaatgatttaccgatttttttaaatgatgggcacagtaaccataattaagtcttccgtatttggcattggaatgaaggtaacgggatcaaacccttctatttacttctccttactcatccaaagatgcagtcaaccatcaacaaacacttccctagtatactgcccacaaagtcagctcgtaaattcagggaaaatagtttataagggtctcaaggctgtttaaaaacaccaacaccataagagagatggagtaggtggaaaaaatacacaaagaaagtgcaacgaacagaaacaactaaaataaacaaggaacattcagc

SEQ ID NO: 147769 - DNA, 340 bp, Homo sapiens
tctcagataccgatgctgaaagagaaacagcagcctgtccccaagtggcaggaaatagtccattttaatggcaatttcataagtggcagatgatttttattgtaattttctggtgagctgattaagtggaggcagagtcagttctgaggcgtcaatgtctttaacaattcggggagacggaggccacgctcagcaggaacactgagtccatggaaaacaggccctgggcccgctgatgtgcataattccacgtttgcccctcatgtaaccaggatggtaaattacaggtgtcagataatcacgctctggagtggctacttgaggatgcgatcgaccaatt

SEQ ID NO: 147770 - DNA, 186 bp, Homo sapiens
cgggatattttatgaattgagaaaagttgatactaaagtccatgtgatgaagtcagaatgtaggagtagctggggaagaattggaaaaatccccactaaacgttagaacacgctacaaaacctctacagttaaaaaagtatggtactggcacatgaataggcaaatagatgagtagaataagctgg

SEQ ID NO: 147771 - DNA, 165 bp, Homo sapiens
tataatgactagaaatatattggctcacagttctggaggttgggaagtttggtatcaatgtgccagcatctggcaagggccttcttaccatgtcatcacatggtgggaggtggatgtccattcttgccacttctcctgaaaattgtactggaggtcctagaaagt

SEQ ID NO: 147772 - DNA, 359 bp, Homo sapiens
aatccattttgctgccattgtatgggttggggaagcaatgctgttgctcattgtataatgaggccacagcacatgactgcttcaagaaaacctgggaggtcaggaagcattgtaattaaaatatcaacataacacaaggaaaggggcaagccacaatgaagctctcaatagcacatttttttctaagaaatgctgacatcccttaaggagaaagggattggccttggcaagcagcaagcgaagagctgctgatctgaagctctgcttggggaaggaaggatgggaggagacacatgaactctaaagaagctactttagcattttcctttgcccatcctggggccaggtcagaaaaccag

SEQ ID NO: 147773 - DNA, 262 bp, Homo sapiens
gtttcccatagtatggatagtgttgactgcaaccctgcactgtcatttaacgtaagctacagtctactcttaacagacttttgttattaataatttcctcttactaaagaataagaagaacctattccctttgtagaaaatgaggacaagtataaaagaagaaaatttaaaagtcatccataagcccactaaccagaggtagccgctactgtcacttcaagtattttgctcagatacatctctgtcctgcttattttcattt

SEQ ID NO: 147774 - DNA, 581 bp, Homo sapiens
tcgagctggtaccagttcgacggagactctctaaacaagaaaacttgtgctgacctcagggcctttgcacatgctgttcctgctgctggaaacactgttcccaggctctcggtaccgacaggatcccttcaggacttggtgtaaatgctacttcctcagcaaggccttccacactgcttcacctcagtttagtctgtctcctctcttttctcctcctggcacctaggacaatctctcattggtctgagaactccacaactccatctgtccgtctctcttttcaccactagagcctggcctggtgcctggcacacagtatagattatggaataaacaaataagcctgtgacatgggctggcaccactggcatacacacacacactctcatatacaccctcacacagttggcacagcacagaacagagtaacatcaaatcctgactgcctgggttcaaatctcacctttcccctaaacagcatttggtaagttacctgcaaattttaaagctgtgatattgtttggtttgtcaagttcttagtatggtgagggtgtatatgagagtctccgtcgaactgggga

SEQ ID NO: 147775 - DNA, 544 bp, Homo sapiens
catcgtgcaactcagcgaactgtggacatagctagtccctggtaggagtgaataactgatccgctgggctctcggtaccgacaggatcccttcaggacttggtgtaaatgctacttcctcagcaaggccttccacactgcttcacctcagtttagtctgtctcctctcttttctcctcctggcacctaggacaatctctcattggtctgagaactccacaactccatctgtccgtctctcttttcaccactagagcctggcctggtgcctggcacacagtatagattatggaataaacaaataagcctgtgacatgggctggcaccactggcatacacacacacactctcatatacaccctcacacagttggcacagcacagaacagagtaacatcaaatcctgactgcctgggttcaaatctcacctttcccctaaacagcatttggtaagttacctgcaaattttaaagctgtgatattgtttggtttgtcaagttcttagtatggtgagggtgtatatgagagtctccgtcgaactgggga

SEQ ID NO: 147776 - DNA, 308 bp, Homo sapiens
aggccggcccgcatcaggcgcacttctcagagaaacagcaagtcctgagccttttgtagtggtggtagacagaggccaggcagggaggttagtccaagcttcctgcagccttccctacccacaagctacctggtcctctagaaccataaccgcagtggcatctgcagttactttttttttttttttttttttcagttgaaccaatttcttaaggtttgctctaattctaacattatgatcatatgaattcaatatccatgatctatctgttctcttagaggctataaatcaattttttgtgctgtcat

SEQ ID NO: 147777 - DNA, 195 bp, Homo sapiens
agggcgctctcttgcagatgtaaaagtggaggaagagagaataatgcgcgctgggagaggataacaactcaggcaacgggagagagcagttggggaagaggctgagcccaccacttaacttctctggtaagaagaaagtgtgaggccaggcgtggtggctcatgcctgtaatcccagcactttgggaggccgacg

SEQ ID NO: 147778 - DNA, 396 bp, Homo sapiens
aaaagaaaacagaagcgaaactaaaggcttgtagcccggtgcctaggaaccagacccgaaaccaaggaaccagacctgcaaccaggcctgagcctgcctgacctaagcctggtagttaaagattgacccctgacctaaccagttatgttatctatagatttcagacattgtatagaaaagacattgtgaaacttcctggtctgttctgtttcactccgaccaccggtgcatgcagcctctgtcatgtaccccctgcttgctcaatcaatcacaaccctctcatgcagacccccttagagttgtgagcccttaaaagggacaggaattgctcactcggggagctcagcgcttgagagacaggagtcttgctgatgttcccggccgaataaacccctt

SEQ ID NO: 147779 - DNA, 388 bp, Homo sapiens
acgtagtttctatttgggaagatgaagaagtcgtggagatggatggtggtcataggtgcacagcaatgtgaatgtactcaataccaacgaattacacatttttaagtgcttagcatgataaattttatgttacgtatattttaccacaataaaaaagtatcattaaaaagcacgtgctttttgtagtctgctccataatttatagttgttttaatacaaaaatttattttctccaaatcttccagaaaaaaaatacatattatacacatcctgttgctgcaaactgcctcccccactattgtgagaagcgcagactagttcaatccacccttcttcctattttatatctgagaacctcagataggaaatgacttgcttgaggtcactc

SEQ ID NO: 147780 - DNA, 593 bp, Homo sapiens
aagatctttcaactgggaagtacctactgacatttccaaagaagaaacctatagagcacatggaagatctttttgcacttcttgcagcattccataaatcttgttttcaaatcacatcacccggctatgccctgaattcaatgaaggtgtggctcttagaacatatgaaatgtgaaataatcaaagaatttccagaagtgtacttttgtgaaagaccgggaagtttctatgggacactcttcacttggaaacagagaacaccattcgaagggattttaataatctattccaggaatcaaacagttatgttccagtgccttcataatctcatcagaattctccctataaactgtttcctcaaaaatctaaaatcaggaagtgagaatttcctaattgataatatggcatttactttggagaaggaactagtcacccttagttctctttcttctgccatagctaaacatgaaagcaattttatgcagaggtgtgaagtgagcaaaggaaagagtagtgtcgtcgcggctgctttatcagacagaagggaaaatatccatccctacagaaaagaacttcagagagaaaagaagaaa

SEQ ID NO: 147781 - DNA, 202 bp, Homo sapiens
gcacctttgacaactggctacgcgaccctgggagagtcacctcacctcttaaggatcggacttctcttccagaaggttacatcagcaggcccaagaagctctcactctccaagccccctggccattctaaacacaattctatgaaatgtaatcctgagtatgttcacaggaagacaggctctgagctgacagagtgacattc

SEQ ID NO: 147782 - DNA, 337 bp, Homo sapiens
cagtttctcacacatagaagtgtttgatatttgttaatagaagaaatcactgtttcaacaaacagcttttctatgaaccacaactcctactcacagcattattgaaacattaaagatccactcaagccacaagaatactatgagattggaatttttgctttttgcaaaagtgacctcatcaaaacgaggacggcaaaagatacagaaggtttctttcactttttaccgcagtatctatcccacagttgatattttcccaagtgttgcctgcagactttttccacatggaatttggtaccaagttctttgtacaaaaagtaggccagctgcttcacag

SEQ ID NO: 147783 - DNA, 886 bp, Homo sapiens
cgcacctccacacctggctcatgttttgtagagatgaggtctcactatgttgcccaggctggtctggatctcccaggctcaagcaatctgcctgccttagcctcccaaagtgctgggattacaggcgtgagccaccatgtctggcctgtgtattgttgacttccccataggactgagtttcttgaaggcaggcatttatcttacccgctttgtatccctagaacagtttctgaccagttgtgtagtagtaggcagtgtgtaaatgttttaaataaatgaacaaatgttaccttctattctcttttattctttttatgtgctatgctttgtctttctagttagaaactgaaatgtaagtcctttgagtacagagatcatgaattacgaaggtgtatatggtatatttgcttggttgtcttcatgggagcatttcaccatcctctgaatgtcgatttgtgctttctttttcccccaaaccaccttattgaggtatgactgacatactaaaagctttaggtatttaacatataccactcgatgtgtttggagattttctttaaaaaaaaaaaaaaaaaactatgtttagatattgttatggattttcaggttgggtcattaatgaagtttgacagttttaataagactgactttctttgtggtttataaacaggctccgaaagcagcttcaaaagtagagctccaaaatagttccataattattgtaattaatgcaagtcttccagaattcgggcagagttggagagtctctgaattaggagtcaaaagtcctggattcatttgtattgctgacatttgcttgagtgcatactgggtgccaagcgcaggaatgactgaaaattcaaaaactacagtatggaaaaaaaaa

SEQ ID NO: 147784 - DNA, 349 bp, Homo sapiens
agcaggctgtaggaagagtgtgcagaagctgcaggaagagtgggtcctgctcactgccgtctcttttttttgttgttatcttgcactccccatgccaggggacatgggaggtggagaatcctcgtgaagtgcgtggggacagttgaccatcctccactcctcccagtctacccccagagcctctctctctacaggtttgcctggctcttaatttgaggacccgtctctgcagaggccccttggtgataaactcagggtcacgagtcagttctcatagggatgttcactctccagactcacacccactggctgcccttgcagacctgctgggtgccacagaaccagggca

SEQ ID NO: 147785 - DNA, 277 bp, Homo sapiens
taaaagtattttttcagctgtgtcttctgaccttggaagggtcaagggcgaaaatatctgatacctaaatattcttaggagatctagaagtcttcataaaaagcttttaaaacagcgttattgatgcatattttacatagcataaagttcaccattttgaatgtgcaattcaacgaattttagtaaatttaccaagctttgcaaccatcaccataaatcagttttagaacattttcatcacctagtaagatctgtcatgctgatttacaatcaaacg

SEQ ID NO: 147786 - DNA, 397 bp, Homo sapiens
cctgattggatgcagggaccccaccgccatcactgggcctcagttggtcactcctgatcatgggctgaattctctcctgcttcagctgctcctcaggcgagagtgctgcccctgcacaccctactttgggcagtgctgggcatgctcagattcgcgcccgtccagttatggcccgtccagacttctccctctggcagggcgggcattcacctgtggcagggcactcgcctccttcctctgaatacccttccatttctgtggcaggtctgcacagacccagccctgacttcatttcaagttcctgttcctgcttatatccgtccatcatccatgcttgtttttgccatacagttcttgatttcctacctgacagccacacagccagcgtcctgtgctt

SEQ ID NO: 147787 - DNA, 755 bp, Homo sapiens
tgaggcaatcacagttacagaaaagctggaagaagagtacaaagaacttcctcctgaatcacttaagagtcagtcgccgactggacttccctgcacccagaacagtccatgtgtgtttcctagagaaaatggtgtcccctccagaaccagggtgtcattgagactggccatgaccgacagcccctcccacgtgggccccggtctcagcagtgcctctccctgtaggaaagtctgcgtccctatcccggctgcctgcagctgccacaccttgtccagctccttgggctggaaggttcctcagcctctcctgactcccgagccagccctgacacgtgggaggcagcaggccagctgtgcacaggacgtcctcattcccaattcagcactctggggtcattctaattttctcttgtggtcttggtaactccattctccgcctataagaaaccgggcctccatgcactttaagatatttatggagctgctcaacccctacctgctgtgacccgccctcagctccacctccccgcctgctcccagagctccccattctttagcgggtctctgttctccgactggctgagttcccgtgccgggccacctctccatgggacaccctccccttgatacccttcctgtaaatatattttacaggacagctgattttgagatggttttagatttgtggacaaggtgcaaaggcatccctgcggacttcctccccagtgcccccgcagccgtgcctgtgcggccgc

SEQ ID NO: 147788 - DNA, 489 bp, Homo sapiens
tggatcaagggtactctctgcataaatcactaaagctgggatatgaattcagtctcgcccatctctcaaaaggccttcctatgaataggcatgccctaattcatctccaccatgagaactggaaacaatggggaatgagtgtatgtgtgttcactgcacatagaagcgtggatgcaggtatttgaggaaatagaggacaataaatatcccacatttccaaagagctgctaagaaagaaagcataccctaaaaggggagaagtgatattaggctataaaagttcaaattacttctttagataaggaacaagtctgtggttctgaattggagaggctgtttatacagtgaagtgataatgaggtctaagaaaactgcccaactgggccacaactccaggtgtaccattcacactatagtctaagaagcaggggcctacaggatgacagctaggtgtagaaaccctgcgcatgtcaaaatgaaccacataga

SEQ ID NO: 147789 - DNA, 162 bp, Homo sapiens
tcaaaggcttcttgccttttcaatctttaattcctttgtctttcttcctgcagaattatgaggcctccattttttaactttatcacacttacatatatttattaatccgtgggtgagaaatcatgctgagcaaatgtatcccacctccatccatcctctcct

SEQ ID NO: 147790 - DNA, 600 bp, Homo sapiens
tgcatctctgcacttccaggaccagtcttaagtttggtcacaggccttggaagaacagtggtacccactgtgcttcgtggtggcgccaccagttgccagccaattagtaggtatacagttggcaattaataaatgtttgttgcatgaatttagggcttctctgtgtatccatgcatccaacaactaagtacctacaatagtctcataagagtttgcaaattttagaggagctgtaaaatcacttctaacactatattagcttaaaaagtagcaggatgtttatatacagacaccctctcactttcaaaggcaacagttgtgacgtccaggttttccatttctcttatatgaggttggacatggtgtttctgagggcgttaccagagcttgaaatggcttggtgggggtaagcagaagggctcaaaaccaacttttatcaaggtagatcatattagagattctaaataagacatgcctcattctcaggtatttctaaggagaaaagataactcaatctacaaataaaccaaacagctgtaggatgtttttccagagactatactggcaaggcagattaagactggacacaactcccaaata

SEQ ID NO: 147791 - DNA, 239 bp, Homo sapiens
tcttgactgtaactggactacagtccattcattcagggcacacatactcaccccaccaagtcacctattcccattgaaagttctacaaggccaatcaggatacagaaatatagcctagagacacataccaaggactctaagaaagtttgttagttttatctgtgataattaaacttattatcagctattaaaactattgattcttgattgtgtttaagaacaaagtaattactaatatc

SEQ ID NO: 147792 - DNA, 523 bp, Homo sapiens
ccattctctaaaattcaggatatactcagtctcatttcatatacttatcctacctagggataatctaaattccaggcagcttacttatccctctaaaattgaggagaaggccagcctggtctacagcaatcctccatcatctactgacctctatcaagatgcacattcctcaccaacctttgatggctggcactgacctctggtgtattgtctaccctttgatcaccaggttgatgccagtcatacactgtcttcatcataccaattatgccaggtgaagtcttccagcttactcaccattcctttttcacctctctcacttagactctaggcaactttgctgtgctttttcatgtaccatactggatgggcagaaatctgtgagagcttacccctctactgatatccttctattcaacaagcttctctgggggcgtgggttcacaccaggccaccccaagaaagcaaagcacaggtgttgttcagcccaaacttatcagaaacagagagaaagtgggtctat

SEQ ID NO: 147793 - DNA, 285 bp, Homo sapiens
aagagtatgtgataagctaagaggtcaagtatgaaaactccctgggaacccctcaattactttacatgaattttttttcatgaaatagtatttgttatttgcaaagataacttctcgctttatctatatgttacgtttttagctcttaatagtagaaaagggttagtgagagccctttgtctatccatttagtataaggcttgcataatgtatttaaagcattgttcttaaggtctgcatatagtaaatggcttttcaaactttttgtgaaaatctttctaattt

SEQ ID NO: 147794 - DNA, 412 bp, Homo sapiens
gaaaaaccagggtgttttcacactcacactcaagcatgatcccacttacacacacaggttttccccactcacacgtggtaatccggtctcacagagacacacacaagagcatccattgtcatttgtgctctggccaaggtccccaagaccctcctcctggccacacacacacacaggggtgcacaggtgaacacgccaccaacgcccacagctgcaaagattccagggcgcacagacacggtgggaggagagtgagaggaggggaagcagatggggccgggggactcaggagggaacggccccgccctgaccactgcccgtgtccacccctgcagggatcccaggtgccgtctacattgcctgtgcagggcctggctagagatcccttcccagtcctggagaaaacgtagaa

SEQ ID NO: 147795 - DNA, 308 bp, Homo sapiens
gagggactgagaataggtcctaaaacccagagtcactgaagggcctcacccccacccagcacgatccgggttgcctctcagggagcgatgtggggaaccatgagtggagggcctaactgggtgagactggaaggggagagaccttaactaaactagagatggcacagagcccgcagctgagtgggaaagcagggcccaggggagttgctggttggttgactggtgttggtgggtgaggagagatgtccagagtgttaaaggtgtctgggtggatggtgcagccattacatggcacagtttacaatatt

SEQ ID NO: 147796 - DNA, 287 bp, Homo sapiens
tatccagttgctaaaaagcaaaaaatcttccaaatacatcaatatctaatttaaagaaaagaatgtatttacaataccaaatttacaaagctagtaaaataaataaaagagaaaatgtgcaaaacaaaatgtagaaaactacaaattttatttaatgatatgaaaacttaattggataatcaagggattttgcatgtgctggataggaagatttattatgacatcagttcttactaaatcaaaaagttaaatgtaacaataaaaatgattttggctgggcgcagtgg

SEQ ID NO: 147797 - DNA, 554 bp, Homo sapiens
  misc_feature (537)..(537): n is a, c, g, or t
ggctcggcccggttgacggagactctctacttagaaccctcccataagccgaacccaatctgccttttcaccatcttcccatcttcctactgcctccatagttattcttcgggatctagctaagtaaactctaagttattctcccatgttttcctagcacctaacatatcagttccccctccacccccattttcttccacatacggaggctcaataaataatagttaaatgaggctgggtgtggtggcacatgtctgtaatcctggcactttgggaggccgaggcaggaggatcgcttgagcccaggagttcaagaccagcctaggcaatatagtgagacccatatctctacaggaaaacaaaaagaaaaacaacaacaaaaaaaaaacagctggcctgccgtcccagcaactcagaagcctgatggtgggagaatcgcttgagcccggggaggtaaagccttcagtaagccatgtaagccatgatcgcaaccctgtactctctgtactctaacctgggtgaccgagctagagtacngagagtctccgtgaact

SEQ ID NO: 147798 - DNA, 525 bp, Homo sapiens
aaggaacccagactccttggggaaataaatggctgactgcaggtctggggcaggaaatgcacaagataagcctataacattttatcgcaccagaaaacagagaagctatcaaagatcacggggccttgtcagaagggcaaagaaaacatccagaatgggctcctagtagcctaagatgagaaaatttgagcatcaaaaagaataataactgcattggattcaaaccgattaaatatagtaatgtttcattttattcataataatactttaaaaatcactgatctcctttaaaggatgttaagggaaaaattcatcattattctgacaactgatagagaaaatgcaaacagatttttggtttgagtagaaaagccatatgattaatggctaaatgctagaagggcatttgataaaattctattcattcctgatgaaatctctcaataaacaagaaaagaaagaaattctgttaacatgataactggtatctgtcagaaagcaatagctaatatactaaaaatgaaa

SEQ ID NO: 147799 - DNA, 295 bp, Homo sapiens
ttcctgctgtgtctcctacactggctccttatcctcccctgggccctcactttcaagtttcagatggaaatttccaactgtctgctgggcatctccacttagcctgaaaccatccaacatgtatatggttgactattaattatgacctatttcatttgtgtcttctccagctattaagcccttatgagtaccccacacgcatctgggcatatagcagtattctaaagatgcctgcagaatgaaccatcattcataatatcccagtgctttggcatggacaaatttagcatcagag

SEQ ID NO: 147800 - DNA, 280 bp, Homo sapiens
caatgggaatttgggtagggcttacgaattgtgcttgtcactatcatgtgccctggggaggccctatgttgggatacctccaggatcactttatttaggtgtttcaggccgcttggattccccagagaagcctctttaaatgttccaatctcctggtaatgctcagggagcccagtgggagaatagagctggactcagcatctaacattcaatagcagtagtcacttaaacccttatttttggtacagtactcacatcctcaactatgcctggtttcctc

SEQ ID NO: 147801 - DNA, 389 bp, Homo sapiens
accaataggggcttgtgtgtgtgtgcacgtgtgcacgtgtgtgtacatagacagatttttaggaactggatcatgccattgtgggggctggcaagtgtgatgtcttcagggcatggcagcaatctggagaagcagggaagagttgaggttgcagctccagcctgaagacagcatggaggcaaaattcctttcttgggggacagcagatatttcctcataaggttttcatctgatcgcatgaggcccactcacattttggagggtaatctgctttagtcaaagtctatagattgaatgttaatcacatctaaaaaatactttcacagcaacatccagattggtatggacaaacatctggccagcatggcctagccaagttgacacattta

SEQ ID NO: 147802 - DNA, 484 bp, Homo sapiens
ccccatacacccggtccctctggctccactgtggaaccagctctcaggggtcccatgcaggatgccacgccaaacacctttcaatctccattgtgtctttctcttttgaaacaacgccgacctggatgtgaatcctgactgccactcagcagcagtggaaaccctggcaagttttgtaacctgtagaagcccgtttccacatctggacaatggagttggtggcactggtctcacggggttgtaatgaagattaaataccttagcagatgtcaaggggtctcgacctgattccttcagagccaggattctttactgagggatcagggatgggctctgggggagttcatgaaccccagaattgcaggtgaaattgtgtgtctttgtgagaacacggttacgcatttttctgggaaggagatccataattttcatcagatccagattctttttttttttttttttttttgagacagagtctcgccct

SEQ ID NO: 147803 - DNA, 212 bp, Homo sapiens
ctgggtttcgccgctgctcctgttcctcgagcagccttcaagcagtggaaattacggagaaatgaacattctgaaagcgcctagtaaatggtggggaagtgaagacactggaaggtgatatggcctttccaaagtggcatggctgattgatgacagaccaccattggaaacaaggtggtttgactccagagcccgcaccctccaccacaacg

SEQ ID NO: 147804 - DNA, 441 bp, Homo sapiens
gccagtgtaaacgacggccagtttaaacgacggccactgttaaacgacggcgcaatgttaatcgtgggtcagattaaagcttgtggcgatatagagatgatggaggaggaggcttttgtaaagaaagacctggagcccagtggtggcctgaaacaaagaagggtaactttaagggacttcatttatttctctcaatttcccagaaacgatttaagatggcttctttgtaacacattagaaggtagaaactaataagtgaagaaattaaggtgaaaggaaaattcatggggaagaataaaattaagttgaaataaagttctgaccatagatgggccacagatttggttctgagcttcctagctgccaatgtaaagagggaagtagaatcaacaagtggcttgagatacggagcagcagatcagaggatggatgagtggatga

SEQ ID NO: 147805 - DNA, 426 bp, Homo sapiens
atgaacaagagggtggtgtggccacaggtggagaccgcaggatgaggatcgtgggtgggtagaaagattgttgggaaaaggatgatggaggaggaggcttttgtaaagaaagacctggagcccagtggtggcctgaaacaaagaagggtaactttaagggacttcatttatttctctcaatttcccagaaacgatttaagatggcttctttgtaacacattagaaggtagaaactaataagtgaagaaattaaggtgaaaggaaaattcatggggaagaataaaattaagttgaaataaagttctgaccatagatgggccacagatttggttctgagcttcctagctgccaatgtaaagagggaagtagaatcaacaagtggcttgagatacggagcagcagatcagaggatggatgagtggatga

SEQ ID NO: 147806 - DNA, 215 bp, Homo sapiens
gacaaaatgtttaaagtctcattttgtggagaagagaataaaactataattggttgacacagtcacctcagctgttatggagagattttctcgcttattttcattttcactccttgacttgtcacttatcaaattagttaggtgctactataattaaaataatcctctttttaagatgtaatattggataaaaaggtgaaagtttagtgaacaaa

SEQ ID NO: 147807 - DNA, 143 bp, Homo sapiens
tgtgttctaaatggggagcctcaagcacaggggtcccaaggtggggcctctcaaggggtagagtccagcagtaggaggccagcacagctgagaagaggggtgacagacacagtaagaaatgaggtcacagaggccggtgtgtg

SEQ ID NO: 147808 - DNA, 498 bp, Homo sapiens
cactaggtcacctggggtgagggtggggcatggcctgcccagggtagagaaggaaacctatttctttgttcctcccaacaccgtgaaacagccttctgtgttattggacagaagctggagcttcccagtccaaagagcttgcgtttggttatttcatgaatgtcttgatcaagcccaggtataacgtctgccctaaagacagagtcattcttctaccctgagagactctctatacaatgtggttgtttagattcaccagttttttccatttccagctaaccaagagttcaggtactgaaagccatctaatctcagagaaatttaaagctaaataaaggattcttaaaacagatctttacatgtccagtttttaaagcctccattttaccgaacaggaagtttgcagaatgatcacattagcaccagagccttggacactcaagtgaacttgagcccacaaagtcagcccgaaaccccgcgccggtgccggtctagagt

SEQ ID NO: 147809 - DNA, 264 bp, Homo sapiens
tattccaaggacagccattaaccgtgaagtatgtgtgtgtatatacactgccaccatgggctagagaaaaatggtgtttctttttttccctgaatatgaactaggagaagggaaatttctccagtgttctggcataagtggacagtgatgaacattgagaagagacttgagtatacttacgctcgcagactaaacagacatgagttgcccaggtgactgtcatgaaatctggtgtctgtataagtgacaactttgaaattcccg

SEQ ID NO: 147810 - DNA, 410 bp, Homo sapiens
gatgaactttagtgtcctctaatgtcagatttagctaactttctgatgtctgagaagcctcacaaaacattaacattttccctaaaaattgtcaaatagacattaaaaccaattccaacaaaacctggtttatgaaagcagatatcacatgctactgatattgaggttttatttcagaaaaataattctcgaccagtaaggcttccatttgcaaatggtctaccaaggtgctagaagggtacttagcagaagcttccaatttatatgttgtaaccaagatccaatgtgtggaaaactcccgagtgaccttggtcgacatgagtgggaagcaaggatctgtgttccaccaagccttggccacaccgcatgccggcaggggacaggtgtggactgacactgctcatccaggg

SEQ ID NO: 147811 - DNA, 277 bp, Homo sapiens
gcatttgtaaagcctgaccacttacactttgccaaagaagtttcccaccctctttcagccccaggggtcctttccataaacttcttaaggcagtagtttctaaaacattgagaaagggctaagggaaggtcccttatgagccactagaggataaaggagtctgtagagactctcctctttcagccagaatggttccactttttttccccccgagacggagtctcactctgtcccccaggctggagtgcagtggtgcgatcttggctcactgccacct

SEQ ID NO: 147812 - DNA, 273 bp, Homo sapiens
tcagagcttcttggatagcagtggcttcaatcaagtctgaattcaccggcatctttgggccccggacattgggcaatacggtaactttccagaagatgaactgagccagaaataattccaccccctactatatacctccagctcctacaacagaatctctgcttagcttggtaccatttcctctgagactcgactttctagagctttcctcatcgaaagcagggctcaaaaataaatttaaggatgggagaacataccaactttcatacaaca

SEQ ID NO: 147813 - DNA, 419 bp, Homo sapiens
gatttactttcagctctgttccagaacagatgctcttttccactccccacggagatcaagagcttggagcagaaataatagctctcctcacaaaaagacaagagtggagagaaccacacaatgtctttaacttttgggggaagaatcaagagctctaagacaaatcactttatgcacctatctctacagtctttgcatacatggcctacttttattaccccttctctttttgaggtaaccaggtatccaggttaatcacgctacccttggttatcatcacatgtatttctgaaattgtcttttacatatatctttttacttgttaatgtaagacataagaacagcctttatcttgttgattatggtaattagcacatagtaatttctcaataaaaatatgttggaaagttcaatgttta

SEQ ID NO: 147814 - DNA, 798 bp, Homo sapiens
tcaggagacactcaccctaatcttatgcctggagactgggtatgtcgtcccaaaggacaaaaagccactggagcctctttggattagatcataccaagttctccttatgaccccaacagctgtaaatctccaaggcctctctgtggatttacctcttcagggtcaaggtggcaccagcacccaacaaagaacacttaaacctgtgaaccagttggagactttcatctgttgttcagaattcagcagtttcaccttcgaataatgctgcaaatggaatatcagtctctcaccagtgatgctcactaactgaacaaatctcccttggattcagctggacaccagtttcaccttgacatgctccccatctctgatgagtcgcttcctccagcaagatccaatatcctaagtcccacagtccaggacaatgacccacaggatctcccgacagaccaacagccatagttagggtcaactctacacccaaggccagcaggaagtagttggaggataagaccactgccctagtgccaaagacttgtcattgttgttctgtcagaggggaaaaggggagtctgaggaaggattcccaggtgggggagggtcccctgtggggagaaacaataaacagttattctgagagatggctaatcacaaacaacccatggtcacagtgaccttgttccacacatagccccctccagcatgaccctataaatcttccctccagtccctcatctcttggcagatagccccttctctattgtactgtctgttgtaaccttgcaatgtatttcatac

SEQ ID NO: 147815 - DNA, 316 bp, Homo sapiens
aggttgtaaagaatggttctcagtgctgctttcatcatgaaagactgaagaatcactattggctcattttataggaaagaaatactttcacagaagagcatgcctatagtaactttggaaatattccacatcttggaagagctggcttaggatataaagaaacttgaaaataaaaaaaaatggcctaatcagaaaatatttagtttttgccataaactatatcaaacatgtagacatagtacacatggacttgcttcttttggttttcagtgcctgtaacttattaataaaagtcagtggagaacatctatcctaa

SEQ ID NO: 147816 - DNA, 241 bp, Homo sapiens
cagatctcatcagatgaaggataaataaacgtgtctctcaaagccatctttattcgaagaagtttccttcgcactacaaatctaaagttctttctacgaacatcttgtatgaattgatacctgattaagcgcatctaactacgtatttgtatatgtgtctcattgcctcataaaaatccagaagtctttaaatgtgattcaaaaccaacaaaaaatcaaataaacatttaaataaattagt

SEQ ID NO: 147817 - DNA, 254 bp, Homo sapiens
agttgtcaataatttctttatttgtgatacaagcagcggtggggaaagagaaatgaacagacttggaagcttctccgaggccctagagaagacctctgggttccgaacaccagacaccaggagtaaggagggtagttgatgactccccactctttctccagcccctgctcctctgtttttccccttcacccactgcagcttcctcaggtcctgggtcccacgccatcatctcttcgaatgacctcccttctatt

SEQ ID NO: 147818 - DNA, 382 bp, Homo sapiens
ttctgttttatttttagtagagacagagtttcaccatgttggccaggctggtcttgaacacctgaccttaagtgatctacccgccttggcctcccaaagtgccgggattacaggtgtgagccaccgagcctggcccattttattttttttgaatttgaacagaatcctgacaatatttagagaactgctataatttaactttatagaaaggtgtaaaacattacttttcaggcaaagttgatgagaaaagcagtgcgaattaatgaaacataaattattaaaaagcttaaagtaggcaaaatatttttaatatttttaatttttatatctggagctatacagaataagaatactttaaatcaatatttttcagtgagggtgg

SEQ ID NO: 147819 - DNA, 487 bp, Homo sapiens
gacttgcatatattgtgagaattaaatgggatactacatatcaagacttaccatactgctacgttgtgacggtgcctgcttccccttcaccttctgctgtgattgctatacaagaagcatggcaccagcatctgcttctggtgaggacttatggaagtttccactcacggcagaagggagaggggagcaggcatcacatgatgagagagaaagaaagagaggagaaggtgccaggttctttttttaacaatcagatctggacccaggaactcagagcaataagtcactcattaccccttccaccaggccctgccttcaaccctagggatcaaatttcaacatgagatttggagaggccagacatccaaactctactagcctatcagtagccccttactcttccaagaataaggacattcctgcattaaaatgtataatataatgctgagtgataagctcttaaaataaaagtaaaaataaataggga

SEQ ID NO: 147820 - DNA, 269 bp, Homo sapiens
tgggaacatgtcatttccctgagaagaaatcttcctcatttctgctgagaagatcctcaggagcagctgatgagtcttcgtcgttacagctgccctcatagatgatgtccaggggctaatcatattcattgattcttgaggctgccattgtctttcatgggaccttttccaatgcccagtaatgaggaagctgttccaatatttcctcaatgggaaggttttcacttgcttttgagtctaccttgacctcaaataaggtctcctcctct

SEQ ID NO: 147821 - DNA, 141 bp, Homo sapiens
tgtaatgtaataatctttcagtacagcaaagaggtgcgcccagcactgtggtgaagaagaaaaaagagtcagtgcccttctttcgataacatcattcccacctccactaccagtttaatttcccaactttttttcagaata

SEQ ID NO: 147822 - DNA, 320 bp, Homo sapiens
catgtatatcggcgtctatgcctgggctctgttatgttccacagacctatttatacacatcatgaacttctgttgccatctccaagtgagtctgtggtggcttccttcatttatccagcaaatactcattgaatacctaccatgcaacaggcacagtgcaggaatgaggaagcagacaagacagacaacacacaagtgaatcaataatgctacaacttcagataacaataagcgcgatttccaccattaaacctgcaaaggtgaccctgaccagaaggtggggtaggggaggtgttaattagataaagcggaaaggcatc

SEQ ID NO: 147823 - DNA, 384 bp, Homo sapiens
acaaaaaacaaacaaaacaaacacttccctgacatttcttcctctgtcaagacagccccaacaccttccttcccttctcagcttctgattcattccatgggatttgcaacttgccaaaaccaataaaaacgcagaaggccttggctccccagtgccctttggtcatgtgaagcatgtgacctcagataattattggttttgcccctctgtgcctcagttcactcatctgtaaaatggagatccgagtaacacttacctcactggatttgtatgatgaatcagaactacctgagtgctcacaaatgtccccagcacactgtgagggctccagtgttgtcactatggtcaaaatgatctgtcccataaaacccataggcctgctcc

SEQ ID NO: 147824 - DNA, 388 bp, Homo sapiens
aggcaggtaacagcttgagcctaggagttcaagaccagcctgggtaacatatcaagccccgggtctatttaaaaaaaaaagaagaagaaaaaactaaccatagatacacacaaaactgacaattctcatgtggataacagagggtaactactatcaccctaacctaaagccaactgtttcagatttttatgtggttgtttagaacaaattagagccacagcatgtggaagcagcagcacaaattgatcaccatgattggaaacaactcagggcacatatcctgtttccaatgagtatacagtgtaaccatgctaatcaaaggatagccattgtatataatctcctttgctggttggcctgtttcttccttcctccaggaatctttcag

SEQ ID NO: 147825 - DNA, 346 bp, Homo sapiens
tttttagctaaattcttaacagctccatgcccaattcctaatctgtcaaatggcttagaatgttacgtaatgctgagatcacacctggggagacgacaatgttagctcatgtgggttgagtgctccgatgcacgctgggctcgtgtttcactcattaccaatgtaatcatcacggagcctctgggaggtgtgtgctaccattagtacccacttcacagatgaggaaactgagacatagagtgattgagtcacttgtcacctaggcctgcagccagtcaggggcagatccaggattcaagtccaaagaatcagattccagggccccagcccacaggatactgctttt

SEQ ID NO: 147826 - DNA, 227 bp, Homo sapiens
tcaataaatgttgaattaactggatgtttagatggatggatggctagatggcagggtggatagacagatcagcaagtgatccagttcatttaaggagaagaagagcgagcattcaataagctggtgcactaatgagacagaacattaagtaacgatattgatccatgttgtaaatatatatccacatcgtttatgcaagagttttggtttttttgtttttttttttt

SEQ ID NO: 147827 - DNA, 388 bp, Homo sapiens
tttttgtttgaccctgggaggtgaggttgcagtgagccagcagtcagcctaggcgacagagcgagacccgtctcaaaacaaacacatacatgagggaaacgtggtgtgaaaacgatcttttctatgaagaaaaactggtcatattactttatcatgacatcttctaatatcacccactgagccatggcaactccagtgaagagggagttgactgtggcactaaccagctgcgtgtctcggttttctcactggcaaaatcatggtgttcaatgaggtcccttccagcggcaacattctagtaatctttgagagtcaaaagacaaagctaggctgggcatggtggctcatgcctataatcccgggcaccttgggaggctgaggcgggcag

SEQ ID NO: 147828 - DNA, 173 bp, Homo sapiens
ccagtttacccagctctgacatccaggtgctttggctgaaggcttgagggcctcctggggtctctggccccatgtggctccgcctctctgggcctgtttctgtttttgggctgcctcaggacccatcctggccctgactgaggcaagagcatgaccgttgagattgccccagc

SEQ ID NO: 147829 - DNA, 349 bp, Homo sapiens
cagcgaaggagtcgatgcatggaaagcctttcaggcatgcctggctcaggcagcgccggccgagtgtgcatagctatcatttctgttatggtcactgacactgagcaaggccaccagcccaaccacagcattgttgagggtcacaggacgaggatcctgggtgggcaggagagcactgccacgttacgccctgccctgactctgaggaagctgaaaaggttgtgaagaatcatcctgggagcccttcaagaaaaatggttccaagtccctccaggctctgcccagggctggcttggcctgatcagcacgtgtgtggtgtgagccactattctggcctgcctgacttcat

SEQ ID NO: 147830 - DNA, 763 bp, Homo sapiens
tttggaaaacagtctggaagttcctcaaatggtaaaatatagagttatcatctgacctagcagttcccacacctagatacatacccaggagaattgaaaacatatatccatgcaataactcatacatgaatgttcacatctgtacataataaccaaaaagtggaaatagcccaaaagtccatcaggtgatgaataaacaaaatatggtttacccatacaatagaatattattcaacaataaagaggaatggaatgcttacatgtgctacaataacgataaaccttaaagacattatgctaagagaaagaagccagtcacaaaggatcataggttgtatgattccattgataggaaatgtccagaatggaaaatccataaagaaagtagagtaacagtggttgccagggtctgagggagggaggataaggagtgagtaccaatgggtacagagtttgtttttggaattatgaaaatgttctggcattagatagtgatgatggttgcttaaccttatgaatatgctaaaagctaatgattctatactttaaagtggcgaagtttatgatatatatatctcaataaaaattaaaagaataatacactatcaaaaaaaaaccagatttggaaatgaaccaaaaaaaatacttttagaaaagaaaaataataatcattgcagtttaaaagtcaacaagcatttcagagagcagatcagaaccagctgaaaagaacattcagtctacaaaattggccagagtggcacag

SEQ ID NO: 147831 - DNA, 194 bp, Homo sapiens
ctggctcctgtcattttaatttcctctaaacattggttcctgtgctgtcattcctgaggcaggggtgattcgggactgatcaagtgtttattccctggatctcctgctccgcggcttttaaacaaatccagcactcacttctttgcagtgtggccaagttgtccttggcccctgggttcctaatgcggcgcgtt

SEQ ID NO: 147832 - DNA, 305 bp, Homo sapiens
ggactttgtagtttttggcctgagcaactggagagagagagcgaccattcgctgaggtgggaagcactgttggaggagaaggttgggaggatacattaagagttcagttttggacaagttcagtttgagaaccctattgagcatttatgtgcagatgtttaactgatggttgattatatatataagcctggaattcagaggaaagtcttagctggagagcatcttggaaatcttcagactgaatatatggcatttaaggcctcatgctaaatggtgttatctataaaggggaggcagaggtggaa

SEQ ID NO: 147833 - DNA, 677 bp, Homo sapiens
aatggctcttgcatactagaaaaaggccacattccttactctggcatttaagtttttataacctggccctaggttactttccatcaccagagtctaggccatatgatagtaaaaacaacctcatcagtattttattaggtactctgaataatggtcccagattactgatgggatcttaaatagtaaaagctgtatctggcttctgatgttatactgacctcttccctcaccagtacatagctatcccctcatgttgtcattctcctcaccaaaaattttgtctagttactgtaaccaaaattctacttcctctctgaaggttatcgtctccccgaagctctttcaagtggagcatagctgttcattttaggttaggggtaattaggagttgttggcattgttttagatcatgagttggaaaactctttctgcaaaggaccagataataaatatttgaggcttgggagccatacagtctgttgcaccatttcaactctgccattgtagtgtgaagcagctatagacagtacataaatgaatgagtgtggcagtatgccaataaaactttacaaacgcatgttcatatagtttcttaatatatatgataccaaaaccacaagcaatgaaagaaaaaaaaggtaaattgtatatcatcaaaattaacaaatctaagcttc

SEQ ID NO: 147834 - DNA, 405 bp, Homo sapiens
ggggagagtagctgtgtgcctgaggaggaaagggcgtttgggagacctctgctctcgtatgccttaacctccaacactgtgtgactcccagacccacagattcctcgtgggaaaacagggaccaggccaccacccagtgtgatgaaaggtgagatacctaatgggcaggcagtcatcagggttaattcaaaggctggaagaagggctgacctggatgactggaaatgtctttgagctgaaggtcatgtgcaggtggaacgaagagggtgagccttttgcggtgaactgcaagtatttgataagatccctgtccccatggttggggaagtcttgataagcatcctcaatgtgatggagggattagggaacccatggctctacctgtccagcatggcagcaacatga

SEQ ID NO: 147835 - DNA, 281 bp, Homo sapiens
ggtgaatttgtttgcactgtgttcttggagagcagtctaattcaatattctcatgattcatgctttccctcccagtggttttgtctttgatcatggaactctttaaaactgtaaagtcttaaagactcaaagggatgagcccagtgaaggttcaggaactgagacaactgagtaaggagggtgagattattttaggactgaggagtttgtttggaggcttctaaatccaccccttcccaggcattatatgcccaaaaagctggtcttggttgacagactag

SEQ ID NO: 147836 - DNA, 308 bp, Homo sapiens
gcctggatttgaacgccgccccttccccagtcttgggtcagtgagctcacatagtgtagttgtgggaacagactcagcaagacagagccctgggctctgcccccactccttgcgtagctttgggcaaattgcctaacacctccctgcccagtttcctaagctgtgaaatgcagacgatggttatacctaaggctgagtagggatgaggtgagttaacacgtgaagtgctgagacggtgcccagcatatgatactaagcaactgtgattagcactgttgttgccattatcattaacctgcaagcttcta

SEQ ID NO: 147837 - DNA, 294 bp, Homo sapiens
tggcaatgcctaggaaagatgtccagtcccagcagcttaaagccaaaggatgagtggtcacaagattccagggacctatagctttgaaacactagggctacagggagctttataaactctcattacttctctatatcccaggctttaagataatgttgatttctccttttcctttcaccccatcataaccaatcaggtactaacccctcgggactggggactcatttttgtttgttttgtcttttccagtttcctctgtctcctcttttcttgtcttcattgcccacagtatgt

SEQ ID NO: 147838 - DNA, 350 bp, Homo sapiens
atgggattctgaggaaggggctggctggaccttcaagccctctgggattggggggacagggagtgggatttgcctccctgcaggcttgaatgtgtgtgagaatgtgctctattgtaaattcaatgacccgaagacctgtgaaacgcccacaggagagggaatccagtgaagggggtctgcgtgggtaatgaatgggactgggagacatggcattcccggtatttactgtaaatgatgcagattggacctggcccagaagccactatgggattcacaatagggcttcccagaagaggcagtgacaaacctggatcctgtctaggaatccaatctgctgtgtgtcttaggaa

SEQ ID NO: 147839 - DNA, 246 bp, Homo sapiens
acttacactggctgggcaggtcgtcaccctcatcctctgacctgtcagactggctggtgtcagctgacagcggagctacactgaaaacagagacagtactggggcctccgtctagggccttgtactcactggtttgcttccagtcgactctgaaagctccctgctgcttcctccaccattccttcactcgttctggaggaactacccgacctgggttggcatcctgcctctgccactcatttactg

SEQ ID NO: 147840 - DNA, 580 bp, Homo sapiens
tcctgagggtaaacagacgacgaggaaaaccctaatcatagccatgagctctttcttgtttcaaaagacaggacatttaaactgagacaaagaatgagaaagagttattaaccagaatgggggaaggagcattccaggtggaagaaatagcctgtgtaaaagcctcgaagcaggaatgactacagacagtctgctgccgcaagcgcagtttcacacatcacttgcccttgtgtcagtgggagtatggaggagaggatggcaaaatgcacaatttggaaactctgaagagagaatgaacaaagttaacaagttttgaagttctcaacatagcataaggaatcactacactgcctcctgctagaatatgcaaatggttaaaattttctaaaacctgatgtctgaatagtgatactgacagggccagctgctttatatacaaaatagcctttacttcagaaaaggcctcatgcttctaagctgtttccagggatgctcccaacttaggaagacagtttaacaggaaaatattaatcacagagtgctaaacaggatgcagcctctctaccaaaaagcacaaaat

SEQ ID NO: 147841 - DNA, 237 bp, Homo sapiens
taaaactgtacaaaagaatcatttaaacttacagctactagaggtttattaattcacccctggaatttagcatagctaagctcagcataggtatggggccctgttccacattactttaagaattataacaaaatatttggataaggcagtttcaaatcctctccagaattctgaacaccagagaggttaaaaagcaaaagggtcattcaatcaggtggatatctgttcggagttatc

SEQ ID NO: 147842 - DNA, 239 bp, Homo sapiens
gccataaaccactgttctgctgaggcaatctctttgttacaaaaggtttgccttttgatttccttactagaaagctgcttctcaaacatctggaaggggatttgtaatgtgctacagtttaatgtgctcgacctctctaaagcacatgctgaagtttgatccccagcattggaggtggggcctcactggaagtgtttggttcacggggaggatccctcgtgaatggctcagagctgtcc

SEQ ID NO: 147843 - DNA, 1018 bp, Homo sapiens
agagttctgaaagatagaagggagtagtaggaggagatgaatcttcggctagagagtgaggcctgaataggatttaacttaaccaagaggcaaggggaacaaaatacttacctatctcatctagtagctgtgtgctgctagctcagcttcctacttagacttgagcccacttacttttttagagacaggatcttgctctgtcgcccagattggggtctagtggcgcaatcatagctcactgcagcttcagcctcctgggctcaagcttcccaagtggctgggactacaggtgcatgtcaccatgccgggataatttttaaactttttgtagagacgggggtcttgctgtgttgcccaggctggtcttgaacccctggtctcaagcgatcctcctgccttggcctccaaagtttctgggatgacaggtatgagccgctgcacctggcccaagcccactttttaacactgctttgatattttataaatatgttcctttctggcagtgtgtgttagctggatctctcttcttttggcctggccctttgcccttttctttttttctttattttaatttttttttatttttattttttgagattgagtctttctctgtcacccaggctggagtgcagtggcacaatctcggttcgttgcaacctctgcctcctggattgaagtgattctaagtagctgggattacaggcacctgccaacacgcccagctaattttgtatttttggtagagataaggtttcgacatgttggccaggttggtgttgaactgctgacttcaggtgatcctcccacctcagcctcccaaagtgctgggattataggcatgagccactatgcccgacctttgcccttttctggggctcatttgtaggccagggtcctgcaggagccagctatggaggtcaggctggatggtgggctgaggcccttagtgcctggccaagggcagtccctgcctgtgtttggggcgtgggtgttggtaaagcagtgtgttgagaagact

SEQ ID NO: 147844 - DNA, 124 bp, Homo sapiens
atttaacccagcatatccaaaatcattgtcctctcaacatataatctacattttaaaatttgagatattttactttcttttcatactaagtctctgaaattcactatgtattttatatttacag

SEQ ID NO: 147845 - DNA, 303 bp, Homo sapiens
gcatacagtgaagtaagaattagtgaactagaagttatgtcagaagtaaataccagatgtgaaaaactaagagacaaaagaatagaaaatatagtagagagtataagagacatagagttaacttgagaagatctaacatacacgtaactggatttccaggagaagagagaatatggcagaagcaacctgtgaggagataatgactgagaattctccaagtttttaagacatgaagacctgcaagatcaaagcatgataaataaaaacaaaattacaacttagcacatcctaagaaaaaataaa

SEQ ID NO: 147846 - DNA, 175 bp, Homo sapiens
taggaatcacagacacatcagcagtcatcagcagtagagtggaaaaataaatcatggcatatttatgcaacaggatgctgtatagcagtgccaatgattgagctatggctgtatgtttccactggatgggtttcacaaaattgtggattgtaataacctgaggggaaaggaggag

SEQ ID NO: 147847 - DNA, 350 bp, Homo sapiens
gggtgggccgtagccccagctgggtgaagaaagggttatgaactatgacctcaggcagggagtggctcagagcagtgatacagttgttactcagcacagccgtgatgtgaagccaggcctagaaggattccataccttcacactccctttaggtgggacaggcccgccacagtcagagaacaggtgccagggaacatgaccagcctcttctgccaccactccatgtagaggaagtgatgggtcatgttaacaaaggtggactcccccagtgagtagagcagctcctccacacccgagaaggcatagccgtgggcctggtacttatagatcctagaagacacatagagctg

SEQ ID NO: 147848 - DNA, 496 bp, Homo sapiens
aaacacagcccactcgcctgcagccggaggagtcaccctgctggctttcgcatggcttcaggctctgggcttcgggaaactggttcatattctggtatcaccacttcctagtgagctgacccttgacaacttacttaacttccaagatgacacttactcaaacaggatactacaaggattaagaagatgacatctacaaatatcttgaacacattttgagggcaaaaaaacaggattgttattgagattaataaacatgcatgaaaattcttggcaccccagactcatttaactaaggatggagggacacgtctcttctcaccctccttgatagttccgttgccctgagcagagggtccacttcctcctcctgaagaagctcctcttttcgttttggtaacacatcctctcctggatttcctcctagctattggcctgtcctctcctccttgctggcctctaaatcttggggggtctcccctccagccactggccc

SEQ ID NO: 147849 - DNA, 345 bp, Homo sapiens
ggccagactatgactcaggtcagggcctatggagcactgcatagatggggacatttgcagtgatctacctaaagctaagctagctttaagtggaagtctagcgacagcagttaattgtttagtattcacttctaggaaagaatgtcaagttcttgatttcctcatacgaagctatggcagttttttatgtttgttttattaaaactgttcacaaaccacttatgctttcctagcactctcagtagtttgcttccttttacctttcccccacccccatctcttatcccacttccctaccctgaagacttctctagcagcttggaaacactctaattactgtagcta

SEQ ID NO: 147850 - DNA, 221 bp, Homo sapiens
tcaacatgtcacaaccagaggttgaggcaggatctttgtcttgttgactcctacctccagtgccttagcagtagctgccattggagctttcacgaccatcactccccttctcccatgaacacattgtacacaccccaccctccttgatacagcatcactggggcagcagagcagcagttttaaaaagatgctttccctttggtctcctgctactactttgc

SEQ ID NO: 147851 - DNA, 842 bp, Homo sapiens
tgtgggagttcgggtgggaaaaggaaggagagctggtagtattggaagagctgccaatcacaagtccagcttgtcgttccagttgtgctgcctgtgtggaccagccgccttcctctataggcctcagtttccctatctgtacaatgaggaacctgtccttgattatctctagctgccttgagattctgacatgtgggctccctgcatgcctgggtatatgagcatatcagggtgcactggggcactcgggggaatctgtgcaggaattctggttcaggaatggtggaggaaacagatgaaagagcttgaggtttgggaaatagggctgtcttgtagatatgcagagagtcagaggcagagagagagagagagaaacagtggatgatggaaaggagagtgtgggagagaggaagacagaacaagaggaaaggtatatcagaagagggaggagagagaaacagagtggaaaaacagagataggaaaaaaattagtgagagtaagatgaagacagaaaaagagacagcaaaagagaaagaggaagcagaaaggagtggaggagcatgccggggcgcacagaggagtggaggaggtctggccaggtctatacactcggagtgctgagtaagccctggcaatcgtgccctcagcgcatttgagaaacagtacacccagtatcaggttctgcccagctatccagagtgtgatctgcagcaggcaggcagacagtagctccctgggctccatggcctctcagcaccccaggcagtaggctggttggagagacacagagctgaacctcgcccaccccgcaaccccgacacggataggaccgagcctgact

SEQ ID NO: 147852 - DNA, 298 bp, Homo sapiens
ataaaatgttagcttttctatttctgctgtaaaataattatcatgaactgggtcaggtgcagggtctcatgcctgtaatcccagcactttgggaggctgaggtgggtcaatcacttgaggtccggagttcacaacatggcaaaaccctttctctactaaaagtacaaaaattagccgggcgtggtggtacacacctgtaatcccagctacacgggaagctgaggcttgagaattgcttgaacctgggaagtagaggttgcagtgagccaagattgcaccactgcactccatcctgggt

SEQ ID NO: 147853 - DNA, 305 bp, Homo sapiens
ctttatatctctgccagatactcagctctgagatcatggaccatgtctgttttgtttactgctgtatcctcagcccgtggcacagtgcctggtttacagtagaataataaatgtgtaagttaattttttattttaagtgcactttaataattttatatctcataaaaatgaaaaggcctcaaatgtggctctctgctaagtatgattagtcatatagtaaattatttttatagcagatcttgtttaggttgtgaacatgggtgagaaattccagtttctgtcattatgtctggttctatcaagag

SEQ ID NO: 147854 - DNA, 124 bp, Homo sapiens
gcaatacatttgtaatcaacacacacacacacacacacacacacacacgggcccaccattttgagtcagtctccctgcctctaatgcccagatttttttctcttctctacagcgtgctcccaca

SEQ ID NO: 147855 - DNA, 594 bp, Homo sapiens
ggcgccctgcacttcctgctacatcacaccaggaggcccccgtgtctggctgcttcccttcctgttcagtgagactcagcagcgggcacaggtgctacccccagcccgcactttgctattcaccctgtgctgatccccaggcagagccacacttcacgagagggtcacactgtatgtatacccagggaataagaggtcacttcaagtcgcttagttattctcaatatttttaaatttcagtctcaaacagaatgcaatttcatctagtttataaaacttaatatacgtatactgctacctcaaagtaatcaatccaacacttggccagttaatatgacctaatttcacatttacctgtacatttacagcattcatactagagttattctgctaccacacagagatttcaactttattatatactttaacaaaaatggtatgtgaaatggatattatgtctatttacttaagggttattttgcagagtgacttactaaatggaaaaaaaactgtatggtctatattagtaagaaagtaatttttggagaaggattatgtaaaaggaattacagaattgggaataagctgtttcag

SEQ ID NO: 147856 - DNA, 303 bp, Homo sapiens
atgtaagtcacacgtgaccggcagcaacaacacaggtggaagttacctctcctcactaaggggcaagtgctcttccgtaaagtaagaatttgaattagaagacgtggcataaaggcctggattcctatcatgtttgattttctctaagtcatttaacaactctatgccttagctctcaatctgttgatggaaaatgctatctacttctaccaattcagagagacatctacctggatgactaaaaaagtatccttgtatgtgtggtattaataggtgcacgcatctcaacagatcagaattctc

SEQ ID NO: 147857 - DNA, 263 bp, Homo sapiens
ctgggtggctggctaggcccactcactagctggagggccttgtgtccacataccaggttttagccctggtggttcagattatgcctcaggaaaatgaatgtctgctatgggtcttcaggattctgaagctagtgaggattccggtaaaccaggcgactcatttattgactttccgccatgtggcagcccaggtggggatggaggtttcttggtgagccacactcagtgccttgcccctgcggtgctcaggaagtttcatgaga

SEQ ID NO: 147858 - DNA, 915 bp, Homo sapiens
tgaaattgcctgacttttaacagctgatacatggcagaagctggcttcaaattcagactgaaacattcatctcctaaatactttattattcagaggtgctaaaagagacatagccagggttcctaaggcagctggtagggagataagattagtaaactagtcaaccaccatttattgagcactgaacagtgtacctggggctgtcctatgcatggagcagattttataccatttaatcctcacatcttcctaaagtatgagggccattatggtcttcattgtgcaaatgataaaatggaagcttaaagagggtaaatacctgaccacagacatagtcggttaaacggtggagatgaatgtaagccccatcagagtctgtgcccttaagcccagccatacaaagtttcccacagtgtcttcccttggtggctggcatctcactgatggaggtcagcctggaagtcagggaggggtgaggaaggcagtgcacatgtctgggatatctcagccctgtttcttatgtacaagtacatgcatatttctacttgtctacacatactgtgtgctggatgctttacactgtgatgagcatatagtgattctcctgaagaccgtatgatgtcagcactagtcccattatacagatgggaaacttgaggcttaatttgatccaggtcacatggctaataaatagtacagctaaactggaacacaagccatgtgaccccagagcctgagcacccgatcacgttgtctttctgcctccaggaggactcttcaaaatactcctcagaaccttgcttgcaaatctgcccagcacagcccagactcagcgccccacagagcacgccgctcttccccactctaacatacagtggcaaatccatcttcttagaggaaagaggaaaaaaaaaa

SEQ ID NO: 147859 - DNA, 291 bp, Homo sapiens
acagcgtccggagacagacccaggttgatgctgcgttgctttttctcttttatcctcaggagctctgcaggccctttctcaccccattttaccttcactggggaagttattacttggtgcaattattttgacaccaacctaatataaaagtctgcccaggttcaaggggaggacccgtggatcccaactctcaacagagcacgtccatattatagtcagaagagcacgagggctggggtgctgattgatgctgaacttttggaaaagagaatccacttcactagccttctg

SEQ ID NO: 147860 - DNA, 451 bp, Homo sapiens
ggagggttgtgagcagaggagagatggggtctgattcacttttcacgtggagaacaaactacaagaggacaagagtggagaaagctgttgtcgtcttccaagtaagagagggtgctggcttattaataattcattaattaaaccatcaacattaatacaaattatctattgggccaatgctattactcttttatttcagacatatcatggggagaccaggcatcgcattccagctacttctacagaaaaatgcattctgagttccatgatcaacttgaaaccttttccatccaccttggttttaagctgggtactgtgtggttggatagaagacagcaggaaagggagtcagggatgagggcagattaacaggaggaaaaaagggcatctcccctcatcatgcccttttccccagagccaccagagaagagcagtctgaatggaaccttcc

SEQ ID NO: 147861 - DNA, 461 bp, Homo sapiens
caaggtgtaggggatctagggctgtgcagaatgtgccttgttaacaatatgtttacaggcagtatgctggtaaaagtcattgccattctccattctcgattaaccaggggcacaatgcactgcggaaagcctcaggggcctctgcccaagaaagcctgggtattgtccaaggtttcccccaactgaggcagcctgagatacggcctcgtgggaagggaaagacctgactgtcccccagcctgacacccataaagggtctgtgctgaggaagattagtaaaagaagaaggcctcttgtggttgagataagaggaaggcctctgtctcctgcatgcccctgggaatggaatgtctcagtgtaaaacccaatcatacattcattctattctgagataggagaaaactgccctgtggctggagatgaaatatgctggcggcaatgctgctctgttactctttact

SEQ ID NO: 147862 - DNA, 435 bp, Homo sapiens
gacccccaaatgggagggaaagcccacctctagcctgaggacctccagccctcctatgggagtcttgagcctgtacatagataagcgggcttcctagagactttcttagacaaaaatcagggctggcctcccctccctacctggaggcaagaaggaaagagggtgacaaagggaggttggcctcaagcccattgcctacctgccctccacttctgcaccccagaagaagaggggcataaagatcctaccagctgtgtccccagcatgttctcaacccacagaggcccagacccccatctccggccccttctgtccctgttcggactccttagcaggcaggaggctttgtgatgttctcagcacccttgcccagcctctgtcctgggctccccctgccatcctgtggccctgtcagtccctcccctgatctgttct

SEQ ID NO: 147863 - DNA, 581 bp, Homo sapiens
agaatctccgactccacctatggcctgtgacacccgtttcaagaaatcccacctttctgggctaaaccaatgtataccttccatgtaccgatttgtggctttgcctgtgagtcctgtctccctaaaatatacaaacccaaactgtgatctgactgcctcaggtgcaccttctcagactctgtttccccagcccacagtcacttagacaggctcagaataaacctctttaaaatagtttacagactttggtctttccattaacagaatggtcattaatgtatttgatcaatcccttatccacagacttgagatgttttcattgctacaacagatactgctgcaaagaacattctgatatgattgtgggcacttgggatatgactttcttaggctgaatttccagaaatgaaatggaaatacttttttttaaattatgggagactgttgttttggactgagctccagcactaggccccaacagaccagaccaaacaggaatggagttgctcctgctcaatgccacgtcaccaaaatggaactttaaagaagtgacgtggcatcgatacagaccggtttttctc

SEQ ID NO: 147864 - DNA, 431 bp, Homo sapiens
caccaggcacgcagcttgaggaaagcggtagaagagggaagagttgcttagctaggccagcaccatcagtcagctctttttactcctccccaggttgctttacttcctgaacccagaatgactctcataatcactcagtgggttctagaaattatttaactgatttcagcatgtatccatggagggctgtaaagaggagaatgagacagaggacgcgtatctgatttaaataattttagatgtgataattaggtttttgaatgtttcttggaatttttattttctaaatgtgtgcctctttgacttcctcctgctgctgttgctgctattgctgctgctgctactgcttctaattattattagataagtgattgactggagccgaggaccactactattagagtcagctgaccagcaggttaaaatacaga

SEQ ID NO: 147865 - DNA, 384 bp, Homo sapiens
atgccccatgctgctgtgattcaaggaaaaggcagtggttttcaccccgacacacacatccacagatagaactgaggctaagtcaaccatcacatttccaagatggaaaagagggtttgctcctttccctgttttcccattcatcaggctgcatttatacccagtgtggccttcggctctcctcccctgtgaggctatacttcatgctcattttaacatcagttcccctatgtataaatgtagtggagcggaggtcacagagtgatgctggccccctgctccttcaaaggatggttctgaaaggcgactttccaccctcctctgattttggtgcttccacttacctttggatcacaatccagtctggcaatttgaggaacaacc

SEQ ID NO: 147866 - DNA, 192 bp, Homo sapiens
gctctgagtacaatataaaattatgatatatcacattcattcacataaattatttactatttgattatccttcagctgaataatgactatgtatactcttaaattatggagattaatattgttataactttaattttattatgatagtaaattctgttcacgaatgttgtcttcctaagatttgctcacagt

SEQ ID NO: 147867 - DNA, 571 bp, Homo sapiens
ttttttttttttttgagacagagtctcattctattgcctgggctggagcacagtggcgagatctcggctcaccacaacctccacctcccaggttcaagtgattctcctgcctcagcctcctgagtacctgggactacaggcgtgagccaccatgcccggctaatttttgtatttttagtagagacggggtttcactatgttggccaggctggtcttgaactcctgacctcgtgatccgcctgccttggcctcccaaagtgccgggattacaggcgtgagccactgtgcccagccggcaggcttttattaagcgttagatgggaggatagaggagtgaagtggtactggcaggaagtaccaaggttccagctggcgtaatcaggaaggctgcatggaggaagcagcctttgagctgcctgtggagtggtgggcagggtgttgtgaagtggcaatcactggattttgcttctggtacgaggtgtggccagatgcaagaaagagcagggtggactttggtgcaattggtgggggtctggtctgtagggttcccgtggggagccgtggagggagg

SEQ ID NO: 147868 - DNA, 322 bp, Homo sapiens
ttccaacctctctggccactcctctgcagatttattccacccctttaccccaccctcagccacacatacacacacaccagtgtggcctaagtcctggcacaagcatttttcttctatgtttcctccttaggcaagctcattctgggtggacaacatctacacacagtgactcccaaatttccatctctgatcctaacctttttttttttttttttttttgagacagagttttgctcttgttgcctaggctggagtacaatggcgcgatctcagctcactgcaacctccgcatcctgggctcagctcactgcaacctccgcat

SEQ ID NO: 147869 - DNA, 148 bp, Homo sapiens
gcagcccccacagcagtgggcacagtcagcagcaatccgggtgtcagcccctctctgcaaggattgggggccagatgctccctccctggaagccacatcaacgacagaccactgctctactgagaattcaataaagactttttacagg

SEQ ID NO: 147870 - DNA, 522 bp, Homo sapiens
tagctgggattacaggtgcccgccaccacacccggcttatttttgtatttttagtagagatggggtttcaccatgttggccaagttggtctcgaactcctgacctcaagtgattcaccctcctcggcctcccaaaggctgggattacaggcgtgagccactgcgcccggcctaaagtattaggtaacttttttttcaatttcataaaacattgagaggaaagaaacaccttaaataagatcatacctatctgggcttttcttttcctcttctttctttctccccaacatcctcctctcttttttgacttcttaattgtgaataaagcttctgtaaatatatgtggacaggtttttatgtggacatgttttcaggtccttgaaataaatatcaaggagcacaattgctagattgtatgataagcatatgtttagttttataagaaattgtcactgtcttccaaggtagctgtaccatttgtactctcatcagcaacaaatgagagttacccgtgctccacatc

SEQ ID NO: 147871 - DNA, 342 bp, Homo sapiens
agttccagttcacatgcaggactctagggttatttaacctcttctgtcttacatctgtatctttgtttgtttcccctacactacaattcctagttctcaaagtttctagggatgatagtaattatgttacgttctgttctctttgctttatccgaagttgcctagaatagcaataccaacattaacaccaacaatttaattactgaaaatagttaaaagatttttattttgtttgttttgcttggctgttatttttgccactagtctgtgtgtggccaaactattgtttttagaagttacttgaaatagtttctttctgcgcttctaactggatgtatagtt

SEQ ID NO: 147872 - DNA, 406 bp, Homo sapiens
cagcttctccacatccttactaacttgtcattttctgtgtttttggtagcagacatcctaatgcctaatggttgcgaagggatatctcgtggttttgatttccgtttccctgatgatgagtgacgttggttgtgcatcttttcatgtactcaccatttgtgtgcctttagagaaatgtctgttcagatcttttgcccattttttaggttaattggtttgtttgactttttgttgagttgtagatatcattttctttctttctttcctttttttttggagacagggtcttgctctgtcacccaggctggagagcagtggctcaaacatggctcactgcaccctcaacttcttgggctcaagggaacctcccacattagcctcccaagtagctaggaccacaggtgta

SEQ ID NO: 147873 - DNA, 390 bp, Homo sapiens
caagacgaaaaacagtcaaaggcaggggttgcaaaggcaaaggtggtcatgggccaggcaggaaatatgaatgggagaagcagctaggtggagactggcaagccgtgaaccccggcgccatctaaagtggatgctgaccctgggatggagcccagagtagccagttcttgctctgccttctctctgggtctctccagtctcacttccctccagtccagcctccacgatgtgttcaggtgtcaaagcgaccttttgaaacaaaaacctaattatgtcacatcactgcttaaaatctttaaatggtcccccttggaggctatgtttttcacactgttatttttagcagcaaaaccattccttcaaatgaaaatgtacatgtaaaacagaaaa

SEQ ID NO: 147874 - DNA, 378 bp, Homo sapiens
ggagaagcctgtgggctccttctccaaataatgtttttaaatgcataaaataaaatacttagtcttgtaaaggaaaccaatttcattgaaatatagttaccttcaaagagcctgcaggggtctatgtactgaagatgaagaacccctgactggcaattacttgtgtttgctttagagctgtgttgtcccttgcggtagccacaggccacatttgactgttgagcacttgcaatgtggctagtccaaagtgagatgtactgtaaatggaaaatatacactggatttcaaagggcttagtataaaaaaagaataaaaactgcctcattagtttttttgtggattacattttgaaatggtaacactttggatatattggat

SEQ ID NO: 147875 - DNA, 396 bp, Homo sapiens
tggttggaatggagatgaggattaagtaggggcagcagtgctttggtggagaagatgatttagtgacttttggacttcctgagtttgaggcaggacacaggggaatgttaccctaagagctcagcagagagaggccaggattggaacgtgtactactcttgaccactggagctccagacatgacccaaatgcctggtgaatgtctagaacaggtgaagagcaaggtgaggaaaggacccgagggaacaccaaggtttaaaggatggtggagacagtgagtgaggaactaagaagggagacccaagagatggaagtcaaagagcagaggctgggaatgaaagccattggaaggtacagtctcttgcaggagtgagactgtagtgtcatcagaaaaca

SEQ ID NO: 147876 - DNA, 485 bp, Homo sapiens
tgtttcacggcgggcagggtgcttccctatgctcggtcgttattgttatcccggtgttatagagatatctgacaaacaatgtatcctttagatgcttctccatgttaacggaagtaacaacctggtatataataaattccctgggcccttcaggttgttccaataaaggttctcctataaccaagacactgtttaaagaaacacaccccatctgcgaggcccagatgccaatcagtgttgagatgttcctcctctttgtggcaatgtagcaaggtttgcaaacttagcataaaaaggagatactacaccccagtaccaaaagtttcctggatctttttttccatagttttctttggggcttggaaggctggcttaaatttttagttctaaatagattgtggtcgcaactgggtaatcgttacttgatgaaaaacaaaatatccagtttttaaaaaacattcagctattgcttggctcacatcctt

SEQ ID NO: 147877 - DNA, 200 bp, Homo sapiens
agggtccccatgctgaaggagtgatggtgtcaggagagagaatccaggcaggatctgcagacgtggtgccctttgaggtgtcaaagactagatttcctaggcaaccctgctagaattcagggctagtcattgccccttgctgtgacctggcagcctccgagtaacccaagaaggtggatgggctggctgcattttacatg

SEQ ID NO: 147878 - DNA, 598 bp, Homo sapiens
actgaccctcctgctctgtcaccagcatagagccaagtcattaagtcagacaggtccgaagcaaggacagaggttgagaggccagaagaagatatcaaagtaaggctacatttggcagtggttccctccttcttttctcttttcttttcttttctttcttgtatttgagacgttgtctcattatgttgcccatgctcatctcaaactcctggcctcacacaatcctcccaccccagcctcccgagtacccgggattaaaggtgtgagctaccactcccagcattccagcccctttttggcaattattacagggagaaaaatgaacattagaacttgaatttgagagatgataattccaaaccgaatttcttcttctgcccgcctccttcttccctttattttctggtttctatgtgttttcttcctattctagtaaagttaaaataatagatgatcaggccaactgtgtaggaggaagtcatttaggcaggtaatcagctcagatatcaatcggaccaccaccttcctcaggaaagtgctcaagcctgcagctatcacttttggcaacaactcactcagatgcccctgagttgtccct

SEQ ID NO: 147879 - DNA, 116 bp, Homo sapiens
ctgctttgtaggatgttttatgaaacaaaggaatagaaattgtattcatattatacattttgaaattatatctatattatattttttgtcaaagcaaaataaattatacattaagg

SEQ ID NO: 147880 - DNA, 380 bp, Homo sapiens
gcgggcaacgctttttcccgggtgaagaaaatgtcctgaattagacagaggtgtataaaagtacaaaaaaccggccgggcacgggggctgacacttggaatcccagcactgtgggaggccgaggcgggtgggtcgactgaggccaggagttcgagaccaccctggccaacagggcaaaacctccacctctattaaaaatacaaaaattggccgggtgcggtggctcatgcctgtcatcccatcaatttcggaggctgaggtgggcagatcacctgaggtcaggagtttgagaccagctcggccaagatggtgaaaccctgtctctactaaaaatacaaaaatcagctgggcatagtggtgcatgcctgtaatcccagcta

SEQ ID NO: 147881 - DNA, 289 bp, Homo sapiens
tgtgtgtgtgtgtgtgtgtgttttgctggatatcttttggagctgcctggtgccgctgtgtgcagaatgttccatatgtgcctaacatggaggccccatggctgtggtaaagcagagaccagcatataggacagaaggatggagaagtcagctgaactcagggtgtgacttcagggtgagatagctgggaggtgtagtgttacgtgtgcctactggtccttggagtagccgtgccatgtgacagtgtaagctgacctcttactcctctgcatcaggaaacacaccgcag

SEQ ID NO: 147882 - DNA, 401 bp, Homo sapiens
atcttaagtgttttcagttccgggtaccattttttgaggacactggccaaccagaaagaccctagagggccaccaccacagtattcagtgctcagttactgtttgttggatgcatggggactagagtggttaggatcctccaggtcctgtgaagaacagttgaaagaactaaggaaaaggaaactttgagatagttctctttaaacaattgaagagctctcaagcagaaaatagtctggatttatttcatgtttttccagatgggccagcgggtttgggtcagtttaagaaagaatttcccagagctgttctccaatggaatgggctgacattaagtaccgttaaactcctaggacagtgactttctgtggcagtccattcaggagaggccaggaaccaag

SEQ ID NO: 147883 - DNA, 587 bp, Homo sapiens
agtagagatggggttttcaccatgttggccaggctggtcttgaactcctgacctcaggtgatctacccattttggcctcccaaagtgctgggattgtagggcatgaaccaccgcgcctggctgtgacaaggttaagtcaagtcattagggattaacatacgtaaacctatgtaacatatgtattaataagggcaagaagatgttatagacttggctagacagcagtggctgtggatgtggcatgaaagcctggctttcaggggacccagttctgtgattttagcctggtaaagatcggctgagttgttaatttctttcagaaaagttagatggtgtcagcggcttagaatatcccgtgtgggagggtggccatcctgggcatttcaggaggcagcacacataccacacacccaagaagaggctgggaagggaatttattagcgctccccttaggttgagtttattgtcagaaacctgtcattgtgatttcatttgatgatagaaaccggtggcctcaatcacatttgtgatggccaacaaatttacctaagcattttgctaacctgaagaagtaaagcagtggctta

SEQ ID NO: 147884 - DNA, 241 bp, Homo sapiens
ttcctcgccctgcccccagagccaagttctctatcagccgtttatcctcacacacttttctacaatggcattcaataaactgcacgtgtttctggtttaaaaaaaaaaaaaaaaaaagggtcgtctgtactatggcatgtaagtagttccttcctgcttatggtggagtagtagtctatggtatgcttgtcccagttggtccatctagtgggggacatggagttagcaggacatcagggca

SEQ ID NO: 147885 - DNA, 325 bp, Homo sapiens
gccaagggagctctcacaaaagttgagacactttttcatggcttatatcttaactctgaagattatatcactgatctatttaagggaacaatggttaaatgcacaattcaaaaagaattagcacattatgagaaactaaatattctgaatcatctgtctacagcacaaagtatataccttgaagcctttagactatatcataattgctaaaatttaatcagaaactatggaagacacagaggatgaataaaacagactccttgcacctgaggaactcagcctactaaaacaaacagattttgagcaaactcttaaagcataatat

SEQ ID NO: 147886 - DNA, 245 bp, Homo sapiens
ggcatgaacatggctcatctctttccgtatcctcctctgccattacaggagctgttaatggcagtggcatgaacattgctctaatcactacaggtttctaagcagcggagtatcaagaaacccaaaatcattcctgataacatttaagttcttcagccttgtattcaaggttcttcagtccagctaacttaatttttcttctcaacctcaatagagcaaaattggtcttactgcccttgtttttg

SEQ ID NO: 147887 - DNA, 274 bp, Homo sapiens
ttccagacactaactacccatcaattgactggagttggcaacacagataaaacacacttgtctttcctgatctaaattattgctcttcttcatttatatgatgtactagcaaaggcttgcttccaacaagtttgttaaaaagaactaaggatacttaaatgctggattgaataactgagctgatttgatcattaatctttgcaggcatatgaggggttactataccctatagaaccataagccatcagtataagagattcaaagtaaaaaaaaa

SEQ ID NO: 147888 - DNA, 194 bp, Homo sapiens
aaattgccagtattcacttgttttctacttacggaaatgtcaattttatgtgggtcagcctcatagcagggagacaaatgtcccttgcacattacagaaaaaaactaaatcaagctcacatctcctcttgtataagctattagcttagcctcagaattagcttccctgccttaattctcaaccccctccaattc

SEQ ID NO: 147889 - DNA, 1130 bp, Homo sapiens
agccgtggttcctcacctgtaaagggtgaggacaggagcacctgcctcagggtgagaaagcatggtcctcagtagatggtagtggttgccctcaggttcacagcttacctctcccaatttagatgagggaactgtggcccaaagagtcaacatggggttttctggcaaaatctctcttgttttagtgggtactgtattgatactgattcctcgggtgggtaagtccttcttctccacatgatgaaaataagtaactttaattttatacactgtcagttactttaaccattttaaaagttaaaaagtgtcagtacagccaaacaaaaaatcagcaaaactacaggttgggaagaaatattttccaaaccatatgtgtaataatatcttactatctaaaatagcaaaaaaaaaaccctactaaaaacaacctactaaaccctactaaaaaacaaccctactaaaaatgggcaaaggacttgaatagatatttttctagagaagacatacaaatggccaattgatgtatgaaaaaatgctcaacgtcactaagcaccagagaaatgcaaattaaaaccccaatgagatatcatctcatctcgctccagttagaatgactgttaccaagaggacaaaagagcaagtgttggtgaggatgtggagaaaagggaaccctgtgtgctgttggtgggaatgtaaattagtacaactattacggaaaactctggaggttcctcaaaattcataggactactatgtgctccagcaaccccatttctgggtgtatatccaaagggcatgaaatcagaagctcaaagagacacctggaccctatgttcattgcagcattattcacaatacccgagatatggaaacaacctaaatatgtgttggtgtttaatgacaatgtggtgtgtatacacaactgaatattattcggctatgaaaatgaaggaaatcctgtcatgtgtgacaacgtggatgaacccaagtcattatgttaagtgaaacgagccaggcacagaaagacagatactgcatgtcactcatgtggaatctaaaacagtcacaactcacagaaacagagtaggacagtggttgccaggggctgggggaatgcagactgtggcgat

SEQ ID NO: 147890 - DNA, 468 bp, Homo sapiens
ttgtatctttccagaaaggagtgaacccaaccacacatgaaagatgaaagatgcttgatattgtaccatctgcatattaaaattactctacgacaaccttcacattaaaaagtccacttctgttcaagagaagacatttttagcaactcaaagtgaaaagcagagagaaccagaacatcttaaaaataaacatactgaaaaaacaaaaactactccctgttaatttaactgaaatataacccattggtattttgttaaattagcaaataaaaaggtcacaagcaattaaatgaaacaaaagccacactgtgttcatctacattaatgctgaactgggtctcctcgtgaatgacaagataaattgttatggtgccttcaaagacttcacaatgtattttgtcaaagtcgggagggttaatgtctctataagccacggattaccataatgtattgtgtcaaaacgctcaa

SEQ ID NO: 147891 - DNA, 951 bp, Homo sapiens
acttgagttctgtctttatttcttaaatatccagagatgggaactgagaaaaaaagtactcttgcaaaagtggtaaataacatgatccaggctacctgctcaaacaacctgtttgtttcctctatctctgtccatacttaatcctgcatgcaccgcttctattttaagacacatgactgtggaactctatgatttatgacttggtgactttacagtcaccaagttaccagaaaccagcattagatggtcaattccagtcccaaatctcagtcatatgttatcacatgatccatatctccatctctattagaacccaatagtgttgtttttttaaaaggaatacaattgtccactaaaagtggcatggtctccctccagaatgctggtggacttgcctcaaactccacatggtgtttttcctagcattgctactttcaataccacagtgcaagaactgtaggcattacagcccagttcttctgccaaaaactttcttgttcttgtccacctcagagctggaagccttttatgtcacccaggttatagtttgctcagtattcccaggtgtggaatatggctttctccaaggatgaagagacatactctgtggtgaccttcttttttgtgtactttgggtactttggtggggatatcctagcaaccatccactggactcgtaataattttataggtactgtaggcccatgagtacttatacaatttgtcactccctttcagaagtacacatttcttactgaggcctcaaatgcactagccatttcttgttcaccttgtctaattagcatgatgtcattgatggagttgaccaatgtgatgttctgcaggatgttcaggctgtctagaactctttagactatgttatgacaagaggtggggcagagattaaccccaaacatccgagtgagtataaacagtctctgattttttttt

SEQ ID NO: 147892 - DNA, 519 bp, Homo sapiens
tatggatataaacttctaatatgaggaagagacccaaaccaattcaaatagcatgttaaaattcaatctatctacaatcttcacgtccttgattattacattctgtaatctcatgggtatttttgcttccaaatataaggacatacctattatttccttcagttttctttttaggagagttgactgaactatttcaggaaagaagatgtcttactttcctttgcctagtaagccttgctgctttttgaacacagtgcattttcttcaaaatatacccactactttaggtggtcttaatgaatgaataatatgtaattgtgtatacttttctaaaattctttgaaacttccaggaaggaaggtctcattaaatatctatttgaattttagtgaaaagaacaaaaaaaagcaataacaaattaagacctttgattcatgtgtactagcagtggttttattttggtagctagtgctgtgatgtaattgaagcagtattttcatatagaagcattttttactt

SEQ ID NO: 147893 - DNA, 436 bp, Homo sapiens
cacagattctagagcactgtctcagattccatcaaccccatcaaccccttgagcttctgctgacaggtttaaggcaatgatccagaagtatggaggagtcagctccctctggagggccttgattagtgaaatgcagaggacaggagggagcctggcaggcaagcgccccctcctgtctccctcctgtgaactcctctcagccatggttttgccttgcatgccttccagagaagacacacaggttgtctggcaaatgtgttcggctaagtaaatgcacttggcaaacactccgtgtgtcctcctggctcactgtgaagcctgcggtgaggtaatgcattacatcacattgctatgcatcgttccttgcttcatttacctttttcctcgccctcacctctctgttcttacatatcccaaataaaataccagtgcttac

SEQ ID NO: 147894 - DNA, 260 bp, Homo sapiens
gaattaggtggttatcataagattttctcttacttgtcatttcatttgcttttatttaaattattttttcctgcagcttcattcttatgtgaaagcatgatcgtaatataaacagagttgcagcactaatcacgttgacactgcagatgggtctaaccttattcgtagtcccaagtaattgccacaatgcaaattttagcacctatctctatcgtatattactgctttgtagttaacgtttttcctctgatgagttccaa

SEQ ID NO: 147895 - DNA, 345 bp, Homo sapiens
atcctattgcttgataataatgacaatttaaaaattacgattcagtgccctagggaccaagtaatttgttttttgttgaaaaactcagttaatgcaaggatccactaaaacagataactcccttaaacattttatttcaattaaaacatatatatgtatatattcatttgccaatctttctagagagggccttcttttgagtacaaatctgcagattagcgtttgctgtgggcttttttcacacttgtaaacaacacccaatttctgtttcttccaaatgaaagcaaagatacttgtgaaaataatcagagcccaaaagccatctagatttttctcaattttttc

SEQ ID NO: 147896 - DNA, 266 bp, Homo sapiens
gagaaaatgcctggaagtggatcccaaagatgctggatcaagaatggggaataggaagtcaggaaagggacactttgttgttatagtaatactgtgcagtgacataggatttgacaccctggcagtgaccctggaatgactgttagaagcttggctttcctagtatttctgtgacattaatcacattttaatcacaacttccatatctgtaaaatggaggactgggacaatattgattatttttaaaaaactgttattttaggttt

SEQ ID NO: 147897 - DNA, 499 bp, Homo sapiens
cattgttccagaaaagagttggggaatacatacataaaatttcaatataaatcaatacatgtttatcaaatttaaatacacatagcttttcacccagcatgtcccaatctggtaatttgccctaaattagtgcttctcaactagggcaattttttcctccatgagacacttggcgatgtctacggatactttttccctgtcatgcatggggcaggggtggtgagtggggagcagagttataggcatctagcaggtacagaccagggatgctgcaaaatatcccacaaatcacagcacagtctcccacaagaaaaaactagtcagccccaaacaaaaataagctgatgctgagaaactgtccttaggaaatagacaggcttgcaactatgcatatacaagctttttgtatacaatctcgtgtatccaaccaagtagaaatggttagataaactgcgatatatttatacatagctataaagtaataataatgttgctatat

SEQ ID NO: 147898 - DNA, 347 bp, Homo sapiens
gtggtgatagtggtatctgtggtaatggtgataaggggcagaatgaagtatccagcataatcaactgagagacacaatattgttagttgtaagatgacattcttctgtatacattcttttcaaagcaggaacacaatgttggaaaggaaattataaacccaatactagatcaggtgacacttaaggtctagatttcagcttttctattaagcgaaaacttagaacatgtcagttttcagaatagaaatgtttatttccgtatctgaattttaaaatgcattgtgcatatgttctgccacttaaaagtaacaatcttttccatttttctcattttattacaaattgca

SEQ ID NO: 147899 - DNA, 224 bp, Homo sapiens
aattctcatccttccaatatatctactactttgacacaactatccttctacctggctagttttatatcatcctgaccttatttatcaaatggtatgggtctagtgggtgtgtattttcacattcattcatattctttttctctctttccttccacgcttaccctatcctgaactttccaaagcaaaaccctgtgtgctttcagaaatcctactaggtcttctca

SEQ ID NO: 147900 - DNA, 298 bp, Homo sapiens
gtctcccaagcaactaccccaagacataccaacagtgaagccaggacagcaccatgccatcggcgctccagtctgtctggctgggaggaaagtgctgggcatcttacagtaactctagaagttcctctgactaggctgcaatcccacctatatgctcagccctaagagctgtggtttcctgtgctctcatttgtccattcattcattcattcattcattcattcattcagcaaataatctgaaatccagtctgaactaaggcctgagctgtggataccatggcgcgtgagttagatgt

SEQ ID NO: 147901 - DNA, 577 bp, Homo sapiens
aacctctgcaaacttttcttctgcagtttcctcacctctgtcagcattcacagaattgaagagagttcagattttgctctggattagtttggcttaagggaatgttgtggctggtttgatcttctatccagaccactcagaccttgtccatatcagcattaggctgttttgctttcttatcattcctgtgttcactagagtagcacttttaatttacttcaagaacttttcctttgcattcacaacttggctgtatggcacaagaggcctagcttttgatgattgccagaatagtaagacagaatttaaaatggttccatggttgatcagatgggagattggtgggagtagggaacacaaaaggcatgggaaaagaagataggttgtattttggtcatactgacaccaacatgcctaaaggatagccctgtgaaaaaagctagcagacagttgaactgcggctgtgaaacaggaagccgtgagggctagactcatcgttgtagtcattcgtaaagagtaaatacttggagctattgtagtagatggtatcaccacggaatggtgagggagctgcaaa

SEQ ID NO: 147902 - DNA, 673 bp, Homo sapiens
atatttcttaatagaaaaggcacaatgtaaaatgtctaccatttaaaaccaaaactcagtatctgcaactgttccgattgggaagcacagcacatttccgggttcagctcaggaagtaaagcctacacttacatctcggatgctctcaaggggcagaggtgcagtcagtgtgcccaaggcctgttcctggcttcagctcaccctaaggtccccacatctccctcagaacaggctcacctcttggcaatccctgccctggtgctctgtcttgggaggcaagtggcaggcaggagtagcgaccctgaacagacagtgttatccttccctcctcgtgactgttcttcagggcttccacacgcacaggcacctgtccgacctatccatttatgattcacacctgctctcatgaaaggcacctgcggcccatcaagaaatacgattccaaggagaaactaataactactctagtagaggatcattataagttgtagggaaaaataattaggcactgcttccaacatttatgaagactaccctaaaagttctccatatcattcaggggaaatggctacgctcatgtaaaaccatccagtcattccatttatcattccactataaaaacaagggctgccgcaagtctgcctgaaactcctaagcctgaggaaaatcaatt

SEQ ID NO: 147903 - DNA, 212 bp, Homo sapiens
attctgggatatgaatgagcatctttaagtctactgttgagacctcaatacaggaagtataaattttagacctaagatctgaataatcatctagctttgtatcagaaatgttagcagcaatacaaaaacaaagcatggtttccaggtaattataaatgctgggtgtgactgagatactgggataggacagcatcaggtcagactaccaataa

SEQ ID NO: 147904 - DNA, 361 bp, Homo sapiens
gattgaatatggcacaattaatgtttcagcacttctcggcttttctctaaaatatttcaatgggcttttaatttattgcagctcttgattagcagggttgaggcagggttactgctgacctcctgggccaaggtacttctggggctgtagtgaagtggaaaagaacaaaggtttgatagtgttctcagctggagcctcccagggatgagcccctgggggttcactgaataattccttcccctaaagtagtcagagagcaatgcagtgttcttcagatctttatcagagttacctggggtatctgttgggtagaacagcagattcctggaacttgtttaagaatctctggactatggagggt

SEQ ID NO: 147905 - DNA, 129 bp, Homo sapiens
ttcgctgatgtaatttctttaaaacctcatcagcaaacatatgtttcttgaatggttcatatctcagccttaaaatgaattgtagtttgtagctttggaggagaaattgctttgcatttatatcaaaat

SEQ ID NO: 147906 - DNA, 240 bp, Homo sapiens
ttaattgccaacattttaaaattttgaagacttcacataaaaattcagatctctagtatctctttttaaaatgagaaaatatgcaaacagtgaacctacattttcacctagtaaccattcagcctctcatagatggttccagtgtccccatggttcccaaggccaaggccaaatatcagccagcactaatcctgagtcatggcatggtgttacctggctgaatcctgcaggcacttgagt

SEQ ID NO: 147907 - DNA, 264 bp, Homo sapiens
tcccaaagtgggctaggtcaggggcagggccatgggccatggggttgggggaggtgaagcaggtacagagcaaggcagagccttaggagctctccctttggggccccccagggcagacaggatagagattgggtgtcataggaagagcagggactgagggggtagagacactggtgggagacagacagggggacaaacagcaggacaacacagaaaacatggggtccccagaactgggttcccaggacagacagccaacaagcc

SEQ ID NO: 147908 - DNA, 591 bp, Homo sapiens
tcacacatgttcatatacacattctatacttctcaccatcctgtgtcttgtgcacactcacacatgcacacaccacacattctatacttctactatcctgtgtcctacttttcagcccaaacctctaagctcaaattctatttccagaaatcgtttttggtgcctctggcccacaggagcccctctgtctcaacgctttatacttccatgaattttcggcctgctgctcagcggctgactgctgaggcctgcaatgatatgcaagggaacttggctggctaattttgaattttcctttctccagggccatggcaagaggaatatgggcagaggggggaatcagtgctttgtttcagggcaactgccatacataaccactgtcttcaaataaaagcctttcacaagtaggtttccattacacagcaagtcgaggaggagctggtgaaatcagtgagttaggtgagtcccccccatcctcaggatcttttgttatggtggtggtggtaatggcggtgatagtggtgataaagaggaggggatgttgcccttaacgtagtactggcatattacatagctcttccatacaggtca

SEQ ID NO: 147909 - DNA, 229 bp, Homo sapiens
ctaggctgtgggtggggaagatagaactggagcctgagaaactgcaagccctttgaagacagaagccatgagaatcaacatgccaattcttggcaatccacttacccacaaccaacattcaccagcatggttgtactgattgctaaaatgttaaaatatttccaaattaagggtgccatgagccccctttgtgcaccatcctgatgcctgtcctagcccctttaatctc

SEQ ID NO: 147910 - DNA, 248 bp, Homo sapiens
acattcttaacaccccttttgaggtgtcctttttctcctaattcctctttggagctggtgggtgggcattttctttcacccctaacaggtctgctactattaataagcaagccccggttcactcctgtaaaccgtgtgattaggccacgacagtccctctggttcctctaatttgagtgttaaggtcaagagggcgccactggcatgagatggccaaactggcgactggaaacctttccttttaacca

SEQ ID NO: 147911 - DNA, 350 bp, Homo sapiens
acgattataccgatattactagtttgcaggactgtgtccagagttggttccttccggtgggttcgtggtctccctgacttcaagaatgcagctgtggaccttcctgtcgcaggtggcgtgatttgatttgtgtgaaggcaatgaaatgatacacagatacaccgaagcctcccaaaagaatcctggttccaagactcaagaagatggattaatgtttttccattaattgttggaatttatgccattttttactatgtgccatcaattttaaagcacttctgaaaagacataacaatctaaatgagatggcattttaaattcataaaaatatagtattttcctcaactttt

SEQ ID NO: 147912 - DNA, 432 bp, Homo sapiens
acgattataccgatattactagtttgcaggactgtgtccagagttggttccttccggtgggttcgtggtctccctgacttcaagaatgcagctgtggaccttcctgaaaatgtgaaactccgaccaagtgcagtggctcatgcctgtaatcccagctcgttgggaggccgaggcaggtggatcacaagtcgcaggtggcgtgatttgatttgtgtgaaggcaatgaaatgatacacagatacaccgaagcctcccaaaagaatcctggttccaagactcaagaagatggattaatgtttttccattaattgttggaatttatgccattttttactatgtgccatcaattttaaagcacttctgaaaagacataacaatctaaatgagatggcattttaaattcataaaaatatagtattttcctcaactttt

SEQ ID NO: 147913 - DNA, 597 bp, Homo sapiens
catttaatccatcagctgcagaggagaaaaaagaaaaattatgtactcaatatggcctatttctctttataaaccataattgcaagcatcattttatcttcatttgttgcccttttaatacttccattctgagtgatctgcagtttcatttttaccaacactcctcccatctgcctcctctttttctcctctttcttttgcccacataagcaagcacacacatatcgggtacaccccagggcaccaattccagaatagttatcatcgcaaagcttcctgtggcctttcaacagttttctgaacatattttagacactaaaatcatcaagtcatttatgcaagaaacattggctcatggagtgcaaagctctgctgtaaaatcctgtccaccaaagccagtatttatcatgtcagggcactctgactacatgcaaattacagcaaatgaacacagtacccattttcttaaaacataaaagtgttctaatagttcctctgatttgggctgatttcatgagtggccataaattcttcgtataaatttcagtcctttcattagtttctcagttaatgtggatgatttactgccttgttctg

SEQ ID NO: 147914 - DNA, 277 bp, Homo sapiens
gctccttgatactgacttcctgcctccagcactgtgaggagtaagtgtttgttgtttaaggtacccagtttatggcatttttgttatagcagcctgaagtgactaagacacccctccttgaaaaaatctgacatgcacaccctcatattctgagattccatgactcacctgggacataaacatgtcccttcctctctgcagtccccacattatgccgtggaacacatgggcctggacatctatgtcctcgccacccagtgggaatatacatctttct

SEQ ID NO: 147915 - DNA, 319 bp, Homo sapiens
aaattagccgggtgtggtggcggtcgcctgtaattccagctattcgggaggctgaggcaggagaattgcttgaacccgcatgcggaggttgctttgagccgagtttgcaccactgcactccagcctgggcgacagaatgagaccccgtctcaaaaaaaaaaaaaaaagaaagaaagaaattatatttcctggctaagcgcggtggctcacgcctgtaatcccaacactttgcaagaaaaaagaaaattctttttcctgacccatccatctagcatcccacctgactattcagtttagttcatctgaaatttattgagct

SEQ ID NO: 147916 - DNA, 292 bp, Homo sapiens
aagagatgctagggcaagagggaggggtgatgtagatgattcaagattgttttccctaccctcttcagtgcctctttcagtaataaaatggcaaaaccaggtactgtgatttctgacctgatttttgattcttataatggtgctttttttgtgtgtagttagttgttaaaatttggtattcctgcaaggagggtgatcggtggaggcttctattcagccacattgctccatcaactctttttttccaaatgccatcacattcacagttctgggagatatgatttggacatac

SEQ ID NO: 147917 - DNA, 310 bp, Homo sapiens
ttttccatgttggccaggctagtcttgaactctagtcctcaagtgatctgcccgccatggcctcccaaagtgctgggattacaggcatgagccaccaggcccggccttgcttggtgtttttgatcaatcctttggatttctgggctgcccagtccagtgaaaactgactagactagaagcaccatgttggcagggacctggctatttcattcacagctctatccccagtgcctggcatgtggtgggttttcttgttgaatgattggattcaaataacattatccaaagaattttggtctcttggcccaag

SEQ ID NO: 147918 - DNA, 518 bp, Homo sapiens
  misc_feature (499)..(499): n is a, c, g, or t
ccattcttcttcattatggctattctgtgtattttgccactccatataaactttagcattagtttgtggatatccacagaataattttttgaaattttgattgggattgcattgcatctatagatcaagttgagaagaactgacatcttgacaatattgagtcttcttatccatgagcattgaatatctctccatttatttagttcttctttgatttctttcattagagttttgtagtttttctcatatgtatcttgtacatattttgttaagtttatacataaggatttcattttgggggtactaatgtaaatagtttcgtttttaatttcaaatccctcttgttcattgcttgtatatatgaaagtaattgacctttgtatataaatctcatatcctgaaatcttgctataatcatttattagtttcaggatttttttgttgttgattattttgaattttttgcatagaaaatcatgtcatctgcaaacaaacacangtttttgttcttattaata

SEQ ID NO: 147919 - DNA, 343 bp, Homo sapiens
aagctctctgtgcctcagggtctgccacctatgaagaaagagtgaaaatgttcccctctcccagggccagctgaggattacatgagttaggacacatgaaatgcctccaacaggacctggcacacaggatgtgctcaactgttagctagtcttattaaatgggtttttaagttagcatttagtactcaagagaggcctctggagtcctcaaatcgttggtgcttttccagctcttcaccctctcttcacagcagttccttaaagagcgctgccctacgggttgctggggaatgaaggccatgccctgtaaagcacctgcccatcgtggtgctgaccaccacca

SEQ ID NO: 147920 - DNA, 382 bp, Homo sapiens
acatcacgaccattcacatcccatgggccatagcttttcacatggccaagtccaaagtgattgaggtgggatatgtactcctctcacagaatgcacgagtacctcccatgacagtgggtaggaatatgcaatcctatggctgggaggaagcaaatagttggggacaataacccaacagatcacacccccaatgcctctatctaagttctaaatacaacatttcccgtagagaggaagccactctgcctcctccactgcatcttcctttcctgcccctctcagcttgagctcaggctccaaaacttgagcgtgataagaatcatctaagtgcttgttaaaaatccccttcctagggcccccctttccaaagatcttgacacat

SEQ ID NO: 147921 - DNA, 390 bp, Homo sapiens
gctgccaaagaccatgcttccatccgtaagttccccagataaatcaccctttaccaaaaaaactggattttgtccttgttctttggtttcttgtctcctcctgtatttgggggtcactttgtgtatgtggccctttcttggaacactatctcagaggccccttcagattagaaactgtctcacactttcttaggaaaacattttgatatcagcaaacatttccttgaatttaatctaaacctgtcattcttcagctccaacaaatctcctcttattcaagtctccattaagataaagtataggctgtcataggcttgggcataatcatgtgtgtgatatttagtgtatttgcaagtaattgtcaagccttccacagtcatcccactcagg

SEQ ID NO: 147922 - DNA, 254 bp, Homo sapiens
cgtgctagcagcaatattgctctttaatgcaccaaggtgtttctatacatgcacatcaaggcacagcacctttccttaaacttatttatgacacagagatctttgttcacatgtttcctgctgaccctctccccactattgccctattgtcctgccacatcctcctctccgagatggtagagataatgatcaataaatactgagggaactcagagaccagtgcctgccggtcctccgtaaactgtaagctgagt

SEQ ID NO: 147923 - DNA, 442 bp, Homo sapiens
caggctagtctcaacctactgggctcaagctgtgctgccacctcagcctcctgagtagccgggactattggcttccctgagaagcctgatgctttagtggggaaggtgtttagagaccaagacgtgggtgctggggtgcccgttactactggggtgctgcagcttctcagcccctcagccggcagagttaggaaatacatggctgttcaggaagccacgcaatggggaggaatgaactgtggacagctggggaccctcgtaggccacagtgcaccgtgccagtgttagcagctgccacatccgccccacactccttgcccctgctgttttgccatgacgcagatcccaggcatcacattcctgcatttggaaatgcctcctcgtacacctgaagacaggcctttgcaacaacacgacgccaacaccacatcacacccgaaaa

SEQ ID NO: 147924 - DNA, 517 bp, Homo sapiens
  misc_feature (449)..(449): n is a, c, g, or t
gagctcggtacccctcaacgctttatacttcgattagtaagggatttcacatcattcactatttactaatcgaagtagaaggcaaaatgatatgctgaaagcagagatggaggcttaatgagaaaagtgtatgggttgggaagagagtaccataaaagttactgcacagctgtgaagtctcaggtaaagttcttttgcatggtttcttcatggtctagtattgtgaatatttcttccttctacagttctggtgctggggtcactttagaggggccaggtagacaaggtagacaagacacagtctaggcccttaagttcacaggttagtgtatgaggtagaagacatagaaataaattaagtatgttgagttaagggaagtaaaattgggagtcagtggaagacaaatcagaggaggcttcctagagaagtataaagcgttgagctcaangctttatacttccgtatggaattccagtatcatatcaagtttgcatggcgaagtataaagcgttgagg

SEQ ID NO: 147925 - DNA, 209 bp, Homo sapiens
ctggtgctggggtcactttagaggggccaggtagacaaggtagacaagacacagtctaggcccttaagttcacaggttagtgtatgaggtagaagacatagaaataaattaagtatgttgagttaagggaagtaaaattgggagtcagtggaagacaaatcagaggaggcttcctagagaagtggggatagtaaaatttcacgtagaat

SEQ ID NO: 147926 - DNA, 315 bp, Homo sapiens
acagaaaaagactccatctcagaaagcacacaaaaaaaagaagaaaatgtttgttcatcctgcctttaattccttattacaaggcgtgaatttttattgttttttttgagacagtctggctctgtcatccggggtggagtgcagtggcgtcttcacagctaggcacaacctcgacctcccaggctctcaagtagctgggaccgcaagcgccactacactggccagctatttttctttttttttttttttttcggtagagagtaggtcttgctgtgttgcccaggctggtcttgaactcctgggctcaggcgacct

SEQ ID NO: 147927 - DNA, 922 bp, Homo sapiens
tttcagggggtctgccacatgtagaaagatatcttccaaaacgaaatcctccagcatcattggatccagttcagcctcacatacttctcaagcgacatcaggagccaatagcaaattggggattatggctccaccgaagcctataaatagaccgtttcttaagccttcatatgcattctcataacaaccgaatctcaatgtacatagaccctctttcttgtttgtcagcatctgaccatctgtgactataaagctgttattcttgttataccatttgaagtttttactcgtctctattaatatttaaataaatgctggggggtgatagttcttctttttaaaataaacattttcttttgaataagcatgttttgctgccgctgcaagtgttgtggccgttgtttctcagaacgtctgaggcagcagctgaatcatctcagtgcaagagcttctgagcataacacgaaacccagaagccaaaggaagagccacgcgtgggcccttgtgaaactaaagcttttcgtgtaagacaacacaaacaaaatttaaagacaaatgacggggaaaagaggagaaaatatattacaaaggattagtatccatcataccaaatacccgtgaaccagtcagaaacatcccagggggcaggtggaccaaggatgtgaacaggctagtctcagaagaagaaatacacatgctcatggcccggcactgtggctcacgcctgggatcccagcactttgggaggccgaggcaggtggatcacgaggtcaggagtttgagaccagcctgcccaacatggtgaaaccccgtctctactaaaaatacaaaaattagccaggcgtggtgtacaggcacgcctgtagtcccagctactcaggaggctgaggcaagagaatcgcttgaacccaggaggcggagg

SEQ ID NO: 147928 - DNA, 341 bp, Homo sapiens
gggtatttgggcccagagcatccttcctccacgagaggagaaaaagagcactaggaaagaaaatgtgggactgggggaaatgagagtgagactagggaaagggagggagggaaaggacagggtggtgggaggagcatgtctattgatttcttcaacacatgtgtattaggtgccacctctgtgccagcacctggacctggggagacagtcatattcagatggatgacttctgccttcatgacactttcacactagtgagctggctagcatttatcaagcgtcctctttctgtcaagcactttacacgctcttttggattgggctttccagcagcagacact

SEQ ID NO: 147929 - DNA, 231 bp, Homo sapiens
ctttccaaaaaacagggtattaaagcataatttttagttaaaaaaaatcaatgtgatatgtttatgagtgacattagtaagatggcagaggaagactttccaggactccagcttgcagacacattaatttgaaccactatccatacacaaaaacatcttcacaaaagttaaagaaaccaggtaagacattacagcacgtgaatacagcacagaaataaaaagaggcacatt

SEQ ID NO: 147930 - DNA, 196 bp, Homo sapiens
tgctgggattacaggtgtgagccaccgcacccattcccagccaaacaaattactattaattaagggcagttaatgagaactagaaagcactttttggataagatattctttttgctattataagatttgttgagtagtaatttgccctaagcagattaccctcaataagttcccatctctcattcttcacaggaag

SEQ ID NO: 147931 - DNA, 184 bp, Homo sapiens
ccttgtgccctgtgctggcaggtcctcccgagagctgaaggtgccttaggacccaggcccatggctgctgacctccactgatcaagggaggcctgatgaatgggggttttctaagtgggatcacatctctcctcaggtcacagtgcccaagaaagggtcacagcttccccctctgattgggtct

SEQ ID NO: 147932 - DNA, 784 bp, Homo sapiens
gttagtttccaggaggcgagagttcaggtgcaacgtctttcaagaggagggcttgcctttaaaggtcctgacaggcactgctgaccctaactaactgcccaccccaaccagggagggaggggctgcgagggatgcgatgagggcctcagaagaagggcgcaaccaacaaaaaccccaaggaatttagaggcatttaaattggttcatgctccaccaaagactttcttttctatagtccatttggcccatttagtatcacagagactacctcctcccacttcagagccacccagccccaaagctaggctgaccatgcaacttggctggcaccagggcaggcctggactatatatggcctggataaaggccaatggccttgtcactttacatcctggattttctgggacggtcttgattccccttaccctctgggattgttctctgccccctctgtcccttgccctctgagaggttggagcccttatccaggcctcagggaaagagctgcaggccaaggaagcattactttttatggctctaagtgcttctgactaaatccagtcccctgataacggtggcctctcagagctgctccttccctgcagttcagcctgatgtgaagcttggggaggtgaccttctccctgcaacacgcgaggcactgccaaggggctgctatgatgtgggatctgcagaaatcctttgttcctagttggctttccatctttgcctctctgtatctctccctgcctggctggtttctctgaagagatcagctggtttcc

SEQ ID NO: 147933 - DNA, 584 bp, Homo sapiens
cctttcttaagaattgatagagatttgatcaagatgcctagtatggaaggacactgttcatcttagaggcttcttaaattaaagaagaaaaatgtggccaggcacagtggctaacacctgtaatcccagcactttgggaggctgaggcgggtggatcacctgaagtcaggagttcgagaccagcctggccaacatggtgaaaccccatctctactaaaaatacaaaaaatgagctgggcatggtggcaggtgcctgtaatcccagctactcgggaggctgaggcaggagaatcgcttgaacccaggaggcgaaggttgcagtgagccatgatcacaccattgcactccagctgggtgacaagagcaagaccctgtctcaaaaaaaaaaaaaagaaaagaaaaattcaataggaatgtcacacttcatgatagaacagaacttagtgagattattttgttatgaacccatcagagaggttttagttactgaaggtactttattttacaaggcagtgaattgggttcatagttagagaaccatcagagtagccacatagcaaagccctattgtggttatcccaggg

SEQ ID NO: 147934 - DNA, 428 bp, Homo sapiens
ggagttggaggctgcagtgatcgtgccactgcactccagccttggtgacagagcaagagaccctgtctcaaagaaaaagacagataagtccttgggagtctcagacggaggacatacatagagaatgaacaagaagcagtaaccaaagagataatggctgaaaattttccataaagacttccacagacttcaactccccagattgaaggaacaaactgaagtcagagtagggtaaataaaaataaatatatatacataaaaaaagctcactacattagtacatagaaaccagaaaaaaatatgtcagatagttacaaaagtggtataattaggttgacttcattttttaaattggatatacaaaatttaacagttaaaaaaatcatcagtcaagcgaaatgtcaacaccacataacatagattaaaag

SEQ ID NO: 147935 - DNA, 404 bp, Homo sapiens
taatttggtgtggcagtgattttactggaagcctgtttgaagtatagtggcaatgaaagagaaaaaaaatccctggtcagtctagaaagacttcacaggagacattgacctgagatgtacaggttgtataggaattttcattgagatggtttcaaagagattcagtctggggatgttactggaaaaggggtcccaatccagaccccaagagaaggttcttggatctcacacaagaaagaattcagggcgagtccaaaaagtgaaagcaagtttattaagaaggtggaggaataaagaatgactcctccacacacagcagccccaagggctgcgggttacccatttttatggttatttcttgatgatatgctaaacgaggggtggattattcatgcctccccttt

SEQ ID NO: 147936 - DNA, 287 bp, Homo sapiens
ggtcttgaactcctgagctcaagcaatccacccacttcgtcctcccaaaatgctagggctataatgttgagaggttctttgtggaacaggctgccttttgataagttgtttgtgttcataagggaataaaaatgtcatcccttccagtactctcccaattttgttggtgcaaggtcttcagaatatttgggatccatgaaaacaatatagagggatgtttgtatgaatcccctaaggctattatgtgttatttattttgtccttggtgcctagccagcatagatgga

SEQ ID NO: 147937 - DNA, 236 bp, Homo sapiens
acactgaagtcttgagatcacctagctggtgagtggagcactgagatttcaacacaggcaatataaagccagaacacatgcattcaaccagagcatttcatggcccatgtgtggtgtgtagaaaaaatgagccaaaacttagaaacaaggcaaatggaaggagacaagtccctttgggcctccccaaggattattaacagtccaggaaaatgtgcccttgttcggcttgctgtcca

SEQ ID NO: 147938 - DNA, 247 bp, Homo sapiens
gacttagagtttggtgggaagcagagagctgggttttaagaacatgaatctgacaactctatggatctggaggagaagctaactggggacgaggagcagtaagaagcctgttacagatgcactgataagaagtaatgagagctggccgggcacagtaatagacaattaatacaatatctgaggtgtaattcatcactttctttcccaaaaccactcatttcctatttgtgttaatagaaaaagccca

SEQ ID NO: 147939 - DNA, 367 bp, Homo sapiens
aattgttgagcatttttatcatgaactatgttgaattttgtcaaataacttttttttgcaccgattgagatgagcatgtggttttggtccttcaccatgtcagtgtggtgtattacattgactttcttctgttgaaccactcttgtcttcccagtgtgtagtccacttggtcatggactataatcctgttaatgtctttacaatttggtttcctagtattttgttgagggcttttgcatcagtgtttatcacgaataatatcttacacttttgtttccttgtcatatatttgcttgggtggtgtcagactaagggtggtatcatacaattgttttttgttgtttcctcttcttcacttatttggaat

SEQ ID NO: 147940 - DNA, 338 bp, Homo sapiens
tgctcatcccggcagcaggcagctggggacgcccatgggagtctggaatttttttttctgggccgcttggttttccccagtagacagaggtgactcacaggctggcaggctaagtggctcaggggatcatgagagccccgatgctgcggtgcaaagttccaggaattcagaaaccaaaatgcctggggcaggagaaagggcaagacttagcccccaccaggaagaccagggagaaaaggtaactccagctccactgttgaggggacactttggaagaaatcgggatgtctacttagctgctagtaataataacaataaaaacaacaccaccaccagct

SEQ ID NO: 147941 - DNA, 334 bp, Homo sapiens
atgaggaactggtttgtgactcaggaaactgaagtcacagagttcttaagttctgagaaaaatgggtcactgtgtttggtgctggacaggacacggggcctgcaggcgaggagccaggcctcaagggttcagtgagttgtccaagccagcgtgactaagggttccgctgggacctctcagattaacttccaagaaggaaagccgctccttgcgcatacactttttcttaactctccccggctggtaaactcaggtggcatcgaggccttggcgtctaccccttggtgacacccccatcaggataacgccttggctgtgtctccctaagacccta

SEQ ID NO: 147942 - DNA, 187 bp, Homo sapiens
cctgttatggcagtggcatgaacatggctcagccctaaggatggcatgttgaaaactcaaaactaaccctcctcccattttacagaggaggaaatggtggctcagagtgtgtgagggactacaaggacagggtcaatgtcttgttcatgtatgtatttcctgacctccactatgtcctgccattaaa

SEQ ID NO: 147943 - DNA, 393 bp, Homo sapiens
aagaatgtttttctcaataataaatacagccatctgatggggcagggacaagcagaatggcatagataatgacaagactgaaaataaaaagtgaagtcagatgactaaaggacccaccaaatattagatttcagagcttgaattttatccaatatgtaatggagaattattgaccttttaaagctggaaaatgacatgaagaaattagtttgcgggaaatatatctgggtagtagaagcatggaatggtgaatagtgactggtgcagaaaacaatgttatctaggacaagagtcagaagatttttttaatgacatgataaaggtctgaaggaaacgtgcaaaatattacaaaggaagaatgggcagggcttagtgagggaagggcctctgtga

SEQ ID NO: 147944 - DNA, 310 bp, Homo sapiens
ggagtctgtgataccccaaatcagtgggtcacaggtgttggaatttccaaagagtccttcttggttttctgggttctggaaatgggccaggaaaagccaggataaagctatgttccccgacctcgaatggaagcttctggctttctctaaatgggtgctccagaaagacaaatgctggggagaagatgatattctttgatggtgatcatgctttatgatgatctttctccttttgtacccacatgtctaatctattctaagtctcaagtgggtttttccttttttcaaaaaatttttttggagacaaaga

SEQ ID NO: 147945 - DNA, 368 bp, Homo sapiens
cttaaaagaaactaaccctgcctgacgccttcaactcagacttctgtcctccagattgtgagaaaatacatttctgttatttaagccacccaatctttggcactttgttatggcagcccttcctaacaagctcatacacctttatattatgaaacattttagagaaataataaaatggacctctatatgcctgtcacatggttgccataattttcaatgtttttccattcttatttcatctatccctcaacttttccccctggattatgtaaagtaaatcccagatattatgatattctatccttaaatacctgagtaatatttgaatgctcaaagaggacagctcatatttattgtgggcaaataca

SEQ ID NO: 147946 - DNA, 510 bp, Homo sapiens
ttctacatcccacctcctcgcctatgctgaatgcaccatcacacagggattacacagtgaaaatgcaaacccacgcctgattctaaataagagaagggaagaaaatccaaaggaacactaagaccaagaaaaatacagacagagaccagtggaaactgacacagagagacagatatggagagagaatgagacagagactgagaccaagagagggaaagaagtgggtggggaaacaggagataatagggacctagaggcctatggaggggtggggaaggggagcaagagatatagatgtgggaagaccaccaggaagggaaagagtggagtgggagactgaggaggaggaggggagagatgagctggggtggaggaaagaagggagttgggaggggaacgtctcaaggatgggaagggagaaggggaggccaagaaaggttaaacattaaaaaggcatcagcagaagctttctgacatgatctgcctttccttttgcttcccagtgcactc

SEQ ID NO: 147947 - DNA, 389 bp, Homo sapiens
ggagacctgaaaacgttcccatgtcattcagtcaaacttttacagacacctccatttaaaacattgtctcccagagaggggagagcaggacagagaggttaagtaaggtcacacagccaatagagaggagttggaatttcagtccaggtttcccactccaagaccacagagaaggagaagcaacacagccagagtggagacaccctcaagcgagcgctggggatgggaaactggtccctggggcatcaaacaggaaacggctggtgctggggccaagctgaaacccaactgttgccaaactcgcagccctgagacaagggctttaaaccgattcagcatcccccagagccgggctcagctttccagctggcttaggctacactgggctg

SEQ ID NO: 147948 - DNA, 299 bp, Homo sapiens
atattgaactgagggccagatgaaagtcacacaggtggactcggatgccagttcctaagtcgggtggcaccataattatgtcttttccaagagtctcttccttgcgatttcagatcatcctttgattattaaccaaaattgacgaaacagtcccagggagtggcctgatttggtcagtgtaacttttcctgggatctgcacccagaggaggtggcatgctccctgttgagagggaaatgctgcctaaagatgaaggagctgccgcccaggctcaccatctggccaggccacagcagcag

SEQ ID NO: 147949 - DNA, 193 bp, Homo sapiens
tggacagtctcaagtgatttcatttacagagactctcacaattgtgacaatgagccatcagttgtgcttgctaatcaagagtagccgagttataatttggcaaccacctttgattgggactcaccttttacttgtctcattccccctttccgttatttctcctaataaattagcagctcatcagcctttgcca

SEQ ID NO: 147950 - DNA, 533 bp, Homo sapiens
tcaggaggccgaggcaggagaattgcttaaacccaggaggtggaggttgcagtaagctgagatcatgccactgcactccagcctgagtgacagagtgagactccgcctcaaaaaaagaaaaaagaaaaccttaacccttacctagcattatgtataaaagttaactcaaaatcataaatctaaatgtgagatctaaaactataaaactcatggaagaaaatgtgtgaaatgttctgtgagatttttagccatgacactaaaagcttgatcccatgaaggaaacagataaactggatttcatcagcgtgaagaactttataatatgctgttgaaaatagcccatatgaacaataggtgaatagataacctgtaagtccataacatagggtagcattcaataataaaaagataagctatcaagcaacaacaagacttgaaggaaccttaaatgcatattgctcaatgaaagaagccaatctgaaaaggttccatactgtatgattctaactatagaacattctggaaaaggcaaa

SEQ ID NO: 147951 - DNA, 356 bp, Homo sapiens
tcacgcccagtccacaacagtggctgttcaccaccctggtgatttgagagtggaggtgggggcaggcagctggttagctggagggcaggtatcacatcaggtgatctagcagtgaggagaggggaagacgagggaggttgcagcacagctgcaaaaggagcaagagagcaatgacagcagaaggctgaagaccagtgagagtggccagggttgcacaggcagaggcttggatttctgcctgccatttcctcttgccctcttcagggtctttagcacagcgcccacctctcaatggacttttattgataaggaattctattctttcagactttcactcttcttgtgtcagaaacacc

SEQ ID NO: 147952 - DNA, 258 bp, Homo sapiens
tgtaacacacaccagtaagtccccataggaaacttttgctatagaagagtctgaagaatccctcattagagcttctaaaagtatttcaggcaggacggtcaatgcgaaaatgaatttgtcaccaaagcagttgtgctacgttgttttattccaggagctgtaattttaggatgttagtattgtgggtggatgtgaaagaaatgaaattatttttccctccacccaaaatcgtaccccagagagcaccagggttgtaaa

SEQ ID NO: 147953 - DNA, 809 bp, Homo sapiens
ctctcagagtgcaggattacaggtgtgagccacgcgcccggactaaggtgagttagtctggacacaaggatggaggactgagggagtgggcagcaaggctgctcagcatggggcccgccacccttgaggcaccacttcagtgaccccttcctgtgcctagaaatgaattttcagggccagagccttgagtcggcttccttccatctacctcgtctttgatctagaaactgaggagggtggggtttccagccttttaaggaaaagaggggactctgcttaggaaaaggtctgactgtctcacgtgtagtgattctaaaactgagcgttggggtcctgtggtgggtggcagcttgaccctttcatttcctcatcgatctttctcccaatgccgttagcattcatcgatgactgttgtttgaattaattatttcattagagattgttgattcttctctcttaatgagatggcagtgagcatgagatgagatttaaactgaccagggtatcggggaaaactgacaacattgatacagcttaggggcatctacagaattcacagaaaaaagcaaagattggcttggctcttgcagttactgtgagcgcctcctgttattaaagttaattaccgtttgcacggtcttctgtggatgttaccctgtcaggttaattttgttatttaagtcttgagttgcagcaatattaaattctgtgcatatgtgctaactctcttttttatgtaacttgggtgcctgttcacctaagttaggagagaatgacctaggtttaggaggtagaattccccgtgatgg

SEQ ID NO: 147954 - DNA, 362 bp, Homo sapiens
gcttaggctactccacaaacagctctttcatctgttcttgcccacaagaatcagagaagtaggttggggttcaggcatccagctcagaacatccaaggtctgccagaaagggctgaacttctgtcctccctgcaccaccaaaatccccatgctgatcgaggagcaaatagatgtcctcccttccctgctcatccttagaggagaacgccaagatccagagaccctgggacgactgtggctgtctttatcactcagccaaagagagaacagcgcaggacgtgagtagacttaagccgccacagctcagctgacagaggaccacttcctttttctctcttttatctgtttgtggaggtagcact

SEQ ID NO: 147955 - DNA, 466 bp, Homo sapiens
gacctcaccagtttccttcgtataaaatcctctgcaagtgtgtgtgtgttgaacataaatgtccgtagggctctgcctttaaaagcaaatttcctctagtctttctcctctggccaggtcaggctataggtctcttatgcccaatgactgtaacagccctaaacatttgtcttaaaaaaggcttttgcaggccgggcggcagtggctcacatttgtaatcccagcactttgggaggcgggcggatcacctgaggtcaggagtttgagaccagcctggccaacatggtgaaatgctgtctctgctgaaaatacaaaaattagctgggtgtggtggtgcgtgcctgtaatcccagctactcgggaggctgaggcacgaggatcgtgtgaacccaggacgtggaggttgcggtgagctgagctggtgccactgcactctggcctgggcaacagagcaagactctgtcta

SEQ ID NO: 147956 - DNA, 694 bp, Homo sapiens
tattttcaaattttctctttttttgtaccatgaaagggggactctggaggaccactggtttgtagaagaggtggtggaatctggattcttgctgggataacttcctgggtagctggttgtgctggaggttcagttcccgtaagaaacaaccatgtgaaggcatcacttggcattttctccaaagtgtctgagttgatggattttatcactcaaaacctgttcacaggtaggtgaattctttcttcctcatctcatcctaactcaagggtagttactctgctatgttgcgatattatcagaactaagctttagaacaaagcaagaatgaggctggttttaaattcttagtccagtgtagatacttgtctctgaaaccctgagtacagaaatctgtcaatataacttgaacaaaccaaatccctgtataaaattttcatgagatgcctttttgcatttacgagattttattaatagaccttgagaatagactcatcaggggattctttcttcattttttcagttggcatgatttttctctgtactacttaagaataccaaaaataaatcactcatctcccactttgcctgttcaaccttgttaacttccttggcaacagtgaaaaaatgagggaggccttggagagttaatttggctctgtgacactaaaatctagattaggaaaatgtgggcctg

SEQ ID NO: 147957 - DNA, 351 bp, Homo sapiens
ggaattcgagaccagcctgggcaacatggtgaagctccgtctctacaaaacattaatacaaaaattagctgggtatggtggtatgcacttgtggtcccagctactttggagactgatgtgggtggatcgtttgagcccaggagttggaggctgcagtgagctatgatcgcgcctctgtgctccagcttgggtgacagagcaagactctgtctcataaaaaagaaaaagattgttagccaagaacagagaatgggaagaaaatgaattctggaagggaaccccccaagtaccatctgacccaggaagggaactgtcatggtgagaggcctacacttaggtgatggaggaaac

SEQ ID NO: 147958 - DNA, 374 bp, Homo sapiens
cttaggcccctcagctggaaaatgggaaatcatatctatctcagcaagttgttcagacatactctggctaaaaggactttatttgcccagtattcacttattcattcaatccacaaatatttataaattgtagtcctcaaaaagcatagaataatcattcccataaaacagaacaggaaaataaaatgatgtaaacatgagttaaatgtaaatctcattcaacaaacatttatggagtttcttctgtgtactaggcaccgtgctacatgctggggacaactgcaaaggtaaatatgccagaatccttgtttttgaagttttctgtcaaatggatgaggagaaaatgaaagagatcacattgtcaatgggtaagt

SEQ ID NO: 147959 - DNA, 412 bp, Homo sapiens
tccaaatcagtttggcagtgagtaaggttaggaactattcacatacattggaataataatagcagcagcagctacagggtcagagacagatctttgagaggccataagcattgaaaagattgtggtacctatcacacaccgtctaaaataaaacaaatattttatttatgggaaaagtgttaaggtgttgataattccaagaaagcttttatttgtcctacaatcattactttgataccttttctgaaatcctagagctgtccccactctgcccatttttttttctcattatggtgatgtctctgggttgctggtgacctgcgtaactattgggaaatctagtttctcaaaacttttagtttttttttagacagggtctcactctgtcactcaggctggagtgcagcggctc

SEQ ID NO: 147960 - DNA, 438 bp, Homo sapiens
tttattaaagttattattacccataagtaaatggtaacaggttttgaattgcatgagtattttcacatttcatatttccttcttcaacacttttctatagtaagacccatagtcaagttaaagaagccttaatgtaagagataacattagacataaaggccaggcgcagtggctcacgcctgtaatcccagcactttgggaggccgagtcgggcagatcacaaggtcaggagatcaagaccatcctggctaatacggtgaaaccccatctctactaaagatacaaaaaagtagccgggcgtggtggtgggcgcctgtagtcccagctactcgggagactgaggcaggagaacggtgtgaacccaggaggcggagcttgcggtaagcccacatcgcgccactgcactccagcctgggtgatggagtgagactccgtctc

SEQ ID NO: 147961 - DNA, 392 bp, Homo sapiens
gttaactcaggtttctgctctggggatgtctgggcacccatcaagctggccgcgtgcacaggtgcagggagagccagaaagcaggagccgatgcagggaggccactggggacagcccaggctgatgcttgggccccatgtgtctccaccacctacaaccctaagcaagcctcagctttcccatctggaaatcaggggtcacagcagtgcctggcacagtagcagcggctgactccatcacagggtggtgtagcctgtgggtacttggcactctctgaggggcaggagctggggggtgaaaggaccctagagcatatgcaacaagagggcagccctggggacacctggggacagaaccctccaaaggtgtcgagtttgggaagagactagaga

SEQ ID NO: 147962 - DNA, 230 bp, Homo sapiens
atttaaaagatgagataaaaatgtaaaaaatgagatctacttgtacaggggaacatttaaatatatctcaagaagaataaggaaacagtaaagaaaaatccaacttcaccaaaacactaaaagagaacttacataatctctaaacaaaatgagcaaaatagtctctctaaaaatggcctcaaaaataagttggaagccgggtgcagtggctcatgcctgtaatcccagca

SEQ ID NO: 147963 - DNA, 282 bp, Homo sapiens
aatgcaacaatcccatgctctactaatgcacactttattgccgtgacagtgacattcatgaagggcagagtagaaccatcataatttaccaccagcagcagcagccacattgtctaccaaagggaaaaaagacacagcacactcctcctggccacttcctcccaagcaggtaggagagtacacattcaacgaggaaagccagagacaacaggcagccaacaaggagtaagtcaacctttcctagcaacactcaatgtcttcatcatgaatgggctctgtagt

SEQ ID NO: 147964 - DNA, 224 bp, Homo sapiens
acaatagcattatacctagagagtaattcagaaagagtagtatccttaaaacattcagtcttctcttttaggaactgtttaaatttacccaagtggactttaatggatttcaaagtttattcacacagttcccacgtacttattatcttacttttttcttgtcattatgaaaaggatttttcttttacttcctaactgctgctattgaaccttctaaaactagg

SEQ ID NO: 147965 - DNA, 751 bp, Homo sapiens
caaagaattctcatcaggttgatcaagagttgaaaagtaaagcactgttcttaaaaactgctctctagaaagatctgcaatggttttgaggactgccaagcaacaggaggtagaaaaatggataactaaataacctcatttacagaaaatatgttaggttaaattgcataggaaaagatagtatgggtctttaaaaaaaatggatatttataacaaagaaaggataaaattaataagtaagttataaggaatatttagaaaaataaaaacagtattctaaaagacaatacttatatctttctaatgtaaatcttagaaaatggtgagaatttcttgtatgctttatatttataagaagtaataatagcttttgaaataattccatattataagaagtcttttcttcatatgtacccaattccaaataagtggatgctggaagaaaatctgtaatttattttatttaaaagaaatgcagtatattaataaatacctattttttggataataaaataagcaacattttccagaatgaggtttttttttgcaacaaatgtgcataccaatgatttgaagtatttaaaagaaacttttctacttgaaaggaaccaagatgactaagtactaattttgcggaatctccaattgggaggatatctactgctcagaaaagcaaactaaaacaagacaagaaattaaaattgacaaaggagaagttccatataatctaattcaaaatcaaatgagtttt

SEQ ID NO: 147966 - DNA, 322 bp, Homo sapiens
tcacaggccagtggggacgggcaggctatcagggatggcaccgggatgagcaactccttatatggacaacaatcaaattagatccctcttcacagtgtgaactcttcctggaacatgccagggtactgaaaaacgaaagctagtatttatgctataatgtgggctggcccgtgctgcccagcagaactctcagctgcctctcagctgtctgtgttgtccagggtggcagcctctggctgctcatggtgctgaatggcacttgaagtgtggctcatgcagccagggagctgctgatttaattgaactgaaatagctaccctgg

SEQ ID NO: 147967 - DNA, 308 bp, Homo sapiens
tttttttgagatggagtctcgctccgtcacccaggctggagttggcatccacactggacagctgcactgtcccttctccttcactgtcccgtgcatgtagttgatgtttgtaatcccccaacagggcctgacgcagaagtctgtggacagtggctgtagggtgtatgaaagcactacagcctgccccatccccatagtgcgggccactacccaccacacctgccagcagtgggctggctccgggctggaagctgccccaacaccatgcccaaccctggccttccccagccagcatcccatggaaggct

SEQ ID NO: 147968 - DNA, 1110 bp, Homo sapiens
tccccggaacattggaggggaatgtggctaggccagcctgacgctgctgcgtcaacctctggctcgttctcggcctctatcgcttccagggacccttctatctgggctcagctgacccgccccgcctctcggcccacgtgccggcagttctcccaggctggggctcagctgcgctggagactgggatgggtcagctcagtgtctctgtctgtttacaaaggaggaacccaggtgcactaaggtaacttcgctactctgctagagtctcaccccgatccctgcgccatttcccttccacctcctgcactgttaagccttgggctgtgagatgggccagtgtagcccggctactgccgtgttccctgggtcagggacagctgcctcactgggagcgccttagaaatgtagaatcttggccaggaatctggagcctgtaatcccagcactttgggaggccggggtgggagaatctcttgagcctgggaggtcgagaccagcctggacaacacagtgagaccttgtctctacaaaaaataaaaaaattagctgggtgtggtagcacacgcctgtagtcccagctacttgggaggctgaagtgagaggatcccttgagcccaggaggttgaggctgcagtgagccatgattgtgccaccaaactccagcctgggtaacaaagcaagaccctgtctcaaaaaaaataaaaaagaaatgaagaatctcaggccccaccccacacctgctgaatggcaatctgcatttgaacaagatccccagagattcctgactgcattaaagtaggaagtagaatcactggcttaactctgtgccttagtttcctcatctgtaaaacagggctgctaaaagtgcctcccctgttgggtcgatgtttacgtgcatgtagttgatgtttgtaatcccccaacagggcctgacgcagaagtctgtggacagtggctgtagggtgtatgaaagcactacagcctgccccatccccatagtgcgggccactacccaccacacctgccagcagtgggctggctccgggctggaagctgccccaacaccatgcccaaccctggccttccccagccagcatcccatggaaggct

SEQ ID NO: 147969 - DNA, 1332 bp, Homo sapiens
gcttcgggcttccaaagtgctctcattatgttggctaggtggccttgaactcctaagctcaaacgaggtgagtagaagaataaaggatggtacaataggcccaccacctgtttttataaataaagttttactggaaggtggccctgaccccactcagtcacagtgctgagtcatgcttctctttagggcagaggtcagcaaacctttgctttgaagggctggatagtaaatattttaggctttccaggctgtaatattacagtctgtgcctgaactatttcactctgctcttgtagcaaaagcagccacagacaataaggaaaggagtgtgggcaaggctgccttccagtaaaactttatttataaaaacaggtggtgggcctattgtaccatcctttattcttctactcacctcgtgaacgaactcctcttcatccttcagaaccccccccccccaccttttttttcttcacgatggagtctcactctgtcgcccaggccagaatgcagtggcatgattgcggctcgctacaaccttcacctcccagattcaagcgattctcctgcctcagcctcccaagtagctgggattacaggcacccaccaccgtgcccggctaatttttgtatttttagtacagacagggtttcaccatgttggtcaggctggtcttgaactcctgacctcaagcagtccacccgccttggcctcccaaagtgctcggattacaagcgtgagcgaccgcgcctggtcttagaacccctcttagatattcctactcccctaatgtcttctcttgtcctttaggataatcactcctgctgtgtgtcttttaactgctgcgctggattcacgtctacactcacgtctgtttgcataccagtctctcctgcctggctttgggcctcatcttcacaccctcagccattcttggttgactcatgccgcatttatggctcttgatccaagcccctaggtgggctggcaccagcatttctttttcttgcaaccttcagaagcaaatgcactttttaggaataaacttggccgggcacagtcactcatccctataatctcagcactctagggggcctaggcaggtggatcatttgagcccaggagtttgacaacaacctgggcaatatagtgaggcccccatctctacagaaaatacagaaacattagccagcatgcatcgtggtgtgcacctatagtcccagctacttgtgaggcagaggtgagaggatcacatgagcccagggagatcaagtctgcagtgagccgtgatcatgccaatgcaccccagcctgggaagtagagcaagaccctgac

SEQ ID NO: 147970 - DNA, 555 bp, Homo sapiens
gtacatggaaccatcagaaagcaaagatgtctctgtctcagctacccatgtcataggtcttggctccatgtggagcatcattgggaacctgctgttagcatgtgtagcctacacacgtgccattttattaccctttgtggatgtgcttgtgtgagggaatctgggtgtgcacagaaaagatatattgaagctgatggcagactggaacggtccttttccccttggagacactgaataaactgtgtattgtatgcctgcatttccacatgtcaggtttggaattctctatggcatcatgttggtgctcagaaagttttggattttggattttcagattagggatgctcaacctgtataagaagccagctcacaaaaaaatagccttaaggagttacttttgggcaaataccattattattcttaaaaacaatacagtagcaaataaagggatgttgctgaccttgcagttaatgttaaagctgcaaagatatcgcacaaataaaagtgttttacttttgaaaaaaattgtcatatacccactgtttttatatttgt

SEQ ID NO: 147971 - DNA, 252 bp, Homo sapiens
acgagagaatctagagaagacgcgggggaccctcatctgcgtgtaaggcataaagcacggactccgactcgaagcaaagaaacttatcttacctgccagttgaatgccccttgtagctatacggtatgtaagagattgatttttgtatgtttgactgctacagattgttcagagttctccatcactcaccacagaataaaccagcattgaatcatttcattaagcatgcctgaactcatcttgtcagtttgt

SEQ ID NO: 147972 - DNA, 228 bp, Homo sapiens
tgtgtttgccaagctatttctaaatctaaaggctttagtccgactcgaagcaaagaaacttatcttacctgccagttgaatgccccttgtagctatacggtatgtaagagattgatttttgtatgtttgactgctacagattgttcagagttctccatcactcaccacagaataaaccagcattgaatcatttcattaagcatgcctgaactcatcttgtcagtttgt

SEQ ID NO: 147973 - DNA, 415 bp, Homo sapiens
  misc_feature (199)..(199): n is a, c, g, or t
  misc_feature (260)..(260): n is a, c, g, or t
ggagagttggaaaacaggctttctattaatgaagaaagagatttctcaaaaagggctgaggttttcccacctggatatggtagcacatgactaacattcaatcttccctttttaacaataactctaaacaagagacacaaacacaaattctacctgtgatgaacctaggagacatggaactgtaaaacatgaagtaaantagagaggacaccaaaaatagcagagcccagaaacagagagaggatattctttggttgctngttttaggaaggagtgaaaaaggtacactgtaaagtgaggagcaacccagaggtgtagaatcagaatcccttactttcaacaatggaaatgggctctaaaatgcagtcaacaatgtctctttggaaccagctgtattctgagaaacaggtgaaaa

SEQ ID NO: 147974 - DNA, 284 bp, Homo sapiens
ctgccaccacgcccggctaattttgtttttgtatttttagtagagacagggtttcaccgtgttcgccaggttagtcacgatctcctgaccttgtgatcctcccgcctcggcctcccaaagtgctgggattacaggcatgagccaccgtgccaggctgaggatctaatttctatccaaacacataaatgcataatctcccactgaatagaagaaccatcaccaatagaaagactgggatcataagtcttttcagtggaccaaggggtaagagggtatttgtctca

SEQ ID NO: 147975 - DNA, 459 bp, Homo sapiens
gatgtgttgggagagaggataggtggtgcgtgtttgtcctttctcagtggcaaactcactaacttcctaaggacaagaactccgtcttggacttctttatattctctcatagtgttaggcttaattctcgggacaaagtatatgcgcacaaatacttgatcattcactagaaaagagtttcagtgtgttcgtcgagtaataggtttaaaaagacacacataaagtctacatggacttgttttccaaattattttcaaaagcataatggtaagatttaatttggttgtgcgtgacagaacacttgaaataatgacttaggtaagacagaagtttccttctttccccatatgaaacaagggcacaggtagagaggccagggtggagtgggaaccggggctgcttctcgcttctctcctgctgctctaccatcctagcctatgatttctttctctcctctcc

SEQ ID NO: 147976 - DNA, 174 bp, Homo sapiens
aattacccacaatgtcatcaatctgttaataaaacaaagccaaatgtattagaatttaactgcagtaagaaaaactttgcagtgtttcggaaggaagaagtagaagaaggatatttatagggctttgggatctgtgctgaaatggtttaaggtgggctttttaagacaggcagc

SEQ ID NO: 147977 - DNA, 475 bp, Homo sapiens
gacttggtaggtcttcatggatttgatgtggcagtaggttaagttttaaaggaagtaaccatttagtaaatggtgaagagcaggaagggaatttcaggctatactgtactttgtaacttactttgtttttcatgtttcctttgaaattatttttagtctcattggtctaaaaatgtttagtgttgttagggggtgtgtaaagaccagaagcttccatgcttttgccatagacactacacagcctagatgggttaatggctagcaaacaccaaaactctcaagtccattgagttaaagaaacttcttggggatactgatacctgcccaccctacctcacaggttttctgtaaagatctaatgggatgtatgaaatatttttaaagacgtaaaagtagtatacaaatgtagaatggttaaaaatcacatggctggtggagaattgcataatgtataattacactgaagggaaaattt

SEQ ID NO: 147978 - DNA, 316 bp, Homo sapiens
gaggtgaggagctctgggtctgatagcagaaccttaaatgctggctattcatttccgtttccacagttgcaagcccagttttcagaaaaggggcagaaaaagaaggaagaaaaagaaatgcaaagcccagcacctccggccatagcaggttctgagtgcttcagatactgagggttcatctctaggggtcttagtttacagcaaagacttggcaaggttggcttaggtggttaagctctcgcctgctaacagacacctgatatttttctccaggccccctctcatttatttttgctcactggtacttctccaaacc

SEQ ID NO: 147979 - DNA, 214 bp, Homo sapiens
acagggcttgtcctctctgagctcagtggtgcacctgtgaaaagggtgggatttggggccccttccagctctgacatgaggtagtttctggtccctggtcttggctacccttacagaactgctcaggccccagaccatccacgccccaaaccgcccgggctgcaggtggaagttgagaaactgggcctgccctttcctcagcacgcctgacccc

SEQ ID NO: 147980 - DNA, 140 bp, Homo sapiens
aaggaattgatattggcagttaacctggggaagtcctcataaattacattttatgttcacttaaataaaacaagagagacagcactgcaacacagatcatattaattacattttacacacttcaaatgagtaattataag

SEQ ID NO: 147981 - DNA, 605 bp, Homo sapiens
aacttcatactgagaaagaatattagcactttggagacccttcttggtcttcagtgttaaataaatgatttatcttctctttaatccatttcagttagccgcaataaatcaattaaggacattatatgtaacttttaggtaaaagtcaattctccagactcatatctagattaaactggcatatattcatccaggtgggatccataaaggtagtattagaccaccgctctcaatgaaaactaggaaaacctgtttgaaggcagcaggaagctgctcgggcaacaataagtgcagacaccaacctttcagaaaagagagaatcttgtacaaataagctgcttcaacaactttttcccaggggacacttgctgatgttaagtatgggcaggaaacgggattcaagcattaggcccagaaatactgttgccgaaagtcaaaaaacagcacagaggttttggtggagtcctacctagatgcatcaagcatgaggagattctcccctcagttcagttgtttaatcctggggctacctgggatgagaaacttaaaacctaagtagaaaatctttgaaaatcaggaatggagtttgcaggacaaaaattaaa

SEQ ID NO: 147982 - DNA, 447 bp, Homo sapiens
cgtgatagtcagactctagagtatcccccggctccacggaaccctgtgcagggaagacctgagctgcgaagccgggggttacactgcgggacatggtggggcaggggccccactcatcaccagcagaagcaaactcagaatcaccccaggtggatgtctacagcctggccacatggaactccatggaaaacacgagctccgcaggtgaggccacagcacaatgtcacacaccccaaggaaacgatcagtgccacacgagacgacagcatgcagatggagcagatctgccatctgagcatgtcggagacagacagaaacctccaaggaggaagtaaaacccgaatcaaagaacaggagagagaaggaagaatggggagatgaggcgcgggcgaggaaggtccacacacacaggcgcagggacccttcagccctgcagactgtgccatg

SEQ ID NO: 147983 - DNA, 326 bp, Homo sapiens
gtgcaatcccctccctcctaccgctttcctagctaagccctgctagccccacaaatcagaatctgggtttggggtgctggagagatggtgggccccagctcttccccacatagcccacgctgctcagggcacggtctccaaccaggctcgagattgcctgcctgcccgctgcagccgcagggccccaccctgtggaaaaggaagcttcccccactcaactgcactgtccttttctgctgtctagtctgtgctaagggacactacttgtacacttttcaaacggtgccctaaattggaagagaaggaggggccaggaacacagccct

SEQ ID NO: 147984 - DNA, 455 bp, Homo sapiens
ttcttaaatgctcttttgagatgctgcatgcatgttatattaactgttgaaaaaatagacaactgaaaataacttgcagcaaatcaggaaaatgttaatggcatagtaacttactctagcctgtgatatctaggttcgaatatcctccgtgttcaactggatgacggattaagggccttctaaattagagtatctacactgaactgggatctatataagtgattcttagaatacttgggcagttcattgtgagagcaaagaagagcttttaggagaaaattgattatatggaaccgcatatttttggaggttaaggctctgacagaacattaaggcataagacctagctgatgttaagaatatgtattcatttatttatttattatttttgtagagacagagtcactatgtttcccaggctgatcttgaactcctggcctcaagtaatccttcta

SEQ ID NO: 147985 - DNA, 539 bp, Homo sapiens
tctacactgtaaatcccaccacatcctgagcccccggtggggaggagggactaggaggctttgcatctctatcattctcagttgccacgggtttctgcaaagtaggtatccaatgaagagcctgtggcacccaagacagctgtgttttagctgctgtctgtgcattcatacttggctttaggtgaaagtgaatctcttccagaaggttgagtagacttcaccagcacttacctctgcagttttcaatgtcattttggctcttggattaattctgcttcagattgtggaaatcttaatttccaaggtgatcgtttcctatgaagtactttgctgccaaggaaacatagcttagaaaggtccccatgctgtggccaccccctaattccaagcaacgtggcccctactgcagtctccctaacaccctttctgcagggaggctcctctgagcactgttggcccatccttgaccttcacgtggctttgggtgtcttactgaaccctgcctaggtgtgttcctactggctgtggggttgggccgg

SEQ ID NO: 147986 - DNA, 262 bp, Homo sapiens
cagtctgagaaagatgactgaccatagataaccttgaccgtgttattcaccaaaggaagtatatttccaaaacagcccaacatgggttacatgagggccgtgagaaatgtaagctcctccaagagcgtgcagccctcactgttttcacaattgtccatagtcaagacaggaaaaagtgagaaagaaaagcaggacttcatactccagtgagagcgataaactttgacttctggacagaatatacagaggtcaagatgaatca

SEQ ID NO: 147987 - DNA, 469 bp, Homo sapiens
ctttctcttgactcctaccaatagagtcctctgggaggagtggtttttgctatagtatgtggaaccccctttgtcagtttttgtagtgtggtagatgtgaaatagtatcttgctgacactacaatagtatcttgttgcatttacttgatttcactctaaaaatgtaaaatctgatcaattaaatgtcagacttttaattttttatcttttgtgtttatccaccattgtgggagttttattcgtcatctctctgtaccatgactagagacccaagatttaattcagtagctgaagctttcactggtagctcttgtcagcagaccctcagggaaatctattatgccctgtgctatcagcaccaagtatctagtcattgagtcggaaaccaagccttttgtccactctgcctgaggaactgaattagtagccctcacccgtacattgttacctaacctcagaaaacacatca

SEQ ID NO: 147988 - DNA, 428 bp, Homo sapiens
gcctctcaagtagctgggactacaggcacccgccaccatgcctggctaatgtttttttttttttgtatttttagtagagacgggctttcaccgtgttagccaggttggtctggatctcctgacctcgtgatccgccagcctccgcctcccaaagtgctgagattgcaggcgtaattaaatgccttcttgaggacttttataccttcctcttgaagacataaatccagagcttactggtggttgtctgaaaaagatcacatcttgtaataggagtcatacataaatatttctgagatctccctcatacttaaccaccgtgcctggaaaatgcagacaactgtattcagtaaatggtatttgaatataagtaaatcaaaagtgtcgtttccatagattctgtagatgttaccacttagaataattacctg

SEQ ID NO: 147989 - DNA, 356 bp, Homo sapiens
gttacattgctgggcaacatggtattaaaataagacaggtcaaatttgagaaatctgtgattctacaggttaccctacaggtaactgactcaatgtctcagtcctaaatttccaggagaacaattctggtataagcacctggatttagaagctattttcacctagacaaacatgagtacctaggcaccattccattattagaagttgagcatagatgctaatctagaaaagagagatgggttgtccaggtgggcaacaagttgcagttttgatcaggctgctgctgctggtggtttatccagctacaaaattccaggatacacagtttgcctctttctcccctacccccagctggc

SEQ ID NO: 147990 - DNA, 323 bp, Homo sapiens
cacctaataccactgaactgtacactcaatgccactgaatgacacactcaataccactgaactgtgccctcaataccactgaactgtacactcaataccaccgaactatacactcgtaccactgaactacacactcagtaccactgaaccataccctcaatgctactgcactttaccctcaataccactgcactttaccctcaataccactgaactgtacactcaataccactgaaccataccctcaataccactgcactttaccctcaataccactgcactttaccctcaataccactgaactgtacactcaataccactga

SEQ ID NO: 147991 - DNA, 901 bp, Homo sapiens
gctctgacagagccacagtgaacattgcattccatcatctgggtatctccaggaatgtatgtagctggatgtctggcttttcatctgggtttcacgagcctcctgcagaactgaaaccatgtgcaaatcagttctcatacttgctctcctgcctccttcctattgtaattttttcttcccaccttttttattgttactagagaaatgatgaagaaaaagaataggctggagagtcactcaaaattttgttttcctcaattaaaaagaagtaatttagaagttactcaatgatgttttctttaattaaaaaaaaaagtagtttgggaaagcagaaaattaatgaagacagaaaacacaggtttcatgaaaaagttcagcatcccaggaaaggagcaaagagaagtctgcagatgagagttgctcagtgtcaggactcagaaaacaataccccaagataatgttcaaacctgagtgctttgaacaaaggatattgaaagacctcagaagagggcctcagaactcacatgtctctctgaccttctcctgtctctccttcacttccaaagcatgatctttggccaggggatctctctgggattcccttatctgcctgagggatgtacttccaaaagaaatgtgactggcatgacctcctccctaggaatctcttcaaacagccgggaaagactggtcacctgagaggagattggaagtcctcactgcactcagaaaggctgttgtccattcttctagagactttatctgaataacaaggcaacttttgtttaccattcagttcctcccctttcctttctaacttgtcaccacctcccccaaaagcctcaagcctccactcctacaagctataaagacttcaaccatctggcttctcaaaaaaaaa

SEQ ID NO: 147992 - DNA, 291 bp, Homo sapiens
ccgcccaaaaaataaaaaaaaccacgaaaaacacacacaacaaaactacggcacttcacttagtgactaggaccctacctttaccacctgcctcagtagacatactatattacacgcttttggctggcagactggtaattcagtatcacaatgcatagaggtgccaggtaatatcagcacacacctgcgtaatttttcaacacctccctttcctaaaggtagaatcaaaaccctccctgcctactacaccaaaaccaaaaaacaagaactttagctctttcatcctctccc

SEQ ID NO: 147993 - DNA, 250 bp, Homo sapiens
agggagggagcaggaaggggtgagtctagactgaggggctagcagcagagcacacgcgtcttactagagtctgtgctttcctgagatggtcccctacagaaaacccaattttctgttaatcctcagattcctgagccaaactattatttcactgtgaacagagaaatgggatcatgcgaggaacttgagaaggatatgtgaacagattacagtgcaaacagcaacttgaagtcaaatactgatatgaaaa

SEQ ID NO: 147994 - DNA, 484 bp, Homo sapiens
tgccttccctagagtctctcaaatcttaactcattccagcatttattcaagtgcccaaagcccagagtcttatctgagacaagtctacactcccttctgcccatgagccactgaattatatataaaggaagtttactacttccaaggagcaatcattacacaggtgttgggtaagcattcccagccaaaaggaaaaaaattgccagaaagaagctcaaaacacagatgggacttacagaccccatgcaagtcaaaaacccagcaggccagtcattgaatcctacagctcccaaatcatcttttgtgaatctataccccacatctggagcacaggggtggatggctgtgctcccaagaccttcagcagctcagcatctctggctgtgcagggtatatcccccacaggtgccctcatgggctgggttggtgttgagtgcctttgacttttccacactgagggtgccagcagttggtgcatctatga

SEQ ID NO: 147995 - DNA, 378 bp, Homo sapiens
aaattagacagagtggaataatgggtgttccaaggcagtgaggataggagataactttgcaaattttcaggattcccagtcctcaattctaaagtcagccagaggaataagaagcacagcaatgacacttttttttaaagcttaaaagaatataaataaacaaaaactaagaaaaaaatgccaaaagtcaatctctttcggattaaaggaaactcatctgtggtcataaaatcaaggtagtggctccctccgatgacttcttcagagatgaaggtgctggcaggacactggtgagtacctccgcacctgaaagcttcttccaaggccattttaattgcatccaaggatagtttgagttgagtccttactttggagaag

SEQ ID NO: 147996 - DNA, 267 bp, Homo sapiens
aaatatatttgctattgaatgaacaagtagaatgcacttatatattccagaatgtactgatttcgaaagagaaattgttctttactggtattcatgattctgtagtatattaataaatcatttggagattttagaatgacaagcaaatccttatcttttgtagaagctatggtgagttatctatgtatgcaatatgttgtctttgttgatcgccatagaatcatgtaatttaatttatttttggaactcacatatatgttattaaca

SEQ ID NO: 147997 - DNA, 476 bp, Homo sapiens
gtgatcctcctgcctcagcctcccagagtgctgggactacagacgtgagctacagtgcctggctattcactttttaataaaaggctttcctatatatgatctttttaatactcatttagatagccaaactaaagtcaaatataggatctaaggcatgtcttttatataatttgtgtgatattgtttttgttgttattgctatgttgtttggtttttactgtttctatgaacaatatcagtactaagatggtcaatactgagacactgtatcaagtcactgtggtatttagtattattaaaggctcctatatatcactattatgtaacagcctaagaaatccctgaagtacaacagggtccccttttttgtttgcaaactctaaatttaataaggatctatttaattagtccagaattcaaatacatgccaaattttgcaaccacatgggaggtaggcagaaagagatttgaaacac

SEQ ID NO: 147998 - DNA, 336 bp, Homo sapiens
tcttatttttttaaagctaaataatattccattgtttgtatataccacattttgtttatatattcacctgttgatggatacttgggtttcttccactttttggctattatgaagtaatgctgctatgagcatggataaataatctgtttgagtccctgctttcagttcttttggaattgctggatcagaagtggaattattagattatatggcaattctatgtttaaatgttcgaggcactgccatactatttttctttttcttttgagtcagtctcactctgtcacccaggctggagtgcagttgcagtaactcagctcactgcaacctctgcct

SEQ ID NO: 147999 - DNA, 567 bp, Homo sapiens
tctttgtagactcggggctgcctggctggacatcagcccccactgttcaccccagcctggtgcccactgtccgggcagccctagcctgtcccacatcatcccgcactctccccacccctgctattgccctgcatcgcgggggcactggcttagggaggggtcttggtccatgcccatgaagctgggctctcagagctagtgtggatgggagagcagcatcctgctagggccaccaggatgctgagaatttggccagcgagcggccgttctgtgggagtcaggccgagggccaccgttgggaaccaagacgtgtcctgcccaggcgcacggcatgtcccctgcatttggttctcaggaaggccccaccctggcctttgcccggaatccttaggctgggacacagatggctgggacaccccagcttggagctgcccaggaaggcagaggagaaggggaggacttggctgcttccagccacatctggacaacagaaggactgagccaccaccctcaccataggatgcctctgtgtggattggaaaagggaggagacagtggtgccttcca

SEQ ID NO: 148000 - DNA, 529 bp, Homo sapiens
tggtggggaatagggtctgggagattaactgaacacagtctgcaggaagagtgcgtgtatgttgatggaggactatgtcgagatatgtaacactaggggaggaaatatgagctttagagggggatactcagtacccctttgagtagagatattgaagaagtaggataggatagtgtcctgctgggaagattggtaagaagggctgcaaagaagaaggtcttcaacatattgaataaggtgggaggcagatgggcagaaagaaagtcatgagagagggcctgaccaaagtagtgtgggctgtccctgaaactttggggtcggacaatccaggtgaattgctgggactggtgggtgtcagggtcagtccaagtaaaggtgaaaagaggttgggaggagggatgcaaggggatggtaaagaaggcatctttgaggtggataacagaataatgagttgtggaagggggtgtcgaggagaggagagtatagggtttggcacaacaggatggatgggaaggacaatctgatttat

SEQ ID NO: 148001 - DNA, 392 bp, Homo sapiens
acccaggcgcgggggacacctctgaccttaagtaccccttggcgaccaggctcagggaagctctcaccgaggctcggttccatcagctcttcaggggcgaagagcaggaaccggagctacctgaagagcgcggctttccccggctcttcgggctgtggaggctgcgggctcgcgcttgttccgggacaggggcgtggcgcctgctgctggctcggctgcccgcgctgcactggctgccccattaccgctggcgggcctggctgctcggagatgcggtggccggagtgaccgtgggcatcgtgcacgtgccccagggcatggcttttgctctcctggcctccgtgcccccggtgtttggactctacacttctttcttccccgtcctcatctac

SEQ ID NO: 148002 - DNA, 594 bp, Homo sapiens
ctcctgcctcagcctccagagtagctaggactacaggcacccaccaccatgcctggctaatttttgtatttttcttagagatggagtttcaccacattagtcaggctggcctcgaactcctgacctcaggtgatccacccacctcggcctcccaaagtgttgggattacaggtgtgagccaccatgcccggccaagatctgctaaaattaattgtcatggttttacttctggtggctgtggaagctacttattttctttggatgtcattagatgtcttagctcttgaagtaagtagaactttaatgttgtatggattttgccattttgctaacactggtatgctccatgcatccacagtcccgctggaattaatttttccattcataataatttttgttataaacctaactgatggagcttctgggtatttaggtctacattctacttcaggttatatattctgctttcatttttttgtttgttcatttatttgttttttgagacaaggtctcactgtcccacaggctggagtacagtggcacgaacatacgaactcctgggccgaaatgatcctcctgcctcagcctccagag

SEQ ID NO: 148003 - DNA, 387 bp, Homo sapiens
agtctcgagtgaccagtaggattggagcagaaggaatgaggagcctgtggaatgaagcgagggcagaaaggacttgggtgtttatgttctggctggcttttctggagattcttctacccttcctttctcttccccagagctctttcccaatgcagtgttagtcattcattcaaaaatctttactgggccctagctactgggactctgtagattaatgagtctgggccccattcttaggactccatggcctggtgctatcaaggtttcttggggaagttgcatcgataaagtaggttgatgtaaacagttgtcttaatttgatcatcatagagtcaatttgctagagtaggaattttccactggaacctcccacaggtcacttttacc

SEQ ID NO: 148004 - DNA, 490 bp, Homo sapiens
tttccaggtcctgatggtttccacgtccttctcaggtgcccagcaccagacctgctaaaaggtcttagacacacaaggatctggtggatgaaataaggaatgaacagatgaccctaactccagttctgatgggacagtgtagctcagtggctaagagatatgcatgcaattccaggcgctgcccctcactatgtgtgtgatctcgagtgggtctcagcctcagttttctcatctgaaaataggtgagggcaggattaatgcataaagaggagagcgagagacagagacgagagagagagacagagaaaatatgcaccaacgcatggcagctgagaatgatgtttgttgcctgctccatctcagtctgttcgtgcagttcctcaggcaaaataccttggtgccctccttgacttatctctttctcttccttccctgccagccaatccccttggctctaccttcaaaataaacccagaatccaaccactcct

SEQ ID NO: 148005 - DNA, 326 bp, Homo sapiens
agtctgacattggagtcggccgggtcgatgcaggacgcgatcaggtggacgacgaggtggaacgagaagatccccccggtcacctggcatgtcaaggaagaacctggcccagggcctggtcagcctggcatgaggcgtccccgtgaggcccaaggtcccagaagaggcgtggccactggtcagccctgctcacccagccctgcacacgtgagcccagctcacccaggcctggccctgctcacatggccctgcttgtccagtcttgcacacatggccctatacacttggcccttcacacacagccctgctcacccagccccgtccac

SEQ ID NO: 148006 - DNA, 307 bp, Homo sapiens
cctgaaagaccctctccccgtatcgcctgcctgttctctaaaacttgtctcaacattatctccggcatgaaactcttcagataccactgtagctgggttgggcctctctgtctactacacattgtccaggattacagtgatttgtatccttgtcttggtctcctactgattggtaagttccttgaaggcaaaagttatcttagacattttttcgcttaactaaaacacctagcatagagctttgcatggtgtagggcctcaataaatgtttttttcaatgaaacaagttagtgtgcatgttttccta

SEQ ID NO: 148007 - DNA, 313 bp, Homo sapiens
ggcaggggctagatcgtggtgctccttgtgttctttctggagcttggccttctctctctaggcatgccattgggggtgttaaagcagggctatatcatggtcagatttacattttaggaagtgaatgagggggctgggcatatgctagctcatgcctataatcccaacactttgggaggttgaggtgggaggatcacttgagaccaggtgttcaaggctagcctgggcaacatagcaagaccctatatctacaaaaacatttttaaaaattttccaggcatggtagcacatacctgtggtcccaaatacttgg

SEQ ID NO: 148008 - DNA, 652 bp, Homo sapiens
acatttgcgtcttaaaagattgcattatctattatctttccaccactttaagattcatggtcagttatagttttgtctctccaaacacccaagtttttcataaatagttttttatgattcagttctatggagaaccttgtttagaattagtatctgtatttatacaaaatgattaactccttttggcattgttgatgaaatctgtaactggcatctgatgacaactgaatcagtgagcccatccgctattatttttggacaaaaagttcttaattggtctgatgcccttaaatggaagaagttgttagctctagagttgccaattgcgatttatcactatgggaattacaagttaaggaagtcagagtcagaagcgtgaaacagatacacataaagcaagaaaagtaggaatgagtaagggaaagaaaagacttctatttatcttttgttgctggtcttattcttaacattagatcttaagatattgcccgtgtcacaatacattttgatcagcctacttccatttgaaagcaaattattctaactcattaacttcaaaactgatcaattataatctctgatatgattgtgtcttcaagatacatacataataattgtgccttgggcatattacttgtgcccatgctataaa

SEQ ID NO: 148009 - DNA, 304 bp, Homo sapiens
ggtgatccacccacctcaggctcccaaagtgctgagattacaggtgtgagccgccaggcccggcctgacctagtttttcaggttaactttggaatggccttggctgaagggagagtccatcagtcggttggggggcttcgaattttattgttggtttgcattgtaaacagtcctgtggtatcacagtgattagctatgtcttacactttgggatcacattgtaaccacggcctccgagtaagtgtggtctcttcttatgacttcctggcaagaggtgtctcctgcagaaaggaagaagcgcatt

SEQ ID NO: 148010 - DNA, 382 bp, Homo sapiens
ctctgtggccttcctttgccacctttttcatggaaggctgctcattttcccacatcctgtggggactcagaagcgatcagcattgtcctagctcccctgatactttgctcaactctcctttgtacaaatgatctttgattcttatgccatctacctcttccttctgcttttcctaccaaatcctggttatcccataatagtgactgaggaattgactcataatgtttcttccactccaactcttaacatcacttgaaatgtctacactgggctgatgattctcttaaaactcttctgtcacatttccttggcttcttcaaacacaatgacattcatctgctctctactctggccacccaaagcaatcaagtggcccaaagca

SEQ ID NO: 148011 - DNA, 404 bp, Homo sapiens
tatgtccccaaatctcctagcacaggcagggaacataataagcattcagtgagttaatttttgtaaatgcagataattgcctgattcccaccactctcccaaacacacaaatagacacacatttatttttacctagcaacagagaagttaagagaaatgaaccgtaaagggtttggaacaaatattttggagtttattgcattctgttttctcagttgtgctctgagtcagacagattacacatagcccaagatatagccaggaaaccacttcactaactgtaaagagccaacagacttcacaaggacgaaacttccagtttgttatttacggtgccacaaaaggtattgggctacttcaggctccaaggtctcctcaggatgtgggctttggtggtggagcag

SEQ ID NO: 148012 - DNA, 761 bp, Homo sapiens
gggttcgctcattatttcctgctccttccctaggctcgtgggtttcgatattgggggagcggagattttctcttgggtgctggtcacgcccccttaagactcgggatcgtcactaagaaccccgctgtgaattgggggagcttcgggccttcttttggtggggaatgcttggaagctgctcattgttggaaaaagctctttttaggggattctgggtgatgtttccgcctgttgctgcccatcttcctccccagccccttcccgcttcgggcagcctgtcattaggggaagttgagggactctcccacttcaggtggtgttggagagcgtggaatctggagtccggtccctggattcgaatgcgagcttcacaccaattgtcagctgtttaactttgcccaagtttctcaactagttacctcagtatccttatctgtaaagtgaggtaaaatatccgaagcctttggaacagtgtggcacgtaataagggctcaataaatattagctaatattgttcctaaacagttgttgaacatctaacatgaagaattttcttttcttggtggtaaggaggacagggttcattctccagggttgaccgtctcccctcatgtgcaatacacatacgtgctttcgcgcacacatacaccgcaggaatttacgtgctccggtgggggcaaacaaacttgcaagccataatagtattttgataagattatcgaatagatatgtgcgaagttgatgagaacattggagaggaa

SEQ ID NO: 148013 - DNA, 872 bp, Homo sapiens
cttttctaggcaaaaggtgtccaatctctacagacccacagaatctaacagatgtctctatattcctcctccgagaacctcagaggatccagaatggcagctggtccttgctgggttgttcctgtccatgtgcctggtaacggtgctggggaacctgctcatcatcctggccgtcagccctgactcccacctccacacccccatgtacttcttcctctccaacctgtccttgcctgacatcggtttcacctccaccacggtagccaagatgattgtggacatccaatctcacagcagagtcatctcctatgcaggctgcctgactcagatgtctccctttgccatttttggaggcatggaagagagacacgctcctgagtgtgatggcctctgaccgctttgtagccatctgtcaccctctatatcattcagccatcatgaacccgtgtttctgtggctttctagttttgttgtcttttttttttttctgtcttttagatgcccagctgcacaacttgattgccttacaaatgacctgcttcaaggatgtggaaattcctaatttcttctgtgacccttctcaactcccccatcttgcatgttgtgacaccttcaccaataacataatcatgtatttccctgctgccatatttggttttcttcccatctcgggttcccttttctcttactataaaattgtttcctccattctgagggtttcatcatcaggtgggaagtattaggccttctcctcctgtgggtctcacctgtcagttgtttgctgattttatggaacaggcgttggagggtacctcagttgagatgtgtcatcttccccgaggaaggttgcagtggcctcagtgatgtacatg

SEQ ID NO: 148014 - DNA, 529 bp, Homo sapiens
ggctcccacaagtgcagggagagtgctctggtcaggagctctgcaggtgcctcaagaagcagcctgggcagagcctctcagacagggaggacgtgtcttgtttggtgaagggcaaatgtttcattgtggcaggggcacaggaggcatggaaaaagagaagcagggtcagagataggaagtttgggttttatgctgcagatgaagagggggtgtctggggtgttcaggggttttaagttcaggagtaatgtgggaggccagattgaagtccgggccaggaacaatggtaattgtgggacttaacaaagagtgagtacagctgaaggagctggggagcagaaagtatatgcgtcaggtataaggaagaaaaagatttcggaagttatgagaaatgtagagtgagttgagcatagtttgtgatttttagggcctctagaagtattaaagcatcggcagccgctgcatgcagacatgagggctaggctaaaacagtaaggtcaagttgtttggacagaaacgctgcagggtgt

SEQ ID NO: 148015 - DNA, 661 bp, Homo sapiens
cagttgattttactctgcagcctgaaagaaccaatagtcatatcttcctgtatggagatttgagaagcatgaatgttggatgtgaccctcaagatgatcccgatatcactgcaaaatctgaatgttttcttgtagggggggctccggctttcacatctggcaaatattattgggaggttcacgtggggggactcttggaattgggcttttggtgtctgtaacaattatcggaaagagaagagacagaatgacaagatagatggagaggagggactctttcatcttggatgtgttaaggagggcactcactgcagtctctttaccacctccccacttgtggtgcaatatgttccaagacctaccagcacagtaggattattcctggattgtgaaggtagaaccatgagctttgttggtgttgatcaaagttccctgatatacaccatccctaattgctccttctcacctcctctcaggcctatcttttgctgtagtcacttctgaccagagaaaagtcagagatgcgtctatatgctctgggaacctgtttatcccagaaagccctctttttcgcacctcaccaaatgggacaaataagttacatttaatgtctttagttgcattctaatgtcatctaaactcatttatagtgtttctatta

SEQ ID NO: 148016 - DNA, 474 bp, Homo sapiens
gtaaaatgtgaagaagtcatttagtaacaagtgaaagaagagtaaatacgtgcttttgtggaaatttaaacaatctctgtaagggaagtaaaaggactgtgactgaaccttaaggaacattctattggcaaaagaaacaggaacaggactgtgcccatagatttttggtgtctccaatgaccagaatactatcttagaagactttaataacacataagaagacttctatatgtaccaaatgaagggagagtacacaaagaattgaagaaacattcagattttaaaatcagaaacaaggatacagctgcctctaattatttggtataattacaccgtaggattgagcctaaactaccagagctggatgatcaattatgtcactagatttcagatctacgtagacatagtaaatactacacagtacacatcaaagttctaacaattaaaaaggagacactaaagaggttgctgaca

SEQ ID NO: 148017 - DNA, 376 bp, Homo sapiens
tcaaactttctgtagaaaacattatttttttggtaattaaacatagttatatgaaggattagaatgcaaattagcattagaatagtttcaagctaaaacaatattttttaggttttttagcaaaaaatctgtcttcacctttgtcccaagataatttcccagatcctcccagtttttctgcttatgctctcccacgatttactgagtatatttgtacctctaatgagacgtaccatagtggatattgtatgaaattctgatacttgctgaggtaagttaatatgtaaagtgtagaaatctggagggatagcagtagccaataggaggcagttcagtgatagtcatgatatacttcctcaagaggtcacaagggtta

SEQ ID NO: 148018 - DNA, 167 bp, Homo sapiens
tgctccctgggtacgtatgaaatcagaatattcaggagtaactgagaggatgcaaataacatttcttagtacccagctttaatatctaccagacctggtagtctggattatttgtagcaccatggaaaactcattagaaaatcacaaaggtatacacctcaaccttt

SEQ ID NO: 148019 - DNA, 250 bp, Homo sapiens
gtagcccttaagttgtcataaaacaccacaaaaccattcatgactcctgctacaaacaacaatcctggccaaattttaattcttgcacaaactgcagaaaatagccaacgctttgccattgatctttgggatcttaataatactgaattagatagttctatcggctggagcctcagtgcccttgtttgaaatttattaagattaggcggcagatgttccaaagatacaacaattttctgaaatgtgtagc

SEQ ID NO: 148020 - DNA, 470 bp, Homo sapiens
gtggctgatggccaggctgagtcatggtggccagagtagccatgcggggatgccagggctgtgtgctgtgagctggcactggctgctaattaacatccatgggagctgctgcttggacgcgccctcttttaagagcctcctcacattgttcctggtgggaatttcttttcttttaagagaggcagcatgagcttagatcctctgaagacagaagccgaccccactcacttctgctccttgttccactccctgccttcacttcctggcaactcaggagtgaggctgtcttgagtgaagccacagcgatcaactccaaggccggaaaggagttatggagtgtaccttcctggatggaattgctgtcttcccgaagagttacacagaaagtgcatttcctcgtcagccacctgacagcaataactcccctttatgtagaactttacagctaaggcagctgttcaccgatgtct

SEQ ID NO: 148021 - DNA, 479 bp, Homo sapiens
tttgtttgttctgggagttcacccttcttgggaactaagtgatggctcgtgagcacaatgctaatggcccagccagcaatgtgctcccataaagtgctggtgtcaagctgccatttgctttcccctcaccaccagttacttaaaatacaaatctgctgaaaaccagaggaaaataatgaggcgggaaagagagaggaagaggaagtaaaattttatatggtatattggaatgcaaatccagaggagaataatactatgtctgagttcattaagcaactagattagaaataagagtttatttaaaataattgataccaaattacaacatgacatgatgataaagagaaaaattctgtgtcagatgggtctctcgtggatctgtgaagaaggaatttagctagtaaaatgccagaattgcatgggctttagtatggacccctaaggacaactttattatgaacttgtggcacctatactca

SEQ ID NO: 148022 - DNA, 402 bp, Homo sapiens
gctcccacaaaagcgccaagagggttcgcaatcactaaagtgttttgaacttcaggtccttccttcttgaaatcgggcaaaagaggtaatagggggtgcgtccgcaggcggagagggacgcgatttgttcacaccaggcgctttccagttggtcccaacttcacactccctactttccgaactctcaggacctgtcaccaggcaaagcttgcccctccctctccactggcccaaaagatgtaagaccctcagggggcgcctgccagacccagaaaggatggcaactactgaagcccgatgaaacaggagcgcgcgcaaagcttctgcccttggacatccgctttggcagatgccaacctgtgcgcccgaggctgcccctgcccgctcccagtgcgcccattg

SEQ ID NO: 148023 - DNA, 310 bp, Homo sapiens
ttttttatatttttagtagagatggggtttatccatgttgtccaggctgatctcaaactcccaacctcagatggttcacctgcctcggcctcccaaagtggtgggattacaggcgtgagccaccacgcctggccataactattatctttgacaattttcctgggaggtggatgacaggacctgttactgacgccagtttacatctgagatgctgcagtggagaggaattggaactagaaccgacacttacggcttcttgtctggtgtactctctgctgttccatcttcattgcttgtgtgcatgcgtgtg

SEQ ID NO: 148024 - DNA, 291 bp, Homo sapiens
agcagcacatcaaaaagcttatccaccatgatttgaatgaaatttaacttatatccattgagcacagcaagtatgagctaggtacattcaccatactaagtgtatgtgtgagaatatgtttattttccttttaaaaaaacaattatccatgtagcacactggctaagggtatgagtccaagagtccaatggccaggaccttccatctgtaaactgtgttccagttgctcatcttctctgtgcctcagtttcctcatttgtaaaatgataataattataatagaatgccttg

SEQ ID NO: 148025 - DNA, 318 bp, Homo sapiens
  misc_feature (19)..(19): n is a, c, g, or t
  misc_feature (24)..(24): n is a, c, g, or t
actctagaggataaacagnggccnaccttttttgacaaataactcaaaactagatgtacatgtactgcaagtaaaagcaaacttttctggctcttaatggttgtcactggtacacaaaagtttataagccaaaaatgtgcaagcaattacagccacaaaaactgatgcagccttgacctattacagatttctaatattaaacagatacatgcaattccccattctacaatacatatacacagcattcatataatttaagaaacacagtccttccatcatgcaaattaaattaaggatcctggcaacaataataatgtt

SEQ ID NO: 148026 - DNA, 522 bp, Homo sapiens
ccacaacttggacctcccagctaacaacacagagtgttgccgttaagatttttgaagtgtccgtcacatactaaaaagttgtatttgtttaacatgacctcagggcctttagaagatacaactcctctggtacagacacatctggccgtttcccatggatttaacttttatccctcccctccaagatcccacaaagaaaccttagtgggcccaaatgagatgcaataagactcagctaaacctatcctccagctatcgtgtttaaaggattagcctggcatgaatttcctcacaattaattagcattttttgtcagggtaccattcataaaataccaatttatggcacttagctagccaacaataagcaaaatgtttcaataaaatgaggcagcaaaagtttatactcgaaaatgatgaaaaccacctatttttccctaaaattaagacaaggccacatctccagctaaccaccacctattttaactctgcattttacacccacggccctaatacttgaaat

SEQ ID NO: 148027 - DNA, 452 bp, Homo sapiens
tccatggagatgtctttgccaactgtgtccagttgtggcaggtgagtccttcaggggcaccccattaaaagggtgtatgaacatagtcatctgctgccccacagaagtgggcgctggtatgggagaatgtgcggaagacagagcctgtctcagctgggtggtctgttgctctggctttgtctttgttgcctgggcaacatctctctcagaatgtgagaaactcactttctcttttgcatgttgatctgtgggaaggactaacagctgtagctataggttgcctgttatccactaccacctatagttgagaaacagaaaccagattttggggaggtaaaccatcaggcccagggtgcagaaagatattaaatcactgagcttcttttatgtagctctgaaattagttgggaaaaagatcacctccctgaatcctgggagctttttctactaaa

SEQ ID NO: 148028 - DNA, 479 bp, Homo sapiens
aaaaaaaatatatctattgctctatattaaagaggcagattaaaaatttgccctaaaacagaatttgcaactcagcagggtaagaagatgattccattttacttcttataaatagaagtttaaggcacacacgttgtcaaaacaactttataaataagctggtgccaacacactcatgaatactaaaaatgttttccaggttctcagttgtcttctctatgattctattgaggttatacctattccaataaactcaattctcattgcaattcttagtgagtccagtgtgcctcctcgtataagataaagggtttcataaactgacaccatggacacatgaagattagtcagctttatgaagccagtgacttggtagctcctttaagtatttctgtaaggcactttggcctccaatgttcactccagattctatggtggaggagaaaggcttgtggacctacagtttacttcaatgactt

SEQ ID NO: 148029 - DNA, 398 bp, Homo sapiens
caggctggtcttgaactcctgactttgtgatccacctgcctcggcctcccaaagtgctgggattacaggtgtgagccaccatgcctggcctaagagtctttttttttttttcagtagtttttgcctagctagtttttcctaacagaactgttagaaaagcaccaggtttggaattaggacatagtaaccaagtcctaaggacatggctgaagtaaggagaccacttaaaaaaatacctgtactaaagccagatgaggttttactttaaagctatcattttaggaggctatatagtttttccactggtatgtcctactattattcaatctattctttgaaactcagaagttctttggaaacaaatttttaaataattcttcatatttcacttaacaaaa

SEQ ID NO: 148030 - DNA, 272 bp, Homo sapiens
gacctgtataaatgagaccacattacatgagatttcctggtttcaggtccttttttagtgcctcagcaagaagttctccctcctttgaatatctatagcattttatctgtaatgtaacacatcacatgtgccttatacaataacaggcacatctaactgctcctatgagatctatgtttgatttatgtttctatcacccacagtctatactaagtaacttttcactagcagtcagtaaacattttttggacaactacatggcagcccactca

SEQ ID NO: 148031 - DNA, 296 bp, Homo sapiens
accggaagcatggcgcggatgctcgctactgattacgtttacaaccgcgagcgggggagcatttgctgtgtgcagggacagagaagacagacacgctggccactgagtgggggagggagtctagtctatcagtgcagaaaactccccatagaggtgggggctatgacggaaacaccaggaaaagtgatggtggaagatgggggtgacctactgcagatggggtgctcagggagggcttctctgaggaggtgacattaactagattgacaaaagggatgatcaaggcctgtgaaagt

SEQ ID NO: 148032 - DNA, 329 bp, Homo sapiens
  misc_feature (252)..(252): n is a, c, g, or t
ctctgctgagtgagccaagggtggcttccggggaggtgagtgcctggaggagatgtcccagagccaagatgggatgcctcctggtatcaaagtgatgttcagattttttctggaaatctagaataggataaatgtgaatagagattagagtgaacatcttctaggatttgaagcccttgagagcttctaggatttgaagctcttggtcttgagaccaagcctctgcaatgcatctggggtccgttgcacaangtgtgtgtctttttaccaggtcttatccccgcttcagccttttctctcctgttagggatcaaaacttgccaaaacag

SEQ ID NO: 148033 - DNA, 340 bp, Homo sapiens
tttgggatgatttactatactttgctttaagttgtagatattttttgaaaattaatgagatagccaggtgcaggggctcacgcctataatctcagtacttcgggaggcttaggcgggtggatcatgaggtcaagagattgagaccatcctggccaacatggtgaaatcccgtctctactaaaaatacaaaaattagctgggcatggtggcgtacgcctgtagtcctagctactcgggtggctgaggcagaagaattgcttgaacctgggaggcaaaggttgcagtaagccaagatcatgccactgcactccagcctggtgacagagtgagactccatctc

SEQ ID NO: 148034 - DNA, 941 bp, Homo sapiens
tacacatgagctctcctgaattccttccttttcttcctttcgttctttttctggattatttccctgaattgccaagttgaatgaaccagctagaaacgccactctaatgagtatggtttgtgtcgctggagttgggaattctgacaactcataactgtactggttattccttggcttataaagaaatgactgagccctgcaggccactaaattaaaatgtaaacttcagacttcttgaagtgtctctctctctctctctctctctctctaccaaaatgtatctttaacatcctaaggtcactttcaaggtctttggcaaattagacttgggcaaggtgtgaaccaagtcaggcttcgggggctgtgttctcagttgcatgaaaggtcttttctctaacttctcttgcacatcattttgcttaggggggttgtgactagcaaggcacagagcgagaaggataagtctgaccaccaggactgcaggccagtagtgagcaaggggacatactgggcaggaaactctgctttgccctattattttcctagggctgccataacaagctaccacaaatgggaggggggagcttaaaacaacagaaacttattctgtctcagttttgaaagctagaaatctgaaatccaggtgttggcaaggccatgccctcttgaaggctcaggggaaaatctgtttcaggctcttctcttagcttctggtgtggtcagcaatccttggcttgcagccgcactgcccctgtccctgcctctgaggtcatgtggccatctccctgtgtctctctcttcacatgttccttcttataaggactatggtgagatcagttcactccactaagacctcctcttaacccgattacacctccaaagaccctctttctaaataaggtcacattctgaggtatttcaacttatctttttggggttag

SEQ ID NO: 148035 - DNA, 177 bp, Homo sapiens
aggaaaattgacaaaccaaactaagtagcagtaattcatcctactaccaacagcctgtacttgtgacgtctccagtggagagcagatgcccaggaaggagctctacccagcaagctgagggttcaagaatgcttgtgtggctttgagaaaataaacccccatctgtattagaaatgc

SEQ ID NO: 148036 - DNA, 625 bp, Homo sapiens
ggggacaggccagccctgcccctgcggtccggatgctgcctacatacgtggggtccaccccacatggcactgagcaaggagacttcgtggtgctggagctgggggccacaggggcctcactgcgtgttttgtgggtgactctaactggcattgaggggcatagggtggagcccagaagccaggagtttgtgatcccccaagaggtgatgctgggtgctggccagcagctctttgactttgctgcccactgcctgtctgagttcctggatgcgcagcctgtgaacaaacagggtctgcagcttggcttcagcttctctttcccttgtcaccagacgggcttggacaggagcaccctcatttcctggaccaaaggttttaggtgcagtggtgtggaaggccaggatgtggtccagctgctgagagatgccattcggaggcagggggcctacaacatcgacgtggttgctgtggtgaacgacacagtgggcaccatgatgggctgtgagccgggggtcaggccgtgtgaggttgggctagttgtagacacgggcaccaacgcgtgttacatggaggaggcacggcatgtggcagtgctggacgaagaccggggccgcgtctgcgtcag

SEQ ID NO: 148037 - DNA, 646 bp, Homo sapiens
accagactttgcaggccttaggaatttgggaagtgggcagagggctctggtcttgccagctgcatggctttctgtgacctgcttgccctccagagcaaggagacttcgtggtgctggagctgggggccacaggggcctcactgcgtgttttgtgggtgactctaactggcattgaggggcatagggtggagcccagaagccaggagtttgtgatcccccaagaggtgatgctgggtgctggccagcagctctttgactttgctgcccactgcctgtctgagttcctggatgcgcagcctgtgaacaaacagggtctgcagcttggcttcagcttctctttcccttgtcaccagacgggcttggacaggagcaccctcatttcctggaccaaaggttttaggtgcagtggtgtggaaggccaggatgtggtccagctgctgagagatgccattcggaggcagggggcctacaacatcgacgtggttgctgtggtgaacgacacagtgggcaccatgatgggctgtgagccgggggtcaggccgtgtgaggttgggctagttgtagacacgggcaccaacgcgtgttacatggaggaggcacggcatgtggcagtgctggacgaagaccggggccgcgtctgcgtcag

SEQ ID NO: 148038 - DNA, 466 bp, Homo sapiens
tggttctcccagcggccagctgtgccctgaaatggctgcacacccccgagcaaggcaggtagggcctgtttctccatctggaaaacacctggtcggggagggttcagtaggaaaaccagatggcagagggcctggcaggtggtgagggcacctgcgtggcgagctcttactaaaactgagctgattttttttttttttttttttttgagacagagtttcgctcttgttgcccaggctggagtgtgatggtgcgatctcggctcactgcaacctccacctcctgggctcaagtagttcttctgcctcagcctccggagtagctgggattacagacatgcgctaccatgcccggctaattttgtatttttagtagagacagggtttctccatgttggtcaggctggtctcggacctggcgaccacaggtgatccgccagcctcgtcctcccaaagtactgggattaca

SEQ ID NO: 148039 - DNA, 212 bp, Homo sapiens
ccacaggagtcgagggaggagtggacggagttacccgcaggagctgagggaggagcggacggagttacctgcaggagtcgagggaggagtggactgagttacctgcaggagtcgagggaggagtggacagagttacccgcaggagttgagggaggagtggatggagttacctgcaggagtcgagaggggagcggatggagttctccgcacga

SEQ ID NO: 148040 - DNA, 512 bp, Homo sapiens
caaagagcaggacttaaacatagcattgatgcaacctgttcctaacccttttgcaaatggtttgcaagttctatctaaagacttctgcaagcgtcttaccagcctttaaactggttcagttgcatcaaccacttagtctgatgtgcctgcccttcacccagtgctgggctggagaggcagctgtacaggaaaatctgaccaagtctttccttttgtctgaaattctgcctctctgtccccatcccagatacaattttaggaaagagatgcgttgtaaaacaaaagtttctttggcctccatgcattgtcaatatttggcctgtgaaatgagtatgacttctgtcctcttccctaaagactaaacccaagagaataataaacactcaacaaactaagttattgatttcaccaaagagggagatgcatccattccatacattcattcaacatttgccaaacctaccgtgtgcaggccagtataccagggccttggagtccaaagataatgagat

SEQ ID NO: 148041 - DNA, 566 bp, Homo sapiens
gcaattgcaaattgagctgctataaccatgcgtgttcatgtgtctttttcatagaatgacttcttttcctttgggtagatacccagtagtgggatatcccaattgttttaagaagtcttcccagatctttctatttggaatttttatctctttctcttctatccccgaggtgttttgcttgtgcctttaactgagccctttctactttctgccacgtagctagttgaattgtctcttgatcaatttcccttgccagtgagggggctcatgaaggcagacagtaagtctttctctaaccctcaactgtgatgcttgagacatcataggctagttttgtttgttgaattaaattggattacatttcccctgtccagaaatgtctgtatttatctttcaccaaaaatcctatttcctctgtctccataatgcttcattattgtgctaagctattccctttatctctaatcttcatgatggtggcccaagcgtacagtggctttgctgggattcccaccaattataagccacaggtacgctggcatggaattgggtgatacactcttgct

SEQ ID NO: 148042 - DNA, 426 bp, Homo sapiens
ggcaagacattaaaacataccaccagaaaataatcactttcccataaaggaagatgggaaggaaggaaggaaaagaagaccagaaaacaaataacaaaatggtagtagaaagtccttatcaataatgacattgaatgtaaacagactaaattctccaatcaaaagacatacagaggctgaacggatttaaacaagcacagtccgaccatctgcggcctacaagaaacaggctgggcacagtggttcatgcctacaatctcagcactttaggaggctgatgcaggaggattgctagaccccaggaatttgagactagcctgggcaagatggtgagaccctgtctccataaaaaataaagaaaaattggccaggtgcagtgtcatgtgcctgtagtcctagctacttgggaagctgaggtgggaagat

SEQ ID NO: 148043 - DNA, 786 bp, Homo sapiens
tcagcaaacaccaggtttcatatggagatgcagctggataggaactgagcaccaataaaatgcttcgtcttccactggcaagattttggagtctaataaaagtcacttttccaaatacaggaaaatgctatgagtatcctgaataccttgaggtggggcagctgggtcagcacatggctgaggactgtcaaccacacatcaaataatgttctggatctctcctaacaggcataaaaacagattcacagacaaatgaaacagaatagaaaacccggaaataaatccatgcacctacagtgaactcatattcaacaaaggctccaagaacatacactggaaaaagacagtctcttcaataaatggtgctgggagaacccaatatccatacgcagaaaaataaaactagacccctgtctcttaccgtatacaaaaatcaaataaaaatgcatcaaagacttaaatctaagtccttaaactctgaaatcaccacaagaaaacattggagaaaaatctcctggacatcgttctgggcaaaaatttctctagcaatacaccacaagcacagtcaaccaaagcaaaaatagacaaatgggatcatatcaggttctgcacaacaaaggaaacaatcaacaaagtgaagagatggcccacagaatgggagaaaatattcgtaaactaaccatctgacaaaggattgataatcagatatggaaacagctcaaacaactacaggaaaaaaaactaacaattggatcaaaaaatgagcaaaggatttgaatagacatt

SEQ ID NO: 148044 - DNA, 613 bp, Homo sapiens
  misc_feature (27)..(27): n is a, c, g, or t
taggactgctgctttgtgccaccccgncgggtggagcgctccacccgacggggtgggaaggtgttgcttaaaaagaacaaacaggccaggcgcagtggctcacacctgtaatcccagcactttgggaggccgaggcgggtggatcacgaggtcaggagttcaagaccagcctggttaacatggtgaaaccccatctctactaaaaatacaaaaattagccgggcttggtggtggtcgtctctaatcccgctcctcggaaggctgaggcagataattgctcgaacctgggaggcggaggttgcagtgagccactgcactccagcctgggcaacagagcgagactccgtctcaaaaaaaaaaaaaaagacaaacaaaccaagtaagtggatatcattaaacaattgaggactggctcccttgtcccctgccagggcctgcagggaaagttaaaggccatgttccttttaaacaaagccaagtcatcatggccctccctgtgtttgagacgctagagttcgtcaaggaagcccggtttcctatgggcaccgcctagggaagtgaatcaagaatctcaggccaccccgtcgggtggagcaggtgtccaaacagctga

SEQ ID NO: 148045 - DNA, 429 bp, Homo sapiens
actgcaagcacgtgccaccatgcctggccaattttcatagagatggggtttcgccatgttgcccaggttggaatattttaggctatcagtttagtgacctatatcttcacccaggcaacagtctgttgattttagagttgaatccaggccaggactggcagaactctggcagcccacaagaaagtagatgtcactgcgtgaggtctgatgggcagtgtctggccctgaagagcctggggcagagcaggaactgaaactcctgagcctacaccctacaaaacagcagcagcacaagggtccgtcgcagctggaggaggtcccactcctctctgtgtgtgataatgaaaatattgccacatgtgctactgaactctgaaatagggcttgtgattcattttgatgggaaaagccacatgtgtttaggggcta

SEQ ID NO: 148046 - DNA, 401 bp, Homo sapiens
tttacagtggtgacttttactgggaaaggcattgagtgtccaggtttggataacagaggcgactcttttggaacagggaaagctgtggtgaagaaggcaagtcatatccatgttgtgtcctggcctgataggaggttatcagcaagaaagggagaagtgtgtatttcctcgttcacttatacgttctcaatgtctatctattaataccctcaaaccagtgactttcattcatgtttataaataaaattatatatatgaataccctatcaaattaataatgattatttctgtttactggaattatggaatatttttccttcattttgctgatctaaatgttcattgatgattgagataacatgtttttcagaagagaaatattaaaagcacaatttttcttg

SEQ ID NO: 148047 - DNA, 557 bp, Homo sapiens
tgaggcgcttacggcagggcttggcacagagtcagcacccatataatgttcattattactgcttttccttccccatgaaaccaggcagtgctggctggccaccccaacagatactctcaattcattttttctctggcttcctcctcaggaaaggctgacaagttaaataacatttgtcaccttccttggagctaggggaggctatgcgacatggcagcaggagcgatgtgtccatgaggggaaagatcaagagaatcaaagcggctctgccctgacactgcccagccaccaaactaacactggcagccaagcacctccaggtgtgctgttgtgagcgagaaataagccctccttcaatcaagctgcagtgagcgggggtttctgttcctgaaacttgaagacattcctggccgaatgcacataccatgatgcaaatggctcaaggcgcacacccatggtaattgtttgccaatttcagctcaggcccgctgctgagaacccctgacccagaggaaaaacagtgggtggctgagccatacagtgcttaccaagcccag

SEQ ID NO: 148048 - DNA, 245 bp, Homo sapiens
atgagtaaagacgaaggaggtgaggagcaagccaggaagacttgtggctcctcggcagcagcaacacctgtaaaggcgctgagggcaggaggtgcctggtgcactggaagaacagcaagccctgctgccttcattcccaagttcagttgccacctgttatctgactccaggggcagccctgtggggtctgggcttttcttgagttcatcatacagagtttgaggacagtgcaaaatactctctgt

SEQ ID NO: 148049 - DNA, 329 bp, Homo sapiens
ctgcctcagcctcctgagtagctgggactacggatgcacatcgccacacctggctacttttaaaattttttagtttttatcagaggtcttgctgtgttgccagggctggtctcaaactcctggccttaagcagtttctcctgcctcagcctcccaaagtgctgggattaccggcgtgagacgctgcacccagccttaaatattttttgttgtgggatctccgtcttgttcattagtggcttctgtgtgccattggacaacttgcttaacttctttgggccccgttttcggtttttaaaaatagggacagtaatactgaccccgtagggt

SEQ ID NO: 148050 - DNA, 270 bp, Homo sapiens
caacacagattaaggccaaaagcaaaaatggcaaaatcaagtcctcattctccaagggctcctaccccaagactttcttccttgaccgcccacatggaggcgccatgaacacaactatccacacttcccaaggtcaaaacaaaattgagctccctcttgaaaaaaaaacaacagcagctaccattgttcaacccacaggcattcagagtgttcatacagcaaagtcgaaatttcccctttcaggaagttcctgggaggaagtcagtgccc

SEQ ID NO: 148051 - DNA, 415 bp, Homo sapiens
agttctgatgacactcaattatctctctagcccaatctctcctacattccaaaaacatgtttctaaatcatactccacatctctcctccaatggtctacagacacctaagattcaaccaccttaccaaggttgatccacaagaatctcagactcaacggattcaaaacagaattcaacttctttccacttcctcaaacccaaacttgtacatcctacctatattgtgagtgcttccaccaagccacaaacctcagtggaatcctggactcctttctactcttaataacctacatctaatcatttaccatgtactgtccattgggcctttataaatttctcttaaatctgcagactcttctaccttacttctggacagcatcctctcttccctgaattactaaattagtctccaac

SEQ ID NO: 148052 - DNA, 491 bp, Homo sapiens
ttccctccagttacaccagctccagttacaacagctctgttagggttaccaaaactggcaagtgagctatttcctagaaaccagccactcccatgagatgtataaaacataagaccactaggacaccccctaaaagctgcctgctacagaaagaggcacagtgcacctcggctcagacatgtgttgctgaaaaagtatgcctaaaggggtgttgtaaattgaacccaattcatggcgtaacaggagggagctgtgttttacagaatccatgcaacagagttatctaattttatcatcagaaaaaaaaattccctaaatttactgttctatttgaggttttttataaattggattttctaagtacaagacatctcagcaaactgcatgctctaatgttcaatgaactctccaaataaaggctcaggggcttcaaatacagcctggaatacagcaggcatttgagcactgaggaacaaatgtgtgaagaaatg

SEQ ID NO: 148053 - DNA, 478 bp, Homo sapiens
caaaaacaagaacagcttaagtccaagagaacaacatgattaaactatcacatatgaaaatttaggaaagacttgcagtttttatattatttggttggaatagcttaaacagactctcagacaccaagctggtcttcaactgtagaccgttactgaggcaaaaatcagtttgggcaagccctatcctaaatgctagagtaaaaaactacaggaactacagaagctcaaaaggcacaacattgatattgagccacagtagctgccatattaacaacgatgttcattagatactagtctacacttaatattactgtgtataaaaacaaacaaaaaaataggtacctaaacttcagggagtgtagtggcagaatattttccccctttttgctcttacttataaaaaggccaaggccatacagctctagagaagagtccagtagttttgctaatgtcatgttgtatctggaggatgccaagc

SEQ ID NO: 148054 - DNA, 367 bp, Homo sapiens
gtgattctcaaatgcaggtaggtttcccagtcacagactgggaggtatcttattggagtttattcatggaatataccaagtggggtcgacccaggagaaagttggcaaaaaaccacgtaaggggtcacttggatgaaggtacagggcctcacaattaccaaggaactgctggcagagccaaaagctggacaggaggaccatgagagggacagaccatgcccagtggaggctcagcagcaaggtgcctgcaagatgtgtgtccaccccagatacctttggcatgaggtgtggaggcaacacggcctttctaggttccactgttctggggatggaacttctagaatgcccccaggcctgagccttcctt

SEQ ID NO: 148055 - DNA, 546 bp, Homo sapiens
aacttagcaacatatatacacatgcttatttctgagtgcccctgacatctagcggcttagtggtttcttggatcttttctaatgtgtcatgagccaaagcaacataagctgggccatagcaacacaaatggtgagtaacaaaatagaaaattctcccttactggaaaaagttagatattcttaatcatttgtgactaaaaattttgcattagtgaattgccctccataatgcctttgaaaaggcagtgttagttatgttgcttctaaaatagagaatggatcagaaaaagaagcattctcactgatcattttatagatataatctgtttattgagcatttaagcatgcatttcaggtaatactagatgaatacatagaagattctttaaataaaatgtaaatgtttatccaactcatataggttattttaatataaatatcaaagtaatacttcatttaaaaaggagcaaattcagaaatagtaaaaaccagaaaggaatctgggaaaacagggacagattaaggctattctgggtaatccaaaat

SEQ ID NO: 148056 - DNA, 134 bp, Homo sapiens
aaatacaccatggatcttcccttcaattccccaatgactcaactttctagtctacttttcagcaacaagcgaacctcaggtgtcacctaggttcagtggtgagaggtgtagctattgcacaagttttgtgagga

SEQ ID NO: 148057 - DNA, 446 bp, Homo sapiens
tcgagctcggtaccagttcgacggagatctccttggtgtgaacccaaggaagtgtggcggtcaacttcactgttatcttaaaggcagctgggaggagaccttggtagcgggagggaaaaatatgccaaaagcttccaggaagagacttccccattgacaaaaacagtgaagtcaacccaaaaaaaaagggactctataaacagtagggttggaaacagtgaagcaacggtcaggagctgccggcaggcatgggtgcacgctggtttcgtagggcgactgcacgaggaagccgctgggaggaagtgacaggagcggacaggcgcgtcttacttaacagctggtgacagtggccaacagacctagcaattccttttaaaaaacaatcctaacagggagctgcacagcgctgaagctagctttcagtattagagagtctccgtcgaact

SEQ ID NO: 148058 - DNA, 255 bp, Homo sapiens
aggattcaactttggttgtctcttcatcaataaccataagccctgggcacttactgatcctctttggactcaactcctattccaagaaaatggacataacaataaagttatttccttgaaggcaaaggaccaaaccagatgttcacttacagaagtttctagccccaattcacatgactattccataattttttgattctaggtctgtcctttgggatgggaccaggctgctgggttaaataggaagtgttcaga

SEQ ID NO: 148059 - DNA, 211 bp, Homo sapiens
ggaagaagtctcagatgaaggttatcaagaaggctggagaggctgtgattcagagcacacagagcagtggctttggctgggaagagggatgggcttctgcatttctgtgcatttctgggttcagtggcaatggtttgagagtgttcctgtctggcaactctcattctctctgtgaggataaaaggtactacggactacatttttctacata

SEQ ID NO: 148060 - DNA, 243 bp, Homo sapiens
acctcattctccaatcccctgctatgtttagccctccttccccttttctttgctgttgtttgtttttaagatattcatccgtcagcttaggaactgaagagagctgaatcttaatgagcctgtcaaaatcctaggtgtatttttgttgttgttttctaagtcctgctcacagctgaatgctgggtgaatgacagcttcttgcatctaggagatgatgcctgggcagagcggttggaaactgac

SEQ ID NO: 148061 - DNA, 383 bp, Homo sapiens
cttcagcacatttctgatctggtctttattctcctctctatctctccaggctctgaactcagacagaccaagttcaaattccatatctgtcactacagctgtgtggccttaggcaagttgcttaacctcccccacgtcccactaagcctcagtttccccacctgtgaaataatagtatccacttcacagggtggttgtaacctttaaacaaaatagcctatataaaatccatagcacagtgggtgcctccatgtccccgatgagtggtagctacgatctggcctctttcttccctttcagatgttcccatcctaggccctctttctctgctttattactggcaggtatatggtctctggtgttggtatagtgcctgttaaatg

SEQ ID NO: 148062 - DNA, 215 bp, Homo sapiens
gaactgctttaatagctttttgcataaatgtgtgcatatatatgtataaacgccacaggagatattaaatttaagtcaactggaaggcatctatttggaagggttggataaatagaaataagaaaaacagtactgactgtagtcataaataatcagtaaatttggtcttactgtgcaaattccaaaaatcctacttcttgttaggcaatttaaaa

SEQ ID NO: 148063 - DNA, 382 bp, Homo sapiens
tctcatcaacgttataaggaaacaactttgaacattgaactgacagcgtttgaggacctcctttacgctgtgtaaagtctcagtttccaagaacctatcgatagttaagtgagaactcaaggggaggagtgagtcatagggttggaagtcaggaagtatgatgtagatgaggattggtttagaatttctaatccaaatgagctgctggatcagacattggtctttatcattggagcatctgagtctacacaaagttcacttaaaatagttggtcttactttggaacatgtgcctgagtaagcctctgtgagacagttttggttgtattttgtttctcttgcatattatggtttagtatagtttaactgttttagagtcaaat

SEQ ID NO: 148064 - DNA, 379 bp, Homo sapiens
agaaaagtagagggtggatttctgcaagcaatgtgcaaagaaacttgaaacaacaacaagataacccaggacagcccttacctcacagtggggaggagtgagcaacaaagacaacaacaacaaaaaacagctcatcatcttgttattaattgcaactctggtgccttggatatgcctgattgaagacaagggacttgaaggccagcctataaacatgctatattctcatggaaaacccaatactttaatggctgtatttttgtggtttattattttattgatctcaaaggaaaacctgcagcaaaaaaagttggtgcattttcttctattatggaaaatttctccagttgcagaaataaagtcccaacctccccagtca

SEQ ID NO: 148065 - DNA, 390 bp, Homo sapiens
tctgacccacaaaaacggcaatttcatatggttcagcctataaggtaggcacaagaactaaggaacaattctaaaaaagaggaaatataaggaaacaacaacatgaaaagtcaatcaagctcattcataatcaagtaattcgtaaacatgaaacaatgaagcaacatctctttccagcaaggcacagcacagtaaatgccagttctatatagatgtcgctttaatgtggcgggaggcgtttacttgccatcatccacacagggtacggaagttggagtcagaaaaagaatgtatgaggagttgaaaatctgttcagatcaactccccaatggaaaatgtgcatgctcctcatcttactcaggaaaacaatataatcagtgatataaaaat

SEQ ID NO: 148066 - DNA, 749 bp, Homo sapiens
attttgccttgccttgaaggttattaataattctttgaaaaattgattctgagaaataacatgatacaagcaaagacatatttacaaacatactaaaccattttcgcaaatctgtaaacattcttaattttattattactctgtgacactatataataaaatatttatcaattacagttcactgtctcaaagaattttgaatggtctgggaaaatattaacaatataatggttagtgaatggagcagacaatatgtagactgtttatcccagtttttcaaaataaaatttgtacacagatattttaatatgaaaataccagcaagttaataggggccacgtccacttccacattcatatcgacttcaatgggacttgaagtgatatttatttaatttgcttttttaaaattttctattttgaatacctatttttattttcagaatacagtttaattttgaaaaaaaactatcttgcaatgttatttgggcgaactttataaaattacatacatagagatatgaaaatagcatgattacaattactgcacaagaaatgtgtcagaatgcttgtagtggttgttatagtgtgagctatgaatgttcctttccctcccttttctctgtttatttaatttaggggtttccaatcttttggcttctctaggccacattggaagaagaagaattgttgtgggctacacataagatacactaacactaatgatagctgatgagccagaaaaaaaaa

SEQ ID NO: 148067 - DNA, 269 bp, Homo sapiens
cctgcacaccattttctctgacagtggctgtgactggcattgatgcctcattgttctctgctagagccaccagatgtttgggagccttcattaggctagtgggaaatattatccgtttacagctgctccctttccgtctgtggggaacgggtatcatcaccttacctgtgatttggcgtcctaattattgacaagcgatagacattgtttggccaggcagttttacagccagaatcttaactgggacaggaggcatcctcagtgacttg

SEQ ID NO: 148068 - DNA, 602 bp, Homo sapiens
acccatgatgtccctgcttaggaggtaatggtatagatgactagatgacaaggacaaagatgagaggtgcgaagttgtccaagtccaacagctcaactgaactttcctaagtggaattgttaaaaagtggtaaatttaaaaacttcccctggctcacgtggtggctcacgcttgtaatcccagcactttgggaggctgaggcgggtggatcatttgaggtcgggttttgagactagcctggccaacatggtaaaaccccgactctactaaaaatacaaaaatttgctgggcatggtggtgggcacctgtaatcccagctacttgagaggctgaggcaggggaatcgcttgaagccaggaggtggaggttgcagtgagccgaggtagcgccactgcacttcagcatggttgagagtgacactctgtctcaagaaaaagtcatttcaatgaccacctcaggagattcataggtatctgacccacatctgagatgggatttgcattgcattttagctatgatgagaagaaatatttaatatcttagaagattaaaagcatactgtgataatatggaaatcttggtgggaattcagtcattagtga

SEQ ID NO: 148069 - DNA, 438 bp, Homo sapiens
gaggctgtactgtggattggagtacagattgagtatttaagagaaaagcaacaatgtcaagacaaaggaacatgggtaatttagaaaggcctccgaaaggtactaagctttcatgtgatatcatgcacatgttgtttaagagtttgtggagtcaaaaaggagtcaaaagctttctccttcagcgcaggagattttgtaatatttctaaatgatccagccaaacaacattggaggaagaaaaaaaatcaaacactacactacacaagccatcatcctgtcacaaagccattagcgctcatgaaaaacgatggtattgttaaggtttatttatagttctttcttaatcaaataaaaaatgaacaggaaaacactctgaatataaatttttaaagactttaaagacccaagaccagtagcaaaaacatgtatgaagacata

SEQ ID NO: 148070 - DNA, 444 bp, Homo sapiens
  misc_feature (14)..(14): n is a, c, g, or t
taatcgagctcggncccagttacaacagctttatgtatcacgatcattttgttgtatgcactgaaggaaacaaagtagtcataatcacctcaatctctcccactactcctttcttccctttcaccactccagtcaagctgctctccttgagcagggcaggctggctcaatggtcttctccccgtatgtgtatgcacgtgaccatctccctcatctttgagtacttgttaaatgtcaccctcaccaaatagcttttcgtaaccactctattttaatataaattccaacccctcttttcagccttccctttccacccaatttagttttcttcacagcaagtatcttcctcagatacactttatattttacttattaaatgtgtttatatctctcttcccctttgcaaaaaccagctccatgagctgttgtaactggttgttttgtt

SEQ ID NO: 148071 - DNA, 566 bp, Homo sapiens
  misc_feature (535)..(535): n is a, c, g, or t
agacggcactgtttcagctgcattgcataaggcttgacaggacattctcgattgtgttagcttctgagtactttgtgatttctattcttgttacatgtttaatgcatgagctactcagcagtgaattgaaagttgaaaacattcttccacttcgtttctactgttgatttaaaatttaattgtataatgatttaaaaaatatggcttgagactgaagtttggaaagctcccgagacttcctttgtcctggtagaacttttataacccttccgtgtgaactcagctatttgtagggaagattctatctagctattagacctggcttggcttgttcatttcactcttccaattttcagggtttcttttcttttttttttttaagacaggtcggagtgcagtggtgcaatcacagctcattgcagcctcagcctcctgagctcaagtaagtctcctgcctcagcctcctgagtagctgaggaccatcgttgcaacgatggtcctcagctgcagtctgtggagaacgacatccatgggntccgcagggtcattgatgacaccaatatcac

SEQ ID NO: 148072 - DNA, 429 bp, Homo sapiens
gccctacagatctagaaggttgtgtgtcttctgctctagaatcagaaccaataggacatatatagatatgtgagacattataggaattggctcatatgtttatggaggtggagaagtcccatgatctgccatctgcaggttggagacccaggaaggctggtggtgtaactcagtcttagtccaaaggcctgataaccggacgagctgatggtgtgagtcccagttagaatccaaaggctctagaaccagaagcaccagtgtccgagggcagaagatggatatatcagctcaagcagagagagcggatttgcccttcttctgccctttggctctatccaggccctcagcagattggatggtgcctacccacattggtgagagtggatcttcttagtctactgatggaaatgctcatctcttcacaaaatg

SEQ ID NO: 148073 - DNA, 311 bp, Homo sapiens
ggtaatctctgttcatttggattatcatgaattgcatatcattggaatctaaattaatgacctactgaacagagagggttgagcaagacatttgtggaaaggactgttgagaagaatatttatattaggtccaaaggccctcagtgaacctgagagagaatcagcttattttccttttaaaataggtactaaaatttcagagcagttgtctttcctaatagcttcgtctacttctgattgtcacacactctctctgcactcctgcatattgattattatattgtaacatttttaccatctacctggaggtg

SEQ ID NO: 148074 - DNA, 241 bp, Homo sapiens
gtttctctgtatctcatctacataagagatataatttgaatctgagaagaatcaaataaaccagattaatattttgggggcaaaaacatgtttactagttcaacaaagccaaatgtacctaagggaaaggtcaaaggatacttcattccctgctgagcaaatgctcaggaagcacatttgtctacattttcctgtcataacaggaagagtgtaacttcttcctttccacaatagcctaggt

SEQ ID NO: 148075 - DNA, 510 bp, Homo sapiens
ccatatcctgaagtcataaagatattctcctataccttaattgagttctagttttcccttttatggtatgctttgattcatctggagtccatcttcatatggctgttaagaacctggtctttctctattcacgtctccatttttctccatggagtgagggagttttccagcaccatctatcagacagtcgtcctgacctcaggggataatgagttcttcatccagttcccacatacggctctgtctatgagttcccttctctcttccattggggttagagcttctcacagtgaacaccagttattccagaattgcctgaagagctataacagcgtgggttcctgggcccaccagtacagcaggatcagaatctctggctgtgggcctaggagtgtgcatttcccaccttctggcagagactttgctgtgcactggagttttatgaagtattgctcaagtgaagacactgtccttaaacaaatggttattattcaattccttcagtaagca

SEQ ID NO: 148076 - DNA, 253 bp, Homo sapiens
tttgctccttttcttatttttcgtgaggggcaccaaaggcaatgggagcagttggaactgctgtgctacaagcatcaggagacacgtacaacaaaaggcactcatcaaaggacaaaaagtaaacaaaaaaaaaaaattcagccaaccatttagccttcactcacaaatatgagtgcctccttggtatagtcactatcccagaaagcagtcaacaagaaaaaaaaagaacccggccttcatgaagccttcattg

SEQ ID NO: 148077 - DNA, 176 bp, Homo sapiens
aaacactcccatgtccacaacacacacacatccttggcctacaccaattctacacatcttgcaaaacatgctcaagagtagccttccctgtgatgcccttcctgatcattccactccatgaccaattctctctgttctgtacacttgtttaatacatgaccctgtgctgtccttac

SEQ ID NO: 148078 - DNA, 334 bp, Homo sapiens
acatatcagggttagtttctatactaagctattctaactttcattattactcctcaaaaggagcttgtttatttatttttttcttttttcccccaccctccccaaaaggagcttgtttattaatcccagctgaggagcaaggagccactggcagccacagatctcactgctgcacagggtttttagaacttcagccataaaaatgggcagaattttccttgatcatattcgtggtacctgtccattttcttatgcaaactgtgatacaatcctgaccaaccgctcagaattcatctccacttggttcacaggcgccactggcagagcatttctt

SEQ ID NO: 148079 - DNA, 378 bp, Homo sapiens
tttatttgggcttaatgtttgaaaaattgacttattttatgatgacctatcaagtattttaaacttttgatatttggcaaagtttccagaatcaaattacaagttgtgtatttttctgacctaattaatcctctaagatattagtttccctaaagtccaaaaatgaaataaatgacttatttggtataaaaattatacaggaagcattgtcaaatataaaatggtgtttggttttctttgggctgtatttgtataaaaatgttattggtatgtgcaccaaaattatgggaaactcctataattctgatatgacatggtgtacaatatcactaataattataattgttatataaaattatcgtgtgccacagtggtaac

SEQ ID NO: 148080 - DNA, 348 bp, Homo sapiens
taggattacaggagtgagcagctgtgcctggccctaagactaatcatatctcctacacatcagtctagatacgaagactacctaatcctgtagtttgattctgggacatcaactatgatactgaaaatttcattaaactaaggatgacattaaattctaatgtaaaagtaatgataatttaataaggatatatgtgtaaaaaattaatctccatataataaagacacaatttttttttagactttgaccagaaaaaaatggctttaaattataaaatccagtgctgaagacatcattacctcaagcactcacagtagcaggtaaattgaaatgacaattgagaaggca

SEQ ID NO: 148081 - DNA, 378 bp, Homo sapiens
aacgctccaggacgatgtagagatcgcccaagccacgaaattgaaaacgttgcagtagagaatgggacacagccatgttgtccagactgcactcgaagtcctgacctaaggtgatctgccagtctcagcctaccaaagtgctaggattataggcgtgagccaccgcacccagcctaattctcctttatcatgaataatctatgactaactctcactattccattagttcttgtgtataataaataataaacatctattagctgttgttgacttggaataaagaaaaaaaaccaaaaccaacatctattgtttaagccatttttagtctaggttcttttacttgcaactaaaagcatcttaactaacatagaactcttt

SEQ ID NO: 148082 - DNA, 442 bp, Homo sapiens
catggggggaaatagaacatattattcttatgagttatcagtatgactaccatcgatactgccagtatcacccaatatttattaagtgttgactgtgtgtcaagaactatggttcgtgttaatgatgcattatctcttcctgctcacgaactctgtgaagcaggtactattattatctccatttttactaaggctttaggcagatttaatactaagtgttggtactgagtgtagtcttgctgctaaaggcaggaagctgtggtgtcctggcacatgaactgttaatatactgtgtgcttgggaattaggtagacttaggctattttccagaagtcatgagtgccctgcccaggtccacccactgacttcacagcccagctgagttttgcccttttcttgtgtcctcccaccctgtggtgtactgggtgtggcactgctaaaa

SEQ ID NO: 148083 - DNA, 831 bp, Homo sapiens
cccatccactgcccataacattttgcagaactgcagtacagtatcacaaccacaatactgacattgatacagtctgctcatcttattcatatttccccagtgttactcgtatccacgtgtgtatgcattgtgttttcaatactcttttattataaagctgtttttaatgtgattcaattctaggttgttttgttctgccctcaaaaagcattccctctcctaatcatatctccgtcatacccttgtatgttttctttaaacctgttttaagaaagcagctacctgtaagagaaatgagattgaaaacagaattgccaatctgcttgtactttataagcctgttgattgtttagatacggtttagccagtttatagttaccctgggtgctgaaaggtatgctggatgatacctaaccaacagagaaccattgaatgccgttcaaaatggactgaagcatcagcaatgtctgaaaaaggcctgacagtaatgtacatgtcaaatggcccgtaatttaagcagagtagagtaagtagaagaataaacatggggaaagttccagcaacagaggaggctttgagcttttgctcttcatcttgagtggatgttgttctcaggtggtaataggccatcgagctttctccactggctgcctctctggggaacaaataaccgaaaagatactcagcaccctggttggtacataggtggtcagttgatttatacttcctggttttcagtgttgcttgaattttctaaatggaaacacagtacctttataatcagaaaacaatcccgagttttgatttgagggtgttgtaaaaagttaaaaa

SEQ ID NO: 148084 - DNA, 777 bp, Homo sapiens
cccatccactgcccataacattttgcagaactgcagtacagtatcacaaccacaatactgacattgatacagtctgctcatcttattcatatttccccagtgttactcgtatccacgtgtgtatgcattgtgttttcaatactcttttattataaagctgtttttaatgtgattcaattctaggttgttttgttctgccctcaaaaagcattccctctcctaatcatatctccgtcatacccttgtatgttttctttaaacctgttttaagaaagcagctacctgtaagagaaatgagattgaggtttagccagtttatagttaccctgggtgctgaaaggtatgctggatgatacctaaccaacagagaaccattgaatgccgttcaaaatggactgaagcatcagcaatgtctgaaaaaggcctgacagtaatgtacatgtcaaatggcccgtaatttaagcagagtagagtaagtagaagaataaacatggggaaagttccagcaacagaggaggctttgagcttttgctcttcatcttgagtggatgttgttctcaggtggtaataggccatcgagctttctccactggctgcctctctggggaacaaataaccgaaaagatactcagcaccctggttggtacataggtggtcagttgatttatacttcctggttttcagtgttgcttgaattttctaaatggaaacacagtacctttataatcagaaaacaatcccgagttttgatttgagggtgttgtaaaaagttaaaaa

SEQ ID NO: 148085 - DNA, 519 bp, Homo sapiens
atttggcttcgtggcgtcccaaattctgaacatgccttgaacctgtcaccagccctgggctgtgaccactctgatgtgcagatttttacaggcatgggaactaagaaatgatcctgggtcaatgatgtgcatttcattacctgcaccctcactggctcggccttcctgagagggctcctgctggccctggtgactaagaggctgctcctccagccctacagtcagcagtgttgccattgtgtccgcctcacttcctcccctcttgcaaatgatcaccaggtacccaggccccacagttttcgcctgatcctctggctgctccagcttggggaatgcagagaagtcaggtgagctctgcagggacgagactgtgcacagaggggaaacagttacagctggaccccagatccccgcactccctcccactcccgcgtgtactggcgggagagagctctggtccacgaatggggatgcctggtttcctgtctcagctctgccacagtcttcgcctgatgggta

SEQ ID NO: 148086 - DNA, 397 bp, Homo sapiens
aagaccagcttcctctccggtctggcggatctgttctcaggctgagcagagagtggcaaaggctgcatctgcgttgcttgctcctggcattgcctgcctgccagggcaccacacaagagctcgggcttacaggcacactttgggtgaagtcattcttccctgaaaactgagatgggaaatttatcctgacatgtcagaactgatgaagaaggctaagcaatggctacctgagcattagtcttgggagtgtgttctttcaagcacaggtttaggtttgcccttctattgtttcttctactaacacattatgaaggtagatttccactggaaaaaaaagaccagaatttgaaaatgtaatagagtgcatattcattattaagattataagaaagccttt

SEQ ID NO: 148087 - DNA, 446 bp, Homo sapiens
ttaacaccgtcacactcccacactgctccctcattggaagaacccatggataaaggaacccctccttaaactgtccaacctcccttagaaattgtttattacagtcatgttctgtataactgctgttgttacaggatcgcagtctggcctccttctctaactatcagaacaggttgtttcacatttttgaaacccattttcctcatttgttaaatatcactcagtgaattttactgtcctagtgagctatttaaaaagttaaggcacaaattaatagtatatccataaacagcattcccctaaaatatccccgtctagagttactacttagaatcaggacactgacaagttagtctgtgaaaagaatggcatttctccacatgtagaaaaatgtcctaagaaataagaacctttaaaattccaatctgcacctggctaagaactcc

SEQ ID NO: 148088 - DNA, 291 bp, Homo sapiens
aagtcctgccttccttttagccatgctgatggctgcaagcttgtttctttgtaatagccatagaacatttctattctgtcagtaaccattccccagtgggtggatttttagtttggattcagtttatttataataaatacagggccgcaatagatggcctttctactccttttctgttattgctgacacatagtcctctcggtcctcagtccagtgtgggtttccctgggctgaagtcaaggtgttggctgacacacagtcctctcggtcctcagtccagtgtgggtttcc

SEQ ID NO: 148089 - DNA, 221 bp, Homo sapiens
agcctctcactcacaccactaatttttttagtttttaaatcacccaactagtttatttttatttttattttttgtagatacaggtctcactatattggcctacagtagtctcaaactcttggcttcaagcaatcctcccacctcagcctcccagggtgctgggattatagggtgagccactgcttccggccctaaaatgactttttatgagagattgaaca

SEQ ID NO: 148090 - DNA, 1146 bp, Homo sapiens
atgcttagatactgtttcttccctaagatgtgtttctcaaccacaattggtggaatgaaccagagaggcaagaggaagtgaattgcaccaatttagtttagcgactgtgccttttgcaggaaaaactgggtgaatcacagctcctcagagtcctggactcaactagaattgaagatagacttattttgctgactgggcttcttagagtttatgtgacttgaacagcttggcccctgcctcccttctgctactgtgagcagccttccttcttccttcattcttcctggaatgcagttctcttgcttatgatcctatgaataaggcaaaatggctggtctttgtaaggcaggtcttgccctagcttctcagaaacaggagcattttaggatcagtattaggagatgccccagggagtaagaaagtattgggttcagtgataaatctggactctgacatttcttttactctccctctttaatactaaaagctctgcataagcaatggttcagaacctgtcttgggtacagacctgttgaatctgacagaaaccagaaacgcacttttgagaaaaagacatttgtaattcactcagttttccatacacatttagcaggttcaaagcccatctgtggaatccctaaactgccttcaaagaaagggagttccccgatctaaaatggtcattatatatttgtgtcaagaattagaaggcaagggtcactaaatattttaaggattaaggtaccagaggcatcagtggtataaggatggagtctggtctttaattacgacaagggtattgcttacattctactctctggttttcaaaaagatctgacatgctgacaaatccagctcctcacaaatcttgtttgaaggacttgtgggaagtgatattccttactattagatcacgccccttataactacatgttaacatccagccttttatctgtttgagtaattgtagggatagaaagtgaagcccccagagttaggtgcaagtatagcacccagctgaaaggcatcatggagtctaagggccttctacagaaggggcaatcctttgggttatttctggtgtaccactgtcttctctacctcggtccaacaccacctctcttggacaaaaaataaaacaagcaa

SEQ ID NO: 148091 - DNA, 1092 bp, Homo sapiens
atgcttagatactgtttcttccctaagatgtgtttctcaaccacaattggtggaatgaaccagagaggcaagaggaagtgaattgcaccaatttagtttagcgactgtgccttttgcaggaaaaactgggtgaatcacagctcctcagagtcctggactcaactagaattgaagatagacttattttgctgactgggcttcttagagtttatgtgacttgaacagcttggcccctgcctcccttctgctactgtgagcagccttccttcttccttcattcttcctggaatgcagttctcttgcttatgatcctatgaataaggcaaaatggctggtctttgtaaggcaggtcttgccctagcttctcagaaacaggagcattttaggatcagtattaggagatgccccagggagtaagaaagtattgggttcagtgataaatctggactctgacatttcttttactctccctctttaatactaaaagctctgcataagcaatggttcagaacctgtcttgggtacagacctgttgaatctgacagaaaccagaaacgcacttttgagaaaaagacatttgtaattcactcagttttccatacacatttagcaggttcaaagcccatctgtggaatccctaaactgccttcaaagaaagggagttccccgatctaaaatggtcattatatatttgtgtcaagaattagaaggcaagggtcactaaatattttaaggattaaggtaccagaggcatcagtggtataaggatggagtctggtctttaattacgacaagggtattgcttacattctactctctggttttcattgtgggaagtgatattccttactattagatcacgccccttataactacatgttaacatccagccttttatctgtttgagtaattgtagggatagaaagtgaagcccccagagttaggtgcaagtatagcacccagctgaaaggcatcatggagtctaagggccttctacagaaggggcaatcctttgggttatttctggtgtaccactgtcttctctacctcggtccaacaccacctctcttggacaaaaaataaaacaagcaa

SEQ ID NO: 148092 - DNA, 450 bp, Homo sapiens
gtctatagatgattgacagacacaggaatggatgagaccacaagggagaggacagatggaaagaaatatccagctcttggaacctcaacatatggaagaggaaaatggtgggcaaaggagacggaggaaggagtgtttaacaaaggagagattcatcacatgacttgagcaccgctgagaggtagaagaaattgtcttagtccattctggctgcttataataaaatatcataagctgggtggcttacaaacaactgaattgaatttctcacagttttggaagctggaaccccccaaatcaaggtgcccgcagatttgatgtctgatgaggaccagctccctggttcatagacagtgccttcttgctgtgtccgcacatggcaggagggtgaggggtctctcccatgtcttttcttataagggcactgattccattcatgagggctccacc

SEQ ID NO: 148093 - DNA, 281 bp, Homo sapiens
ttggctttggtaatctatggattgtcacaaaggagtgttctagaaatttagtcttaaccaaatagaaaatttcttagtgactgtaggcagaatttctcttagacacataaaataatcttccccttccaaacctgacattctttaagccctgtatatgtacttttttagaccatgtaagcagttactgatagaggttttttcttgtagaaatttcaagtgttgaaagtaggccaggtgctgtggttcctgcctgtaattccagcacttgggaggctgaagtg

SEQ ID NO: 148094 - DNA, 248 bp, Homo sapiens
acaagaactacagcgagaaaagggagacagaagaggatggacgttgctttgcaatcaaattgcagatttttttcccatgcttactgtgtttgggaaaaaaaaaaagtgaatcatgttcccccattcatgattacgaagcattgcatcctgccatattttcttcagtacttactgttcaatcacctctccacagaggtagttgtgctttggtaatgtatcaactttgtaaaataaaaaaattcaattag

SEQ ID NO: 148095 - DNA, 367 bp, Homo sapiens
ttggcagactttagaggagggaggtgctccaaagcttaggctggatgcagagccagaagcgcaagtgatggctgcggcttctaacttagggtagcctgtgtccatggtgtttccagggaagacttcctggaggaggagtgaatggatggagtagataggaggctgggacgtagtggaaggatcaagtctgaggccctgcacctgggtggaggggttgagggagtaaggataacttatttttcccttcttctattccttgaagtttcaggccagtggctgctttatctaagtttcctcctagttcctaggatgctttaaatgtggaccatgtgagtggggctgatttcatttggaggagggagagcag

SEQ ID NO: 148096 - DNA, 838 bp, Homo sapiens
gaatatggcatcttgtctgtcttattcaggatgaagagtaacctgcttattttgtctcctgtgtcccttattccttgggaggtttccctgggtgttattcttaaaaaaagtcagctcacgaagcctaaggtttaagtctgttcaacttagtagtaaattatggtaacctagggtagggcaaatagacctcagtcaagttcatgcagcaggatgagggtagtagcttctgagcatgtgggccgagctctgtatcagtgtggatcccatatttgaagatccttattcatatattcctcaggaaaactagattcctttgcaatttctaaatctacatgaactaagatctcatcaatgaccactaccacaacacatacatacctttactaataaacatactggatttagatgtgagaattaatgatgggtttgttcaatattttccttccaagctgactgacacagtttataagcttatatttatttttctggcattctttagaaatgttttttgggacaaacagccaagtttaacatgaatcaaaatcttggcctgccctttcaactcctccacaataggctccagcgccactctgattttttctctcctgcaacatttaattattaatcttgtgacttttgaaaaatgtcatgtggtttggtagtctttcaattaaaaggagggaaataataccctagtatttttcttgttccttccacctccccttaccattgtcctctctagtactgatgagtactttaaagttgatttttaggctgccctgagtttctgaatgttcctaaacaccattattaaagaagcctgcctcacccgtcattc

SEQ ID NO: 148097 - DNA, 471 bp, Homo sapiens
cctcacctcccacgccctctcctgccactagtctctcccaccatatcctcctctgcggctgccccggggcccagcagctcgttgctgtgtggaggcgtcttcctgtcccccaaccccgctccagtgctatgtgtttgtcctcctgtcctggccgagggcaccatccttcttggggctggggccacgctgcatctctgctgctttgttgtgggagtggacagtgctcagcctgcgctgctgttcctgtttgtggccgtgttggggtttggtgtgtgttgtccagaaggggaaggctgaagcccgcgttctcacccagggcggaagcggtcattgagcccctgtgtggctctgcatgtgtgtgtggagtctgcatgtctgtgtgcatgtttgtttgtatgtgtaggtgtatggtgtttatgtctgtgtgcgtgtttgtatgtgtgcatgtgtagtgtctgtgtgcatggtgtc

SEQ ID NO: 148098 - DNA, 185 bp, Homo sapiens
cagagtgacagaagagccaagtagaggacgctgaattcaaacccaggcagatggacgtaaggcctttgcttttcactatacattacacaccttcccccagtctcaacagagccaagtgtcagacactcatgattctgacttcagcatccattctgttaatctctgcactattctgttttatagtt

SEQ ID NO: 148099 - DNA, 219 bp, Homo sapiens
gatggtctcgatctcttgacctcatgatccgcccacctcggcctcccaatgtgctgggatgacaggtgtgagccatcgcgcccagcatggaaatgtgtactttcaattgcacttgctaattgaaagctggtaaccaagtcaaagataaggcagaaaacaactgcggcagaactagacttcccaacaagccccctccactgttcccagttctggtgtaat

SEQ ID NO: 148100 - DNA, 188 bp, Homo sapiens
ttgttttttccttcttcctccctccgtatctcccttttccctttctactgccaccctgtgagccaccatgcccagccctctattctgtttatttaaaatgttgctaataccattgaccttgattttaggttaaaaaaaaaaagaactcgtagtagatttttgcctctcctctctcctccccctctcct

SEQ ID NO: 148101 - DNA, 209 bp, Homo sapiens
tgagactcatgcttttggcagctgttgggcagctgagtataaaccagactaaggtggttggggcagaaccccagagtactgtcccctgagcctatgttcaagcaatgcagagtggcaaccagaggatgctaaactcgaaggagatgacttgactttatcatgatcactgcctgcagttaccaccaggaaggcctaacacagggtgcagg

SEQ ID NO: 148102 - DNA, 181 bp, Homo sapiens
aaagctattagaaaaaaaaagtgattaaacacaatagacaatgacttaagggaaagaaaaggtaaaaaagagaatagcttgaaaaattaaaaagaaatggtcagacgtggtggctcatgcctataatcctctgggaggccgagcccggccttttttgtttttcttttttttctaatacttg

SEQ ID NO: 148103 - DNA, 488 bp, Homo sapiens
taacaaataaagagtcattacatattagaaagggatccaatcattaggaagacataatcctaaatgtatatgtactcaatcataaagttttaaaacatgaaaagtaaaactgaaagaatagttaaagcagatttcaacattcctctttcagcaaataatagggcaagcagacaaaaaaaattgtcagaaataagacttgaatagtgctgttgacaaacttgacctaattaatacttattgaacagttggtaatttcaacactcctctctaagcaatccatacatttagagaaaataaatcagtaaagatataaaatatacagtaaagatataaaagtgtctttttaaaaagtctgtcagttgacctaattggtatttacaggacactccagccaaccaaagcagaatacacattgttttcaagtacacttgaaattaaagtagaaaatgaattagttgggcgtggtggcatgtgtctgtattcctagc

SEQ ID NO: 148104 - DNA, 382 bp, Homo sapiens
tctcgtggcggcttattgttattgccctgatacaaagttccatcttcctcatttgcctgggaccaatatgtctgagctccctcctcctggacaggaaagtaactacctagtcattctggggacccaaagaccttgctaccaagtgggtctcctaactaccactgagctggctagacaaaaaactttctgggtgatggtagccttgaggtttggctagggtcaccctcccatgacccagcataggattggctggaggctgaggcagatggatagactggggaaattcagggctgatgagaaggaagccactggcccacaggatcactgctgaagcagtttatcttctctgagttttcagtttgaggaaaatctaactatagaa

SEQ ID NO: 148105 - DNA, 474 bp, Homo sapiens
gtgattcaaaatgctgacgtttttgagttccccttttgggagaggcgcatgtttccatttcaaatgtccgtcatcagacatctgctgccttcttgctgctgctctcgttttcccagctgatcatcctctgctttgaccatccctgttccctctatccttgttccctgggtgggcttagcctagttctctgagggtgcttcctttgcattctgcatctttaggaagccactttgcttgttggtttcttcctgagcttgcattagtccatggtggacaactgggttggggaaataatatatttgaagagcttagagcagcttggctttattttttgaagggcacacactgtccccaaaacaggcttttaaaacttggcatgtgccaggagttccaggctgcagtaagctatgaccacaccactgcactccagcctgggtgacaaaacaagaccctgtctcaaaaaagaaaaaaaaa

SEQ ID NO: 148106 - DNA, 251 bp, Homo sapiens
tcaacccgaacctcaggcgaaggtttggggacaagactaagctcagctcccagtaactggccctccccttgcctcaatcccttctggaacaacacaggctgtgccagcctgcacagggcagtgcagaatcaggaaaacctggctggggccagagtacccgggcacatcctcgctctcctgggccgcctggggcctgcacctgccgggggatctgccagcccccatacctgcggccgggcacatttaactgt

SEQ ID NO: 148107 - DNA, 498 bp, Homo sapiens
tgccatttttgtttgaccacttacaaggacaaagagggagcacactaggttttggagaactgtaattgttagacatatctcctttatattcagccaactctgtaactcttattcattaattttagtgctgctatggaaataacactaggccttttgcttatttgaagccagttttcaaaagcagttataaagatggggagacatacaataggcacgggtcacaacgtatgagtctcatgtctcagcacaactgcataggcagcttgacttcctgtgccttctgtaatagcagcttcccggtttagcaagcatgttggcttcaaatccaatcattccttcagaagcaggaagcaatgtcaggttatcatgcaacaatatcaaatctggggcaccaacagcagttatgaggaaatcatatatatattgtgttccttctccaaatatgagtttataaaacagcaaacaccacaaaacttttttcatcttctattattgagg

SEQ ID NO: 148108 - DNA, 445 bp, Homo sapiens
ccacaccctataacctggagccgggactgacctcagacatacccagacctgctgtgcgtgggccatctgagggccccatggcagcccactggtacgtgggtcactgggcccatgagcagtccccaaggagcaaccaagaccccattcagaaggctgagcaggggctgcgtttcaaaccttgtcccagaacccgggcaagctcttggctagtgcgaagaaagtggccgcattcctgggctgctcccatcccgctggcttccccacggtcccgggctggtaaccattaaccagcagcaaaacagcccgttaatcagagggctccatagcgcttcgtgtgctaggggaggcagggcctgtgagaacctcggtgtctggctccgggaaacctttcctaacactctccccaccttctcacccctgcatcctgaaggacgccaaccgccat

SEQ ID NO: 148109 - DNA, 328 bp, Homo sapiens
gggcctgccttgcctcgggcagaccttcctcacctcgggcagaccttcctcacctcgggcagaccttcctcacctccgatctgtggctctttggccacagcagcccctaacctccggggactgtcactccccaaggaaggtcggttctgagctgtgtctggaccctgagcacagacactgcaaccccgggccttgtctttctgctcatgccggtgagaccagggcaagggcaagggcgcgggtgagaccagggtgagggtgagaccagggtgagggtgagaccagggcaagggcgagggcgcgggtgagaccagggcgagggtgagac

SEQ ID NO: 148110 - DNA, 264 bp, Homo sapiens
tgccaatatgtaggttctggtcatggcagcctgtctgtgaactcctgctcatccatcaatacccaggtcagaggcctgcactctgtgaaaccctccggcaccctcccaagctcacctcctgctcctttcttctgtccagtggtgctgtggctattcctcgatgtaataatcatcctagctcacagtagtgggtgctaacaacatgccatgccagacactctgctaagcactttgtgtggatgatctcatcagtacccattagga

SEQ ID NO: 148111 - DNA, 190 bp, Homo sapiens
atatttagttgcttgatttttaattacaacattgacttgtaaaggatgttcccaactaaaaaataaaatgaagtacatgattataaaaataaatattagaattttttctagttttactactttgaacatgttttttctttcactgagaatgtgttaataggcgaaaatgaagttatataatagataactt

SEQ ID NO: 148112 - DNA, 198 bp, Homo sapiens
ggctcaataagcctagacactacagtaaagagttcattaaggtgactaacaagaaaactactaacaaaaaaggcacgtgtaagtcttgctaaccaacggactgcctcaagaggctgtctgaaaagatatgcttggcaagctaaggtccattttaatttgcttaagtttctcaggcataagaaaaaaaataatggtcaa

SEQ ID NO: 148113 - DNA, 308 bp, Homo sapiens
cctgcctcagcctcccgagtagctgggactacaggcacgcaccaccacgcctggctaattttttgtattttagtagagacggggtttcaccatgtttgccaggatggtctcgatctcctgacctcgtgatcaaccccccactcagcctcccaaagtgccgaatttaccattttaaactatttttaagtgtacagttgagtattattttgcagccatctcaaaaactcagcttcccaaagtgaaattctgcgctcattaaacaatagctccccactcctccccacaactcatggtacccattattctac

SEQ ID NO: 148114 - DNA, 296 bp, Homo sapiens
cagggcgcagcagggatgaacatgccactgtaagcagggggtaaacaccatcacagaaggagaaaaatgtctctaggttaagcagggagaaaacaccatagggaaggagaaaaatgtctctaggttccttgggagaggccaacgatatagaaatcaaagcatttaagcaaaagaaactgtaacaactgtttctgttcttttcataaagctagattgtggatttctatgttccaaggtagttacacgggggttttttttgttttgtttttttgtatttttttttttgttttgctttg

SEQ ID NO: 148115 - DNA, 488 bp, Homo sapiens
taaccagagtccagtggggtaaatgcaatgatggggcccaggagggaggagtgagcacctattgttttgtggaggaagaaaggttaagctttatggaggaggtgcaaataaaatgtgaataacaatatcagtatagatataatttttttcatgcagtacaaaaggctataaaatgaaacttctagaggattatctagactccttcctgcaaagccacagttaacaacagttaggttttttttcttcttcttcttcttgaaataactaaattattttgaatggtgaatgtaagctttatgaggctggaactttttgtccgttctgttgcctgttgaatcttcacctaggagagcgattgacacttaatagatgctcagtaaatatttgttgaccgaataaatgagcagtagaatgacatgatgagatcttttctagacagagatgactggagggcatcagggctggagactgggggagcaatgcgtgtt

SEQ ID NO: 148116 - DNA, 203 bp, Homo sapiens
aaaaaattgttgtcaatcaaaccaggctacactttcagtactttgatttcagagacattaactgtggaaaaagtgtcttaggacccatgacataaggtctgcctcccagttaatcacagatgtggccttgcctagcactccatggcatgaacctgaaccctgaccctgcgctccccggggaagggtctgcctccgccaggccc

SEQ ID NO: 148117 - DNA, 491 bp, Homo sapiens
atggtcctcttagaaaatctttagcacatgtggtgtgccacagggacagtgtgttgaggtcagcaccatgttctgcagagagcaggggctttgaactcagaacaccggctccctgcaccctccctatccctcccaactggccacagcccctaaagctcttactttcagtgttgcacagctcaggccctgagcctgtggaagtccagctgggagtcatgaatgagcccagggcctggggcctgagacctggggtagacttgcagcctaagctggaaaccctggtggagccctcaaggatcttcaggtctcagagctcatggcctcttccaaaccccagggagtgcccttttcagggtgagtgggtcctctttgcaaagttctggttgctctgtggtaagccaggaccttgcactagactccgtgccaaacagggtgcctgtgacttgccctgagtcactcctggggtctaccccttcaggcagcctcatctc

SEQ ID NO: 148118 - DNA, 382 bp, Homo sapiens
tgattgggtgaaaactaatgcagaagggaggatgagcgagaggctgcatgggtacaaagttacagttaggaagaagaaattgggtgttccattgcacaggagggcaatgatagttgacagtaaaatatcatggccaggcatggtggctcatgcctgtcatcccggcactttgggaggccaagtcgggcagatcacttgaggtcaggagtttgacagcagcctggccaacatggtgaaaccctgtctccaccaaaaatacaaaaattagacgggtgtggcggtgggcgcccataatgccagctactcaggaggccgaggcaggagaatcgccggaacccgggagccggaggttgcagtgagtcaagatggcgccgctgcactc

SEQ ID NO: 148119 - DNA, 508 bp, Homo sapiens
gagaacagaaaaagatgaggattccacatttttcctctcctgtcttcagagacagaagttggcatgaaagacactgcaaagttaagagagcagatcaggagacacaagttgtgtctccagtgcttagtcaatttcaacctatgatttacactcccttatgcttctggagcccggtcaccgggcgagtgtgaggggagaggtcagctccctttcctggcagccgtgtgctaaggaaggtctctgggttaggcagctgggccatgcaactgctgcaggctgcctttctctgtctgaagccccaggccccactgctgccgtggcctgtttaacgagctgtcagaggcggctgcagtcccacgtgccttcctgtgttgactccaaaggctattttaagcagggaagatggtgggaaacaggaagtgtcccagctactagaagttttgcatccttcaaggagaggggctgggaaccagatgtccccggtgaccggctacggagtaccgagcag

SEQ ID NO: 148120 - DNA, 326 bp, Homo sapiens
ccagccaattccctccctgggattcccctccactcacccggaaaacagtgagagaaggatctagaaatggccacattaattaaggtcaaacagcagaggccctaagggccatttctacttgggactttacagatatttcaatgtcatttttaaaaacatgtctccactcagggaatgggaatcttaagttcccactcctcgttaaccaaatccccagcctcatcatgggatactccagggttcggcatcatccttccagggtttcagggaggcggtcaccctcagcagctcctcttgcagacagcaggtgcacagcagggttgagc

SEQ ID NO: 148121 - DNA, 809 bp, Homo sapiens
gccggcccagataaggaagaaagaaagaagacaagaaagaacgaacgaacgaacaatgggaaaaattgactgacagacctctttaggtctgcgagtttctcatagtggttcacttcacccagtggtgcatacaaagcacccaaaccagttggtcttttcctttcttgtctttgaggctgggctgctgggttctaataagtgcagtatcaggcttccttaggattattttcattcctaattcaggttgagcagagcccacgatcaaggtctcagtatacttgaagtttctaccgggggacctaggtatcctactatgaaaacagactaagaaagtcttgttaacgccttcatttgattgattgattgattgattgattgattgatttattgccacatagaaagcaagcttaggcatcttcatgtgcacatgagaaaagccctggaagaggctgggggcggtggctcacgcctgtaatcccagtactttggaaggctgaggtgggtggatcacctgaggtcaggagttcgagacgagcctggccaagatggtgaaaccctgtatctactaaaaatacaaaaattagctgggcatggtggcacatgcctgtagtctcagctgtttggggaggctgaggcaggagaatggcttggacctgggaggcagaagttgcagtgagccgagatcgcaccactgcactccagcctgggtgtcagaaagagactccgtctccaaaaaaagaaaaagaaaagccctggaagacagggcccagcatggagttgaaagactgccagtttactccttcctttca

SEQ ID NO: 148122 - DNA, 251 bp, Homo sapiens
ttgacctctcgctcacgaacaggcatccttctcaggaacagcaccatgtgtgatgactgaattagcgtctctggccagccacagaggagggtggggacagatgtataaaccatgaacttggctaacaagcaaatgaaggctacacagaccaaatcccatcaatcaaaggacccacttgatttcagttaagggcggacagtagaggtggggagcacatactcacggtaacccagtgttcggttgagcggaga

SEQ ID NO: 148123 - DNA, 318 bp, Homo sapiens
ggctgctagcatgtcaggaatcaaataaaaagagagggctggggaaatctcccttcatcatttagtaagcacacagtcatcaaatccccatgttttgggaaagatatacatgtcctagacatagattagggtctcccagtccagagatatttattttcccctctctagagaagaaacttccagtctactgctaggatagggatggagcagttacctggtgagtaagagaacagatttagagaaataacagcttttcaaacaggcctttcattttaaccctttcatcccctgagatagctgatattgccaattcctgag

SEQ ID NO: 148124 - DNA, 738 bp, Homo sapiens
ctctctagttgtgttgcctgtggattcaaagaagaaaacattctcagaaaaatggaacccattcttcaagtaagggaatgtggagagtgacattctcctgctagtaaggacaagagatgataaaattgaactaaggtgatcacaatgggaatgaagagaagcaaacacattcaggagatatttctgggtccataggactttgtgacttcttgagcacagtggcgaaggaaagacagatttaaggtttctagtctacattcatatatggatagtgatgactacaacccatgggaaacatagagaaagtttcattaaaaaaaggacaggtccaaaggcagtctacaaacttcaggggagtacatgctctggtcaataaatgtgtagttattcaaaatgcaaggttcgataaacataagaaaatgtgccaaattcattagtcatcagggaaatgcaaagtaaaagcacaatgacatactagaatggctaaattttaaaggaccaatgataccaagtattgatgaagacgtggaggaactcattcaacgcaggtgggagtgtaaattgatacactactttggaaaaatgtttggtagtatttatcaaggctaaaatatgttagcaattcctctcctggttatatgaatagtctacaaaaatatatgtatgaaaatgttcagttattcacaaaaactggtaacaagctaaataatgtcttaaatgtagaatgaataaattgca

SEQ ID NO: 148125 - DNA, 413 bp, Homo sapiens
ggagtgtgcctatattgcccaggccggttttgaacttctggggctcaaatggtcttcttgccttggcctcccaaaatactgggattacaggtgtgaaccatggtgcccagccaaggtcaactgatttttaacaaatatgccaagacaattcaatgagagaaagtgtaggaaaaaaagtcttttcaaacaatggtcctgggacaactggatacccacacacaatagaatgaagttgaaccctcacctcatattatctataaaaattaactcaaaatataacaaagcctttgtttataaaacatttgttagactgaaaagtagaaaactcttttttttgtttttagatggagtttgcagtgagccgagatcacaccactgcactccatcctgggcaacagagactctatctcaaa

SEQ ID NO: 148126 - DNA, 532 bp, Homo sapiens
actgaactgcatatcacaaactgtgctctgtaaattggagggtttttgttttgttttgttttcttatgaaattagctttgagctataaaagatcaagagaatgtgaagaacagttgttctaatcacagaaggttgaatatacccagtgattcaaagacagaaaggagaaaaaggtctgggggcagcgaggtagaaatgggaaggaaggcttttagaaaaaaccttgtatgagaacagaagatgaggcaatttggagatagagattgtgggtggattgtcaggagtccgacggtgataatggatgttccaacaaaaggtaaacataactgcagataaaacctctaaaaatactttcctttcctaagagatgctgaaagttctgttctctgagatacaggggtaaaatgaaattttgtgggtgatttatagcaaccatattttgtttgtgagtgtgcggtgctttgtatggtgcatctatatctctgtgttatcatctaggacagtacttttcaaactttgtgcatcaaagttg

SEQ ID NO: 148127 - DNA, 525 bp, Homo sapiens
tcttcagcacagttggtgttggctgaatatttttgactgaggctaaagggtcattttgggttttgtcagggtctcagagccagtgtggtcctctctgtccatgggatccgattgtcggaagcattgatgccatctggcgtggaggccgtccaccgtggggactgtgcagcgtgggggccatctggcatgggggctgtctgatgtgggggacatccagcttggaagctgtctggcgtggatgccgtccagtgtggttgctgtctggcatggaagctgtctggtgtggggactgtccagcgtggaaggtgtctggagtggaaggtgtttgatgtggggaccatccagtgtggggctgtctggtgtgggggccatctggcatggaagctgtctggcgtggggactctctggcgtgggggccatctggcgtggatgccgtccgatgtggggactgtccagcgtggaagctgtctggtgtggaagctgtccgatatggggactgtctggtgtggaagctgtctggtgtgg

SEQ ID NO: 148128 - DNA, 507 bp, Homo sapiens
agactgacccagcttcgggcatcagttttgactcttcctttcctggcagtcacagtttctagaggtgaaggtcaccagagctgggcaaactcctgagccaactgcttcccaagcctgagtaggttaaaaatactgtgtctgctgctgccaaggaaaagaacatacaaggttgtgccttggcaggccctagcagggactgggtgccccactgcaaggaaaggtggggccctgatagaaaggaccaaggatttgggcaaagatatcaggtaggctcaaggttagacctgaatcagaactccagatgacatcttaggtaggaacaccctacccaccttgccagggaagaaaggcctaagggcggcctggtggggctgggaggagaactggaaagttctcttgccttcacatgtgagctcccacagcaaacttcctgaggctggctctaggcctgtaccatctcctacccttcacggggatggaggggaagttgtatgtggaagccaaatg

SEQ ID NO: 148129 - DNA, 340 bp, Homo sapiens
cagcctgctgggggttggagggcccagtagtagaaaagggcttcatggtatgtaccactaggaggcagctgcagaaaggaatcctgagaagtcagagggagagagcaccactatgtcagggtgtggtctagtccatacctatccacagggaagctctgatgaattcaccaatgaaccccgtgcctattgcctaaatgtgggtgttgccatgtttgagggcatttgacaggatatttttgtgtaaggtgtaaggaaggggtccagtttcaattttctgcatatggctagccagttctcccagcaccacttattaaatagggaatcctttccccgttgcttg

SEQ ID NO: 148130 - DNA, 393 bp, Homo sapiens
tgataacatgttaaactactactaattttttggactttcctgttctttctcactgacagttatgtcttgggggtcctgggggaggtgtcaaactgctattgttggcattcctacatatgtccttgatattttttctactttacatggaacagaaagtactagaaaatttgtaagctgaagatgcctttttgaggttcttgcatctgcgctatgacaaactgctaaacatgtacagttcttgagcacaacattccttagcactataatttatatatccttttttggtttagattaaggactttaagtacagtcctttctagaaaccaggaaacagttgttaaggtcctttccagcctcataactgcaaaacctctaatgtcactgctgtactaa

SEQ ID NO: 148131 - DNA, 474 bp, Homo sapiens
cagagtggatagatatccacatgaatttgacagattacacataggtaatgctttagagttttttgaacattttcagaaacagtatttttaaattttatttgcaaggaaaaaatgcttatcagtggcaagtcaggtagggtcatgttcaacattggtcaattatctcacccattctgatcacttgctctgttcccgccactggctcttcttctccctcttaaatatattcaggctccaaggcccgctctctagactcttttctatcttttaagagacaaggtctcactctgtcacctaggctggagcacagtggtgcaatcaaggctcactggagcctccaattcctaggctcaagtgatcctcccacctcagcctcctgagtagctgggactacaggtgtgagccaccgtgccccagccctctgttttataattagctataaattcagctactctcgttctgccgatgaatctc

SEQ ID NO: 148132 - DNA, 356 bp, Homo sapiens
caatttaactgtctgtgtgatgaggatattggaaaggagtttctgactgattcattgttcacacttgcctctcccagccgagggataattggggccttgcctaatctgcactcgctcacacccaacatgtgctgggcggggaaaaaaggctgcaacctggccggctggttcccggacctggccttgcaccaaccaggaagatctcttctctacctccttttctgtgttcaaggtgatacctgcttaggactcccagaaatatcattagcaggaaagttccacagatttaatctagtctaaacctctgagagttgaggacactgagacccagaaaacctgagtgattttcctaggaa

SEQ ID NO: 148133 - DNA, 525 bp, Homo sapiens
tcaacccaaaccacagaaaatgacagtgccatacagaatctgagcgttacatggcatttctagaaggagttgtgcagggtttcaaccctgggcacttcccctcacactcctaagacaagggacaacctgacccagcacatgagggagtaagacatgaaactctgccagctttggcagaggcaaagcaggaaggggcctgagtaaggaagtagaaagggaaggtagaagatcaagctttaagacaggaggatgaatatggactttgaagaagatgtgaaaagtgagagtgggaggaaaaggctatctatgaataaggggaggcttagggctcaagcaaggaagggccattgtggactggctggaagagagaaactgtaattggaaaggggaatttttttttcccttcacaaatgaaagacaacagtagaagagggaagcaatgggaaacaacagctgaacctgccctttccttccagcctaacctcccttcactgtcagcagcactgggaagggagcagcactggg

SEQ ID NO: 148134 - DNA, 241 bp, Homo sapiens
aaagttgccccacctctctgagcattggcttccccatctgtgaaagaggagtgctgatgtttgccttctaggggcctagtgaggcttaagggtgagcagcaggcacacagaaagctagaaatacaggatcactgtgggacggtggggctggccacctgggcaggccacttacccagcggccccctctgtctccaggtgttcatcggcgtaaactgtctgagcacagacttttcctcacaaa

SEQ ID NO: 148135 - DNA, 563 bp, Homo sapiens
gtaaatttatagagacaaaaagtagattcatggttgctagggagaaagggatagaaagtgatggccaataattacgggattttcggggtgggggcggtgaagaaatgctctggataacggcaatgcttacacaacgctgtgggtacactaaaaaccactaaatttcacacattaaaagtgcaaattttctggtgtgtgaattatactcattcacgattttcaaaaacactatgtatcaaaattgtgtaacttaattaacgatgtacttaaaaggaaatttatcactttagttgcttaaattttaaaaatctaaattaacgaaataagcatctaatttaagaagtcataaaataaagtcaaaaagtcaatccaggccgagcgtggtgtcacgcctataatcctagcactttgggagcccacagcagggcggatcagttgaggtcaggaattcaagaccagcctggccaacatggtcaaacctggtatctactaaaaatacaaaaaaaaaaattagttgggcatggtggcgcatgcctgtaattccagttacttgggaggctgag

SEQ ID NO: 148136 - DNA, 567 bp, Homo sapiens
cggtcgatctaaggatccccaagatggtcctcagctgaggggtcacaggaaattgagaggactaaaaccaggacctgtgagagggaatcaaaagtgttttgcctggagaggaaagctgaccaagactgcctaaaataactgatggctgtcacttgagacctttttctttagaacgctaaactaggtcctttagttgtataaaccaaaagtaaaatcctaagcaccccagccaactgaatggatcccatcttggccaaggggattccaaagtaatcctgaaaaactagttcagaccatgaaaagaaggagggggtcagacatgcctcattatgccctcctcctcctgaaggttggaataggaaacacttgccatctgtcatctctaagtgcggccacctataagacctaatcttcataacaaccttggcctccccttatctccagcccagacactcctttcagttgattccaggtttttatttatttactttttgagacaggatcttactccgtcacttgggctggagtgcagtggcgcgatcacagctcattccagcctccaactcc

SEQ ID NO: 148137 - DNA, 122 bp, Homo sapiens
ccgagattgcgccgctgcactccagcctgggggagagagcgagactctgtctcaaatagaaaagaaaagaaagtgtccctggttagttccctgctgcccttcctcacctcttccttcatgtc

SEQ ID NO: 148138 - DNA, 558 bp, Homo sapiens
catgttatcctacataatggctgaatcaagggatgctctcaacataggagtagagctccaacaataacctgctcagtgcctctggctagaatccttttagcaaggtcacaggagatattctccatgggtgtcttgcatttctgcacatattgcaagaagaggacctatcttttcatggatatttgtagactgaacaacctgaaagacagagataatatctcccttctgagcagaggacatgttttctttaacacccagtataacaaaaataatatttccctcccaggcaaaagttgagcaggtttacttgcagtccattataaaagatccaggttccccaaactcagagttatccagctgtcatgcaaacacaacccaagtgtctagcctccatttgcgctgctctgggtcacacctgtggatttggggtgcttggggagcatggcgagctggtgtgaacttgaagctcataccactggctgtgccacagtaataaagtcttttgcctaggacccaggagtctcgtgtcttttgttgggtaaaatctcagatccatca

SEQ ID NO: 148139 - DNA, 533 bp, Homo sapiens
ctctgtatttctttccctcatacaatttccttcttgctgttctccctccatccttttcattgaggccttcagaattcctattataagattttgttttaatctatcccacaaaccctacacacaatctctttttttgttgttttcttggcagagtctcgcatcgtcgccggggctggaatgcagtggcaggatctcagctcactgaaacccccacctcccaggttcaagcaattctcctgcctcagcctcccaagtactgggattacaggcgtgcaccaccatgcccggctaatctttgtatttttagtagagacggggtttcaccatgttggccaggctggactcgaacccttaacctcgtgatccgcctgcctcggccttccaaagtgctgggattacaggcgtgagccactgcacctggccagttcttaagttttagataggtttcgataatggtggaacttagaatggataagacttgtgggccagaaacttgagcctatgatgactagatttcttttgagagaaagtct

SEQ ID NO: 148140 - DNA, 831 bp, Homo sapiens
ctctctctttctctggagaagagcaggaaagtaatcccagctaaccctcatgcagccaccactctgtgtcagaatctcttctaggccattgcattgaataagtcatttaatccatataaacctgcaaggagtaggtgatattgttaaccccattttataggcgaggaaactgaggcatggtgaggttaagtgaccagcaaggtggaaatctgaggtttgacccatctcctggtgtggagtccagttctctcagcttcactgatccttcctgatttgtgctgagttagggaccccttgggaagcccccatgggcagggggtgctggtgctagcatttcctgtggattatgggagggggatgtgtggaggacctgtgtctactgttcctctagcctctgggggatttggagaacccactctgcccagagatgtaagtcatctttggatatagatgagacttgttccccctccccctgaatcccagggcacagctctatggaataagctctagctggaacttgtaaagtttggcccagccctccctgggaggctaggaggtggggaagagccaggagactcgaagtggtggtggtagttaatgtctatgtggttagacgttaaccagttactctgtggtgccaggcactgtcctaggcacgctatagttatcattgtctcctttggtgcccccagacagcccagggtcaagacaggtagcctcagtttacagatgcagcagtggaggcttgcacaatgagtaggtggctttgttcaaatcacagacctaggccaggtataaaagcctaagtgtggtgtaattccagcactttgg

SEQ ID NO: 148141 - DNA, 254 bp, Homo sapiens
cttagtattcactggaatttcagtgcgctgtgctctcaatgagatgggctcaagagcatgatggtgaggtcctggtacggcgcggctgctcaggccatctgtacaaaccactaaggcgaccactggctcacaaacttctcaggccatctgtacaaaccactaaggtgaccactggctcacaaacttaaaacatctactcttaggacatgtttaaatagcttgctgtcactatgcaaaggaaaactgttatctcc

SEQ ID NO: 148142 - DNA, 168 bp, Homo sapiens
caatacaggtggccactaggagctagaaaaggcaaaaacaggattctcccctagagtctacagacggaatgcagtcctgccagcaccttgattttagctcagtgaaattgatttcagactttagacctccagaattacagaataataaattttttttttttttttttt

SEQ ID NO: 148143 - DNA, 414 bp, Homo sapiens
gagttcaagatcagcctgggtgacctgtttctacaaaaaatacaaaaattagctggatgtggtgacgcacacctgtggtcccagctactcaggaggagagcttgaggttgggaggtcaaggctgcaatgagccatgattgagccactgcactccagcctgggcaacagagtgagatcctgtctcaaaaaaaaaaggcaggatattgtcacagtccctaccttacagaagattgcacactttatagctcaaataatactcaagccagatctcaaggtactaaacacacatttgggataggggtgatggacaggcagagacttgagccagggctgcctggttagccaccccgagggccagtcccagcttcctcaccaaccactgagagatcccaagtatgtcctgccctcttttgt

SEQ ID NO: 148144 - DNA, 197 bp, Homo sapiens
ctgccaaagtctagaagacaggcaagcatcataccctgaagctctctcaagcactcagaatggataaactctcttatgtcatccagttctgcaccttattctttgtggcacagacctttccaagactcctctcttgaccttggccataggtggccctttctagatcatatgtggctcaaccctagttaccatttact

SEQ ID NO: 148145 - DNA, 604 bp, Homo sapiens
atttaagctaggagggttgtatgtttccaggaatttattcatctcctctaagtttcctagtttatgtgcataaagatgttatagtagccctaaatgatcttttgtatttctgtggtgtcagttgtaatatctcttgttttgtttcttagtgaggttatttggattttctctcttcttgtcttggttaatcttgtgaatggtctatcaattttatttatcttttcaaagaaccagctttttgtttcttttatctttttttttttggtttcaatttgatatagttctgctctgatcttggttatttcctttcttctgctgggtttggatttggtttgttcttgtttctctagttccttgtggtgtgaccttagattgtttagaaagacttagaaagttttccagactttttgatgtaggcattcagggctatgaactttcctcttagcaacacctttgctgtatcccagaggtttcgataggttgtgtcactactgtcattcattttgaagaatttttaacttacatcttgatttcattgttgacccaatgatcattctggagcaggttatttaatttccacataattgcgtggttttgaaggttc

SEQ ID NO: 148146 - DNA, 210 bp, Homo sapiens
agagagatgagaccaggtgcagtccattgagatgtgaaatagagaagtataaagcgttgagctaacgctttatacttcttctcaaaggcagtccctccacacgttgacttgatcctgtcctctccattctctcaaggttatgctgcatgtactatcccctcttgcctgtgtgactttccctgtctgctctgtatttgctttatccatcca

SEQ ID NO: 148147 - DNA, 415 bp, Homo sapiens
gaagggggcacaccacacctcagagccacatgaggaagcaccaggagtgcttaggaggcacagggaatgagagaaaatgtaggcaagcctttctggtgatttccaccagaaagaattggctaggcagagtaacccagttcaggattggctagtttgaataatctcagcaggctctagggtagagagcctgtctttagttgtctggtacctaaccctggggtgattagggaaggggtctagtggtctggattgtaagagccagacaaaagaggtggttggggtgtgggcttcgggttggttggtctgcatatatactcctccttgtaggtgcgtcctttactatctctaggaattggctggccctgagaagagcagtctccccaggttaagcaaggccctacgaagtcaaagcact

SEQ ID NO: 148148 - DNA, 203 bp, Homo sapiens
atccccgcagtttgggaggccgaggctggatggtcttgatctcttgacctcatgatccgcccacctcggcctcccaaagtgctagaattacaggcgtgagccaccgtgcccagactaacatcccaatttttaataccaaaaattaccttaaaaataatacttactgaggctgaatgtggtggcttacgcctgtggtcccagca

SEQ ID NO: 148149 - DNA, 312 bp, Homo sapiens
taggctttggttcccaagttgaccactgactggaaagaagtgcttgatgggcccctgtgtttagcatctcaaataatgcacctgaagtcagaaaggaggacagtgctggacctggactccagtgacagggcagcaggtcaccctgcacatagacttcttgggctgaaagccaggaaagaagatgctaatgggaccagcaacctctcacgctcactcatagttcctgggcacatggaccatttcaaagacagctcgccttcaaactcagttctcatctggggaaggattcaatctagtgacaagcagttatta

SEQ ID NO: 148150 - DNA, 232 bp, Homo sapiens
aatccttgggataaatgctcttgggtaaatgctcttgggataaatgctaaaatctttgggataaatagtcttgggaaaaatgctcttgggtaaatgctcttgggataaatgctatccttgggataaatactcttcggataaatgctaaaatcatcgggataaatacttttgggataaatgctcttggataaatgctcttgggataaatgctaaaatccttgggatagatact

SEQ ID NO: 148151 - DNA, 986 bp, Homo sapiens
catcgtccactcaacctgccagtgcatctagatgactcatacatttatgctcttctgcccatttcatctggattcctgaagtccatgaaaatttcatcttagagtctacatttgggcttttccttgaccataacctcttatctggcttggtaactacctgtcatagaagatctctcaaatgacctcatctccagaatttacctgctgctgaccagatactttcatcgtcatgatcagaaggagagtaaggctctgcccttggatgtgaggccctaccttataatgtggcttaatggaagggcattggaaacccaagttcaaaggtcaccctgacacatgaggcactcataggaataattagcaaatggtaaaatcagctcagcaaagaagcaagaactgaatataagcacatcaatagaaagttctccaggggctggaataccattttgctaatattaatattccctacagtgactggcatatattggtaatatatagctttgcacatattggttttcaatgtatatctcttacatgcatgcataaaaaatgtaatatattccaaagtctgccttcataggcatatgttgcttctgcctttggggaacatttaaagagaaaaaaatcaaggcagtgggctgaattgctctatgttgttttatttttatttttatttttgagacagagccttgctctgtcccccaggctggagtgcagtgagctaagatcgcgccactgtactccagcctgggcaacagcgagactccatctcaaaaaaaaaggaaatgtgtatcaagaacatgattatccaggggtattttctaattcagatcatcaaactgattatatagaagagttggctttaaaatgtttgcaaatgtcttttttttttaatactggaagaaaaaatattctgttgtgtctcatacagtgcttaggatgtctttcacagagcttattaaaaagataaaacccgatgcgccagg

SEQ ID NO: 148152 - DNA, 588 bp, Homo sapiens
caacgatggtcctcagctgtgagccttaaaccagccttgtgacttggtttcatctccttttaaccacagtctggggtcagtcctgcctgtcagggactcacgcagtgactgagtgcacccttgtcccagagctagccctgttcctcaaggtcttagaggcagtccagtctgcccagggaccagacatgttcaatgcctgctccttccctgaatagactcaccaaccacaaaccccactgtagactcagcagcagccatgtgactaaactaatcctggaggcaatcccttcagagacccaacagatctttatctgccaaaaatcagtctgtaaaggctgaaagaggtgtttgctgcttcaaattgagacaccaatgcaaggctctatgaataataaagaatcaggccaacatgatgccacagctgggcatggtggctcatgcctgccatcccagcactttgggaagctgaggaccatcgttgcaacgatggtcctcagcttgtccagtcgctggaaattccagtgatgagattgcagctcatgaaggtctgagtgagtactacagggaagcgatactctgagtaccaca

SEQ ID NO: 148153 - DNA, 320 bp, Homo sapiens
aagcatttacatatgttcttttctcatatcaatgagatagctactattaattatccccatctcacagctggaaacactgaggctctgcaagataaagtgatcacccatatcatacagctagtaagtgtctaaactgggatttgaattgagatctatctgattctttttttttttaataaaaaaatttttttagagacgggttctctctctgttgctgaggcaggagaatcgcttgaacctgggaggtggaggttgcagtgagcagagatcatgccattgcactccagcttggacaacaagagtgaaactccgtctcaaaa

SEQ ID NO: 148154 - DNA, 375 bp, Homo sapiens
tctttttggtagagatggggtcttgtcatgttgaccaggctggtctcaatcttctggtctcaggccatccttccacctcattctccccaagaactgggattacaggcatgagcaactgcacctggtccatatgcttcttatagttgaagaagtgaagggtcaatgactttactaaaatactattaaagtaataaagctaggacttagccccaattattcatccttaaagtccaatactttcaatatattaagttgctctttattatatgaattctaaatatcttttttaccttttgttatctaatctggaaatcctatataaatgtataattttatacatgctgactgatatcctctctagtcttccatactagg

SEQ ID NO: 148155 - DNA, 337 bp, Homo sapiens
attacaattactgttgtttttaacccatcagagagctgagaaagtgaagaatcctagttgaactacattccagaaagtgacaagcccttcttagagaagaagagacacatgcttgctctcatttctcatggtatgaaaggagaggaaatctgctattgaaggagaaaagaaatcagtcaaaaccttattgaacttctaatgtccatgggctggcctgcagacagattacaattttaagaagaccctatcaaagagcaagttggtactcacccaataactctttcccgcaggtctccacaagtaataccctaaaggctgccagcagagctgagagaga

SEQ ID NO: 148156 - DNA, 629 bp, Homo sapiens
tgatcttataactattgcatctcttgtttagaaatttattaacttagtttaagggtgaaaacagtaattttaccttttttgggattgtgtgtgtgttttcatttttatctgctgaatttcaaggtcacaccattgtgccactactgatttccctcttagtaaggtcaatactttacactttattcattgctgagtagggtcaacactctgactggcagttatccatctagtcaccggtagcaacttctcttagactgcctgatgtattttagttgtgaatcagaattttagagctagaaaagaaaaaatgattatgtagttccatgctcactttttttttgttgtttttgaaacaacagagcgagctccgtctcaaaaaaaagaaaaaaagaaatacatatctaatgttacagattgtggtttattggttaattactatgcatttttttcagtttaaaaaataatcttattttatatacttctctcggtataatttttcatgacatttcagcatgttgataatatgtgtgcatctatttcagtgccttaaagtattttgagagcaatcttttgctgacagttgaagaactgttaatgaaatactgttcattaaaaggatctgtgaaatc

SEQ ID NO: 148157 - DNA, 222 bp, Homo sapiens
aacctgctcaggttagtggggttctgaaaccgagaagggcttcaccaggagaatggcatttcaactaagccctgaaagagaaagcttggtgagaaggggtgggtgtttgtggaagacaagacattccaggcagcaggaacagcaaggcgaaggccagaagcaggagcgcccctttggtggagttgaggaattacaaggtttgtatgtggaacacagagtggg

SEQ ID NO: 148158 - DNA, 362 bp, Homo sapiens
ttttctaaaggccctttttgtagcaagttccctgtggatccttcgagaaatattttgagcacatacaagcatgtgtgtaaatctctccagtattttacacaaatagaagctgactgcacattacagagcactgtgcttcctcactatgtatcttggaaactgttccacatcagcacgtggacatctatttcctttttcatcatggctgcatagcagaaaatttgtctcttgtaaaagttccccaagcagttgtgagagcaggctaggtgtggggttgacgggctggttggtgctgctagcgggttgaacagcccttgattaaaacagcaagggcagcatccagcatgagccgagccctggga

SEQ ID NO: 148159 - DNA, 306 bp, Homo sapiens
ccatgttgggcaggctgttctagaactcctgtcaagtgatccgcccgcctcggcctcccaaagtgctgggattacaggcatgagccactgtgcctggccttaaatctttttaagacagatttttgctatggaaatttcacaactatgcaaacatggagagactagaatactgagagccggtgccacccccagcttaacagttaccctctggcagccagtccagggtcctctgtgtccccacccactgctccttcccctgggttattttaggcaaatcccagacatcatgtaatttcctccttcttc

SEQ ID NO: 148160 - DNA, 191 bp, Homo sapiens
ttggcagcacaagtgcttctaaattcatcacaattctagaaatctcacctgttaacaaaagtagttcctaaagagtatgtcatttttatgagttttaatagctggttttctattaaagtgtataagataccttgcttttatgagaggattacacaaatgtggagagaaaaaaacaacagaaaaaacacacc

SEQ ID NO: 148161 - DNA, 268 bp, Homo sapiens
tcgccttctggggcagcagggtcacggtgggggggctagtcctctctttcagcatcttgtttctcagccgtccctgcggctatttgtgcaatgtctgtctgtctgagtctccgggtgagggcagacaggatatggtgcgaggaagtctggggtaagtgtgagccgaaccccgccctggagtctctcggggttgtggggccacagccccagcttaggttaggccttcactgctgctggcagggcctccagagagaagtgcgcctgggtg

SEQ ID NO: 148162 - DNA, 385 bp, Homo sapiens
cttgaaggaaattgtgtgcctggtttcttaactatttgaaatctcagtgctctttaataaccatttagtgattctagactagagaatgagatggcttttctaataaattatcattaagaatgtataacaccatctaaacttggaataatctttctttctcttcctttaagatttagtcttcatgacctcctaattgctaaatcaattagcctttttctcggccatcatccctcagaacctcagctgtggtggatacaatgttgcttgccttactgacttgctatctggcttccatgggagtctaccggctggacctggttctgccctctagacccacaccacgcaatcttcattcctttcccacatgactgcactgtagctattt

SEQ ID NO: 148163 - DNA, 475 bp, Homo sapiens
caataacaagaagaaccttataaattgtttaaatacatgaacattaaacaacatgttgctgaacaatgattgggtcaatgaagaaattaagaaggaaataaaaagttttttgaaataaatgaaaatgaaaacacaacataccaaaacctatggaatactgcaaaagcagtgttaagagtgaagttcacagcagtgaatgcctacatcaaaaaaagtagaaagatttcaactaaacaacctaatgatgcacctcaagaaagtagaaaggtgagaacaaaccaaacgcaagattagtagaatgaaagaaataataacaatcagagcagaactaaatgaaatcgagattaaaaaatacaaagaatcaaaaaaatgaaaatttggtttttgaagagataaataaaaccaataaactgctagcagactaaccaagaaaaaaggaagaagacccaaataataaaaataaaaaagtgacttt

SEQ ID NO: 148164 - DNA, 466 bp, Homo sapiens
ctccttctactaccatcaaagtccttgatctgtttcccaacatgaattaacctttccatgttttcgttacatttgaacatcaggaatgtgtagacggaagcagttcatcctgggaggtgagaatgagcattgaaagagccatccgtgaaaccgtaaggctgggaaagagaagtgaaggggcacatggaagtgttcatctctggggcagggaaaaacaatccggagaagatgagtcacacctcatttgtaacccatgaatgaaaatcaatactgttacttatcataaattacactgaacatagtgcttacacttgagtatcaatgcagtaaaaccactatgagccaattgattgacttttctagatcccaattctatcattcatcttctggtattcatcttctggcttagctactatttcctggcacagattcttaataaagatcctttctccttggtcccagatgt

SEQ ID NO: 148165 - DNA, 368 bp, Homo sapiens
atgcagcagacactgtggcggttgttaaatatacaaagaaaaaaacctatagctttcccattagggaacttcatccaatggggggacacgagactataaactattacgtcaccacacaataagtgctagggcagagatgggtagtatagggcactctggatgcagaaaaggggtaacgcacaaaggaaggccaggtagaagagacgattattcaagctgagttttgcaagatgtccacagtcttcgcctgatccacagtcttcgccttgatccacagtcttcgcctgatccacagtcttctgcctgtgtcacaaggtcattcgcctgatccacagtcttcgccctgatcaacagtctacgcctgaatg

SEQ ID NO: 148166 - DNA, 484 bp, Homo sapiens
caacataggcaattcaattgagatgacagtactgtattagtttctgatataaacaaatttaagacatcagtatggggaatacacggtgaataatatggaaagctgtacctgtaaaatacttggacattttgattttatagtcagctcactatttgccaacaatgtgtaatgctgccacaaaaagctgataagattttgggttgcattaatagaattaaagtatctgggttgaaggaggtttcaggcataattgaagtctccacaagtttctgatcagaacacatcttaaccattagattcattttgaatgatggacttctagaatgatacaggcaaagtggagcttattataagatcaagaatgaaggcaaaataactaaataacaggtataactgacatcaagatatttcaacctggaaaaaagaaaatttagcatgagacaaagacctaatagatatcttgaaatatttagatatctgtcat

SEQ ID NO: 148167 - DNA, 439 bp, Homo sapiens
gaaacctgggcccgtataccgagaagaaggatggccattgaaatgaatagatgcaaacttcagcaatgccaggaagcattagagccacactcattatagtagaggcataaaaacagctagtcctcctttatatgtgggactgtccctagtgaagacatccctcctggaacagctgcattttccccttccttccttccttccttccttccttccttccttccttccttccttccttccttccttccttacttactttctttcttagctttctttctttctttctttctttctttctttctttctttttctttctttctttctctctctctttcctttctttcttttcttctttctttctttctttctttctctttcttctttctctctctttccttccttccttctttctttctttctttctttctttctttctttcttt

SEQ ID NO: 148168 - DNA, 335 bp, Homo sapiens
ccaaagctctggacaaaggatttccccagctattttgcagcttccaattgcagacacaaaaagaaagaaagagagagagagagagaaaaaaaacacattgctagaaaggctgcagtaaacttttatgttactgttctgattgtctttgcccaaaaaggtgtcttggaaattagccttcagcttcagagaaagggacccataagtctcagaagtcaacaggatgttcacctgctgcacagtgtggctttgtttgtttctttgtttgttttacacttaattttagagtcaacattcttttctgcagcattcacctgagaagctggaaatcaaaagct

SEQ ID NO: 148169 - DNA, 423 bp, Homo sapiens
gcctgatgacagcttcgaatccccatcagaagaaaacccagcacctggttcaacgtgtgagaaaccatagcggggacttttgggagagtccatcacacacaccatgaagctcccatgaaagcacaaaagaagtgtctaacctgaccggaggagttcaagagacagagcgaagaccagcagctcctcctccagcttccaacgcagagcgcagtcggcgagactgcagctcattgccgctcagggacccctggaaggcggcctctctccaccagcttcaccttcaccgcagctgcggaagctcatgctcccctctgcagcctgcggctttgattcctggaacgcagtaccgcagacgccacaggcatttttatggggaaaccgctctttctgtccttgcctgcactcccaggccctctcctacct

SEQ ID NO: 148170 - DNA, 168 bp, Homo sapiens
ctgaaaggagaacatctgtagatatcagagatttctctctttgaatctctagcttctcagacctagaaactctaattaccttagtctcctggaactcttggctttgtacaactctaggagcccactttctctgccccactgctggaaactctagccactaaattaggg

SEQ ID NO: 148171 - DNA, 308 bp, Homo sapiens
tgtctgtgagctgtgtgtgtgaggtgtgtgtctataaagtatgtgtgtgtgtgagatatgcctgtgtgtgcatctgtgagctgtgtgtctatgaggtacgtgtacccatgaggtgtgtgtctgtgagccgtgtgtgtgtctgtgagctgtgtgtataaggtgtgtgtctataaggtatgtgtgtctgtgaggtgtgtgtatttctgtgaagtgtgcaagcatctatatctgtgagttgtatgtatgcaagtgtgtacgtgtgtgtgtgctttcaatctggtcgctgactcccttcacacactcagctg

SEQ ID NO: 148172 - DNA, 350 bp, Homo sapiens
ctcgcgcctgcttagcttcaagatcagacaagatcaggcgtgttcagagtggtgcagccatattcaagaagaactaaaaagtgtaataaaataagaacacaagactatcactgaaaagaagttcacaatttcatgcacacacatgaaaaagttataggccaaaagcaatatagacatgagagtctaggggaggttaacagcatccagtctggagtccgagtacttgagagttattctaagtttctcatttctctgtgatcttgagcaagttatgaaattctctttgcctcaattctttatattgttaaatcaagtttagactaaagctgccttttaacgtattttaagtt

SEQ ID NO: 148173 - DNA, 137 bp, Homo sapiens
aaggccaaaccaaagtctcactcatttaactatgaacttgtgattatgatagagaactccagcacctacttctgtaggggcattctgttctagatgccaaccagatgcctgaggtgaagtgcaactggagctcagtg

SEQ ID NO: 148174 - DNA, 330 bp, Homo sapiens
aaattttatcttttttgggacattctcactctgttgcagagtgtagagtgcagtggtgcaatcttgactcactgcagcctccgcctcccgtgttcaaaaaattctcatgccacagcctcctgagtagttgggactacaggtacgtgccaccacgcctggctaaaaatacaaaaaattagccgggcgtggtcgcgggcgcctgtagtcccagctactcgggaggctgaggcaggagaatggcgtgaacccgggaagcggagcttgcagtgagccgagattgcgccactgcagtccgcagtccggcctgggcgacagagcgagatccgtctc

SEQ ID NO: 148175 - DNA, 310 bp, Homo sapiens
aaggacgatatctagcagacatctagctcaccaaaaatgaaagaagatccacaactgcataaaacatttcccaggaaaacctccaacctaaaaacacctttgtgatagtttattactgtacagtaatctggctacatattatcgtaaatctcaatgtatgttttctgcttatttcatattttgtcttccggttaaaagacagctaggtgataggaaacaacacgctaaacattcagggctctaagtctcaattaagtgccaagacacagggcagcctgtgaatcacagagattaattcacagcaggtgtg

SEQ ID NO: 148176 - DNA, 305 bp, Homo sapiens
ctggggccagtagctccctgttttcaaaagcaggtgtaatcaagcaggtaaatctctgctctgagcagacatctctccttggtcatgtcccattttatttcttctgattagagattgaacaggctccacctgtgcttaataacatcgctgctggattggacgtggcagcacccttctcctgggctggagtgtagaatcccctgggactcctccccattccttgtaccacctgcctcccaaaggcagaggcctattgtgctccctttgcaccacctcttactttgattcctttttcctttttcatt

SEQ ID NO: 148177 - DNA, 234 bp, Homo sapiens
gaagggctccaaacagagacaagtagactagttgcgaacatctgttaagtgtgaaaagggggaacaatgggaggatgtgggcatggttctgcagataaatgaagggcacctgctggggatgagccagcgaggtgggaaagaccagctcatgggaggctttgtctggtccactaaggagtttgagcattatccgaaaacaggaggctaagaaagcgtttcaactaagaaagaaat

SEQ ID NO: 148178 - DNA, 386 bp, Homo sapiens
gccggcaccatgtccctagcgggggggatcctgcccactatctaggtgtggctatcaaaggcatctaatgttaagttagtgttgacacgccagagatgtcaggaagcatagattgttaatgatcccaggagagagatctcacaaccacacttgtccacattcctggctactcagaccttagcctttctttttctctccctctttctctctttcccctcggacctacctcttaatatgtctctctacaaatgatttttaaaaaccatttaatagagaaaaagaaatgactttaaatttgaagacgtgttaatttttgtcatcattaagaataattgaacatactcagaatttgtggatttcaagtgcagatacagataaccttttgg

SEQ ID NO: 148179 - DNA, 249 bp, Homo sapiens
gagacaatgtatatgccacttagtgaaacttaatacttgtgtggtcacatgatgctgtgcaaagtataaacaggagtgagtcttcagtaaatgacacactatcttcttcagctgctcttataaagttaagatgttaagcagtatagcagctgtcagatgattttttagcagattagaaagaatactaattttaaagtttttgtatgctgttacctactgtactccatttacaactaagtggcaaaagca

SEQ ID NO: 148180 - DNA, 288 bp, Homo sapiens
tcaaaacttactacgtacgattcaatgtgaactttatgattgctttaggaaggaaaatctatagaggcaaaaagattagtggttgctcacatctgtaatcccagaactttgggaggtcaaggcaggtggatcgtttgagcccaggagttcgagatcagcctgggcaacatagtgagatcccatctctataaaattaaattaaattaaaaaggactgactgcaaacaggcatgaggatcttttggggtagcagaagtgttctgaaactggattgcagtgatgcttgcac

SEQ ID NO: 148181 - DNA, 263 bp, Homo sapiens
aagtctccataaatttagggttcttcctggagacttctacaggaccgtcacagtgatgggatcagagtcaaagagcttcacgaccacctcagtgacaccggaagggaacgtccgagtcagaagtgtgggaagccaccgtggtgacccgcagatagtactggtcaactcttgcgtgataaagagggatgagattgtgtataaggttgatcatggacaaacttttatgtctgcttctcttaagattggggaagagggagaagata

SEQ ID NO: 148182 - DNA, 217 bp, Homo sapiens
gtctcttcccgactgccagccctgagaggacaggtcccagctttcttccccgccgaatcctcagggcctggctctgggtccggcatatggtaggcccttaacaatcctgtgctgaatgaatgaatgaactgcatcataactgcctggctatgtctgcctctgccctgggttgagagctgcttgaagcaggcaccagctctgcttcacctctggatcc

SEQ ID NO: 148183 - DNA, 537 bp, Homo sapiens
  misc_feature (529)..(529): n is a, c, g, or t
  misc_feature (532)..(532): n is a, c, g, or t
tctcacttttataagaagtatccaatggctccacgcgatgttttgaagttgccctaaaaggtctttaggttccactgttcaccctcccatgatctctctcccccagggagccagagcttctatctggagcacacagatgacatcctctgtctcacagtgaaccagcaccccaagtacagaaacgtggtggccaccagccagataggtaggaggtcctgtggcagctgaggctctcccagcttgcagggacgctgacctgtcagcaattattgggagagggagtgggtgggttgcttacatccatcccttcttgttgatgttgctgttgattttttgagtcctgagtgtatctgtgtcacctgcgttgacacatccagtgactgtgattctgagggaccataaagtctgaccagcgcctgagagtccaaataaacgttggcccccatccctgtggacttgtaagaatagtttttcagaccccaagtgtcaagaactccagcctgagcaacagagggagactcttatttcnaanaaata

SEQ ID NO: 148184 - DNA, 801 bp, Homo sapiens
tctcacttttataagaagtatccaatggctccacgcgatgttttgaagttgccctaaaaggtctttaggttccactgttcaccctcccatgatctctctcccccagggagccagagcttctatctggagcacacagatgacatcctctgtctcacagtgaaccagcaccccaagtacagaaacgtggtggccaccagccagataggtaggaggtcctgtggcagctgaggctctcccagcttgcagggacgctgacctgtcagcaattattgggagagggagtgggtgggttgcttacatccatcccttcttgttgatgttgctgttgattttttgagtcctgagtgtatctgtgtcacctgcgttgacacatccagtgactgtgattctgagggaccataaagtctgaccagcgcctgagagtccaaataaacgttggcccccatccctgtggacttgtaagaatagtttttcagaccccaagtgtcaagaactccgtgtcttttgaagctggttattgtgcttggccagggtaggtttcagtaagtgtgcctggaccccctgtgccctgggaaactgccggtgacaaatgtgaactgattcacatttatgagaagtttgttttcacttagtcatctcgagcaatttttacaacttcctgcttgttttcattgaatcatgtccatttttaagtttaatttggaactttctgatgctggtgttgagtgcttcactgttggaaacgtgacttattttagctattgttttcccttgacgcttcctcattgccattgctcaccc

SEQ ID NO: 148185 - DNA, 552 bp, Homo sapiens
aaggaagccgaaagattggacaccccttctttaaaatagcaatgcaaggatggactgacataggcagcgagccccttttgctgggtaacattgttatggactgaattgtgtcccccccaaatacgtatgttgagtttttaacccttcatgtgactgtattggagatggggcctgtaaggaggttataaagttaaataagttcataaaggcggggccctgatccgacaggattggtgcccttctaagaagaggaggagacgggaggtctttgtctctgtgtgtgcctctccgtgtgctcacaaaggaaaggccatgggaggacgcagcagcaaggcagcccgcctgcaagctgggaagaggttgtcaccggaaccagcctgatggcacctggggctcggacttcccgctcccagaactgtgagaaaatacacttgtgtgggtcagcctcccaggctggggcacttggtcatggtaggccgagctgtctaatccacctctctttcaggacccaccgaatcccgaaaaatagagctcttccttcctctgctcgta

SEQ ID NO: 148186 - DNA, 794 bp, Homo sapiens
ttgccaagcattctacttatatgctttacatatattattttaatcaccacaactctaaagtatactaatttactgatgaaaatattgaagtgggctgggtgcggtggctcatgcctgtaatcccagcactctgggaggccgaggtgggcagatcacctgaggtcaggagttcgagactagcctggccaacatggcgaaacccacctctactaaaaatacaaaaattagctgggcgtggtggtgtgtgcctgtagtcccagctacttgggaggctgaggcagaagaatcacttgaactcgggaggctgaggcaggagaatcacttgaactcaggaggcggaggttgcagtgagccaagatcatgccattgcactccagcctgggcgacagagtgagactctgtctcaaaaaaaaaaaaaaaaagaaaaaatcaaattatatatatatatatatatatatatatgtatgtatgtatgtatatgtgcatagttaagtaaatcaccccaattttttctaatatttaagtgaacatttaaagataagcatttcttaatgttaatttcttttctttcatgtaatcttgtcagtagacaaatgatggtgactatattctgtaataagtacatatattatgattaaaaaaaaaagcgtgtactatctgcccaaagagatcataagcactttggagctataaacttcttgtctatttctacttccatggtactgatattctcttctcagataaccaaacaaaaacagctgaataaaatcaaccattaatagtaacttgccact

SEQ ID NO: 148187 - DNA, 484 bp, Homo sapiens
gaagagcaaccctctggtgtggggcagggaagtaggactgagaaacacccacgagagcaagcgagttatggggctctcctcccaaccactccccactttcagcacttgtgtgatgtcattctaggaacaccaccatcaccagcatggagagcagccgggaccccatgggcaggtccctaacctggtcctggtagttggattccacctctggaagtgagcatatctctctctcctttgcttctgcaaggaaggcacagtcccaagccttttccagcagtccccaaatttcactgactgccccatcctgaccttcctagctgtcctctaccctactgcagcttccactgcatgcgtgtgcatgcagtggtcagggcctcctgaaggcagttctgaggaatggctctggacagaagagggaagggtactacatgactcaatgtgtccctgagctgtggccagcagcggattggggagggggtctgtc

SEQ ID NO: 148188 - DNA, 369 bp, Homo sapiens
ttttgtagagaagcgtcttgaactcctagcctcaagtgatcctactgcctccacctcccaaagtgttgaaattaccggcctgagccactgtgtctggctcctatgttgtccttataagaacaccatgtgaagatacagagacacacagggaaaaagcccatgcgaagacagagacagagactgaagtgctgcagctacaagccaaagaatgctgaggattgctggcaaccaccagaagctaggggagaggcatgtgtggtttctgctgcagaccctccagaaggaactaaccctgctgacaacttgatttaggagtgctggcttcctgaattgtgagagaataaatttctgttctttaaagccaccaag

SEQ ID NO: 148189 - DNA, 311 bp, Homo sapiens
ttaagcaacacgagaaccccgtgtgggtgtacccagttcactgatgaggaagcgctcagaaggtagaagccctgcccaggactgtgcaaacgtaaagccagcgtcagggcctggcccatctcaacagttactccccactgtagaatcagggtgggagctggggggctctcctcagctgtaatacaagggtgtttctcacaccaaacctttgtatgaatagattcagataaaaggtcagcccacttgcctcaggccccctagtctgcctacttcttgtccttccctcctttttcagcagcaaaatccccttt

SEQ ID NO: 148190 - DNA, 437 bp, Homo sapiens
gcccgtgttctcagcctctccccctccgactcctgcccatcttcctggtcacatctcctcccaccgtctgccttgcttgctgagtccatgcatttgttcatttccccattcaacaaggaggtatcaagcaccactatttcccaggcacattcctagggtgtagaactgaaaaacacaggtaaagtactgcctccatgcaacagacattgtagttgaggaaacaggcgataagccaaactgataagagaaatataaggtgtgttaagacaaatataagatggtgacaaatgccccagagaaaataataaaatagggaagggaggcaggaagaggggccgttaatcagggtagccaaggaaactctccagcagccagcctcgttccctccccagaggcttcacagctgctgttccacacacctgaagtactgttccctc

SEQ ID NO: 148191 - DNA, 223 bp, Homo sapiens
aatatcctcaagtcttgagggaacatcaggtctcatcagggtgtgatcagcccacagtttgtgccagttcctttcatccgcctgtgggtgacaatcccttcttgtcccatcaccaccatgtgataatcctcgcctccagccttaatattgtctaattgtatgagacaatctgtccaaacaggtcttcctgtgttaaggtcagacctcgtgagtatgtgatcat

SEQ ID NO: 148192 - DNA, 498 bp, Homo sapiens
caggtttctattgtacaatttctcattgaaaactgcctcagcatatttggagaagacatcacttccctcttggagaagagctcaatgacttgtgacaacagtgatgcttcaggtaccttgaaaaattcagttggttttgatgagaaacagtgagtggggatgccaggagtcatgagagatgcttaggcagtggctgtcctggagtccagggcaagccccaagcacaatgatgcaggacccaggactccatctgctcattcttcataaggttggctcacaggtcatctgctgagaaggtcacctgctcctccttcactgtgctcactgaatgaggacattccaagatcccagctcctcccatttgaactttcctcttcctaatcccatgcatctatgtttgagaaaatattcccacatgattttctatcttcccatttcttccatgttgtattactttattattattaataataaatgcacatattgtgtatatgcata

SEQ ID NO: 148193 - DNA, 686 bp, Homo sapiens
aaagagggagtcagcacttcacatggccagagcagggtggggtggaagtgccacacttttaaacaaccagatctcacaataacttactcactaccatgagaacagcaccaaagggggaaatcttcccccatgatccaatcacttaccgccagatcccacctccaacagtggggattacaattcaacattagatttgtgtgggagcacagatccaaaccatatcattccatccctggcgcctctaaaatctcatgtccttctcacattgcaaaatacagtcatgccttcccaacagtccctcaaagtcttaactcatttcagccttaactcactcttatctgagacaagcctagtcccttgtgcctatgagcctgtaaaattaaaaacaaattagttgctcccaagatacaatgggggtacaggcattggctaaatactcctattccaaaaggaagaaagcagccaaaagaaaggggctacaggcactgtgcaagtccgaaaccccggcaggacagtcattaaatcttaaagctccaataataacctgctttgactccatttcttatattcagggcacactggtgtgaggagtgggctcccaaggccttgggcagctctgcccctgtggcttttccagagttcagtccctgcggttgctctcatgggctggcgttgagtgcctatgg

SEQ ID NO: 148194 - DNA, 655 bp, Homo sapiens
ttcagttgcatcctcctctttgctcactcatgtttaagtttttcctatagcaaattaaaagggaaagatacaggaaaagagagaaagagggagtgcgagcaagtgagcaaatcaaatgaaaaactgttggataagtttctgctatcctagatgatgtaataaaacccggaggtgagtcacagggcttaggtttaacctatttccttcatacgtgatataattattggtgtttttttctttttctttcttttttttttttttttaccaatttctgcccagtagcatagacgaaaagactaaagaaagtggtgactcctgaatctcaatagagtactggcaccacttccctacgaattactaaaaaagaatgagaagagaatcagagagaaggtataaatttgaaattttgccctttatgtcatggtgatgtgacaactaatatctctgcacaaatcagcatctgagactttaagtaaacagaccaatatctttatgggaaggagaggaaaatcatttttcctgcttagtcaaatgacaaataaatgtagctaatttataattcatccatgatacaaatttacagacctttggctctgaaaaaatgtgctttttacatttccatagtgatagttaacctcagaacactctatgatgg

SEQ ID NO: 148195 - DNA, 274 bp, Homo sapiens
cttatctaggttgggtaaaggcaaataagggtagtggtggaaaatgaaaatgatgatagggtacaaacgtgattgaataatataaagagtcgagttttagagcaagtaaactctaaagagaggatgttggggagagttgaacttttcaaatatagatttttggacactatacttaatactgatgatagcaacaatagtattactgatgggagttggtgggtgagactgggtgaggaagaggtagttggaagtgaagatatgatcagagtgctag

SEQ ID NO: 148196 - DNA, 382 bp, Homo sapiens
cccaaaatgaataaaattatcattggagttaagtatctagttgtgatcacttttggggagggtcttcattggcatctgggagagcctttgtaccttcaagaaggtacaagcaaggcttgaggtgatacagaatttaagagaacgatatgcaaattttatgttgctttcactggttttagctgctcttgataaagaaaggggccagcaagcttggttacatgcctatatgggcttgcctgtcataccacttttgtcttcgagcttctgaacctgactggcaggattgaaatgcaggcagcacctgatgctcagattgcttttatagttctacaacaagggtaaaaagagtgggtaaaatgtgagaggaacagaagccaatgaa

SEQ ID NO: 148197 - DNA, 464 bp, Homo sapiens
tgctgcggtgagctagaggacccgggccaatcccataacctgtatgactttctcgatattagtaaaatcattacataactttgtcaaagttaagatataggataaaccctgtatgtcttaatggctcacccagttcagttaggccttcaagacgctacatcccctattatagaagaactactcactttccatgaccacactcttataattattttcctaattcagttgctgcaactctttagaatcacctcctgctaggtctgataaaaactctactctggaaacagaatgaggtcagtgtcagttcgtttctacttcactttcttaaccctaggaaagaaggtatagatttctcatgccattcagtccagctgcgtatatgggacacaatgttaaccagtggaaataatacagactttatccttcaggtgaatctggtttgagtccaagctcaactccatact

SEQ ID NO: 148198 - DNA, 440 bp, Homo sapiens
agtgaggtcctagaagaaacctaggtcgaatccagcaccacgttggtttcagttggtcttagccagcttggcccacactctgatttttttagagtcttatgacccctagcttcttatgacccttattttaacagtttccttttgctggtcatgtgaaatggctgcctagaattttctattctcctgtgaccatctgtattattcctgtctcaccactaggtgtatctgtcttgcaaagatgtttagtttatttataaacatatttaaatacaaaatattacattaaatatttgttgttttgattggattatgtattgcatgagacttggtctgggttatgctgcagtaacaaatccctgatacaccagtggcttgtcacggcagaggtttatttctccctctcagtccatatccagtgtgggttggcagacagttctggt

SEQ ID NO: 148199 - DNA, 455 bp, Homo sapiens
tgcatgaaatgatgacttattttgatcactgagaatttttggtgcccctttaacctttgcacctggggcaggtgtctcacccttagtcctgtccccacaagacatgttccatcacctaacaacatgaagtgagtgcccatggtgtgtccgcagctgagctaggatctgggaatccagtcataggtaaaacagctacacacttcttcatccttcaatgtacagccaaagagatcctaagtcagaagggacagctatctgggcaggcagcctcatcctgtgctcagctggaagaaatggaagaaacgtggtacagaatgaaacagacattccacttacgtttcgttgttttgaccacacaccgtctgaaccgcaccttgtaggctgtggacccagggaccaccccccgcccgcccgcctagaaactaaaaatccccactacgccctttctcagacac

SEQ ID NO: 148200 - DNA, 360 bp, Homo sapiens
tgcacagatctacagcaaaatgttctaacggaattattatcactgatgtagaacaaagggtggtttttattttcagttttgcttattcatatttcaaaaatctcctgtagtgaatatgtattaattcctaaggaaaagaagaataggaatcttttgtaagtttctcccccagatcagcaggatcacttcagaaattcaccttaaatagtaatttgtttcctctcctttctccctatactttctgagtcctatattttgattccaataaatgagttttatcatttaatctgtaattaaatgtgaaccttgaatcttcctggtttatccaagtttgggtttgaaatcaggtgaagacaattc

SEQ ID NO: 148201 - DNA, 176 bp, Homo sapiens
agcttcaagtaaaataagtccagacataaaagctctatttactgcattgtctccagcccccccccaaatttcatccagaatcagtcaacagagacagacaggaagcagcaatatataacaagtgacttcaagaccgagctaagaacatcaacatctcactatgtgaaatcaagtag

SEQ ID NO: 148202 - DNA, 523 bp, Homo sapiens
tatgaataggttaagtaagaaatgttgcaccactacaaaagcctacataggatggaagaagatattaaaagttgctttattgtttttattttttcatatcatgttgctctttatgatttctcaggcttttgaccattgtaaaggggaagtaaagcttcagagttcctgtactgcagggaattagaatctattctctgtggttacaaatacaaattaacagaagtaaacatagaaaatgttatgtaataactgtctattaaaaccctatagggcccttgagttgcaaaggattacagttatcatgtggggaagcggaaaatgttttttacactgactttagtctgcatatttctatgactgcaggacatgtaactagaagagtaagcaataagtcctgttatctttggcaagcctttcctacctaaaccacactgaccactctttcccctgaccaaccaaaatgctacaatttggatttattccttttcagtgtccctgggtattttattctgttgttttctgc

SEQ ID NO: 148203 - DNA, 346 bp, Homo sapiens
cctgggcaactggggaataatatagtatatttgtttaaagcatagtctctgaaatcagactgactggctcgaaacccacctctaccacttattagctttgtgacaaattctcacctcccatgtctccatatttcatctattcacctatcactctcttcctcaaaaatcatcagtggctcatctttccacactgcctacaggataaagtcaaaactctccagcttcatctaccgcctatcttcttcacagccatcatgttccagtaagaaaggacatgtatcattcttttttgactgcccagcatttaacccttttcttatgtctggggaaatccctacctgccaat

SEQ ID NO: 148204 - DNA, 641 bp, Homo sapiens
ttcccaaagacttattttttccaagctatctgtggatttttgtggatggagcactccgtaatttaaccatgagattagcctaactcacttgatgtttacagagggaggaatgccgtacttcttactatcttttcttctgtgtttgtgcacttggataatttctccccgagttctcatatccctgatgttactcggagagcctgtctgcagcatctgctccctggtacggctggctcctgccacatgctctgagccatcggcaccagccgagcagctctcagagaggagatggcaatttgggatttccccccctttttttttattacaactttgtcagttattcccatgagaatacatgtaaccagaatgtgggggacactttagagaggtctgggggactcaaagcaaagactctccttgacagttttctcatttcactttttttattccttgcttggtgaacatgacttaaaaacaaaacaaaacaaaacaaaacaactcccctctgttttgtacctaaaagttttgtgtgtttggtctttctgtactaccaacaactgacttagctcgcctgcctgccttcctttccccaaacccttacccgattctgtctttctcttcttccctccttgtagccaacc

SEQ ID NO: 148205 - DNA, 375 bp, Homo sapiens
tggcacattctattcattgaagtagtcacagagtcctgcccaggttcaagggagtcaaaatggactccatgtcacaatgggaagtggtgatcatctggaagagcatgtgggcccattttctgggatatcttctctgtcacattccccttcctgggtctctgccatatgtctggcacagatgaagaaattcaggtttagagaggataagcagtttatttacctaactcctcaaaagttaccgagcccaggtctgtctggcttacaaagtcctccctgcctcatcctgggacgtttctttaactgcatgtaaaccatgctttgggtgcctccattatcctcatgtctttagggagttccctgttctttgatgagaga

SEQ ID NO: 148206 - DNA, 184 bp, Homo sapiens
agtgcattaaaagccaccatcaaatgtggacctggactcagtttccctctgttccctcccaccctcaaatgtggacgtggactcagtttccctgttctctcccaccatccaatgtggacgtggactcagtttccctctgttctctcccaccctcaaatgttgacgtggactcagttttcctctg

SEQ ID NO: 148207 - DNA, 180 bp, Homo sapiens
aggtcggtaccggtgttatcgatgccactgcctcagccaaccgtggactagatcccaaaatttatgtccagtctagatcactcccctcagctcaacttaaatattcagtgcctacttaactctccgcttggatgcctcccaagtatttacacagaactcttgctacccactcctctccac

SEQ ID NO: 148208 - DNA, 931 bp, Homo sapiens
aactatacaagatggtaatattgagaatgagcaggcacgttctcatgaactaatgagaaagtaaagcagtgatatgtttagttcctcaatactcccatgtcattccattatgttcaacttatatttagtgagtgcctactaggtgtcaggcactgtcatctctttattaaacattaactctctggccatgcatttaatagagaatttgacctactccagtccttgaaagggtcaccttataaaactcatgataccccatcaactctgctatacccaaccatacatgactggattgtggttggcagatgacaaggctgggccaatctgatactctttaccaggaaccgggaatgggatcctgggagcctgcatcagataacatgaagcacttgaactaccgggtcaggcggtgcgtgagccacagaagatgtcagagtaaacaaaagttgaagactcgggggaggccattctgctctaggagaaataggggagagggtgggggttgggtatcacagtccatgtacatacaacctacctgtatttcatttcttacctattcttgaatgtctaacacctatgaagttgcctactttgtcctttcaatatacctctcttttacttgtgacttgtatgagtggtgttcctattccttatgggcaaaaacactttagcattctattaagtcctgcaacagacaaaaagatgagaaatacttagtcctcctgccctaaaagaccatatggttaggaccaggtaagtatataaataaccatatataaggcagactataagtggcataaaaagtactatgaggtttcaaaaatagaggatcatatcatatccaattcagaacatcaaaacagtttcaccaatggcgaggcatggtgactcacacctgtaatcccagcctttgggaggtcgaggcgggtag

SEQ ID NO: 148209 - DNA, 517 bp, Homo sapiens
aggacggtgataaagagagtaaaatgtacatggagaaaatgcaagtccttaaaaaggcttgaaaatacattatgagggagatgagatgagaattcaggtcagagataagctgaagtgttatcattaaaaagccacattaaggttagaattagcaaatctaggatcttagaaatagcttttggtaattctctggatattgtctaacacaagtaatgacagtgaagatataatgaagaagttaaaatttattaaaggcacaattatatgtctgtctaagcactttaattcattatttaaatgtttgtgacaacccaacataattggtaccaatcattattctcaatgtacagatgataaaactaagacttgtagagattaagtaacttgtccaaagtggtagttgtcttttagcagtatcattactatttcttttaatatcaatacgtcctaaagccagtttataatttatttccaaatctaatgcattccctgtgttggtcacttatatcacacttct

SEQ ID NO: 148210 - DNA, 245 bp, Homo sapiens
tcattcctttctcaaagcccttattgactttctacttcaaggttaaaagcaacccaacttctttacttagccccaaaggccctgcctgatctgacccatgcttgcctcggggacctcactcagaaccactctctctgtggggaaaggacttggggtcttcgggactggaaggaggctaggtgaggaagtgcatggaaagagtggttctgagtgaggtccccgaggcaagcatgggtcagatcagg

SEQ ID NO: 148211 - DNA, 249 bp, Homo sapiens
ggcaagagaaaccctttaaacctgtaaaccgaagtttttgttaaaccaaattcccccccttgcctccaggctttgccaccaaaaattgaaaaccccctttccaaaaaaaaaaaaaaagtaacataactagacataccttcccaacttctttacttagccccaaaggccctgcctgatctgacccatgcttgcctcggggacctcactcagaaccactctttccatgcacttcctcacctagcctccttc

SEQ ID NO: 148212 - DNA, 1125 bp, Homo sapiens
gattctagctgtgggtctgttgtctgatgaaaagtctgaaacggtacctaaaactactaaattaattttaacatctttgagttgtttttagttctgtgagaagagcatatctattttggtttactcagtgagtagagtagtgtctaatactgagtaaatgtactgtaagtatttttgaaagaatgagtctttgggtttacataccctggggtttgtaaacaaatatctgttgattggcattaatcctgatggtatccaaggtacaggaatggcaaagggaaaagatagggcaatactgactgatgcttcaaaatcatgccctagttatgctataatcaagcaggaaatgtttatggaatggaaagattaaggaaaaggtatgttcttattttagcaataaaacgaataccagaagctttaacattcaccagtacaaataaatagtttcaatggaataggtcgaaagtaaagggacatcactagagtaaatgctagaccttccctctccttttatttttagcaacagcaaagcagaaactaagatctacaagtgatcaaagagggtgatccattcagtttctgtgtagacaggaataataataataccttttacatattggtacagtttgtaaaaacactttcacttactcatttaatcttcatagcaacttgatgaggtagaatactataggaagcagtattagctcaggttggtacgtaaattactgtgtttaaatttcaataaaacagctatggaatccaagacattcttggcgcctaataaactgtattctttgccaacagtgaaagtgcttctctgttgcttggtaagttttttccccttagaatactaataaagtaattgattaactttcatttttattttgatttgattgggacagcaatttagcagtaaaaaatgtcacctttataaatcctgtggtttctggttcttggccagttaaattcaacctgaccaggaggcacgcttaattctaaaattgcttttaccttctgaagtttttgtggtatagacatcctcctttttctactttaatgaaagcatgttataagcagatcataacaatttttttttctttaaaacaatattgtaattaggccagt

SEQ ID NO: 148213 - DNA, 327 bp, Homo sapiens
cggtgctctagcagagagggtcgggtagaaaggtaaatacattatctaggagtattgatttatttctagagaaaaatagagcagtatatttgccagcagcaaggaagtaagcacaagcaacagatactgtacatacaaccttcattttttgtttttctgcttttattgtttttaattgatagagtaattgtacatatttatggagtacagtgtgatattacatgtagagacaatgcataatgatcagatcagggtaattagcatatttgtcacctcaaacatttatcatttctttgtgataggaacattcgaaatctgctcttccag

SEQ ID NO: 148214 - DNA, 314 bp, Homo sapiens
ctattaaaccaggcagccacttagtccaactatttttgggtcccaaatttaacacttagtgtcttagaagaatttaattttcatagtccaaaaaggtcagaagcctggttgatgtaaaacaagtggtgtctattatttctctcaggaaggcagaaaaactagggcagggattactgcagctacagaatgactgtcctccacacctctccttgttcaggcggcttggcctactctcctgacagtgcagccacggaaaaagtgccaaagcatgccaacctcaaacagaggtgatgacagagaagctgaaatcctgg

SEQ ID NO: 148215 - DNA, 308 bp, Homo sapiens
cactactatccccccagctggttatgcctaaaagagactatcttagttttttgttcctttttatttccccaagagtgtagtctccacgtctccttaacatctccttagtgcagaacctcctctgcatcctatctgctactgccttggtttagggccccgttttccctctcccaggcctgagcaatagtttccccacacttcctcctctatagtcagctactcccaccatctatccttcccactttagacaaagggaactttctaagaagcaaatcattgttgttgactttttctcccttccaaaatac

SEQ ID NO: 148216 - DNA, 464 bp, Homo sapiens
cctgaccaccttccactagactgtgagacagaattctcactctttcaataaatgtttgaccttccactgctacacagttgatgctactttctgaatgctgatttttacaataatttgttcctgtatctatattgcattgtgctacctagctcaacattttctttgacagtcatcagtataacattatatatgctaaattatattttaaaataacttatgaaatcaaatatgatgatatacttgtgaagagactgcaacacaatagtgagaaccactgccctggaaaatactcacctttattaggctacagacataacaacccttgtgtaatgggcagaaggtgccagtggcatagccatgtaaaactccatacccctttaatatgcttttcttccactgacttgctttttctgaaaagaaattactgccagtgaatgctctcatgcttagcttttttttttttt

SEQ ID NO: 148217 - DNA, 677 bp, Homo sapiens
ctgtgaggttgcctatgctggtgtctgttttagttatgtctttgtaaaatgcattacttaatacagttgggtccataaaagattagtatgtatttgactaaactgccaaaaatacaaagaaagcagtggaacagttactttaaaactggtggggtcagatggtccagaacaaaaataaattccaataattttaacttccctgcactgtcaatcttatggacaactactgctagaaaggtccaataaatgctatttgttctaagtggtagatattgccaattgatatagagcccatggctttgtttagacagggcaaaaagaaactggacttgtactaattgccgatagatatcatggccaactttccattcaagcagttccaagggaagtgctttccacagcatttaatctcttgaacatatgacttctattaaaggactgttcaggggctatatatatcatttactttttgaaagtaaagtccctcagagattgaaacagcacaccatttatagtctttgagatctctttttatgcaaaacataattctattaaactaaagcagaaataaaaatttcttagcaacaaacacagaagttttcagttcattggtggaacagaattggtgatttataggcacttatgattgagttacttatagaattctttataaaaaa

SEQ ID NO: 148218 - DNA, 561 bp, Homo sapiens
tccctatgaattgatatacgtatcccaaactccataaatacttccctccatcgacttccctctgaagtcaatgtcttacaatgattcaaaattctccagggctgcttctgaaatgaagctatgatgcaagcaccatagcaggagtccctgttagatttccttactgaattaaaaagtttgttttagtttcccctaggagagaaaactaaacttggcctcagttggactcaggttaaagccactcactagctctgtttaagtcactttacactctattttttcatctttcagggctgtcctgacttggtttaggagatggtttatgtaaatgtgactcacacaaaaaagggctaaatgaaaaaaatcacttaaaaaataaataccttgacaaacgtaattaataatcacagagaagtgtatagtttgagagtagggagacgctggagcgcggtgtatgatggagaagagtcttaacctgtatagggtcttatcctggaattgagggcgctggactggagctaaaggacgacatggaattgggcgggcggtacatgggaccca

SEQ ID NO: 148219 - DNA, 138 bp, Homo sapiens
acatggcaccaactggcccattctttctaccctgcctgcaggggaggaaactgaggcagcctggccagggcagggaacgtagcctgtgttgtggctctaacccaggtgtgggctcgggcagattccttagtctctctg

SEQ ID NO: 148220 - DNA, 652 bp, Homo sapiens
ttttcctttttcccacggcacttatcttctaatatattaaatagtttacgcatccattatactcattgtttattgtctatccacatctttctctaccaaaggaccacaactaatacagaaataagctctatgtgggcagggatctttgtttttcatcaacattatttcaagtacatagaacagtacctggcaaacagtaggggccaaaaaaaaattctgcgatatgaatacataaatccaacccaagagtgtgctattttcagtaaaaatctgtcctccctggatagtggaagagaaggtcacaaaatggataattagtcctaggaaccaaagcaagtaaatataagccaacactctcactttgctcaacaagcatcactgatttgctaacagctctggataaagacagagcaatcagttaagccaacaactcattagattcaaagagatgtgtccccaaaagcatatctactagccatctgatcactaattgacagtatttttaagcatcgtgttgtttcctattcagtctcaaccttgaaaatactacacacagaagggaacacacctctccacctctccttctttagcaccactggctatttcttgcagagggaaacagctacaagctgggggaaaagactggtgcatg

SEQ ID NO: 148221 - DNA, 408 bp, Homo sapiens
tctgactctcaaccaggacacacaactgccactaagtcatggctgggccctcccaaacacaggccttgccacccctcgaggcaacgtgacttttgttttagagctgattgtgctgctttggcttctcactggtctgttctcgtccttggtggccaaacagatgtctctgccatgtgacaggttcatcaacaagcaaacacatttcagtactcttgacaattatcgaatgcataccatgagctaggtattgttttaggagcctcacaggtatgtatgtatgtatgtatgtatgtatttatttatttatttattttgagacagagtctctgtcgcccaggctgaagtgcagtggtgcgaccttggctcactgtaacctccgcctcctgggttcaagtgattctcctgcct

SEQ ID NO: 148222 - DNA, 402 bp, Homo sapiens
gtgtgtcccaatttgtctttctaacaacctgacccaaatctctctctactagtgaccctatgtctgattggttctcagagctatttgcctgaatcccccagggtttcaaatcaattctacaaagaagactgaagctcggactttcactcctgacattaagactcattatcttctagtctgctgctcactgaagtgctgtgctaaaactgtggatgagagtactaacatcattgtcatgcaagtcttgaaaccccacccaggcacctgtgaatacatgcagacagctgcagagtagtttcactcctcttacctttaagaataatgtgtgatgaaacccaagaggggagattaaaactgcctttgcaaagattatgacagtgagaaaaatttgacatgggaaaa

SEQ ID NO: 148223 - DNA, 271 bp, Homo sapiens
ccaaagtgaaagggatttctaggttgacgatagccataggagcacatgcttaagttagcgctgcagttgcttaaggtaacacatgtccttgccgctgaagcacacctggatctccctctggcaaggctggaggccttcagccttccccagcccagcttagggagcagctctgagccccatactcctccttctccagggatcttctgccaagttcaggctttgcacagtcggtccctatcgggtcctcagtgcagagtcttttgcaacataa

SEQ ID NO: 148224 - DNA, 248 bp, Homo sapiens
atctggccagacaaacccaggtgtgctgatcactgggcagaaggagagggatggggtcacagggatgtctaagtttggctctcagaaacctccgcagttgctggaaaaacaactatatatcaataacaaccactcagggcctaataatgtcaggtactatgttgtgtttatacagtagctgtatatttgtttatacattatttatacctctacaataactcttccatataggtgtcaccccaattttt

SEQ ID NO: 148225 - DNA, 161 bp, Homo sapiens
aaaaacctggttctttgaaaagataaataaaattgatagaccattggcaagagtagccaagaaaagaagagagaaaatccaaataacgtcactaagaaacgaaatgggagatattacaactgacactactgaaatacaaaagattattcaaggctattagg

SEQ ID NO: 148226 - DNA, 206 bp, Homo sapiens
aatgcaaactttcaaatcaaacagcacaagtacagttcatatgtgccgaaccttagggcagtcagaaaggatccagttctctatcaggaaatttcagatcataccagagcagtgcatttcaaattatctatggtgaaggatacattgttaattaccagtccatcatagactgatactttagtaaatacaataaattactagaaaaa

SEQ ID NO: 148227 - DNA, 135 bp, Homo sapiens
ggaagtgaaaattggagatcaaataacaaaaaaagagagaagggaaggaggaggaagaagaggaaaaggaggaggagggggagaagagaaagggggaagtggaagaggaggaggaaaggaagggggagaaggagg

SEQ ID NO: 148228 - DNA, 440 bp, Homo sapiens
aagttatcacactccagcaactttcagtgtttttgttaagattcaaaactaggggatctggcttgggtcatatgttcactttttggctaaagaatggcagggaatcttgactcataatcccattaggctgcattcagtggggtagaggtaattttcctcaaagatttggggtgctattatcaaaatagtaaggaaatatatgctgtacagacaaaaagtaatgaatatccacaaaggttatgtgatcataatctttgaatattggaaagaggaagatgagccttggtaaggatgtaaggcaatagttggaatatccatggaggcatatgtgtttcaacatcaggaagaacattctaacaattagagctcttaacaggctgtattgtgagttatggacttcttattcatagtaggatattcttttcattgcatgtggtgga

SEQ ID NO: 148229 - DNA, 560 bp, Homo sapiens
acccctccgcgaacgtgttatcctcagcaccttattctttactttagattctctgccacttactgagtaaccttgagcaagtcatttggcttttctatgcctcagtttccgtacatgtaaagttacgaaggcacctacctcacagagctattgtgaggattaaattatgactaacacaagtaaagcacctagaacagttcctggcagatagcatacactcaaaaaatgccattcagagtttcattattactagcactacttaggacatcatacaccattactactgatttcacacatacatcttctaccccacctcaagaaaagttgcctgaagacaagtattggcatccagagggagtaaggtgcatattagtacccttccttgccctcctccctcttcctaccccttctgcactctccacccgtatcccaaatacacacactgaggagtactgctatgatgggttaggtttacagacattttcttggccagtgcactgagctgaaggttcaaggacatgtaggcatggtcgttatgcgattacacgttcgcgaggacg

SEQ ID NO: 148230 - DNA, 277 bp, Homo sapiens
gagcctcctcacccaaggtcacgccatttccaggacagcaccctggtgactgagcgaggtaagggtacaaggcccttatagggccttctctttgacttcttcccacctccctttatggatgtcagttcctgatgaacatcttacacctcaaaccgtgacccaacatctgcttctgcagagcccccctgtggcatcttgtgccctcctgccccactccctctactctatatcttcccatagttagaatgggctttttttttttttttttgagataagg

SEQ ID NO: 148231 - DNA, 393 bp, Homo sapiens
ccgtgctgtttagttgtgacatgggagtaccatgtgcatttacactgagacctccatactgcagaggccacaggtaggactgaagagcaaaaaataaaaattaaaaattaaagagtttcaaatgagcccagtaccagccctatgaataaggaaggtatcttgaccctccacaccagttcagtcatcagatagactattgagtggctttagtgaatgccacaaagagcagaagaattccatggctgagacttgcctaaatttctgattttaaaactgaaatataatgaagtagttgttttaagccactaactttcaggccagtttgttacatagcaatagataactgaaacagctgggaaaataaaagagacctgcctgcttccacctttcaaa

SEQ ID NO: 148232 - DNA, 632 bp, Homo sapiens
  misc_feature (22)..(22): n is a, c, g, or t
agaagcaagcaaaacaaaaacnaaacaggagctgggtgtgatggctcacgcctgtaatcccagcactttgggaggccgaaggggggtggatcacctgaggtcaggagttcaagaccagcctggctaacatggtgaaacccgtctctattaaaatacaaaaattagccaggtgcagtggcaggcacctgtagtcccagctactcgggaggctgaggcaggagaatcgcttgaaccctggaggtagaggttgcagtgagctgataacgcaccactgcactccagcttgggtgacagagtgagactccatttcaaaagaaaaagaaatattttgattggtatctgttctccttcaacgtatttatagacaaactaaatttgtaggtatgtgaagatgaagggaagatttgttctcggtgtatggtattcattcagctaatgtttgaatacctgatacatgtcaggcactgtgttgttaccttcaaatgctcacagtctagcaaagaaaaagtagtgtgggaaaatgggatggtctagatcatgctgatggagccctacagaactacagcatttgagtcatagctaatagattaacttggcagatacagttggggtgctttatacatgatgatgta

SEQ ID NO: 148233 - DNA, 623 bp, Homo sapiens
ctgatcagcaattccacttctggctatacacccaaaagaactggaggcacgggctcagacattgtacacccatgttcacagcagtacaattcacaacagccaagaggtggaagcaacctgtgtccattaacacacgaatgaataaacaaaaattagccaggtgcagtggcaggcacctgtagtcccagctactcgggaggctgaggcaggagaatcgcttgaaccctggaggtagaggttgcagtgagctgataacgcaccactgcactccagcttgggtgacagagtgagactccatttcaaaagaaaaagaaatattttgattggtatctgttctccttcaacgtatttatagacaaactaaatttgtaggtatgtgaagatgaagggaagatttgttctcggtgtatggtattcattcagctaatgtttgaatacctgatacatgtcaggcactgtgttgttaccttcaaatgctcacagtctagcaaagaaaaagtagtgtgggaaaatgggatggtctagatcatgctgatggagccctacagaactacagcatttgagtcatagctaatagattaacttggcagatacagttggggtgctttatacatgatgatgta

SEQ ID NO: 148234 - DNA, 812 bp, Homo sapiens
tggagtttaacgtttacttctgagccccgcccagaaagcttgctctgtgcttatagcttcaaaaaagtctgcgaacgagatgaactggtttgaatacagacaagcctgtcattggaagttttgagttggatttttctttcccctctgacatctgtaagggtgaacgacgatgagaaccaccacttaactgtgttaggggattatgacgcgcagcagccatggccaggaaagcattccataccctgagacttcctttccttgcacttctctcctattaatatctaaagtaatccctcacgttagcacataatgaaagcagtctctcacccggctattgcatcttcaggtgagttagataggacagagcgtagtcccccctttacacctcagacaaaaacttaagaaacgttactcgcccaacacaaaacaactgactgaccaagcacctgtcttcccctcctcccatccaggtctcctgactaatcccttcatctttccatacctggccctgacctctagcaggacctaattccattcataactgttgagagtacaccatgagctactgattcataaaaactccaaaaagtggttcttctgaggatggactttagtgggattcttttgaccaggaattaaggaaataatgtaaaaacacatgttattggatttattaagcaccttccttgtgcttaataagtgtttgaattcagacatttcaggggtaagactacttaacctctgtgttcctctcaactatctaatgtacacatacaaaaatatgaacatggctgggcgcggtggcttacacc

SEQ ID NO: 148235 - DNA, 454 bp, Homo sapiens
ctggtcaccggcctctgctctccctgcctctcagacccttggcagcccctgggcctggcccacccctttccactgcagagctcccagaaccttccaaaattacactcccagaaagcctggttaagggagagagctgaagttctccctcatgaatgactaacagctacgcttcccttctgtcttatttcacgccacttacctttctacccaggcaaactataagcaacgcacgcatgaaacacagattctctgagcatctccagatccgagctgttctttgcatgcttcctgccacacactgtgcagtaaacaatgacgggcctacaacagcgctttcttacatctcactatgacgttttcacatcgcttacagaatacaaccgtcattagcgcatttccagtttgctctaatttatgccaaacatctttgttttaagcagcacttccccataca

SEQ ID NO: 148236 - DNA, 299 bp, Homo sapiens
tggcaaaatacccatttaagtattttataaaacctgatatccaattgtatgccttgaggcatgcctagagatctgtgctcccaaatcctggatctaccaaagttgcttgtttgcccagaaagtggtatgaccacactcctccctgtcccagacctcaccaggtgtcctagagtttaaactgcctctttgcaggttatctgggaggttaagtgtcttaggctgtagagtcatctgtgtttcgccagggcctgtgaccactccagaagtcctggttgggaggtttctaaggagagcaggag

SEQ ID NO: 148237 - DNA, 405 bp, Homo sapiens
cctgttggccaggctggtctcgaactcctgacctcaggtgatctgcccgccttggccttccaaagtgctgggattacaggcgtgagccaccatgcctggtggtacttccactttttattccacacatttcagcgccctttcattttgggaaactgttgtagtgtgtgtaactcaatatattttaaaagttaattttttttaaatgccaagatggtaagaaaatacatgttagtgttttgtgtaccttgaaacaaatatattcttaacaccccttttgagaaggtgtcctttttctcataatcctttggaggtgggtgggcattttctttcaccccgaacaggtttccaactattaatatgttggtgttttagcatttttgcctcaacaatcacttttttccaatt

SEQ ID NO: 148238 - DNA, 418 bp, Homo sapiens
tgagacggggtctcgctctgtcgcctaggctgcagtgagccatgatcatgccactgcaccccagcctgggcaacagagtgagaccctatctcaaaaaaaaaaaagaaaaagtttagactcttcccccaagttggtcttggcagtccttagacaggtaaactcccttcaatgctaaatggtgtcatagggtaatgataatttaacaattaaactttttcttcctttattagctttaaaagtgtcccaaatcctgcatcaccagaaaatcaccattaaatttttagaatttaaaataaattctagagttgacaagaaaagttaacaaggaaatttcaagaatgtctcttatctattatttggcccttaataaaagatctgttctgacctaagtaagttttgatgacctgcgatggtgacc

SEQ ID NO: 148239 - DNA, 596 bp, Homo sapiens
atgttatcccaactcaaagagtgatttcctatggccgcattccttatgacattttaaacatcataatcaattttataattttgtttgccttttccacgtctatacttatacatatgtatatgtttatatataattataaaacattatgtaatgtcaaccctccgctctagtcaaactgggttaattcattatcttccaaaaatatcttgagcctctttacagctttacacagaaaaaagaaagctcacagagttcgacacttttttaaatatgtgaatatgtcctagaattgcttctgctcctcaatacatacctaccctacccaaacatacgctcttactaaattcttacccatccttaatgtttttgcccaaattccattttttcttgagacagggtctcactcagtcacgtaggctagagtgcagtggcataatcacaggtcactacagccttaagctctcagcctcccgagaagcttggactaaagtcatgcaccaccacactcacctaattttcgtatcttttgtaaagaccggttttgccatgttatccagactagtcctggacttgtctggatacacgttcgcgaggcc

SEQ ID NO: 148240 - DNA, 227 bp, Homo sapiens
accgaatgaagagaagaaggaaggaaaagaaagaaaaagaaagagaaaaagaaagaaagaaagagagagaaaaagaaagaaagaaagaaagagaaagaaagaaagaaagaaatctaattataaaaagagacacatggttcctactaccctcatggaattttgaatttagtgaatgaatgagtgatatttagtaaatcatatctgccttcccttctttctctttcttt

SEQ ID NO: 148241 - DNA, 121 bp, Homo sapiens
tttcattaggtaactataatacatgacattgtcatgtgcacagaaattattcagctcacaattccaaagttttatagagagcttgttgaatttggagacggatgatgtggcatcaagaaaa

SEQ ID NO: 148242 - DNA, 308 bp, Homo sapiens
agtataatgattctctcagactctcagttctcctacttcttggcttctccttagtatcttttgatggttcctcctcttttttaaacatcggagtgcctctgggctcggatctcgtctcaatttgtgtttagttcctaaatcaccttatcctgttgtatagctttaaatactattcagatgtggagactcccaagttcatattgccaccccagcctctcccctgaacttcagactcatttatccatctgcctacctgatacattcacttggtgccaaataggcattccaagtttaatatatccagaact

SEQ ID NO: 148243 - DNA, 205 bp, Homo sapiens
ggaaggtggggtgggtggtgacagatccaccacagatgtggggaaggacagtggcgacaactccctgctgcggtggagacggcacctgagtcgtctttgagtcccagaggcttcctctccaaaatggaagacttgaggccctgcactgggctggcaatcgcagggaagggcaggggatggagggccaccttcttttttttttttt

SEQ ID NO: 148244 - DNA, 301 bp, Homo sapiens
acagtcagttccgtggcccccaggcacagctccagtcacacccagtccctccccatcacctaggccagtggttcgcagcatacactgcagaccatgggggtccccaaaactcctttaggaatctgcacagttaaaatgatttttgtaatcgtactaagatgctgtctgttgctggaaagcaacaatgagtaagactgttggtgccttggtcaaggtggtgatgctgaactgtgccagtagccactatattctccactgctatgtactcccaggtttttgtttttgtttttattttgagata

SEQ ID NO: 148245 - DNA, 339 bp, Homo sapiens
ctgggtcacgccttagagaatctgcatttttaaccagcatctcatatgtgcaggtggtcagcagactacacatcaggatacatgaaccatggaggtgattgctaatattgctagtgccttctctccctttcttccttccttcctcacattgttcccattaatagggcgactaagacagaagcagccaggcacagtggctcacacctgtaatcccagcacttagaaagcctgaggcggatggatcacctgaggtcgggagttcgagaccaggctgaccaacatggtgaaaccccgtctctactaaaaacagaaaaatcagccatgcctagtggcgggcgc

SEQ ID NO: 148246 - DNA, 492 bp, Homo sapiens
cctcttggttgggatggttacttcttgtgtgaactactgtaattaccctttggcttatctacctcaccctgtccctttcatcccatgtaatgcttcaagagtgatttttctaaaccatggtgcactcacttctttgctctgaaacctccagtgatttctccttgtctgctgagtaaagttcaggctactttacactagcatttgagaatcttatgaattaattcctgcctacacttaatcattctttattcctttgttctttaggaaaaatcgtaattggtaagataaaccaaatataaaactatatagtaatgctgtttttcagtcttactgatctcactctattccttatctttaccatgcttttctgactttgtgcttttgcctctggatttcccagtctggaatgcctctctcacatcctagtatgttgaaatctgtccattattcaagtgtgagcttagatgccaacactttgatgaaggcttatct

SEQ ID NO: 148247 - DNA, 472 bp, Homo sapiens
actgatttgggatctctggaagaaaagggtactgagtcactggcaccttctgctcagctcctgacagcagtgtaaaggatgctttcgtgacacccagccttcagcccaggaggatggtggcagatcagacagctctggaaatgcagggcacaatgcgcagagggttgcaccacaacagcagtcactcggtgcccgcctggagcactgctctcatttccagagtccctgtatttctgatcttggctgctttaaaaaggaggtgtgggcctgggatcccagaagtattcctctgtgattctgtaccacagctttaccttaattgggggtgtagggggtggggagaaagaggaagacagatgaaagcagggaaatccttcttggagtcatagttaaaaggataaaataagagctttagtgtagcctccgtttccagcaatccattttattctttgtccacaaactgaatgaaaat

SEQ ID NO: 148248 - DNA, 261 bp, Homo sapiens
cctaagcgtggtggtacacctgtagtctcagctacttaggaggctgaggtgggagggaccctgctttggctgtgactgctttatcacagggagtgcctatctgtgggctgctttctacacattaaagcattttcagaaagggccaacatcagccttggaaaaaaggaggaagagccacggagagtctccctttatcttccccttatgtgatgtgagagtgcacatgactgtgtgcacatacacacacacacaccacacaca

SEQ ID NO: 148249 - DNA, 425 bp, Homo sapiens
tggtaggaggcgactggatcatgggggtgatttctaatgatttagcaccatccccaagtgctgtttcctgataagcgttctcacaagatctggttgttttaaagtatgtagcacttcccccttctctctctctcctgctggccatgtgaagactgtgcttgtttccccttcaccttccaccatgactgtaagtttccttaggcctccacaagagaagcctgtacaggcagcagaactgtgagctgattaaacctcttatctttataaatacctggtctcaggtatgtctttgtagcagtgtaagaatgaactgatacatccccaaatctcagctactcactcacttcaactgtatttatttattataaccaataaccacaacctctccataaatgcagtttcaagaatcccactctcttaaccat

SEQ ID NO: 148250 - DNA, 264 bp, Homo sapiens
ctctatgataaacataatttaataaaaacacataattttacccagattcgagaccttttatgaaaacaagcaagaaaatcctctcttaaaatgtgtaaagtaactttaagtaagcatttattttattattacacaacagtaatacaatacattattaaagagctggcctctactatttggatagaaattaggcttccagtgatttcggtaaacatcatttttatttatttatttttgtcaaaatagaaaaggctatttttctta

SEQ ID NO: 148251 - DNA, 273 bp, Homo sapiens
ggaacaatcttgtcattgtagccaactcccaccacggtttctcaggcaaccaccaacccaagttttatggaatgttctggtcccacggtatgtttggcaagaggaggggctcactctggtgggagagctagaagggtgctgctggctgggagaagggacccaaagcatctccagccagacccaaagccctgccccatcccaggccacacctgcctcctttaccaggggagtccctgggaggtggctgtgagagaggcacacctcagccctgca

SEQ ID NO: 148252 - DNA, 720 bp, Homo sapiens
cagttacttagacatttgttcaattcttaagctgcagttagaagaaaaggaagtggtgtgaacttttcaccttttatctgaattctctgaagaggagttctgcaggatttcaacatccttaaaacaaaacactagcagttactgattggaacatactttcctttgggatctacatggcctttgcaagaatagcataaatagcacatagcctagcccctatctctaaaaaaaaaaatccttactccatggttatttgggagtgatgggtttctggagggctgttttaaactcaaaggacaggcataaaccctttgaatcttcacttctcacaggaatctgatttccatcaagtaggaaagaaatcatgaagcccagtcagctcttaggtagtgttttaagtaaggtgaaggaaaaacaaacattagggaagttcaaagacaaaaaatcctacaagaggacaaccatgattgaaactgtactctgatttctgttatgggtatgtgcacccccacaagctcatgaattctcttatggaagagagggctgagcttccaaggtgatgcagggcctatgacacacccccatgtagacaggtgaactgatttctccaaggtcatagaaaaaactgagaccttttattacccaaacagaagatttctgaaagtacatttcctaccctgtgttttgttatcagactcaactatgtcatgacctcctggc

SEQ ID NO: 148253 - DNA, 526 bp, Homo sapiens
catggacgctttatacttcttctgaatctcaaagttagttataatgcttgtgcatcataaatacataacattttactggatagatgaatgatagataactatgtacttcggctatttaattcatgtagaaaatttaaatattataaaagcagtaatgattctcagatgtttttaaaataaattgtcttccttttttttttttcttttaaagagacaggggtctcaccatgttgtccacctggtcttgaacttctggcctcaagtgattttaatattcatcttttcttccctcttccagtcctgtttccaaaaaggaaggagggaagtataaagcgtggagctcaacgctttatacttcactattacttggtatgggtgaagagtgaagcaaaagtttgtggaaactagtttagtgatgggaagaagaggtattcccgtgactttcatttcctctaggaagaggtggggattatttacaattagggtaaagtcgaagacttagggaacgggaggacagttggtaata

SEQ ID NO: 148254 - DNA, 363 bp, Homo sapiens
aggttgggaggctgacattgcggggaggaaggagctagaatgctgggggctgtctacctggtgccatgtgctgccatctgcccagtatgggggcaacatcagcctgacctgccagcacctgcctggctaccagtatcagctttcaggaataaaaagatctttttcaaaaagcctttgttccccagggaagctcaaggggcagagtgaggtccgtggagggttgtgacagttcaaaacatgctgtccatttatagtatgcagcagtgaccctatatctcaccctctctatagcaactagctccagacacaaactgggcatggcttttgatcatgaagcatgtttttacaaacaaaaaaatactg

SEQ ID NO: 148255 - DNA, 415 bp, Homo sapiens
ctcagcccgtatggatcagctccgagaactccattctgccagtgagagacccggggcccagcagaaggccagactctgagagcgtcaggaggggcaggctggagctccgaaagggataggaactgcctgggcagctggcgacgccgtctggacagctgttaaggaggcccctcagaggaaaggatcacagtttcacaggaatttcccctcatattgccaatatttcttagcgaggtccctggccagagactgttataagcaaatctccatgtcatcgtctgtgaaatggggagaataatcttgcctaaagtccttaaccctgtgcctgggttgcaggagacactcaatatttttgtatttttgttttttcaagccctgaggtgctagcactactgctaactttaaaaagaaagaa

SEQ ID NO: 148256 - DNA, 276 bp, Homo sapiens
cgtggctggcagacgcaatctttttttcttgggtagagcattatcaccgctgcgatggaaggaccttgtcctcggtgcctccataccagccctttccagtgaaactactgctgtcccggcaagcccctgtgcgtgtgcatcattccgggtaggacaagatgtgaacaggtccctcttctttgggcttaagtagaagttgtgctcttctgcttttacctgtgtgctcttctgcttttacctgttctcttctgcctttctcttgcaagaaacctgtcg

SEQ ID NO: 148257 - DNA, 477 bp, Homo sapiens
agtgctatcacaaacagtgtatagccagtggaatgtgtggtatgtggtgtgtgctgtgtgtgtgatgtttgtggtatgtatgatgtatggaagaagtgtggcatgtagtgtgttatgtggtgtatgtggtactgtggggtgtgtagtatgtgttgtgtgtggtgtgtatgatgtggtatgtaggatgtgtggcatgcggtgtggtatgtgatgtggtatgtggtatgtgctgtgtgtggtatgtaggatgtgtgttgtgtgtggtacatgtggtatgtagtgtgtggtatgttatctggtgtgtgtgtgtgtggtgtgatgtgtaatgcgtgtggggtttggagtgtgtgtggtatatagtgcagtgtgtgtggtgtgtttgtgtgtgtgctgtatgtgtggtgtctggtgtggtgtggtgtgtggtgtgtacagtgtggtgtatggtgtacagtgtctgtgggtgtaggtgtgcgt

SEQ ID NO: 148258 - DNA, 336 bp, Homo sapiens
ggagagggtatttgaaatagcagaaaccagaagtttggattccctgtgggtctgcattatttggtcacttcaatcccccagtaatttagagaattgaaagcaggatggcagtggggggaaattgttcaagagaatccccaaacagaaataatgggagctgatattttgatcaaatatttactgtcgggtgtgtgtgttgggtatgcagtgtttgcatagactgtctcctaattacatacttgattagcttgaagaaactttggctttttcttttacctatgggagaatttttaaggccttatctcaactcttttcagcccttagagtgtgctctct

SEQ ID NO: 148259 - DNA, 294 bp, Homo sapiens
ggcactgggggacacagtctggcctagtcaccttcctcctcctctcttgtattcctttattttaaacgttctggttttcaagtacgtttagatgcaggaagatgataaaagtagtacagagttcccataaaccttcaggcagctctccctaggttaaaaaatgtcacataacatcttaagatgaccaaagccactgacaatgtgctagtcactcaactacaaacatgatgtgaatttcaccagccttcccactcttgtcctttctctggcccaggagcccatcctgggtccctg

SEQ ID NO: 148260 - DNA, 445 bp, Homo sapiens
gcaaacctgcatgtttattcaattgatggggctacagaaaggaaaggcaagagagtgaaggaggtaaaacaccaggctgcaatgggtccttcgcccactaattcctttggtgctgctcctggtccaggtcagcaacagccccctccagagcagcagccagaacccccagactgctggccactgccactgccatagcaattggagctcttgggtctgtggcagtgggacctatggtgtctgtggtggctcaggcagcagccacctccctcagagctgcagcaaccacagcccccagagctggagccacagcaggaagagattggaggtgggcatgaggatgcacactttgagggacattttgggggatacttggggataggacacttgggagggggctggcactgctgttggttctgctggcaggacatcttggtggaatttcgat

SEQ ID NO: 148261 - DNA, 478 bp, Homo sapiens
ctccgcattggactctgtgatgctggctccaggggcccccatagctttgtgtctgccatagtgtctcagtgcagatgtggggtcagaccaccctgggacagtgcccatgaactgcctagcaacagacgtcacagaagtgctctgacagctttgaacaacggccgcagtgccagcctttcacccagaactgacaaagggagccctctggggccaggagtgccatggcttctgtggctgccgttaactttgggatgaggccaggtgggcagtttgcagcttagctgggggagagtagggccctttatccataacctgaaatgcttactgcctcctcctgccagagccatgggccttcactgtgttctgttatctgttcgcggttgccagaaaaccatctcatattgacaggcgagctcccttagtaaggtgtgagatctggaagcttctcagatctattctctatggcactttccaccaa

SEQ ID NO: 148262 - DNA, 320 bp, Homo sapiens
cttaaattgcaagtcaggtatttgctagctttgtggtcttggagaaaaaaataattacttaacctattggatccctgattgtcttatctataaaacaggaaatctataaaatgagaatgttggccgtgcacatggctcactcttgtaatcccagcacttcgggaggctgaggtgggggatcacctgaggtcaggagttcaagaccagcctgtccaacatggcgaaagcccaactctactacaaatacaataattagccgggtgtgctggtgggcacctgtaatcccagctactcaggagactgaggcagaagaatccctt

SEQ ID NO: 148263 - DNA, 618 bp, Homo sapiens
ggcaagcatatagagcaattacagtgcattttagggggctcccactgcaggcccaggaccacatccaactgcatcatgtatgcacaagagaccagagcatggcagacacgttggcaggagactgaatacagggaactcagcaacccaagtagtggaccctgtgaggccagtagtccaccagaggcaggaagtgagccaggcccttttctacagagggcagcaggaagaatcatgtggctggcagggggaggaggcaccaagaggagcacagggaagaaagggatggccaccaggagcggaataccatgagcaccctggactccagtccggaggccaagcctgaccagactgcagaaggcagacctgtgagcggcactaggctcagcagccacagaaagagtggggggccagaaagcagttgcagaaacacaagcataaaatacaaggcactcgccagcagggaggaagtcacaggaaatacagaaaaggagcaaatgaccacttcttgaaggacatgatgaagaaagaacaggacatttgtcatgagaaaaaaaaggggaagctgggacgggggcctgcaagaggtttgtggacctcattcggtttaagaccaatccg

SEQ ID NO: 148264 - DNA, 331 bp, Homo sapiens
ggcaagcatatagagcaattacagtgcattttagggggctcccactgcaggcccaggaccacatccaactgcatcatgtatgcacaagagaccagagcatggcagacacgttggcaggagactgaatacagggaactcagcaacccaagtagtggaccctgtgaggccagtagtccaccagaggcaggaagtgagccatgttcatgccactgccattaaaggagctgttttctctgcatctaggccatcatactgccattaaaggagctgttaccatctgagccatgttcatgccacgtgccattaaaggagctatcatgccagctgccat

SEQ ID NO: 148265 - DNA, 411 bp, Homo sapiens
tgctaacattcagtgggagaggctaacattgcaggggagaaactgacatttcagggcagggctgacactctccatccttcagattctacagcctctgcctccttgctataccctgtccctacaagtattggctgagctcatagtaggtgcaaatctctgccaccctggggatttgaacatgcctgaatagaatggagtctgccctcatagagctcgcagcctgggggcagacagttctgaacggaatgattacacagaaagacattcacctcccaggcaggagaggtaatcacgcgctcttaatcactacctccgtttctctcaggcaatacgggaggggaggcggcacccccatcgtggcctggtttgagatgttcccagccgtaggagacagactgtcatcaagtgtcg

SEQ ID NO: 148266 - DNA, 815 bp, Homo sapiens
  misc_feature (28)..(28): n is a, c, g, or t
  misc_feature (47)..(47): n is a, c, g, or t
tttttatatttcttagatatccacaaanaaaaacaaaaaaaaactcntgtactgacagtttctatcattatatctttaagcccactgattctttccttggccatgtctgatttacaggtgatagggaatgaagatcttcaccggaattggcctcttgatcttggactttccagcctccagaactgcaagccaaataaacatattgtgtataaatcatccaatctgtggtattctgttataacagcaaaaagtgaactgagacagtttattctttaggagtggcctgtaagtggtttcataagaggagaaagatacctgaattcactgtataagtcctctcaccatgtgatgcactgtaccacctcaggactctgcagaaagttcccacaacccagaagaatcttaccagatgtggtctctcaacttcagagttctcaccctatataactgtttacagaaggagactctgaactttaaacttttgacttggtactggaacgcgttaagactttagggcaatgagattagatgaatatgaaaagcacatgagtcttgagggactatgggcagaatgctatgctttaaatatttgtcccttccaaaatgcatgttgaaatttaatcctcaatatggcagtattgagaggcgaggtattaaacagataactgtgaagaaatagaaaaaagtggggctcatggcctaaaggtggatctttgcgggcggttccttttagagaggattattaaaaatcatcgcttattgatttcttcagtttgatatttggttaggggaatcggaataattaattaatagta

SEQ ID NO: 148267 - DNA, 706 bp, Homo sapiens
  misc_feature (28)..(28): n is a, c, g, or t
  misc_feature (47)..(47): n is a, c, g, or t
  misc_feature (667)..(667): n is a, c, g, or t
tttttatatttcttagatatccacaaanaaaaacaaaaaaaaactcntgtactgacagtttctatcattatatctttaagcccactgattctttccttggccatgtctgatttacaggtgatagggaatgaagatcttcaccggaattggcctcttgatcttggactttccagcctccagaactgcaagccaaataaacatattgtgtataaatcatccaatctgtggtattctgttataacagcaaaaagtgaactgagacagtttattctttaggagtggcctgtaagtggtttcataagaggagaaagatacctgaattcactgtataagtcctctcaccatgtgatgcactgtaccacctcaggactctgcagaaagttcccacaacccagaagaatcttaccagatgtggtctctcaacttcagagttctcaccctatataactgtttacagaaggagactctgaactttaaacttttgacttggtactggaacgcgttaagactttagggcaatgagattagatgaatatgaaaagcacatgagtcttgagggactatgggcagaatgctatgctttaaatatttgtcccttccaaaatgcatgttgaaatttaatcctcaatatggcagtattgagaggcgaggtattaaacagataacngtggcctcgttggcctcagcggtggagcttctcggtcag

SEQ ID NO: 148268 - DNA, 864 bp, Homo sapiens
  misc_feature (28)..(28): n is a, c, g, or t
  misc_feature (47)..(47): n is a, c, g, or t
  misc_feature (825)..(825): n is a, c, g, or t
tttttatatttcttagatatccacaaanaaaaacaaaaaaaaactcntgtactgacagtttctatcattatatctttaagcccactgattctttccttggccatgtctgatttacagctgtataatttgacatgccttcagctggggaagaggagccaccttattataactaggtgacgatagcaactcagactctccaatgggtttccattgagaccgaaggggatgatgccttgttaccttagacagtgatgggagttcctgttccccaccaggtgatagggaatgaagatcttcaccggaattggcctcttgatcttggactttccagcctccagaactgcaagccaaataaacatattgtgtataaatcatccaatctgtggtattctgttataacagcaaaaagtgaactgagacagtttattctttaggagtggcctgtaagtggtttcataagaggagaaagatacctgaattcactgtataagtcctctcaccatgtgatgcactgtaccacctcaggactctgcagaaagttcccacaacccagaagaatcttaccagatgtggtctctcaacttcagagttctcaccctatataactgtttacagaaggagactctgaactttaaacttttgacttggtactggaacgcgttaagactttagggcaatgagattagatgaatatgaaaagcacatgagtcttgagggactatgggcagaatgctatgctttaaatatttgtcccttccaaaatgcatgttgaaatttaatcctcaatatggcagtattgagaggcgaggtattaaacagataacngtggcctcgttggcctcagcggtggagcttctcggtcag

SEQ ID NO: 148269 - DNA, 655 bp, Homo sapiens
  misc_feature (616)..(616): n is a, c, g, or t
ctgtcggaactgtctataagctacttgtaacacctgattctttccttggccatgtctgatttacaggtgatagggaatgaagatcttcaccggaattggcctcttgatcttggactttccagcctccagaactgcaagccaaataaacatattgtgtataaatcatccaatctgtggtattctgttataacagcaaaaagtgaactgagacagtttattctttaggagtggcctgtaagtggtttcataagaggagaaagatacctgaattcactgtataagtcctctcaccatgtgatgcactgtaccacctcaggactctgcagaaagttcccacaacccagaagaatcttaccagatgtggtctctcaacttcagagttctcaccctatataactgtttacagaaggagactctgaactttaaacttttgacttggtactggaacgcgttaagactttagggcaatgagattagatgaatatgaaaagcacatgagtcttgagggactatgggcagaatgctatgctttaaatatttgtcccttccaaaatgcatgttgaaatttaatcctcaatatggcagtattgagaggcgaggtattaaacagataacngtggcctcgttggcctcagcggtggagcttctcggtcag

SEQ ID NO: 148270 - DNA, 209 bp, Homo sapiens
gggaggtgttggactggccacagcagagccaccaaggggcttccaagagctgagagtcgctgattgtggcagatctgagtctgcagtgaagccttctgtcaggcagaccagcctgaggcctgagaagggagagcaaagccaggtcacagcctggtcagggccattaactcatgtcagagaagtggaaggtggggcctgagcccaatcag

SEQ ID NO: 148271 - DNA, 139 bp, Homo sapiens
agaaaagcctcacctttgtagtatttgtgggcaaagttttcgtcatggaagttcgtatagacttcacttacgagtacatcatgatgataaaagatatgagtgcgatgaatgtggaaaaacatttatccgtcatgatcac

SEQ ID NO: 148272 - DNA, 392 bp, Homo sapiens
agccatactctgccttggaaatttcaacagcgtgcattctaggcagccaacatgaaagaatcagggagacaataattatttgacaactttctttactctcatcgaacactttcttctgagcatttattcaagtaatatgacagagacatgatttgataaggcctttctgacatggggactcttgaattgaaacatgaaaaagtgaaaacaattagttggaacaaggtgaagccatgggagggaggatgaatagtgcagcttaaaaggatgtttaaaagccctgtgtctacatacttattattattattattatttttaagatgccacatataagtaagatcaggcagggctttttttcctttgatctggcttatttcacttaacataatatc

SEQ ID NO: 148273 - DNA, 362 bp, Homo sapiens
gttaattatacataaacttgttaagtaccagaagtagtctaagaggatagtgcaaaaggtaaatttgttcagaaagataatcctgattgtgtcacaagcagaaaatgtctgattacctgccaaggtcacttcactcgaaactcatttgtgggttcagtgaagcaattccgcattttgacataccagcattttaatgtggatattggtatttgtcttatcagtttgcaagtagatttgtttttaaatgcaatttctttacacataaaggaagctatatttgagagctaacttctttaactcagttatccatgtaaatataacataaagagagttaataaaattcagaagtaatttaagaactc

SEQ ID NO: 148274 - DNA, 996 bp, Homo sapiens
agcgacatctgctggtacaatgtaataaagatgactatctcatgaaagtaatttcatagaaaatatctttgtgggtagaattgtttattttactatcatttacacttctaattgaaaatttgaacatttgaccaagagtattatcctgataatgataacattgagcttctttatactttcctgtacatagtatgcgattccaacctgaacctctacagttatttgtgtatttactaagttctttgatattattatgcaacatatttcttttcctccatgtcttttttggctcagttttatatcataatttgccttagtgcagaaccttgcaagtagagattcagtaaatatagactgacttacagtatttattttgtcatttgcatagattaagttgaaaagtctacatatatgagttaaatgcattatttttatgtgcacttgaaaataaaaatgagactttatattagaaaagaatgtgattaggataaatggatttttatttttcttcctttgaagagattttctgcattataagttgtggagaagcaaaatatattcagtccttggacattttctttacaattatttcctgtatgattgtatctagtctcatgcatttaaatactacatataaacaaatcagacctctcccttaatcctcagacttgtacagccagttacttgcttcctcaacattaccgtttaattagttaacacacattttaaacttaacatgtccaaaacaaaagttttgattttctccttgaaactgtttgtgcttagtattccctactttaatgagtggccgtattatccttccgtttgatcaaaccaaaaattatttcagtaatttgtaaattccctctcttttactccacgtttaaaccattgagaatttcagtcagctctacttctctccaccttctacaactatgatctagatgaccacaatcatcgttcccctcctaacttgcttccttgcttctaaccttg

SEQ ID NO: 148275 - DNA, 168 bp, Homo sapiens
gaagcagaaaagtgagtagactgaaagcagggagaccagttcggcgcctgcaacagggttctcacaatcctgctgatggtcctgacactcccaactagagctagatagcccctcccagttgtggctaaggagcacccagccctccctccttccatcccctcacctcca

SEQ ID NO: 148276 - DNA, 245 bp, Homo sapiens
gggccttgccactacccagggcccatgctcactgccacctgaacgttagggactctgctgctggcgactgctaggcactgaatggtaggatctgtctgggagtaggaagtcatcgtgcttctggccagctgcccaagttgatacttttgggctctcctgggtatagaggtaacaggagctgtgtgcccctggcatagagtgaagctgactgtggcggctgttccctcacgcgtctggtcagttgg

SEQ ID NO: 148277 - DNA, 151 bp, Homo sapiens
ttctaatgttagaggagtcttgcacgcttgcctgaaatcaattagtggccctacactgaagtgcgcctgtctgagcaaacaagtacatcagccacagtgccctgagttattgagttatgggggcagaactccagaggtcttctaggtgtct

SEQ ID NO: 148278 - DNA, 308 bp, Homo sapiens
cggagaaggaggctttggactggatgggacaagaggccgttgatggcgtgcggcccacgcaggagagtaaacagctctcaccaggggcaacatttctttgatgtctcctatttcattcaaaatttatgacttctatattctatcccataatatattcatgtttgttttaatacaaaaataacgttcttgtcccatgtttctggagtgaagtcaatgcctcaggaagttgctttcctggtttgagcagcacagaccataaaggggtcatccattcatttctttgttcattcattctccaagtatgcaat

SEQ ID NO: 148279 - DNA, 200 bp, Homo sapiens
tccagatatgaatgagagaacatgtagcctattttcgactactggacaacttacctacaagatgaagccaacaatgttgttagcacagaaagacaaaataaaacctggatccttgatcatattactaaactgctggatcaatgaattctgatacacgctgccaagcatgtgggccaataaatgtactcattgttgaagcc

SEQ ID NO: 148280 - DNA, 288 bp, Homo sapiens
tgattagttttctgtatgtgtagttttccagttttaagaatgttctacaaatggaatcatacattatgtagagtttcatatttggtgtctttagcacaatgaaatacatataagacctctagaactgcaatgtactctttcttgacctcagtactcaatacgtgttttcctcacttcacaatagttcattcacagtcgattggttttctaaacttgtatatatgtgtagtatgctttataaatatcatatgatagttaactttatgtaatttgttatatcttggtaat

SEQ ID NO: 148281 - DNA, 506 bp, Homo sapiens
gataaatgttggaaggcagagagaaggtaatgatgaatgcggtcttgggctaggactatagtgctgggttccagttctaaacctgctattggttacctgatggccccaccctccaatgtgggctcactgtagaaaatgagataactacaaatgtgtgaagtacttccagctatggggtcctttaaaacagagggctttgaattttctaacctttttaggtttttcaactatctaattcttactattgaaatccctagaaagaatttgttcctcacaaaagaaaatgataaaatcaatacccattactagccccgggagtcagccttggggaaaggaggagtttgtgtcccaaaatgcaaaggctgatggtaagaaaacagttcaagaaccacaacaccctgattttatctttaggtctctacggatcactcaagatgtctaaaagctctaattatgtaaagctgtaataataactgactgaaaacagaagaatacaaaatctgcat

SEQ ID NO: 148282 - DNA, 278 bp, Homo sapiens
ctgccatgcaccgcggcggagctgtccatttccttacggagggacaccaggttgcccgagtcctttgctaatcaatgacagccaccatgaatatcctagttcacgtatcccggtaggcacggccggctctggcctagtgaagacacacaggccccatgtactgactgcacagctgcatgtttatcatctgcactggaccctgtgtgtccccatctctgcctgtgtcagatgttgccaactgctgtgcttggtggctccgccacgctcctgccggcggc

SEQ ID NO: 148283 - DNA, 423 bp, Homo sapiens
gagaacctaagaaactcagagccagccaggcgcagtggctcatgcctgtaatcccagcactttgggaggccaaggtgggcagatcacttgaggtcaggagttccagaccagcctggccaacatggtgaaaccccatctctaccaaaaaatacgaaagttagctgggcgtggtggcacatgcctggagtcccagctactcaggaggctgaggcacgagaaccacttgaactcaggaggcagaggttgtatgagccgcgattgtgccattatacgctagatggggaagcatgtgtactctttcccagtggtgctctgggtgctttttcttgcagttgtattttttctttttgtgtatgttttgaggatgaagataatgaaaaagaggaaaaccctagaaaggtcactataactctttctggtgct

SEQ ID NO: 148284 - DNA, 294 bp, Homo sapiens
gtttaaattttttgttgaattaaagtctttgcatgtaacagggaaaaaatttttgcctctttagaaaacatctttcattttatgaaatattttattttgtaaatttatatttctttctgtagaagatactgagactgtaaagtctgatttgttattgaatttctctttaaattagtgaagctttccttcttcacaaaaggatttacactaaatggaggtaaaacttgaaccattcctttcttctgaagattatggcgtttcgaaatagaatctgtgttcctataactaaaatat

SEQ ID NO: 148285 - DNA, 274 bp, Homo sapiens
tactagagaaaaatagagacgtgacatgtagcctgcatagcttttttgaattcttttacaatcactctgtaccagtacgtgttgtcaacaaaatgcagcaaaataaagagttgcatgataattttaatgcatgaccaatgaagattgaagccagcctgttgggttaatcctgttttgtttcaatcctagtctttcccctcaggagctaggtttttggctggactgactggataattgttgcaggaatctctttccatcttcatgtatgaaagca

SEQ ID NO: 148286 - DNA, 317 bp, Homo sapiens
ccagatgcagaagaccttgtatgttaggaaatgtggatattatcctaaggacgacaaaaagggttttaagagaagtagaagaagtaatcctgaattaaaattattccagctgcagcatggacaatgaattagagtggtgcaagactagatgtaagaatatttgtcttggggactcctgttcatcatctagactgtggtaatgatggttctgaacagttttagtctcagcacttctaacaccaaatgtatggggttttgtctccaaatcaaacaatgctccaactttctggacatcgagtgggtggggttctctgcat

SEQ ID NO: 148287 - DNA, 397 bp, Homo sapiens
tcagcctctcaaagtgctgggattataggcgtgagccaccacgcccggcccagacattataattttaagttatcttgttgataatggcttcatttagccattcatttattgttgaatatttggattgtttcaagttgctattattttttaaaatgctacggtggaaacctccctgagtgtgctctgccatctttcaggggactctgaatgttgcacatcagctgcagaagagccattgtgcttgatttaggatagtgtggactgttatccagctctgtgggaggacagtcaagtaatgaattttatatagaagggagcattattctttgcaaaataagaccatgttatccagggagtggcagggaaaagttttttttccccactgcctagaattctc

SEQ ID NO: 148288 - DNA, 364 bp, Homo sapiens
ttttctcatatgtaaaatggggatataataatattggctttctagagttgtgaagactgagtgaatcaatgtatgtaaagtgcctgacatatggtaaggatgtctataagtgtttgctgctgttgttgttgttacatgttacatgaggtgggagatcctagagctcgtgtgttctgatggggagggtagagagggtgtgatgcaggagagaggatagttgctggagggaaggcttgagaagacggagaggagaccagcccaggtggacaggttagcctttggtaggagtaaagtgagtttacttgtcattctagggcatagtgttaaccagcataagccatttaagaagttaaattgtgtggtt

SEQ ID NO: 148289 - DNA, 766 bp, Homo sapiens
cttttccagtgagatgatctttcctgtggaaatctccagaagcgaggaaaaaggttaaattagagctggtcctgagcaagaagtattcttcaggaaaatcttacttggttatttacttagtgtgttagagaaccaaggcccggtttagcaatgagtcttgccccctgtcacagaacccgcatctcctgactccttggtaagtgtgctttgtatcacacacaggcatcatgattgtctcctgtttggtcatgagcctcttgaagagccttctcttccccaaggccaccactgggacagggtgataatagtgaagggaatactcaggttgccttattcgtggctggaggcccatctcttagagccctacaatagtgagcagaaactaggtgaaaaaactccgtaactgtgggagtgtgggggaatgcagaaaacagactgttccatgttaaaaactgttttaatgctcagccactgactgtcataagggtgatagtaataatagtgaaatcatgggatggtaataataaatcctttcagatactgccagaactacatatcgcaggctttagatgccagtgggcagctgcttggctaaatgtggaccccagttgtcaaggagagacccaccccaatacaggagaaacaaatcaacaagtatttgcagggcacacacagggcagagcctcttggaggtgaagacttcagtttagacaccatctctgcttttaaggaattagcaatttgaaaatgtgctcagaatgtcaag

SEQ ID NO: 148290 - DNA, 259 bp, Homo sapiens
gaaagttgaattggttgctctgtctccaggaactggagtacactcttcttctgcccttggacatcaggctctctggcctttggactccaggacttataccagcgcccctctgggttctcaggcctctgtacttgaactgagccacactgccagcatgccagcttctccagcttgccaggcctgctgtgggacttctcagcctccataatcatgtgtgccaattcccctaataaatctcctctcatctgtccacgtatct

SEQ ID NO: 148291 - DNA, 2121 bp, Homo sapiens
  misc_feature (197)..(197): n is a, c, g, or t
  misc_feature (501)..(501): n is a, c, g, or t
aaaaatccatcatggtaaagaaactgtttttctgagtgccttagacattgacttcatttccttgcaatcagtgttaagcattcagaatgatgtttcggttctttgaggcctgctggggaaagggagagggccctataagcctctggtgttccctccttctactaacacacacacacacacgcacgcacgcacgcacncacacacacacacacacacacacacacacactttggcctgaccattcttagccaaaaactcttgttctcctcacattctctctgcaacaaaaatccagtctttcaggaagaacaaactgacacgggagctagcagcaccctaagctctgtgctatcgcctcaatactttagcaaatcacttgtggggaaactgaggcccagatgatacaacttgccctgggtcacatagttggtttggggtagggctgatacatggacctgggatttccaattccagctagcaccctttccactaaggactcangcgccaaggtcaacagcaaatgccagcaattctttctccgagcctatcacactcttctcactggcagagtgtgccagcccttcattctcttcaatctctcactcatcttttggcaatagtgttttcctacagaaaagtggaaggcccagcagggaaactgtgtgcattctactgtcacccatctggagcagcttagcctctgaccctcaagaacgggacagagcagctgcccagagtcattcccagtggatggcacagcacagtgtgcactgctcccacagtggccagttttagtctcttcagcaccctcagccttcactgccctgagtattgtagtttacatacaggagtcccatccactgcaccactactcccaagcctagggatgaagatgctgtaattcaccttttcctggggagcctgcctctgtttccctggagtggtcacttgtagttcaaaatgagccccagatttgctgcacatcctggccagcaccaactgccaacgagctccgtgtaacttatagcttatgttgcacctgctctcaggttgtgtggaaagaggaaatattggtgttcataataggctctggttgttaccaaggtctcccactggtggccagagtgtatcagctattaatctctctagtgctgtcgaagagacttttctaggctcctcccaaggggctgagtctagtactgccagatgggctcacagttcatggatatgtgagagggatgaggctggcagatggacagggcttgtactttgcactttggagctctcagaaagagccctccaggcctggacaggaggatcactcctgtggcctaagaaaatgaccaaggctataaatatccaatctcaaatctcaacaaagcaatttccaggttttaccttatatgcacatgtgaggcattccattttatttgtaaatgttggtggcattggatattcctctgtttccttctaatttcagtatggttttaataatgttggggtttaatggtctaacagtaatataatacatgttaatctcagtcatgtaagaaatgtcacattttatttaattcaaatcctactctggaccctattcttgctttggtgggaaatgtggcctaagtaattattggaggaccctctgcttctttggaatctctgaagtattaggaggccaatctggtatggggaaaatgaaggaggccctctctccttcagttcatcacggctgctgctaacccattcctgtcccagctgatagggtatctgagaagatgggtgattcttctccctccaagccaagcttgacaagactagaagctgtgaggtatctgatctggcctctgtagatgaacaattgagccacaccctgaagttttctcacctccccaatgtattgccatgaggataaggacaggtccctattggtcatgacatcccttgctgcctcacccctgaacagagagagcctaaagtcctagctactttcttgaaaaaaaaaaaagggtagaaaaatacacagagagcaaacaaacacaaattaataactgaataaagagttgaactagcctgggcaacgtagttgagaccctgtctacaaacaacaacaacaacaacaac

SEQ ID NO: 148292 - DNA, 325 bp, Homo sapiens
ggtagtactggcaggggctgagctggagacctgggcagagggcaggctggctccagaggcacccacggagccaggggcccgagggcaagagatgtgaggagagccattcacattgctcccgcctcccagagcatgctggagatgtcaggaggccaagagaaaacgcccaaggaaggctgtgcctgccaaaggccccagggcacaggagggaggggcctggggtcacccatggcccaggtgtctgcttctcctctttctcttggggaagagggtactgcccacaccatccccagggcacaaacccgagcagtgtccatgtctgact

SEQ ID NO: 148293 - DNA, 375 bp, Homo sapiens
ctgtggtgacacatgaacaccacgagtctctacttatcctttactgaactatcagtgcacacccccagccacacaaccgccagacctgccaccccgagccgagaaacaccgcgatatcatcatcagactcatatgtttaacacatgttaacaactgcaccaagaaatgttagagaccccccccccgcaaactgcagaactacattcttgactaatgccacacacatgagagactcagctatgggccagcctaagggactcctgtatctccacgtgtcttcctcctttctactctcagaataaaatgttttctatgctcttcagggcaacgtatgccctactctttaaaagtttctgctatcaaaagtgaccttag

SEQ ID NO: 148294 - DNA, 311 bp, Homo sapiens
gggctggtgccaacctggctcagacatcacgacaccgatgccctgacttcctggacctcatgacccctcctgccccaacagcctcactgtggaactcacagctccaaacagctcagagaagtcacagtttgcacttgatctcggccaaaaggccgagaagtgatgaaaactcacactttgaacgcactaactccccaaacagcccagagacctcgcattctgcacacagtaccaaaacagccaggtgacctcccatctagggatggggccccctcaaacctccccaagccatgctaggacctcacacctcg

SEQ ID NO: 148295 - DNA, 810 bp, Homo sapiens
gtctctcatgaacatggttcttgtaggtctgttcccaagagtccaatcagctctggatgcactaacggcactgagtttctggacctacgaggctgatgacaccatggagccatgaattccaaaaaccgttcacctgtggccagcagcagaagaaggtatgcaaagagaagagaaagaaggatgcaatgtccacacatgctaaaggaaggagctttgggagccatggcttacggtgcagacatggccaagtccaagaaccacaacacacatgaccagttccaaaaacggcacagaaatggtatcaagaaacctcagtcacaaagatcggtgtctctaaagggggtggatcccaaattcctgaggaacatgccctttgccaagaagcacagcaagaagggcctaaagaagatgcaggccaacagtgccaaggccatgagtgcacgtgccaaggctatcaaggccctcgtaaagcccaaggaggttaagcccaagatcccaaagggtgtcagccgcaagctcaatcagcttgcctacactggctaccccaagcttgggaagcatgcttgtgcccgcattgccaaggcgctcaggctgtgccggccaaaggccaaggccaaggatcaaaccaaggcccaggctgcagctccggcttcagttccagctcaggctcccaaaggtgcccagtccccctacaaaggcttcagagtagagatctctgtctgccaacgtgaggacagaaggactggtgcgacccccccgggctgccatcggcatggggctggtgtcctcctgtgctatttgtacaaataa

SEQ ID NO: 148296 - DNA, 836 bp, Homo sapiens
gtctctcatgaacatggttcttgtaggtctgttcccaagagtccaatcagctctggatgcactaacggcactgagtttctggacctacgaggctgatgacaccatggagccatggtaaacgcactcttacactgccccagaattccaaaaaccgttcacctgtggccagcagcagaagaaggtatgcaaagagaagagaaagaaggatgcaatgtccacacatgctaaaggaaggagctttgggagccatggcttacggtgcagacatggccaagtccaagaaccacaacacacatgaccagttccaaaaacggcacagaaatggtatcaagaaacctcagtcacaaagatcggtgtctctaaagggggtggatcccaaattcctgaggaacatgccctttgccaagaagcacagcaagaagggcctaaagaagatgcaggccaacagtgccaaggccatgagtgcacgtgccaaggctatcaaggccctcgtaaagcccaaggaggttaagcccaagatcccaaagggtgtcagccgcaagctcaatcagcttgcctacactggctaccccaagcttgggaagcatgcttgtgcccgcattgccaaggcgctcaggctgtgccggccaaaggccaaggccaaggatcaaaccaaggcccaggctgcagctccggcttcagttccagctcaggctcccaaaggtgcccagtccccctacaaaggcttcagagtagagatctctgtctgccaacgtgaggacagaaggactggtgcgacccccccgggctgccatcggcatggggctggtgtcctcctgtgctatttgtacaaataa

SEQ ID NO: 148297 - DNA, 928 bp, Homo sapiens
gtctctcatgaacatggttcttgtaggtctgttcccaagagtccaatcagctctggatgcactaacggcactgagtttctggacctacgaggctgatgacaccatggagccatgatatgacaatttgtgcttctgttctgaggcctttgaattgcactccaaatatcctcagggcagaggtgttaagtgagaagcaggcactatttgataatgggccaggacattcctacagaattccaaaaaccgttcacctgtggccagcagcagaagaaggtatgcaaagagaagagaaagaaggatgcaatgtccacacatgctaaaggaaggagctttgggagccatggcttacggtgcagacatggccaagtccaagaaccacaacacacatgaccagttccaaaaacggcacagaaatggtatcaagaaacctcagtcacaaagatcggtgtctctaaagggggtggatcccaaattcctgaggaacatgccctttgccaagaagcacagcaagaagggcctaaagaagatgcaggccaacagtgccaaggccatgagtgcacgtgccaaggctatcaaggccctcgtaaagcccaaggaggttaagcccaagatcccaaagggtgtcagccgcaagctcaatcagcttgcctacactggctaccccaagcttgggaagcatgcttgtgcccgcattgccaaggcgctcaggctgtgccggccaaaggccaaggccaaggatcaaaccaaggcccaggctgcagctccggcttcagttccagctcaggctcccaaaggtgcccagtccccctacaaaggcttcagagtagagatctctgtctgccaacgtgaggacagaaggactggtgcgacccccccgggctgccatcggcatggggctggtgtcctcctgtgctatttgtacaaataa

SEQ ID NO: 148298 - DNA, 979 bp, Homo sapiens
gtctctcatgaacatggttcttgtaggtctgttcccaagagtccaatcagctctggatgcactaacggcactgagtttctggacctacgaggctgatgacaccatggagccatgggcagaggtgttaagtgagaagcaggcactatttgataatgggccaggacattcctacagaattccaaaaaccgttcacctgtggccagcagcagaagaaggtatgcaaagagaagagaaagaaggatgcaatgtccacacatgctaaaggaagctggtaactgcaacagtcacatgaggatggagagtctcttccttgtacagagcaaatagcacggcccctggagctcattggcatgggttgtccaactccccactgaagggagctttgggagccatggcttacggtgcagacatggccaagtccaagaaccacaacacacatgaccagttccaaaaacggcacagaaatggtatcaagaaacctcagtcacaaagatcggtgtctctaaagggggtggatcccaaattcctgaggaacatgccctttgccaagaagcacagcaagaagggcctaaagaagatgcaggccaacagtgccaaggccatgagtgcacgtgccaaggctatcaaggccctcgtaaagcccaaggaggttaagcccaagatcccaaagggtgtcagccgcaagctcaatcagcttgcctacactggctaccccaagcttgggaagcatgcttgtgcccgcattgccaaggcgctcaggctgtgccggccaaaggccaaggccaaggatcaaaccaaggcccaggctgcagctccggcttcagttccagctcaggctcccaaaggtgcccagtccccctacaaaggcttcagagtagagatctctgtctgccaacgtgaggacagaaggactggtgcgacccccccgggctgccatcggcatggggctggtgtcctcctgtgctatttgtacaaataa

SEQ ID NO: 148299 - DNA, 465 bp, Homo sapiens
ggtaactctcttcgaagaagtgtgtgatttgctgctgcttttatgtatttgattcaacctcagaaatatgatcattttttagtccatgaggatcttgtcacacaaaacttgcacctgcctttaccagagcctcctggtcattcttatcttatgattccggttccatttaaaagaaaatactcatggacaataagtgagaaggagcaacatagctttttgccctctgaactttttccctaacgccccttcacttgataaccaactggcctctctgtccaccaagtaccacactcactccactcttggcctgaaagccaagccccctacacacacacactccattcaggactcacagcctatctctcaagaagaacctaaagtggtcggtgtgagttgcaatcccaatgtgtgcattcaggaacacagcaaggctaagccacttagaatgcagtgataagagatgcc

SEQ ID NO: 148300 - DNA, 496 bp, Homo sapiens
tgaaaaatggttacaaagttcacaaaaaccatacaaactcacatttcttcaactgtaatgttcttaaagagcttgcagtagtcctcattccacacagccatatcactccaaaccttggaggcaagaagaatggctcccaagacaatcctcttccagttagttggacaaatgtcgatatcagcataacttacaagtctttctatgtaaatctgcaaaacagagcactggcctttgatttagctcagtttaagtgccaagaattcttatgaatgacagatttcttctggttttgaccagaaagtaagtgcttatgttctacagagatttgcttgatcagaccaaacaagtggccatatcacaattgtaggtcagatacttctgctacctactctgctcatagaaattcacagcccaattttggtcacaagaatgaccgtatatctcagccaagggcatcatgaagacaggcagtgctgtcaccttcacactcataaaa

SEQ ID NO: 148301 - DNA, 289 bp, Homo sapiens
taaaaatagcctaagccattttgtgttcatattttacaactcattttgagaattaatattttataagaaaattattttgattcaaaatgtgacttttaaaaggcctgtggtcttcttaagtgtaacttttattatgccttggggccggcagcttttctagagaaatatactgtagttatcgatgtattgtaccctttgtgaatttcccttcatgttctgaggctggaacatgagaaattatttcctttccttttttccgcctctacccctcctttttcctgcctgattt

SEQ ID NO: 148302 - DNA, 239 bp, Homo sapiens
acctgttgtttcctgactttttaatgatcgccattctaactggtgtgagatggtatctcattgtggttttgatttgcatttctctgatggccagtgatgatgtgagcattttttcatgtgtctgttggctgcataacgattattcttatgtttacagcaacatggttatttgcatagattcaaaaagaatctgttctctggccaggcacagtggctcacacctgtaatcccagaactcc

SEQ ID NO: 148303 - DNA, 459 bp, Homo sapiens
tgggggttctttaagaggccaggattgtgccgaatgctctttggctgacgatggccgtggcgggggctttgggaggggaggtcctggaggagaggcttgcccagctcactgcctgcgtctgtggccagaattggcacctgcatggggcctggaaacgtcgtgctcacctggggcggaagcccccctccaggactcagctcccaacgtcactgctaccgaggcagagactctgcagcggcatcagagagaagctgggccccagaacagcaccaggcatgggacgggccctccgtgccttccacggaggatgcaagcgtgaggcctgggtctgcggggacggtttacctgtcagctctgcacgccgctgaccactgcgcgccgcctccacagacagtccccatggacgctggggctgccgtggacgatggggcagccatcatggacaacgggactgccatg

SEQ ID NO: 148304 - DNA, 380 bp, Homo sapiens
tgatttacactgacctgcacatcttccccccaacaacgtaaactttcccacacccaaccttcatctcttcaagctctgaccctgccctcatactcccatctccaactccctcctaataaggagtgtggttcccgatctcaacctctggggagagaagagtgagaaaggcctgagtgagctttccatgaaggccaggtctggggtgaggaaggagacaaaactctccacaggcagcccaatatcctgtctcccttctcctcctctggggagggtcagagcctcacaaagcatgtagctctactgtgagtgggcagtgacgagttagtgtgccagggagggccagggaggcccagccaatgacaaaagcattggccccagaa

SEQ ID NO: 148305 - DNA, 309 bp, Homo sapiens
atgaccaaggaagggattatgacaaagcaaaaaggtctgagaacaaagtcccaggacattgcaacatataaagatgaagagtaacaataattgaaactgaaatgttgttgtcaaacaggctgaggatttgacataattcttacagtactataaatactatagtcacttaataaatttcctacagggaatgatgaggaaaccagaaaagaaacagcctatatgtaatatgttggggaataaaaatgctaaaaattaaaaataaggcaggtaaggatgagagtgaatacaggaagaaactgagggagaggt

SEQ ID NO: 148306 - DNA, 115 bp, Homo sapiens
tgttttggtttggtttattattatactttaagtactagtggttcttaagtggtgctcccatagtccccgggcctcacccaaggaggtccctgggctagaatggaataatagaggg

SEQ ID NO: 148307 - DNA, 169 bp, Homo sapiens
caggagtgaaactccatctcaaaaacaaacaaacaaaaccatggactcaaggtcaaggtttagcttctaattctggctccatcacacaatggctgtgacaccatgggtaaaactgcttaccctctcttagccttagtttcctcatttgtaaaatggaaataataacaca

SEQ ID NO: 148308 - DNA, 450 bp, Homo sapiens
cctgagaagcagaagcggagaggctccgtcagcccctggggggagccctgagttcacaccatccgcatgcagcagcctcccaccccctgctacagagacagcttccattccatggccaagtcacagtaagaaggaaaaaggacaaagcccaaggcctggagaggtgagattcttccaggaggtgagattgggagctggattgtagcgtggtgatggctggtggcttccatgggttggagcattggctgagcctggccctggccacacaggctgctgggagacaaccatctgctgtcattgctggaaggtctagggttctcctgaaactcatctgtcttttccagaaaactctttctcagccagtgcaaagattagcttgtcagggccttcctagcctccagctctcctccctagtcaaaggccatgccttggccatcctgaggcagctga

SEQ ID NO: 148309 - DNA, 349 bp, Homo sapiens
tatcattgtcgttatccccctcagtcctctggtaaggtcgataaaatgaatgggatacttaacctcagaatttccaacttttctgaaaccactagccttctttggcctaaaattctgtctctggctcttatgactcttcagagccacagtgctggaaaacacaagttaacttcttatgaaattactgcttgttactctatatcgttgactattactccaaatgtagatccctaatagacctatgttgaaatgacccaatactgtacattcttaatgcactatgccaaaagttatcaccaacaggtaaaggaagactttcaagacacagaaccaaaaaggcttgttggaa

SEQ ID NO: 148310 - DNA, 277 bp, Homo sapiens
tgtaagtgcatgaaaatgtaaacaacccaaatgtccattaagaggtaaatggataaataattgtggcatattcatacaatggaatattatatggtaatgaaaacgaaccaaaacaatatgcaacagtatggataaatctcacagatataatgttgagtgaaagaaagtcaatgtgtaagagtatatcctttataatctcatttgtataaagttcaaaatcaagcaatgattcctgtggtgttagaagtcaggacagtggttacctttggtagtggtg

SEQ ID NO: 148311 - DNA, 417 bp, Homo sapiens
aacgggtgatgcggttggaacgggtgatgcggttgggcacctgtcgtaatcccagctactccggaggcagaggcaggagaactgcttgaacccgggaggtggaggttgcagtgagccgagatcctgccactgcactccagactggagacagcgagagtctttctcaaaaaaaacaaacaaaaaaacaaaacaaaaaacacacaaaaaacaaagcagctcaggcaggctccagccagaagtgctggccggtcaaggtgtatccattctgtcctcccaggaggccatgggtctcgggaacgagctctgcttccgctctggactgggaaggcaaatgggggaggctgggctgcgtgccatcccgcctcctgatcaaggccggggagttcctaagctcctggggcagccacggaggatgtc

SEQ ID NO: 148312 - DNA, 322 bp, Homo sapiens
gccacagtgtatgttgttcccctctacgtgtccatgtgttctcatcggctataagcgagaatatgcggtatctggttttctgttctgcttattctcacttataagggagaatctgcagaaaaccagcagtatctggttttctgtttctgtgttactttgctaaggataatggcctctagctccatccaagtccctgaacaggatcccattcttttttatggctgcatagtattccatggtgtatatgtaccatgttttctttatgcaatctatctatcattgatgggcatttgggttgattccatgtctctgctattgtgaa

SEQ ID NO: 148313 - DNA, 566 bp, Homo sapiens
  misc_feature (120)..(120): n is a, c, g, or t
agtcgacggagactctcaatagctatatcagtattggcttgattcatgtttcaatatgacaacagcatgtctagttaaatactgctcgcagctggccatgggacatattatgaatacctntgcttcccagatacatttataattgtttagtttttcatttgcttacttctctgggccataattcaaccccaaattatttgccatttgtccagatctctccacatcctgatggatcaggttgtggagagtctccgtcgaacatcatttcaatcttcatatatcttcctcctgtggttagacttaaattgagggctgtgggctcagccacagaacatcatggcctctgttaccctaagtttcttcctgttcttgaaattgtgacggtttggaaagagatggggagaatattgttacccacgtgacaggctgcagcaaccttgaccactaaggtcaaataagcagcattgatgaattttagcatgtgggcacccctggagggggcgaggcaagtctttctgttacaaagatgcagatttcagtgcaactgaaggcagaactttctaatg

SEQ ID NO: 148314 - DNA, 463 bp, Homo sapiens
aaaaatgctcatcatcactggccatcagagaaatgcaaatcaaaaccacaatgagataccatctcacaccagttagaatggcgatcattaaagagtcagaggatgtggagaaataggaacacttttacactgttggtgggactgtaaactaggtcaaccattgtggaagacagtgtggtgattcctcaaggattagaactagaaataccatttaacccagccatcccattactgggtatatacccaaaggattataaatcatgctgctataaagacacgtgcacatgtatgtttattgtggcactattcacaatagcaaagacttggaaccaacccgaatgtccatcaatgatagactggattaagaaaatgtggcacatatacaccatggaatactatgcagccataaaaaaggatgagttcatgtcatttgtagggacatggatgaagctggaaaccatca

SEQ ID NO: 148315 - DNA, 263 bp, Homo sapiens
aacttttatttagactttaatacacaggttgacagcatgttcattttgtgatgacaacccagttgtcttattaggtaagtgttattagcctcagtttacaaattgaaaaaccaaagcccctaacagctctgcagcttttccaaagtaaacagctggttccgcacagaaccatgcacgaggcctagctccacacactcatactgtcagacttctgaagcagagtctctccttttctgtacctgagtacccgagcaggttgtacg

SEQ ID NO: 148316 - DNA, 481 bp, Homo sapiens
agcactcattcaagtagcaacagctgaaaccagccttattgtgcccctcagtgactccgttaccagccagttggaggcctctcctcaaagagctgagcctgagctcctctttcaaattcagtaacccaatactagccaaacagcactcccttgtcagaggtctgagatttgtgagaacttaaaataagagctaaaaataggtaatatactttatggtagcattttttattcctcatataagcacttcacaaggttaaattcttctacttagaatgtaatcccattcacaacaaccacaaaaagaataaaacacctaggaataagctaaccagggaggtgaaagatttctacaatgagaattacaaaacactgctgaaagaaatcagagatgacacaaagtaatggaaaaacatcccatgctcatggataggaagaatcagtattgttaagatggccaccctacccaaagcaatttacagat

SEQ ID NO: 148317 - DNA, 439 bp, Homo sapiens
taccacaggaacactacaagtggaggcctctacgtacgtcgagctgagcgtgtgcacgctctggtcactagtgtccgtcgtccaactactgatcctgactggaatcccttgtcagaggtctgagatttgtgagaacttaaaataagagctaaaaataggtaatatactttatggtagcattttttattcctcatataagcacttcacaaggttaaattcttctacttagaatgtaatcccattcacaacaaccacaaaaagaataaaacacctaggaataagctaaccagggaggtgaaagatttctacaatgagaattacaaaacactgctgaaagaaatcagagatgacacaaagtaatggaaaaacatcccatgctcatggataggaagaatcagtattgttaagatggccaccctacccaaagcaatttacagat

SEQ ID NO: 148318 - DNA, 672 bp, Homo sapiens
atacccaattcaatctttagaaaaaacaaaattggaggcatacatttttctgttttcaaaatattttccaaagctccagtaattaaacagtaggtactggcataaagataaacataaccactgggactacagacatatgccacatgcctggctaatttttcaaacattttgtagagatggagtctccctatgctaggctgatcttgaactcctggactcaagcaactctcccacctcggccttctgaagtgctgggcttatagtcatgagccaccatgccaagccgagaagttggtattttatctttttggcttcctatcaattgggtctgaattcagggaagagttaagatgtgtgagcagctatcactgcctaagccccattaatgacaggatagtaatacattttttaataggtaactctaaccaaaagtagttgttttatgagaacctaggtctagcaaaagaaataaacttaaatcttgccagtctaacaataagggaataaaatatcccagcagccaagtgtggcagcttatgtctgtaatcccagtatcttgggagtccgacacaggaggattgcttgagcccaggaggtcaaggctaaagtgagccttggttgtagcaccatgttaaagcctgggtgacagagtgagaccctgtctcaaaaaaa

SEQ ID NO: 148319 - DNA, 505 bp, Homo sapiens
gcaggcatctgccttcctaccttgggtctaactctggaaactaccagagcagtgaggagtattctgctccacacagtcctttctctcctattgctgggaagaatgtgaaagcatccctgctctaagccctgctactgccagaaaggagacagcctcccagaggccacagacagacaactcagtggggaagtgttcgtgctcccgcaggctcttcagagtgaggcccagggagctgccgactgactcgaaggtgaccttcccttggaatgaggaggccatagcactgacctgtgcctggactgatgacagaagaccagatgcgactgggtgactcaggaaatgcctgcatgatgacatgattaaataaccccctctctctttggcctcaggtaaaccctgggaataggcagagagacactgaattcatggaaagttcttgcctactaggataatgaagacttctgatggaaattaggttgaattcaaataaaactgcatggatggc

SEQ ID NO: 148320 - DNA, 100 bp, Homo sapiens
gaacttggcacctagtaaaactttgattctgtttgctaaggaaggaagcgagtcctagaagccaggtggtgcctggaccaagctcttttggcaggctgtt

SEQ ID NO: 148321 - DNA, 439 bp, Homo sapiens
ttatattattacctatcatccctctaactgcccagtggaaaagcattcatgggtgtctagctcacacactatcagcttccaattctcccacccatttcactagccccatctcacttggccatacctaaaagagtaaaaacattttaaaaaatcttttcactctcaaaatgattaatgcacattaatggatggcatgaaagccctggacatgaatcatgtcgagtgctttcatgccagataattattttccttaaaaagtaaaagcaccaactcttgaaccttagagcaaaaaatctgcttactatcaaaaacaaaaagttcacccaaaggtaaatcagagtcaattgccagtcttttcaggcaaaataaggaacagaggcataagtcactggcttggttacagtataatgtttataaagggcatgaaagcagggtaccg

SEQ ID NO: 148322 - DNA, 220 bp, Homo sapiens
aaaaaccgcacccggacagcagggtcagcaccctaacctgtgaagagaacggccacacagacgggcaaactgtgcccgggacagcagggtcagcgccctaacctgtgaacagatggccacacagacgggcaaactgtgcccgggacagcagggtcagcgccctaacctgtgaacagatggccacgcacatggaaaaaccgcgcccggacagcagggtcgg

SEQ ID NO: 148323 - DNA, 365 bp, Homo sapiens
cctgctatcgtggacattcccattaaccctgttagttttaaatgttaaaaacagagaactcaagacatctacttttttaatgtcaagaaatgcaaagtggcctatgataataaacataaacacatacataatagcccaggacttaaaaacaaatcccttcatttcttagacccacagccacatagatctcacagtttaaaaaaaaaaaaaaatccacagtgaaacgtatcagcgtacattctctttcagatccaatacacagaaaatctttacacttataattttacagggaccaggattagagagagagagagagagagagagagagagagaaggcacgcatctgctttatgttctcagtgacc

SEQ ID NO: 148324 - DNA, 314 bp, Homo sapiens
tggggaggtgggtggtggcacaatgcctctggcccatgctgcaggttctgagcctttatgatgtctgatgattcactgcactcagtacttcagtacaagtgattcttgtgagagcagataatactgagcagtggaattagagatgtgtgtttgcttcattgttcaaggattctttgggtatagctttggaacagtcagtgttaagctttctgcaaatgagggtgtaaaaggcttttttctaagctatggcgcagaaggcattagagtagctggcagcagataaataagcagccacaatttgtaggtaattactt

SEQ ID NO: 148325 - DNA, 291 bp, Homo sapiens
tcatcccagtgcctcctctgcagacaatcttgtcctcagtctttcaattgttttcttcccatgccctgacaagcgaaccagatcaggaatttaggagcagcttacctaatggcacctggttacctaatggcaccctcaacagcttacctaatggcaccctcacttggttctggctccgggcctctcacaagattgtacacatgatgatggccaagtttgcagtcatctgaagtcttgactggagctggagactacatttccaagatggctcactcatattgctagtaagtt

SEQ ID NO: 148326 - DNA, 366 bp, Homo sapiens
tggtcttgcaaacaaagagagggtccctagttggcaggattggagagtaggatttcactccctccctccaggccattgtcttccacctgagccaccacagcctcagggcggcttcagaactgtcctggatgagctagggacagccctgtctcaactgcgccagcaaggagatgtgctggggtcactcacagttcttagagtcagggtgggttttaggaaagagatcacccaggagactcgaaaggtccgtttgctttaggcatgtccttgcctatggggccaagacctcactctagccacccacagcttttcctaccttaccactcactgcacccacattcagccttcactctcacccccacccca

SEQ ID NO: 148327 - DNA, 453 bp, Homo sapiens
ggaagaggcattttcaccttggagaacgctcacatgactgataaatatatgaaaagatcctcatcttcattagtaatcagggaaatgtaaatcaaatccatgagactggcaaaaattaagaaatctgaaaataccaagtgttggggaaaagataaattaataagaacacatgtggccgggcacagtggctcatgcctgtaatgttagcactttgggaggccaagctgggtgggtcacttgaggtcaggagttcaagaccagctgggcaacatggcaaaaccccatctctacaaaaaaatacaaaacttagccaggcatggtggctcacacctatagtcccagctacctgggaggctgaggcaggagaattgcttggacccaggaggcggagcttgcattgagccaagatcgtgccactgcactccagcctggtgacagagtgagactccgtct

SEQ ID NO: 148328 - DNA, 349 bp, Homo sapiens
ccaagtgggcggaatgaacccagtgggcggaatgaacccagtgggcccgagcaaaactcagacaaaggcaccacctgtcaaagaggcttccggctagaaaagcgacaccctaaggattctgtgaaattagctcatattagtctgtttgctctgttttctagttttcttcaactttatgctccagatttgaacattttttcttggtcattattgtatttttatttagcttgtctcactctttttataatttttggcaaacaaattatttcccaaagcagttttttaatctctaatatacccattattatagcaatataatctcaattcaaagcagcaatggcccttttca

SEQ ID NO: 148329 - DNA, 387 bp, Homo sapiens
actattattgttaggcaaacctaagggccaaggagagacaggagggaaggtgtaatattacttcttgacatgacattattattatttatcttttgaggcagagccttgctctgtcgcccaggctggagtggaatgacatgatctcggctcactgaaacccctggcacccaggttcaagtgattctcctgcctcagcttcctgagtagctaggattataggagctcacctccatgccaggctaatttttgtatttttagtagagacggagttttgtcatgttggccaggctggtctcgaactcctgaccccacgtgacccacccaccttggcttcccaaagtgctgggattataagcgtgagccacctcacctggcctacttcttgac

SEQ ID NO: 148330 - DNA, 342 bp, Homo sapiens
tctgtctaagtccagtatttactggctcaaattggtcacaacccgctcccttttagttgcagccagaaaaaattaacaattgaaatatagaggcttttatattaatttttaatgctgattatcattttccaaggtttcctttggagggaatactctaaatattgttgatatgtgattttcctctgaagataataaagacataggtatttgactaacttctgaattccacctttcccacttcctcaaatatttaaaatatcttatttgagtgtacttccataccaccctgaacacgcctgatctcgtcttaaaatatcttatttgaaaaaaaatctcctaaat

SEQ ID NO: 148331 - DNA, 499 bp, Homo sapiens
agcagtgggcataccaaattctctgacctcttggagcttatattttaccagaggagacagataaatgaagtgatgagtactgtgaagaaaaataatggaaaaaaagggaatgcaggagtgatgttgtatgctattttacataggaatggtaagggaaggccaccctatgtaaagtagcatctaccccctcctcccactgctacactactctgtctttgcttttgttcaaagcatttttgttgtgttcttaacttaaaaatgggagaagcaaaataggaaaccttgaaggaatcctagataaacttatttttttttagaattgcccctaatatcttctaaaatttattacagaatgtaaaatgcttattacccatcaaatgtatctgttatgttttgatttatttttaaacaaccatataaagaactttggaagagatcagctggaaatatatctcatttattttatgaataaatatgaaaattctctttagtatgaaaa

SEQ ID NO: 148332 - DNA, 282 bp, Homo sapiens
tagaggctgacaggaggcagaggctgggcctggagaggctgccaagatgcaggagctgggcctggagaggctgccaagaagcatgagctgggcctggtgaggtcgacttgagaaagctcagggcctggagagaaggctgggaggcaggagctgggtctaaagaggccattgtaacggtggagctgtgcctgtggaggctgttgtgaggcagtagcctcatctgcagagactgccgtgaggtagggtatgggcctaaataggccattgtgagtcatgagcttg

SEQ ID NO: 148333 - DNA, 186 bp, Homo sapiens
agatagccaggtacgttggccaggaaaggctaggactcagctggaattaattaacttcttagaggcatagaaaaaagaaaccaacacgttcctgggcttgatcatgggtattagagttcatttctacttgagggaacgctggcctgcaagttgcctgttagctctacaatcagttctctaaactct

SEQ ID NO: 148334 - DNA, 351 bp, Homo sapiens
gctatcttccttttcttttccccacattagcaaagttaaccaatgacatgggcataggcaactcactttcctccttgacccagattgttaagaaacccaaacatacttttatggaagtaaatcattgcaactcagcattacccagctattaatgttacagtataagagtaatgaaggtcaccggctagggccatccttgtgtattgtgccattcttgaatgggagtaactctgctatccaaagactctcagcaccatgtcaaaccggctggcttctagtaatgctgaagaaggcctatgtctaagcacatgtggagatgagcactgaggtaagccctaaaagcaagttttt

SEQ ID NO: 148335 - DNA, 727 bp, Homo sapiens
taccattacattatgtatctgtctgttcagatttatttgcagatcccactgtagtcaatttcattatttctaaagagagaatcatctacacttatgtttaaaagaataacaagtttcactgaagagatattattaaaaactatcattttgtgattatacattaaaaataataattgcaccattattaaaataataataaatgatgatataaggaaaaaggagaacagacaacaacagtgcagtgtgactttgccaagagcttctattaccgcatgagtagaaggcaggcccagggcctgggtgctgatagagacaaactaggaacaagttaccccaatcctagactcacatgcagtatctggaaaaattactgcctggggtgaggcaaatttgggaaactatcttctattcttgtagtagggggttttgtgtgtgtgtgtgtgtgtgtgtgtgtgtgtgcatctgtgtgtgtatttccccttgggaaactcagtggcacataaagttattcagggttttctttaaagtgattatttgctaaaaattgccttagcatttccacatcctcatcgaggatgtcatacgctcctccggtttttcttcacagctttatacaacttaatattcaggctagggaaactggaaatttcctccaggtcaaacaactccttaaatctatctacaaatttattttccttctccaacctgaatttcatggcccacagga

SEQ ID NO: 148336 - DNA, 415 bp, Homo sapiens
tgagggctgaaataaacatgttattaataatccaaaactggcaagggatgttgactggtccccctcccttgcccaaggagctttctagaacctgagttatcattaccaaactgtactgccttgagtaagaaagttagaaggaatgggaaggatggtggcaggtggaggaaggcggattggtcatcacctccttgcagcaagaaacagccccagatcgtgggaaacctacagacctgctagacagactaggagcaaaagctggggctttaagaatccccagggaggttctcctgagagagtagccagttggattttgtaagcagagatttgtttggggaggaggtgacaacgtagggagcagaggggcaaagctgtcgggaatcctgccttgagggcagggatgtgtgttgggggg

SEQ ID NO: 148337 - DNA, 199 bp, Homo sapiens
ctaggacctttgctgctccaccgaagggccagggactatggttaacttatcaacatcaacccattaactagtcactgtgccagagagtatctgtcaggctgtcaggttgtagcaacctcttcattccagagctggcccagggaccggggtgggacaatgggtttatgcgtgtccacagtacaccctccctctcccagcc

SEQ ID NO: 148338 - DNA, 209 bp, Homo sapiens
ttgaacgctttattttcctccaccactctgctctaaattttatcaattttcagtttagatctgttaaacgacacatctttcaaaaacattgaaagtacttaacttgtctaagcctcagtttcatcatctgcaagatagagatacctacatctcataaggctactgaagatttaggacaggcacaggtgctcacacctgtaatcccagca

SEQ ID NO: 148339 - DNA, 464 bp, Homo sapiens
ctttagtacagaaaccaaggtgaatgacctttaaaaaacatattagactgttgacgtgtcttctatgttgtactctaggtaaaaacgataaaccaggaaaaagaaagtaaaattcaaccttaggctcatggatccagagtggataattatgagtctgtagtatctacatgcatgtgatgaggttcaaggacaataaccataaagcaaagacttaaaaggttttatcattagaataattgtaattcacttgatctctcaatgtaacaatacttcggtctactgtctcaagccattattatgtcttacactcagcatattggtttgtctaccattaaatatttattttctacagtgctttctggaaggcaaacaaagcagccactctgctactttatattgattcctgagttgtccttcggaaacgctttcaggaagtttaataggtttgaaagatatttagacct

SEQ ID NO: 148340 - DNA, 581 bp, Homo sapiens
tcaaaaaggttaatgtgacagaaattctccacctgctcaaaaaagacagcagacatgatctctttaaaaaaaaaaagttcaaaagagattaagagatgaaaaataagattggtggagtttaaaggccttatactagaaaccacaaaacataaaacagcacagagaaaataggctggaggaaataaaaaatggaaaagagaaatatgtagaataaagaaatattctgatggtttaaaaagaattggccgggtgcggtggctcacgcctgtaatcccagcactttgggaggccgaggcagacggatcatgaggtcaggagatcgagaccatccaggctaacacagtgaaacccgtctctactaaaaatacaaaaaattagctgggtgtgctggcgggtagagctactagggaggctgaggcaggagaatggcgtgaatccgggaggcggagctttcagtgagccgagatcgcgccattgcactccagcctgggcaacagagtgagactccgtctcaaaaagaaaaaagaattaaatggggtcaggatggtctcagatcttataacaagaaggcaatgaagcaa

SEQ ID NO: 148341 - DNA, 252 bp, Homo sapiens
ttgtctaccttggagaaactgaggaacacagtggcttcactataagttacatggtccataagggaagaatctaggattagaagaatctcatggaagatgaatgacagtgggtccttgggaacatgaggtcacattcaaaagttggaagtggctggattcctggaaaacttcactacaaaacaggcagaaagactcctagatggatagatctcagcattgagtgtcactctgcagacctcatgaggtacttca

SEQ ID NO: 148342 - DNA, 246 bp, Homo sapiens
gagctgaatctcagctgtgactcagtgccagcaccatcatcacccttggtctccagagagcaaaacaccgtgcaggccaaagctcccacctgagccgcaagaatcctgccagcctcactgaaagcaccattcccacgcggggccctgtatccctgacggccaaccacaccacccttggcttcggctttcagcaaaaacgtcgctgtcaggttgaacacgttactgccccaccagcagcaggagcaa

SEQ ID NO: 148343 - DNA, 762 bp, Homo sapiens
  misc_feature (133)..(133): n is a, c, g, or t
acccacgcacacacacatcccctcacgccgctactcttaaatcttccgaccacacaaacacacacacgctgggtacctttggattgtttgaaaccagaacctaagaaatcctccacaatgaaaattcaacatntggaataaaaatcagaatagaaatgtcttttcaaattgactgcaaaaatcatcagctggctatagtttagacgtaatccgtccaagtgaagaggcaacaattcaaatcttccaggcccattattttgaatatatggaggttacaatggaaatatttgcatcaaataactttattaaaatggattagcaatttttagttatagtgcacatctcccttaaaagaaaaactgttcacagaaaacatgtcactttgtactcattatctgtttttagcaaacattcaggactcaatgttgtcctcaatgttagaatttcttaaattgaaaagtatcacaataataatccttggaacctgttctacaatattacaaagtgtcaatatgggatgtgactataaaatgataataatgaaccacattttcttgcactcagatgaacactagtattatataattagttgggaaggcaagcaattttgctttcacattaaaagaaatgcaaaggccatttcttggagtgaggattatttattctatgaagctaactgggaaaagtacataagcagataccgcttatatctcaatagaaaattcacatcatacaaatattaggatatcaacatttccaatt

SEQ ID NO: 148344 - DNA, 744 bp, Homo sapiens
  misc_feature (115)..(115): n is a, c, g, or t
cgataatctctccataatttatatcgactattaatcccacgcccgcaaatcagggtacctttggattgtttgaaaccagaacctaagaaatcctccacaatgaaaattcaacatntggaataaaaatcagaatagaaatgtcttttcaaattgactgcaaaaatcatcagctggctatagtttagacgtaatccgtccaagtgaagaggcaacaattcaaatcttccaggcccattattttgaatatatggaggttacaatggaaatatttgcatcaaataactttattaaaatggattagcaatttttagttatagtgcacatctcccttaaaagaaaaactgttcacagaaaacatgtcactttgtactcattatctgtttttagcaaacattcaggactcaatgttgtcctcaatgttagaatttcttaaattgaaaagtatcacaataataatccttggaacctgttctacaatattacaaagtgtcaatatgggatgtgactataaaatgataataatgaaccacattttcttgcactcagatgaacactagtattatataattagttgggaaggcaagcaattttgctttcacattaaaagaaatgcaaaggccatttcttggagtgaggattatttattctatgaagctaactgggaaaagtacataagcagataccgcttatatctcaatagaaaattcacatcatacaaatattaggatatcaacatttccaatt

SEQ ID NO: 148345 - DNA, 351 bp, Homo sapiens
gaaaacaaagcgtgattctgtctgggtagtgatgaaatactagtcagctggaagtagttctgctccttggaacttacatctcttctgtgtcctgaatcttctttaaatattgctctcttttcttcttccttgtttcatgttccattctcaagtataagatccttgaggctagaactttgttttgttcatctgggtatactctataacacagactgactctctgcattagtaagggtttatcaaatacttacggagaggaattgatgagaaatttccaaagatttaagtaactcaggtgtaaagaatgagggtaaagctcgtttaccttgatttctgcagataggtagctgt

SEQ ID NO: 148346 - DNA, 385 bp, Homo sapiens
tgccacatatttgcagaatgaagaaaactcaactggagaagaaatggaatgtatgtggccgactggaacagtgctttactacagcatcaccataatattgcacatcagtagaaaaccacatccagcataaacttcagagaaggcaaatgtgtcatggtggagacacaggctgtggagccaagtaggggtgggtttacatccctatttgtcagtggagcaaacttgtgcccatcttgagttcaaggccatacattttaataaaatatttttgtctgagtagatgtagaaatattatattggtcaacatctgcacaattggtattaattaatttgttgataactaattattcaaaactcagtggcttataacactaagcatggattt

SEQ ID NO: 148347 - DNA, 580 bp, Homo sapiens
ctactcgagaggctaacgtgggaggatcacttgagcctaggaattcaagaccagactaggcaacataatggacctcaactcaaaaccaaaaaaaaaaagataagtcatctttaatttttttaatgatatttgagatcattttatacaatcttatcatttgaatgacttcaattacttaaattggctctattaaatacaagaatataatttgctttttgatatatcattttttcttctgtctttgcaaggatttacacagttttcttatgctttaaaaatagtaaccaacaaattgttgtgcaattgattttgaaaaattgatcttttaaaaatttatgtaggagaattatatgtaagattcctgacactacctgctactgagttgttttcaaatcaatggttcttaatttattgtgaatctcatatcattgtattccttgaaaatataatgaaaactaagattctcttctgagaaaaaacatgcccccataaaaatttccaaaaattttagtgggttcaaggatttcctgatgtccatcaaagcattttagtttaagaagtccagccctaaactgtgaga

SEQ ID NO: 148348 - DNA, 434 bp, Homo sapiens
gaaaaaaacaatgcggcaagtcaagatccttggaacatgaagactctgcaatttccaacaatactcactggcaggtgcaggtgaaggatttaagatgagcaactgaactgggaagaggcattggcctcttcaataggaatgagggtaggcagttcatggtaaggtctgcggggcaggagcaatctaatcctatgaattttattttattttattttatttttgaaactgatcagcagagctgccttccaaaataagaactcaatttgaaggaaaactaccaagcttgaaatcacatttgagcaaaacaacagaaactaaggataaaagaacatccacagaaaagcagggaaggagaacagagccagaaaatcttagaaataagcagccaaatgtttttgtagttttgtgaactgaaatttttattgagatcattg

SEQ ID NO: 148349 - DNA, 411 bp, Homo sapiens
tctcagaccggctgacacttagggaaaatagaaaagaacatacgttgaaatattgggtgctggtttccccaataatgctgtattttatctttgtgttttaaattgttacagataatggtgacttcaaaagtaaaagtagtttctgggattggtggattctctgcatgcataaatgtttaaaaaacacatcagctcttgaattttctgcttcagtttaatcttacttattgtttaaaacaccaatgtatttttctgtattttaatcaagatttagttagatttaacaagtgtttaaatttgaaaaacatgtaagtcatataggatatacagaagaaaatgtaaaatatggagtcttctttatgacctgaaaagaccaaatattttatcttttttaaatatgaattttgactt

SEQ ID NO: 148350 - DNA, 383 bp, Homo sapiens
cagtactttattaaatatgtcttttacaattatgctctccccaaacatgtggcttgtcttttcattctcttgactgtgtcttttgcagggcagaaatttttaattttagtaaagtctaatttatcaattctttctttcatggatcatgcctttggcattgttgatatttactttcaaaatgtgtgtcagatgatatcagtctttttttttttctttgagagtgacagcctgaagaatcatcgatatcatctttaggctgatttatcagattggtttgccttgcaagcaaatgtgatcccaaagctagtctctatggaataagcggcatgaaaagataccatttactggatttgtttgatagtctagtggagatgatactatag

SEQ ID NO: 148351 - DNA, 265 bp, Homo sapiens
atttgccttaatttgcatccactggatgagacaaaataaaaatgccccatttggtgggttgatttcaaaacagagaataatgtgtgatctgcttttcactacaaataatgtgaagaaaaaggaaaattgcaccccatcacccgtgactctcctctcctctctgtctcctctctgtcttctctcttccccatctccttctctctccctctcctcctctcttctcccccactgttcccttctcttctgtctccctcctttttctcct

SEQ ID NO: 148352 - DNA, 482 bp, Homo sapiens
gggatgacagcggaaacaattgggacctgacagtaaacggtgagtgtaagtgatagcaacgatgttaccctaaatctagaggcgggcaggtccttggcaatcactattgccaaagaaggtgaaggctatcctccaattaggccccgtacaccaccaccctggcacaaggattgagagtgactcaggaccttagtactcaaggtcctgtgtcccaaccctcaccttgagaagcaggcagggcagcacaaaaggaaggtacacgccaggattgtcatgggagtgggggctgggggagggcataggttccctcaaggatagagctccccatctggcacaagagggttctgccagatggcagaacctcttccttggcaggatgaaggccatcgttaagtggtctggtgtgtgtgtctggggtagcgatggggtcttatggagagatttgggggggacatgggaggcgttgacacggatggtggaaa

SEQ ID NO: 148353 - DNA, 320 bp, Homo sapiens
catttatgtaaatttttctaatgtgtacagtgactttttaaaagtaatatgctaaaaccaatccattgagtgaaatgacaattggattaaattataacaacaatattaatgcagacaactctattttctagttacacttatcaagagattagtattgaattatttacttgctttgcaaataagaaaatgtaaaattttaaacttttctcttatttaaagacctaagatgaccaatagacactttttctcatgtacctcaagtccttaccaagtataagaagcagaacagtatctgtatcttcgaagctctcagtgtactt

SEQ ID NO: 148354 - DNA, 217 bp, Homo sapiens
aaaaaaaagaatggctcatggccctcctccatttggaatggcagaagctggagtgctatctccaaactcaagacagtgggagattcttgtagagcagattttctgagtaagacaatggaagattcttgtagagcagatttcctgagtagcaggaagaaaatcggttcaagagccagaaggagagaaaccaggcaatgaagtgggtacacttggtgat

SEQ ID NO: 148355 - DNA, 601 bp, Homo sapiens
aaattggttgcctggcagtacctattttatttgtatacagattagctgttcaatcattaacattataaaacatgacaaatgaaccaaaagatataataatactgagggtaaaaaaaacgatgtcaaacttcctgaatttaaaatgtctccttgagcaagaatctgcctcatatacatatcatagaatcaaaaacgtctgtcatcctaaagataagtaaatgtattgaaagtaatttaaactctgtaaaaggaaatacaaaaacttagtaatttctgaagtaggactcctatagaaaggcataaggaggaactataataatgcaaaaaatgatataatcaaattatagttatatactttctagttactctgaccacagatctatcctaacagagatagataacaaaaataatgcaaaatcacatcatccaacttttcctctaagagccaagagaggcaggtaataacagaaaagaaactggacacagtaaatgtggctagcagtggataaccagtctagtctagagctgagacctttagtttagccatatattgcaatggattatacaacaaaaatatattctaattactactggaaagaga

SEQ ID NO: 148356 - DNA, 354 bp, Homo sapiens
agactgtatgtctgtgtgtgtgtgtgtgtgtatgtgagctgtgtgtgtctgagtgtgagtgtgaacgtgtgtggggtgggtgcaagagtgtgtgtgtgcgtgtgagagtgtgtgtgtgcgcgtgtgagagtgtgtgtgagagtgtgtgtgtgtgtgtgtgttctgaaggaccttcactaagtccagaaccatcagcctctccattacccagggtgctgcagggaaattcatctctgctgcttgcagggaaggaacaggagagagttccaactcatttcaaaacaaatctgtaggaattgagaagccacttacaggaaagaaacaggcccaggccattcaagcctccctgactcc

SEQ ID NO: 148357 - DNA, 352 bp, Homo sapiens
tgagattcaaacccacgtctttcccattctactttttgtgcctttctgttttaatttgcttcttggtattcctgtgtattattaatagtctgaagcttggaaatagatgcaatagtcattagagtgaagaaaatacagtgccgtgctctctgaaggataacaaggacatttttgttgtaattactattttgatttttcttttaagaatgttgccgaggaaggaaaacagagggaaaaaccagcaaagctcactgtgtctaacttttgccacatgcatggacctaatttcttacttgccaagcactagagcctttatttttgagactctgtgagggtggctgagttctgtgtg

SEQ ID NO: 148358 - DNA, 406 bp, Homo sapiens
ttcaccactagtggaggcggtggggaggataggccataaagaaacacacagcaaatgttcagtatagaaggcagaaagaaacacacagcaggccccggggaggaagaatgggtgccggtgagggtttcctgtgttagacaaggctttctgaaaggtgacctttgtgcagagtcctgagtgatggggaaatgagggaaacagcatcccagccaaggcaacagcatgtgcaaaggccctgagggaggcaatgtgtgtcatgccacaagaaaagcaaggaggtcagaggggctggtgtggaatgaggccagaggggctggtgtggaatgagcaccagctcatgcagggacagatgagaatggagaggaggtgagagccagatcccacagggcagtaggtgggagcgagg

SEQ ID NO: 148359 - DNA, 357 bp, Homo sapiens
  misc_feature (33)..(33): n is a, c, g, or t
gtgactctacaggattacagttaagcgtcaggnatctcagggatcccaagcctcctgggacattgacctctcatataatcttgccaggtgaaaccagcaaagtccttcctgatgtctaacctcggcccctcctgggtgtgatctcctctccacccagcagcactatcacagtcctaccgttccatcatctgcgtggggtggaagtgaggccagtgaatggcccagaaatccagcccattgaaacctgcatgctgaaaaggaatgacttcatcctgggacaggccaggtggcaggcaaaacagtcaagtagatcagggttgtttgtagtgccacctgcccctgcactttccactggct

SEQ ID NO: 148360 - DNA, 668 bp, Homo sapiens
ggtagaagaagagggccaatgatacggagggatgttaaccaattctctacacttaataaatttaaaattaatattctgacttttaaaggcaaccctttggtcctccaaaagattaaccataattcataatgctagatgagcatcttggagcaagtacttctctttcactctcataacattcaacatactttggccttgcaaaaaacaaagttcaattaactggatggggtggcatgtacttgtagtcctagctcctcagaagggtgaggtaggaggatcacttgagctcaagttcagggttgcaaagtgatggcactgctgcactccagcatgggtgacagagtaaaactgttgaaaaggaaaataataaataaaggttgactaagaaattatctatgctttgggcctgaagcgatggctcaccctgtaatcccagcactttgggaggccaaggtgggtggattacttgaggtcaggaatttgacaccagcctggccaacatggtgaagccccatctctactaaaaatacaaaaattagtcagttgtggtggcaggcgcctgtaaccccagctactcaggaggctgaggctggagaattgcttgagcctgggaggcggagatcctaccactgcactctagcctgggcaacagagcaagactctgtctc

SEQ ID NO: 148361 - DNA, 791 bp, Homo sapiens
aagatgtgcctgcttcacctactggcgtgaatgtaaactttctgagaccttcccagccatgtggaactgtagttgggagccagggaaggagtgacactatccctagatgtagtgatatgttttacaggtccacagctggaaggagctttccttgattctcaaatgagactttggactttggacttttgagtcggtgctgaaacaagccacgctcttcatgcctgtgtgtttcccgcacccctgggaaggcgaagggaaggagctacattgtcaagtgtggtccagcaagtaagcaggtcctgagcaccaaacatatcacaggcactcactgcttgggcccaccagtcaacaggagcctgctagatacagccatgtgccactccaacctccctgagggcatggcctatgcactatttgattttcagcatatcatcacgaactccacgggcgtcaagaagcaatgggtgtggatgtagaagcagcccggattgcaactgtggtggtgtattcttgaactatattgttctattggtggtttctagctttcttgcctttctgaccatgatacgagtagctcccttgatgggttagttctgaaggttcagagagtctctcctcaggcctacacaagctcactactgctcactttatgtgatgtgggcctacacaagctcactgctgctgtctttctaacatgtctatatgttcttcattaactctattagatcactttctgctgaaagagatcagtgtgctttctgtttcctgaactcaaccttgggaaaaataag

SEQ ID NO: 148362 - DNA, 270 bp, Homo sapiens
gaaaaccactaacaacaactacagaagccctgctccttctgtgggctaaaatggcactgctggctgtgtgttcagagcagctaagaaccaggaggaacagagcccttgcctctgttcctagtccccgggccctggccttgccggagtcaccggaggcaaccaagagcccctcgttcagaaagcagccatgaggtagcctggccaccctttcaccttttacaccagggagcccagaggtttccagggcttgctgaagggaatccaataaga

SEQ ID NO: 148363 - DNA, 465 bp, Homo sapiens
caagtttgattctcaaaaaaagaaaaaaaaaaaagagtttctgattttggagcatttcagatgtcagatatttggattggggatgctcaaagtatatagttttggagtccttttggccccactgaatgactcctgtaaactcagatgctgtcttaccaacctgttttgcactctcctgatttttagtaagctttttaactgtagaaatcacataaaaagcttaaagattttcatgaagaaaatagaatttgccttcattattttggtttttttccccatctttttatttcaagcttatagaaaagtcaaaagaagttacagtgatctcccgttatacctttcatctagactcactattaatgtctggccatgtttggttttctctatacacgagtgtatataggtatgcatctgtatacgtgtacatgtatgtatgtgtgttgtgtgtgtctttttttttcctga

SEQ ID NO: 148364 - DNA, 333 bp, Homo sapiens
gtttaatccttggttctgctacttgctttggaaatgtcactccctaatcactgcttactttatatgtaaaatgggatggtaatgccagcctttcagggctattgagaagattccatgagacaatgtttataaagcacttacaacagcatctagcacccaacagacctaataaatgggagttatgatgattgttctctcaaagatccaagggacacacacaaagaggtttgctattttctcccccagaacacaccccaaaatgctgaaccaggagccaactcatatcaccactttatcacgctcctgtatgaccctgggcaaatcagatgccca

SEQ ID NO: 148365 - DNA, 266 bp, Homo sapiens
agtaaacagattggcagaggctgcttcaaacacgttatctgtctaactcattacatattaatacttccaaagtaaatctctccattctgtaactttatttaaatatttttattaatatacagtaatacttttccagatggccttatcagaagttttagtgagaataagcagctgaaaacacaacagctgctctgctggcagcctgagagccctgcgctgtgatactgccaggccccccatggagtcagccaggcctgggggccagg

SEQ ID NO: 148366 - DNA, 288 bp, Homo sapiens
aaccactaacctctgtgccccactgtattatttcctagagaatactatatttaccatttcatctataaataggactatatgtatctaaaacagtgattctcaactgaggacaattttgccccccaggggacatctgtgaatgttactactcagggcaggatgtggaatgctactggtatctagtgggtagaggccagggatactgctaaacatcctacaatacccagcctcagaagctgaggaccatcgttgagctgaggaccatcgttgagctgaggaccatcgttg

SEQ ID NO: 148367 - DNA, 128 bp, Homo sapiens
caggcatctgcatggtcatggtctggcattatcttgaccttaggcgacttggaaattccatatttggccttcactaaacgaggcatagaagagcaatcatggacgatctggaaatggagggcttagag

SEQ ID NO: 148368 - DNA, 266 bp, Homo sapiens
tctagacagaaacacaaacccttgtccttgtggggctgacattctagtgagaggagctagtccctgcatgagaggaaatgcgtgctaagtcagatgaggggtcagggcagaattaagcagggaagggaatgtggtagtggaggaagatcacactttcagaaagggtggccagggaagaccttgctgagaaggggacattttagtgaagaactgaaggaggggttgggtgaggtcgctcacacctgtaatcccagcactttgggagg

SEQ ID NO: 148369 - DNA, 446 bp, Homo sapiens
atgatgttgcttttagacaggcagagtagcagatgcaaaggctggactgctccctgaaagcatcaatgagggaaggtgaacagaaaacaaataggacctttccagtggataggatgttatcgtgcagaagcagccaagtctagccagtgggctgcttctgcggtcagagggctcactgaacaagctgcccgctcctctgacagacttgtttgtccagtcctgcctcccagccctgtaccgcagcccctttagtactagagccccacagggggcctgcagctgtgggtcaggaggcctgtgttccagctccagccctgttactagctcaactcccacaggggccttgggctagtcaccggccattctgaaacataatttcctaagctgtaagatgaggggctgtagaagagggatctcttctagctctcggcctctgggtacaggtg

SEQ ID NO: 148370 - DNA, 499 bp, Homo sapiens
acagaaataacaactaagtgtcatctgctaactttaactgagggcttcctgaagtgttgtgctgagaatgattctaaggcatacacagggcttagccagcaaaagatgtgataaattagtgatgtttactatagactctggctacaaatttactatcctggtcaggaggataaagtgtctgttgaagaagatgaaagggaaggaactcaaaggatctgttccagaggaggaaatgacctgcagaaagatgatgaggtacaaggtataatatcagtgctgtctgtttaatatctgtctatggttatttgtcaaccctgattacctcatataccattgactgctgagccacaatagccttttaaaaagcttaataagtaaatggtacgtatctagactatagtcctataatttatctcttagccagaaacacttttgttgttgtttttcgagacgaagtctcactctatcgcccaggctggagtgcagtggtgcgatcttg

SEQ ID NO: 148371 - DNA, 256 bp, Homo sapiens
acgtgagaagaaaccacccaggggatatctatggtgaaagtaggccctgccttgagatggaaatgagttggctggagacaccatgggctgagttttcacttgtacctcactggtcagacaggacaagagagccagggtcagggtgggtgcttggtcccccaccagtcacagaagcctcaggctggaaggctctttagacaagagtcaagcgtccgggttttgtcccggctccagtgctggccactatagccatcta

SEQ ID NO: 148372 - DNA, 290 bp, Homo sapiens
ctcacatcacctcattctgatgaagtctcatctactcagatatatcgcctcactctgatggagacagaacccatgttcactggaagaagtcgtctcatctactcagacacccagatggtgctctgccttctggctccttcatcctccgagctctaaaaagcccagatccaacaatccatgcaggacaaagcaggaccctccttctgaccctcgccgcgctagaaacaacggcccctcagtgtccagtcaggactctccttctgaccctcgctgtgctagaatcaatggcc

SEQ ID NO: 148373 - DNA, 322 bp, Homo sapiens
gatttaagtaccatttgtagaaaatacagaaggtagaggaacatgtgaaatgataccaaggacatacagtcatcagaattttatagactattagaaattttatgggaccaatgaccacctttttcaacaattaaattgaaaggtaggggcaaaaaagacaagggagaaaacgtatatattaagagagacataagagacaggaaagctgggcacagtggctcacacctgcagtcctagcactttgggaggctgaggcaggagcatcacttgagcccaggaattcaagaccagccagggcaacataggaagaccctgtctctcc

SEQ ID NO: 148374 - DNA, 129 bp, Homo sapiens
aaatgtttatattttaaaaacacctaactgaagtattctaatggagaaaaaatggcatgacaaagaaatatggaaatggcttacagttcttggctggctgtacgactggacatggaatttgagcacgaa

SEQ ID NO: 148375 - DNA, 722 bp, Homo sapiens
agaaaaagtctccatcttggctgaggcctcgaagccccttcatctatttagcatccaagctccccaacccttggtggccacctcttctctaaaatctttgctggtttttagccttctcacctggggggaaaggctttctcctcttagtttgctcatctgtggtatggggatacactagtacccaccccagagactgtggcgaggactcagccaggtcagtgcgcagagagcagagtgttgggaggagagagaggactgtggtgggaaggcagggacacctgtgctctggtggttacaggttataattctctccacatgagaagatcgcaaaggtcacaccttctagggtgaaaatgaactagggcctaagcttgagaggattcacaaaaatgaagtttggcctatggctccagtttaagcagctgcggcctcaagctcctgtgggccaggagggagccgttgctgcacttgtggtcagggcttcctgggccgtagggacactggccaggtgctcactcatagctcccggcagaggccctgtcaggccctggtggtctgaccagactgccagatccacctccccactaaaccagcatctctgatctgtcttcttccctccagggtcctggctttcaggctctgggagggtgtttgttttgcttgtattttttttttttctgagacaagagtctcgctcggtcatccaggctggggtgcggtgg

SEQ ID NO: 148376 - DNA, 245 bp, Homo sapiens
tccgttaggtatccaagtctgggcccctcagactcgctctattttggccttaatttgtcagctggattttgttagtgactatgcaagacagaagcaggaacacatagtttacctcaactttatgctggacatgaacttcagtgtttcaaagtgatctttggttctgataatatggcagagcaaacttgtacaaaggatgaataaaaaatagaaatagaatttttaaaaatattccggcataaaag

SEQ ID NO: 148377 - DNA, 375 bp, Homo sapiens
gagacagggtcttgctctgttacccaggctagagtgcagtggcatgatcatggctcaatgcaccctccacctcccgggctgaagagactctcccacttcagcttcctgagtagccgggactacagatggataacatgctgatgttgtaacaaggctggagcgtgacacatctcacacatgcacgtgaacacccaattaccacgcctatgaactacaaaagcatctaagcagattttaaattagccagttgtttccctaggatcctccaaaggtgatcaatacagtttgtttttttcttggtggagggatctcatgatgaactaatgaatcttaacatgaatagtaagcaaataaataaaatgggatggtttaagc

SEQ ID NO: 148378 - DNA, 189 bp, Homo sapiens
caatccttgactaacaaaattactttgttactgccagcaggtgtgcttaaaacaataaaacaaaattcatttggaaaaccagacttacagatattaaatagaaaataaaacatcataaacacttaattgccgagatttcagtgatggtacaagagaacctaaagatcacagtgtaggtttagggctcaa

SEQ ID NO: 148379 - DNA, 532 bp, Homo sapiens
acatctgcaatatgggtaaagaaagatggctcaacctcactaagttaactttcacccaattctgttttccacagagtacgcaagctctcaactgtgccagatatcctcaagtctaaagaaataaaactctgaagttccttccagggggaaaagagggcacttgccagctgtgcagagtagaaaagagagtttggaatctaatagtttcttgagcagattttcaaccaattatcatgcttctagcctacaatttaccccgtatttctgaaagcacttgttctgtcaaatcctaaggttaaacagtataaactggttgatttgtagcttttcccattgctgcctaatgataagctttctgtgctgtgtatcagttgggttcatccagagaagcgactactatgaatgcgtatgagtgactatataaagatttgttacaaagacttggacttgtacaactgtggaaactggttaggcagtctctataaggcgttttcttcatgtctggtctgattctagagctgaggtccacagg

SEQ ID NO: 148380 - DNA, 191 bp, Homo sapiens
cattggtttataaagcctaatatgccaaaatgattcttttttcctgactcatctatataggatctactcctatctagaattctaacatttacataatcacttgcttcatatcataccaccacccctaacatgtatgcctctatcacctccccttctctctaattctcattcatagatctatccccaagtca

SEQ ID NO: 148381 - DNA, 197 bp, Homo sapiens
gcctctccctctctctcgctccctttctgttacactctctctctctctctatttctgactgttctctcttttctctctgtctctgtttctttctcctcccattctctccaaccaacagaggctccaactgctgacttttcactgtctttgaactctaggttacaatgtgttggactgggtgggggggaagcaaggga

SEQ ID NO: 148382 - DNA, 402 bp, Homo sapiens
ctctggtgtgctcaggtccagtactgtgcctaatatatggtaggtgtctcgactagtatgtttgtcaaagtcgataatagttaaaatctgaaggtttattctcctttaagttgtacagtttaagcctcaccttattttttgctgctaagagaaggtatcacctacaatgacccttcacattctagacaattaacaaagtctatgtggaaaaataactattccaggaagaatgtgttcagacctggtttgaaatcacagcctgttgctgtggggcatttattacccaccatttagctagattactgaatagatggagttaaccaaaatgctgacaagacacacaccacaaacacacacacacacacacaaacacacacacacaccccaaaaacgaaacctcag

SEQ ID NO: 148383 - DNA, 150 bp, Homo sapiens
ttgaagcattttcagcactaaaacagaatttgttaacagcaccttttagatatgtttaggaagttggattttttaaaaatagcacatcattagaagtattcaataaatagagaagtattcaataaatagaaaactatttgagggagattt

SEQ ID NO: 148384 - DNA, 377 bp, Homo sapiens
gtctcgtcctccccagctcaagcgatcctcctgcctcagcctcctgagtagctgggacacaggcacgtgccaccatgcccaactttgcattttttgtagagacagggtctcattatattgcccaggctagtctcgaactattaggatcaagtgattagtccatctcggcctaccaaagtgctgattacaggcgtgagccaccgcacctagccagaccatcttgagatcaacatcttgagaccacccttaactcctcactttttcttataccccatatctaacctatcaaactctggtctctgtcaccatctcctcttgtctggaatattctaagtcttctaaagtggtctcaccgtactctgcactttactttcaac

SEQ ID NO: 148385 - DNA, 1098 bp, Homo sapiens
gaaatcagggaaacaataaatcaacaaaacgataaatttaacaggttgaaatcactaaaagaaccaaacaaattttggggctaaagaatacaatgaatgaaatgaaaaatgcaaaaaggagaatggcagaactaatcaagcaggagaaaaaaatatgtgtgaactctatttcaaaataatatggtcaaaggagaaaaaataatgaaaaggaatgaagaaagactacaggatttatgagacatcatcaaaagagctaacaaatgtattatagaaataaggatgagggtttttcaaaacctgatttgaaaaaaataatagctgaaagcctcccaaatctggggaaagatataaatacacactattatgaaaaggtcagaggtctccaataagattcaatctaaattatatgaagacatataatcaaacttcaagacaggattctgaaaacagcaagagcaaagaagcacattacattaagaacaatatcaataagactatctgcagatttcccaggacagaccttacaggccaggaaagggtgggatgatatattcaatgtgctgaagaaaaaaactgccaaccaagaatatttcacctggcaaagctgtccttcagaaaccaaagacagagaaagattttctcagacaaacaaaagctgagggagttcattaccactagacctgcctgaaactaataaatgctaaagggaattattcaagctgaaaataaaggacactaaattagtaacatgaaaacatatgaagtataaaactcactggtaaaagcaagtacatagataaatacagaatactcagatattgtaatggtggtgtgtaaatcacatctctttagtaagaagattaaaagacaaaacttttataattataaccacaatactttctaagtaatatacaatataaagagatttaaattgtggcatcaaaaacataaaactacaaaaatggtagtgtttctatatgatcaagtttagttattagcttaaaatatagcctgtcattgctgttattttatgtaagtcccatggtaaccacaaagcaaaaacctatagtagatacacaaatgattaaaaaaaaaaaa

SEQ ID NO: 148386 - DNA, 262 bp, Homo sapiens
ccatctttccttctgtctgtctcctctgctgagctccatgtgctgctccttctcctccccattctcccgtttctctgtcctcagaacacttcctcatatccttccctggtccctggctctctgagtcccttttttttttttttttttttttttttgggggggggggagaaaaaaaatttttccttggggcccaagccggggggaaaggggggcattttggctttttggaaccccccccttctggggcccaaggtttcccccc

SEQ ID NO: 148387 - DNA, 164 bp, Homo sapiens
ctctgcttctgtaagaatcccgactttaggattttcaactgtcactactccaacttctatttctgaaggtttgaaatcaattgatagaacagtagacaggcatgtaattgcagtttccactgtctgttcaaatgtccaatcaaatttcttttgcactttttttt

SEQ ID NO: 148388 - DNA, 918 bp, Homo sapiens
tttaaagaaaattttaaaaggaatcttggattataatcatgagattttaggacagcaaattaatgactttacccttcctgatgtgaaccttattggggagcattctgatgcagcagagcttggaaggatgcttcagctcatcttaggctgtgctgtgaactgtgaacagaagcaagagtacatccaagccattatgatgatggaggaatctgttcaacatgttgtcatgacagccattcaagagctgatgagtaaagaatctcctgtctctgctggaaatgatgcctatgttgaccttgatcgtcagctgaagaaaactacagaggaactaaatgaagctttgtcagcaaaggaagaaattgctcaaagatgccatgaactggatatgcaggttgcagcattgcaggaagagaaaagtagtttgttggcagagaatcaggtattaatggaaagactcaatcaatctgattctatagaagaccctaacagtccagcaggaagaaggcatttgcagctccagactcaattagaacagctccaagaagaaacattcagactagaagcagccaaagatgattatcgaatacgttgtgaagagttagaaaaggagatctctgaacttcggcaacagaatgatgaactgaccactttggcagatgaagctcagtctctgaaagatgagatcgacgtgctgagacattcttctgataaagtattttaactaaaaggtccaggttagaatcttttaaacagaagtagaagaccttggtggatttaacggggggaggttaaatcgtaggaagagaaaataccatgtttttgcagaatagctgtcagttcaaaggaggggttcagaaaggccacggggagagtgaatgaaccaaaagaagggtgtgacaaaaaagattacggagatgc

SEQ ID NO: 148389 - DNA, 511 bp, Homo sapiens
tgaaaaagacttaatagctaggtttagtgaggatgtggagcaattggaactttcatacattgctggtgggaatgtcaaatggtacaaccactctagaaaacagtctagcagcttctgagctaaatatacatttaccacacagaccagccataccacttaggtatttacctatgataatttaaaagagattcacccagtgacctgtacacaagtgttcctaactgcctttttgttaacattatctgaacatttttatttttaaattttttttcagtttcattgaggtatacttgacaaataagaattgtacagtcaggtgctgcataacaacattttagtcaatggcagactgcatgtaaaacgctggtctcctaagattataacaccatatcttactataccttttcttttttttttttcactctgtcatccaggctggagtacagttgcagtgagccgagatcgcgccacttcactgcagcctgggcaaaagagcgaaaccctttgtctc

SEQ ID NO: 148390 - DNA, 382 bp, Homo sapiens
  misc_feature (47)..(47): n is a, c, g, or t
tgcatatgtatcaaatgcttttaagaaagaagaaagcaaaaaaaagncaaaaatttgttcaggttttacggcctcctgctaattccaatttatacattccaagaaaatcttccatttcatccaggtgaaacagtaacctactggaatgaagctggcctcccgtctccttgatttgaagcagcttctccacattggttattatgccatttttctaaatctaacgttttaaaatttgtgcctttcctttctcttttgcttgacttcccagaggtttttttaaccgtcttttcaaagaagtggttttgggttttatttatcaagtctacttttattatggctgttttaaaattaaatatatttatttcttgtttcccttaaaaaa

SEQ ID NO: 148391 - DNA, 229 bp, Homo sapiens
tggcctgtagtgatcgcctttaaaaacaagtctctttgcttctggtattgtatcctttctaaacttcacactgccatcagttatttttctacaacacagacttgttaatgacaccatccctttttatgagtttaacatgatctaaacctttcttaggatcttacacaggactcttcatgtactgatccttaaatgacatatccagccacatttcacatcccctacattg

SEQ ID NO: 148392 - DNA, 181 bp, Homo sapiens
gcttagaatttacattctcaaaagaaaaaacagttatagttacatgctctttcttaccttttgctggattaactgagacctgcaggtatcctacaatgatgctgatcttctagcccgttaattctcagacctctcagattcagtgccctcttcttataagtattttgaaatactctcttta

SEQ ID NO: 148393 - DNA, 360 bp, Homo sapiens
tctgtgcagcttgcaagtaaggtgtggtgccagctccaagtgttctagttcgctcttctcacccattacagcatttgaacatctttctttactgtacatgagtttggccgtgagtcctggctttttctagtcccacagaagccaggtctagagctcttaggagcaaagcagctgttttccctatcctagcaccccactctcttccagaggggtgcttattcttagcaggagtggcaaacactggcgtcaaacccttttgccccctgctttccctttgaggcagcttcctggtaaaagccttccctgtatttactcattcaggggtttctgtgagaatccaaggtgatttttttgctattc

SEQ ID NO: 148394 - DNA, 195 bp, Homo sapiens
tgcttcctggagaggacttaggaccttttaatggcagaaatgatgaatgtgttggcagcagttcatcagtgcccagtactcaagggtccccctgagaagccagtggttgcacggatctaggtagaatcaggcacagaataagtcaggtgatgtgcctttctagcactggcctcaggctgatttataagggaagtt

SEQ ID NO: 148395 - DNA, 505 bp, Homo sapiens
aaaaaaaattagctgggtgtgttggtgtgcgcctgtagtcccagctactctggaggctgaggcagaagaatcacttgaacctgggaggcagaggttgcagtgagctgagatcatgccactgcactccagcccgggtgacagagtccatctcaaaaaaaaaaaaaaaaaaagttttcattacagaattgtaaagtaaaaccacaatgcaattccacaccatacacactaagatagctgtattcaaaaagagagacaatgccaagtgttgacaaggatttggaaaaactgggtccctcatgaatttctggcgggaatgtaaaatggtacggccaatttgggaaacagtttggcagttctcttcaaagtcaaacataaccttgccataggatctagcaatttcattcctaggactctacccaaaagaaatgaaaacaagccgggtgtggtggatcatgcttgtaatcccagcactctggaaggccaaggcaagaggatcacttgaggc

SEQ ID NO: 148396 - DNA, 513 bp, Homo sapiens
taaatatgggagttctccattatacaaagacctcaagccaggatgaacataattcactttggctttgggagtagcccatagaggaaatgcctaacaccaggagtggtgttctggtcagtaaggccagccatccttgtgaccaaacagatattttgaagagaaacttgttttcaattcttgtattgctttctaagaggagaaatgtgtgagtcagagtgaaatccaaacaaaactctcatctaatttaggacactaatgaacacatttttgttttctttatccttgattagaaacattttaaagtaagaggatgtattttaaagacaaaggggttttctggcaattttgtaatgttacacaatctccttccctgtctactaagaaagaaaacagaattctgcagcaccttctttaggaaaaatagatgataattaactgttaaccattttcatttcatgtgagaagtgtgggtacagctgcagggaacttcctgagggtatgcaggtatttttc

SEQ ID NO: 148397 - DNA, 107 bp, Homo sapiens
ttcctctgaaagtactaactggagacagtgcaaaggttgctgcttcatacaaaggtgcattatgacatgggtctttccagagaaaatgcgctgccctttgagtcctg

SEQ ID NO: 148398 - DNA, 508 bp, Homo sapiens
ataaaaatctttgaggagggtaccactttaacccacgttttttatttgaggaaattgaactcagagaatttaggtctcttgggcggggccatgcctggtgagtagttgggctgggaatccaaggcagtgactactggtgtctttaaaactgggagatggagtcctgttcatgattaggggacgggaggacagctctgtgtggaatgaacacagacatagggcggctctctgcgctgtcatgtttttccttccaggtatgcctcatggccttgggttttgcttggaaaagaagagctgacaaccacttttttactgagtctttatgtgaggctaccagggatctggactctgaattggcagaacgttcctggactcgcctccccttctcttcaagctgcagtattcctgactgtgcaggcgaggttgaaaaagtaaaaaaaattacctatgcagtgcaaattgagatttaaaaaactactttatattctatcatgcatatctgaatgta

SEQ ID NO: 148399 - DNA, 315 bp, Homo sapiens
gctactcaggaggctgaagtgggatgatctcttgagttcgggaggttgaggctgcagtgagccatgatcatgccactgcactccagcctaggagacagaatgagaccttgtctcaaaaaaaaaaaaaaaaaaaagtgacggtcacttagccaagatcacagagatagttagtggaggagctggaatctgaacttcagcatgtttgattccaaagttcaaactctcttctactacaccacaggtacctggtggacgctgcaaaccctgttcactgattgattgacagaagtcaggctggtactcgtgagctgggga

SEQ ID NO: 148400 - DNA, 211 bp, Homo sapiens
tataaaggtgaatctgagtgtatctgagtatatcataaagctaactagtcagacttggacagcccttgaatgatgtccaaacatttgtgaacagtctgagtaaaccactcaggttattcttacacaaccaaggtaactttactgcctgccatgggcaagtaagtgctctctagattatagttgtaaacaattctcaagtgattaatgacac

SEQ ID NO: 148401 - DNA, 390 bp, Homo sapiens
gataaacaggatttaactttttctgttatagcaaaccataatttgttaaaaataattatttgactgggcacagtggcttaagcctgtaatcccagcactttgggaggttgagaagggtggatcacctgaggtcaggagtttgagatcaacctgaccgacatggtgaaaccccatctctacttaaaaaatacaaaaaaattagctgggcttggtggcgggcacctgtaatcccagctactcgggaggctgaggcaggagaatcgcttgagcctgggagatggaggttgcagtgagtcaagatcatgccattgcactccagcctgggcaacaagagtgaatctccatctcaaaaatagtaataataataattcttcagtgatggggtgaggg

SEQ ID NO: 148402 - DNA, 378 bp, Homo sapiens
ttcttgtttcaggtctcatgccataaacaaatgtcctgttcgtggcccatttagtgccatatttttctcatttttgtgctttttgctggtgatttcactgttcaaaatggcccacaaatatagtgctaaagtgttgtctggtgttctaagtgcaagaaagctcttttccttagggagaaaatacctatgttagataatcttcagtcagtcatgagttatacaggcatgaattatagtgctggtagccaggagttgagtgtcagtgcatcaacaaaatatattaaagtgactttaaacaatcacacgcacacaaaacaacattatatattgatctgttaatgcaaatgtggtgagcacaggcttatagcaatctaacct

SEQ ID NO: 148403 - DNA, 166 bp, Homo sapiens
tcacctcagcttctcaagaggaagggactccaggagtgcgccactatgcccaactaatttttaaaatttttttgtagagactaggtctcactatgttgccaaggctgctcacaaactcctggactcaagccatcctcctgagaagctgaggaccatcgttggggta

SEQ ID NO: 148404 - DNA, 304 bp, Homo sapiens
cattctgtgtccacactttccctggcggctggaggttggccagcactggaagcaggcccaagacacaccttctggacgtcggcctgcctcatattccagctctggccttgccatccctgcccaggctctggttctagcttctgtgcttccacgtcggctctcccgcacactgccagagtgacctccataaaataacttgcttttcgcctacaaagtgtagttcaaactcctcacctggcaatgaggcctttccttccaaggcctttcagaatttgcatctttaccctcgcctctccttgccaga

SEQ ID NO: 148405 - DNA, 120 bp, Homo sapiens
aaccccttttccttgattaatttcttgctagcatcctatctttctccttccctttcctatttcctcgtctctaacatggcagagataatagagttattgagggaattaaatgaaataata

SEQ ID NO: 148406 - DNA, 205 bp, Homo sapiens
gacagaacactgctgcccgcctcatcaccccagcccaagaggacagaacactgctgcccgcctcatcaccccagcccaagaggacagaacactgctgcccgcctcatcaccccagcccaaggggacagaacactgctgcccgcctcttctcctcccagctacctaaaacttccccggcaaccacccacccttccccgaaggtcaa

SEQ ID NO: 148407 - DNA, 379 bp, Homo sapiens
ggctgcgccgccaggaatgacggccacggcatccgatcacgaacacctattgacacgaaggggatggatgtttcctcgaaaggtttatctttgctccttttcacttttctcactgaaacattcatatatttgtgccatctggttaataatgaatttgtttttttctataaatgtgttgccgccatgtcctgagcgggtgtgtgtctgtgaaattccaagcaacaagaccgctgagccagcatgcctaatatctggcactgtttctcagctgagcgagagcaaactgttaagaaagatgcaacatctaattaggacttgcttcaaataccagaacctccagttaagtggcacaggcctgtcgcaggatgttttcgcagga

SEQ ID NO: 148408 - DNA, 538 bp, Homo sapiens
cacctatggtcccagctacttagaaggctgaagtgagaggactgcttgagcctggaaggtcgaggctgcagtaagctatgattgtgtaccattgcattccagcctgggtgacagactgtctcaaaaacaaaacaaaaaacagcaataattacagataaaaaaagaaatttctaaatttgatttatctggagaggaatatgatgtaatattttatcttatagtacaaagttctctaagatgtattactctataatgcccagtttggagaacattctacttggtaaggagttagaggcaaaaacaagagacttttaccccctatttaagtagtctgtatgaagaacacaaaagacagcataaagcatcgtttctgtcatacttagcagttttgaaaggcttagctcatttggaactttatccttcctgccttgattattttttataccactaatctgtattatttgttgcaaccaatgatcttttcatgtcttgtatgtcttcctaaaatctgaacatagtttcttagcaaccacacaga

SEQ ID NO: 148409 - DNA, 481 bp, Homo sapiens
ctttcttttattcttccatgtatcatttactcagcaaatggtattgggtgctactatctgccaggaactgtgccaggagccaggaatagcatggagagcaaagccaggcaccattcctgaagcctggagtggggagacagatttaccaaacaatattagacatgagggtgcaattctaaatgcggccacgagacaaatgctctggaagaaaggaatgcagttccttgagatcatatcactgaagagcctgtcctagagttggatgtgtggttcagggaaggcttccctgagaaaaggatgcttgtgttggcacctgaagctgagttgtaaactaggcgaagataggggtgaggagaattgcagagaggaggaacaacacgttcaaggccctatggcaggagatggcatggcttatttgaggaaccataagaagccaatgcggtgccacatggagcgtcaggagcaaggaggagggagtgaa

SEQ ID NO: 148410 - DNA, 1548 bp, Homo sapiens
ctttcttttattcttccatgtatcatttactcagcaaatggtattgggtgctactatctgccaggaactgtgccaggagccaggaatagcatggagagcaaagccaggcaccattcctgaagcctggagtggggagacagatttaccaaacaatattagacatgagggtgcaattctaaatgcggccacgagacaaatgctctggaagaaaggaatgcagttccttgagatcatatcactgaagagcctgtcctagagttggatgtgtggttcagggaaggcttccctgagaaaaggatgcttgtgttggcacctgaagctgagttgtaaactaggcgaagataggggtgaggagaattgcaaaaaaaaaaaaagaaacaaaaaaaaacaaaaacgtgttgtggggcggcctctgggcccctagaaaagagctttctcataaaacacatatcggttgtggggggcccgggcaccacgggggaagcgaggacaagtgtgggccatatgacgggtttcaccgaggaggaaacatcggggagcccaacaacaacagcggcacgggagaacgtatgacaaacaaaatatacaaacacgcgcccgcgagggaaaaaacaacagaggagactaaggagaagaaaaaaccacaaaggggagatatctaaagagcgacacaaacacacgggggacaatcagacagcaacagaggagaagaaaccaagaagcagaaccgaagcaaattaaaaagaggagaagacggaacacgagagctggggaggaaaccagagagaaaaaaagaaaagaagaagcgaaagagaggacaggaggagaaagggagagcaaggacaggagagagagagaaagaagacaaaggaacaaagacaaggaaaaaagcagaaagaaaaagaagaagcaacacagaaaaaacgagagaggagaagaacagaggaaaacaaaggagagagaagacaaaaaagagagaacacgagaggaaaaaggaggaaaaaaagagacgagaaaaagaaaagagaaaaaaagagagaagaagaaagaagagcggaagagagagatgacaagaagggaaagaagagaaaaaaagaggaggagaagagagagagaaagaggaagagagagagagaagagacaagaaaaaaacagaagagaggcgaacgagaagaggggagtgagaacgagaaggagagaagagagagaagaaagaagagaagagacgagaagagagagaggaggcagagaagggagaagaaaggagacagagagagaacagagggaaaaaaaggagagaggagaagcgaagagagaaaaaagagagggaaaagagagaaaagaaagagaggaaacgaaggcaggagacagaagagaaagagagaggagaagaggaggaagaagagaagagaggggaggggagagagagaggagggcaaggaggagaagaaaaagaaagaagaaagagcgaaaaggaaggagggaagaagaaagaggagaagaggagagagggagagagaaggaagaggataaaagaagaagagagga

SEQ ID NO: 148411 - DNA, 310 bp, Homo sapiens
  misc_feature (1)..(1): n is a, c, g, or t
  misc_feature (22)..(22): n is a, c, g, or t
nccatcgagctcggacccctanttttagaagtttcaatagcataggtaaaccacagctaaaatgaccactggaggaaccttaaaaggagaaagaggcccccaaagggtgacctttataagcctctcaatttgccctggagtgggcgagaattttgggataagtcatttgttggatctataaagctctggtcttcacagcaggagcttgatgaaactctcatcctcctgcccttgttgtctcttccagctcctggctttgccagacactgtaaagtcccaggccgtgagagctcacttgtcactgctattg

SEQ ID NO: 148412 - DNA, 408 bp, Homo sapiens
gggaagtcctctttagtgccaaactgagacagctctgtgcccctatctcaggcagatggtggagagacctaccttcaggcagaggtaataccaagtcactacatctaaaagaaaacaggggacacggtaaaattcttttggttggtctcttgtcagttggcactccataagttttacctcactaaattaaaaaagaataaaaggacagtcttgtccatacaggacaggctgccttaattttggcaagtcccaaaatagtgaaccagcgtaacaggcagtgttctccagggtcaggacttgaagagcctattagaaaggaagaaggtggtgaaacaagcaggtgcttgaactagactgttgaaagctacaaacccaggagaaatggactccagctacgatggaccacat

SEQ ID NO: 148413 - DNA, 361 bp, Homo sapiens
  misc_feature (23)..(23): n is a, c, g, or t
  misc_feature (195)..(195): n is a, c, g, or t
  misc_feature (200)..(200): n is a, c, g, or t
  misc_feature (207)..(207): n is a, c, g, or t
tagaggatcccccatgtggggcntcactgcaaaaaaatattcaaataacacagacatatgcagagttaaaagtgaaagttccctccgcatctctactcccacccagcaaggaacctacaaaaatactaagatgagctgggtctggtggctcacacctgtaatcctagcactttgggaggccaggctggtcttganctccnggcgtcnagtgatccacccgcctaggcctcccaaagggctaggattacaggtgtgagccaccgcgccctgccagaatatggaatcttaagactccctagtatgtctcttctaaggtcgatcttgactctccttagacctatgtgcgctctgggaattctac

SEQ ID NO: 148414 - DNA, 506 bp, Homo sapiens
ctaagaagacagcagatgtattccatgggtttccagagaaacatgaatgtacacatgaatagaagctgcaggaaggcagagtctagttagcatgtggaagaatatttggccttcagagacatccaacaatggagtgggcagcctaaggacatattaaccctcctcagcttgaacaggattttagcagaagctgcagcgtcatacactaaaacaaaagaaataaccttctccccatactttcttttaactccatctaggtaacccccatctcagtaaataatagcaatatccacatacttgctgaagacaaatattttaatcttctgtttcctttgtcagccatatctgatatatcagcaaacaacatcgcaaatccatccacttttccccatccccacggccaccatcctggcccaagtcagaatcatgtctcctgttgaccactgaaagagcctcctcaatcatccacactctttccagtaatgcactctctgcatggccgcctg

SEQ ID NO: 148415 - DNA, 357 bp, Homo sapiens
tagctgggaccataggcgtgcatcaccatgcccggctgatttttgtatttttagtagagacggggtttcaccatgttggtcaggctagtcttgaacttctgacctcaggtgatctgcccgcctcagcctcccacagtgctgggattacaggcatgagccatcaagcctgagccggctgaccgagtgcttttttttttttttaaagcaaatattgcctttgggcttctctctaatttcattttaaagtttcagttgcattttcaaatggagattttattttaaactggagtgcagtgatttttacagtctttttgaaagcaacaaatgagatttttagaagacctcttgcttgaagac

SEQ ID NO: 148416 - DNA, 838 bp, Homo sapiens
aaaaaggacccaagggttgaattttgaggaacatcaatggtgatgaagatatatctataaaagaaaaaaacactgttttaaaagttttcttcctccctcctggacacatgtagggctgcattttctgtactgcttgtggttggatggcgaatgaaggaaagagtcagctgatcttaaatgtatttactcacaatcctccttctagaatctgccaccttaatgcctgtcagcatctttttctgcagacgacccatcccagcagtactccttctcaagaagttgtagaggcatgattgtgttcttccaaccctacagcttagtgagagaagttgcatcaatttggtgctaaattacagtggaaatgataactaccataagagaatgaaataatcccataaagtgttggtgggaggagtaatctcagagttgcaatacctttgtgtgtggtagaatagtgacaattgcatctttttataaaggctattgaataaatccactaatcataaaaaaaaaaaaaaaaaaaaaaaaaaaaaaaaaaaagaaaaaaaaaaaaaaaaaaaagaaaaaagaaaaaaaaaagaggggggggaggcgaaaaatatttgccgggagggggacaaaagattataaagtgacatttttgtaaaaaggggtccatgaaagaaagactatataaggaagcggcagaggagataaaaaggtgtcggggacaaacgtcgtcggtattattaagagaccgctgctgggggggatcattgggacacgctgcaaaaatatacacagggaataaaaatagggttgggtaccaactttttcataattttcggattaaatatgc

SEQ ID NO: 148417 - DNA, 780 bp, Homo sapiens
agaaactctgaacagaccaatcagaagcagcaagattgaaaatggtaatttaaaaattgccaacaacaaaaaagtccaggaccagatggattcacacctgaattctatcagacattcaaagaattggtacccatcctattaacactatttcacaggatagagaaagagaaatcttccctaaatcatttgatgaaaccaaaatcaccatgatatggtttggctctgtgtccccacccaaatctcatcttttagctcccataattcccacatgttgtgagaaggacccagtaggagatgattgaatcatgagggcgggtcttttccatgctgttctcatgacagtgagtgagtgtcacaagatctgatggttttaaaaacaggactttctctacacaagctctttctttttgcctgctgccatccacgtaggatgtgacttgctcttccttgactccaccatgactttgaggcctccccaaatatgtggaactgtaagtcaaataaacctctttcttttgtaaattgcccagtctcaggtatgtctttatcagcagtgtgaaaatggactaatacacaccctaatactgaaacagactaatagacaccctaataccaaaagcaaggaaggacataatgagaaaagaaagctacagaccaacatccctgatgaacagagatgcagtaatcctcaaaaaaatactagctagctgaatctaacaacatatcaaaaagataatccatcatgatcaagtgggtttcataccagggatgcagggatgg

SEQ ID NO: 148418 - DNA, 166 bp, Homo sapiens
agagaaagaggtgtggatatacagtataatcctactttaaagcctttggtgagtccttccttccgtccctccctttcttatttccccttccttccttccttccttccttcccttttcttcttttcttcctccctccctcctttcccttccttctttctctttcttt

SEQ ID NO: 148419 - DNA, 283 bp, Homo sapiens
aatccgggaggcggaggttgcagcgagccgagattgcgccattgcactccagcctgggcaacaagagtgaaattccgtctcaaaaaaaaaaagttccccgtcccttttttcccttaagctgtttatttgtcctgagaaatggagtcatttgtcctgtgggatttttcacattctgcatctgactgatcatgccctggtggtagtttttgaggggctggcaagggtcccctctgtgtgtccctgtgcattgccttggggggctctgactctgggtccacatgtc

SEQ ID NO: 148420 - DNA, 902 bp, Homo sapiens
agtcatctttgaaaatgaaaatcacatcatgttatttcctgcttaaaatctatcagtggcctcccactgctctgagaatgacttacaaggcccctagggcctagttcctacccctctgacctcctctcaccctcacttgacatactgcagctttgcaggccttctttatgttctcaagtaaggtcagcaaactatgacctgccagtcaaatccaacccgccacctgtttttgtaaataaagctttactggaacacagacactcatgcctttgtgtctgcgtgttatctgtggcactacagtggcagagttaaggagagagacactctcactatgaggccctttaagaaatagatgcacaccactgttctaaaatcatgcccagctttttcccgtcacagggccgttgtacttgcactacccactgctctagtctttctctctccttttaccactacctaaaattatatgcttgcttattgcttgattgtcctgccgagcaaaatctggtctgcttgttctgtgctatgtgcaaggacctagcatggtgtctagcacgtggtaggtgctcagtaaacatttgttaaatgagtgaatgtactttaattacccaggggtctgcacctcttttagttaagacttcttttggggacagtcagccattagagaccttagtcacacacttgctccctgtccatggtgagtgaaggagggcagaagacatgagttgtgtacacagggatgtatggtgtacatgggtagagccgagagaaagtggttggcaggaagctcacccatgtccccagcagcttatatttagtatatgctgttgagctgaagagccactcaggcagcttgtggcaacaccttttgtgtttgtatagcatgttggacactggtgcag

SEQ ID NO: 148421 - DNA, 579 bp, Homo sapiens
  misc_feature (560)..(560): n is a, c, g, or t
ataagtcctaggacctgcctcactccaactctccgtgaagttccttgcccacaccgagatacaactggctcctccaggtgtgaaatgaccctgtgcacaatccccgtggcacagcctacttcgccctgcccgtcggggaaccaggtgatgtagcctgccccctggagagatagggtacagccttgtgtcttcctacaagcccctttctggcagctgtagcctgctcacctgccagtggtgtggcaatgcctctcccacaagtggcagagcccacctgcccagagccctatgccaggtagatggcagggttgaaacgttcagctcctcacccttgaagatgtgaaaggtgagcagaccaatcttcacagccactctcctccccaaaggtgtccagctcgcatagcacagcctccatgtccccttttcccttaggagggcatagtccccccacccccgcaagcggtccatccctcatcctcctcctcggcaatcctgccaagtggttggtacagcccccatacccttctctccctagtagggggtagttgctcccctcctanggagagtctccgtcgaact

SEQ ID NO: 148422 - DNA, 210 bp, Homo sapiens
aaatgggactatgttgctctagaaatcaacatcttttccacactgcattagtagcaacagagtctagaacaaaggaggccacagccccactgaactctcttctgcttgaggtcacatctgccacatcaggggtatttacctctttcaacacatatttattagggcacctgtctgggccaggcgttgtgctaaaacccccaaacgctgtca

SEQ ID NO: 148423 - DNA, 577 bp, Homo sapiens
gagatttgaacctaagtggtctggctccagagttcatgcttttaagaatgacaatacagaccaggggtggtggctcacgcctgtaatcctagcactttgggaagccaaggcaggttgatcacttgaggtcaggagcttgagacgagcctggccatcatggcgaaaccctgtctctactaaaaatacaaaaattagctgggtgtggtggtgtactcctacctcaggaggctgaggtaggagaatgtcttgaacctgggaggcagaggtttcagtgatcctagatcgtgccactgcactccagcctgggaggcagaggtttcagtgatcctagatcgtgccactgcactccagcctgtgcgacagagcaagactccatctcaaaaaaaaaaaaaaaaaaaaagaaaagaatgacaatacacctgggtgcggtggctcatccctgtaatcccagcacttgggaaggcgaaggtgggaggatcacttgagcccaatagttcgaggccagtctgggtaacattgtgagattctgtcttcaaaaaaaaaatttaaaaatattaataaaaaagaattataatac

SEQ ID NO: 148424 - DNA, 276 bp, Homo sapiens
gatgacgggggcagacctccagggtcaggcagatcacaggctgtgctgctggaccagcagggaggtgatggggaggactcaaggaagcctctggggtttctagtgcaagatgagattgcgcaggaaatcagaactcagcagagactcagagcagctcccggggcagggctggcaggaggggctccatcaaggcagctgccttgtggcgctggccggtgtttctgggcagtcacctggcctggtctagctgctcctggatctgtgtgcgctgtgggc

SEQ ID NO: 148425 - DNA, 843 bp, Homo sapiens
cactgccaaagactatggatctcatcattgcctgtgcccacaaggaccctctgttccctctgacctcaggcctcttcccatccaacaagcctctctgcacttctatgttcccctactggaacaaagtcagaactggatctgctgacgccacatataggtatggaatctgagattgctctattgggatcatcattctagacacttccctctgccatggcaggcttttgcttccatgccagattgacatgatgctatactgagtgaggacaactctgagagacccacagtcttcccaagctagacccagggaagcagtttgggggttccccaaatatatttggctgtttgcatggacccagggggatttaacctcaagggcaaaataagaactctcatctcagaatccctgccaccctctctgtgccctactcttcatgactggaagaagttttctcttcccttaggggtgggaatgccaagtcatatcctgcttctctcaataccgtgcctcagagtagaaccctttgctcagacccctcaggtctgctctggatatataaagggaatctttggaaacatacaaaaccctttctctctcaataaatcctggctttcaaggtgaattcctcttcatggacccaaagagtctaatttcaaatggaaagctcaggaatgatctcttgttctggaccagttctacccaggctctgatctctgtgtgtgaactgtttgttactgtctgcaacaataaagtataggaattgagaatatttggaaacttttatagaaatttggcagagcaattttatgttgttgaatttaattaaaatcttgtacctctta

SEQ ID NO: 148426 - DNA, 382 bp, Homo sapiens
tacttagcagcaagggtggtttcttagaaactgagtcttggcactggtctgttttgcatgaagatggtggtaaatgcagtcgtgtttctaggtagatggcacatggttacagattacagtttcccttttctgaaaggaaaagcctgttaaccattatgttgaaccaagccccttcatagtcaagaaaatatcacacagaactacttttaaaagtctccagcagatcatgaacaggtattcatttttattgtgttaaaagttttctatgtttgtataagtttagattaaaaactgtttacaaatgtatgtgcttgaattttgttatttttgagaatgtctcctagagaaggagagacggaagcttgataaagttttaaaacta

SEQ ID NO: 148427 - DNA, 1133 bp, Homo sapiens
tctgcatgtaaaaaccacaatcctgaaacttaccctatctcctttttctgttttattttccccctcaggatgtactatcttctaattcaccatgagtctaagctccagaaagacaggaatttttcttctgttcattgctggaacccaaatgagtgcctgccacaaagcaggccctcaaaaaatatgtcaataaattaataggacttctgctggaagggaggagggcagggaacacttcattgcagaccttttaaagctattaaaccacggataatactttcacaaaagtcttttttaaataatgagtacatatttaactgtcaaggaaaagagacttaggaagacagctagtagataatgtgggatcagaagcagcttttggtttaagataggagagagttgaagattttttcaagttgacaggaaggatccaatacagacagaaaggctaaatacacacaagaagagagagtacacagtatgtttctgagacactgagagaggatgagatccaaagcaggagtgacacaggtggcctcaggtgaaaggaagggcagcccccagtcagagcaggaagaatgtgacagacaaaatggctgccattgtagatttgttttactggtaatggggaaactggaggagctcccatctgagttcttctattatctcttgaagcaagaaatcaggttatatgaagagagtgagttgtaaggaaaaaggtaaggggttagaggcttgagtgaaagttggaaataatcctttcagagaattatccagagaaattccataggattaccaggcagttaagcaagtccatttgagggaggtgctcaagtactcacagtgctaattagtcctgctcagtatctgctcaggggcaggggcacagaaggatgagctacatccagtaattatatggctttatccaggagtggggtactcccacagggtgtgacatgaagactgagaggtctgggattttagagcaccagtaaaagtaaaaatgaaataacaaccatggaattaagctacataaaagggaagacggggtgggagatgagataaagtaatgttctagggagcagttgcacgggattaccatgttactctggaacagctctggcatgatacgg

SEQ ID NO: 148428 - DNA, 307 bp, Homo sapiens
gactgagggaggaggatcacttgtgcccaggagtttgaagttgcagtagactatgattggacactgcactctggcatgggtgacagattgagaccctgtctcaaaaaaagaaaaaaaggataagtaataatagtgggcaactaagtggcctagactgtagaagttttggcagtaacagcagtcctgtggttgttgatgtcctcagcgtcaagggcttttggagtctcctattctcattttccccacaatgggggtaacagctgagggtattcctcttggcatcagatctgacattgtctacactcag

SEQ ID NO: 148429 - DNA, 393 bp, Homo sapiens
gttttctcagggccgagcaaagtcttggtctcacagaatttaactgtgaatagcctcagaattttcctacctcccgagagcctgcattctagtggcagaagatggtgtaattacagactacataaatgctctcagtaaaataagtatgattatgcagttgaatgtaatgaggaggcctaatctgataggattgtcgtttagccacaagccaagacctaaaggttgagaaagagccagccatgcaaacaatgagggaaaaacaatcctgtcgtaaagtagctttctctgcttcacagtagagtttattcagctagatccagaaatgtacatgcaaaagggtatttatgttcttattagaaagtagaaatcacatttcattatatacctatcttt

SEQ ID NO: 148430 - DNA, 437 bp, Homo sapiens
tttccagaagtttctccaccagcaagagaagggggcagagcaaagtgtgtaggcttggacttccttggaccctggtctgagtcctgactgccacataccagctgagccaagttgcgtagttttcagtgcctcacctttctctaaaatggggttagcgcctgcctcagaattgttctgtgcaccaaattatgtaaagttcttagcaaatcacctggcagtagtgtgtgataaggggaggagggccttactaaaacacttgggtagagtgtgtgataaggggagggaggccattgttacctggccatgaccttggcctccagagccgtagagctatagatgactgaggcaggtcatgtgtggaacagcccggctacttcctggtggagctgggactggaaacctccagactcccccctggggctctcttaactgctcca

SEQ ID NO: 148431 - DNA, 445 bp, Homo sapiens
tacgttatgaggggtagccctttcaaaatgacttagtatgatgatgtgattgtacaggatagaaatacaaaattatctttaccttacactacttaaaatctaaaactgaatcaagattattcatgctggagtcaaggaaaagcaccgtattctcaaagaaaaacatatgcaaacatctgtggcagaggctattttaaagtatccatcttgttgatcttttagtcttcttagcctactatgtattttcagttaaaaatcattaaagtccaccatatatgaacccagacacaggacaaaaacaacaacaacaaaaaaccacgtatttttttccatgggggcggtaaccagatgtcaatagctgcagctgtgactatataattacctgtttgcattaacatagaccacagtttagatttaataggttagatgacaatgcagcaaaatg

SEQ ID NO: 148432 - DNA, 371 bp, Homo sapiens
aagaggtgttgcggaaggcaatggattttaatccctcagaagagggtcccaacaaacaggcatttacaattaggttcagagcaatcacttgggcaaggaagagctgagccaaccattatgctgctggggtaactgcttagagaaggctcagctttccagttcatattttgcaaagtgagtggaccaagtactgatgaaaacgaattaaagtcagaagagaatgaactggggaaagaatgcatctaatggtacccaagtgaattcagatctcctggctcaaataaattatgtctcagagtgctgagagactataagaatagtgaaacagctttcctgtggtctttgaaaaaatatggagaatgagaatgagg

SEQ ID NO: 148433 - DNA, 182 bp, Homo sapiens
gggctctgaaatcatcagcacaatctaattttgttccccctaaagaaaccgagtctgggttcacagtgagtccctgtttcctcctccctcccagcctctgtcatttctcctgcattgtacttgatggaaagagtgtagtttccacactcgttcattagttcagacctgctatgttcttgcta

SEQ ID NO: 148434 - DNA, 180 bp, Homo sapiens
tcaccctgtatctgctggactcaattctagtggtgggactagagttctgtgtttttaataaagactaaggtcatgttgataagcacaaaggtttggaagtggcgatccattgccttgtgagtctgtgagctgccacttctaatctgcacttcggtcgctctgccacccctaccaccttct

SEQ ID NO: 148435 - DNA, 235 bp, Homo sapiens
aaaccccagtgcccgccgcagagcctaggggcacccaaagggcccagcagagaggagaggaacaaactcaccttgctggtggctgccctcagtctcagatgccactctgtgaccctgccctgggctctgaccacctcattcccctgcagcaccccccatgccctcttaggtctcccagctcccatctttcctggggagcttagcaggtaccatgctgcgtgcttgactctggagg

SEQ ID NO: 148436 - DNA, 249 bp, Homo sapiens
tgaattatgagatcctagaaatgtatgttaaagaaggttacaaggaaaagaaaaactgatagggaatacttctgcctgaaaagaaaaagaactaagtgataccttgaagtttctgcaaagatatctgaattgcacgcaggtaggtcatcattaatctggtgatgtatgttaaagattcaccataaaatttcctttaattatatctgactttagtagattttacaagttgtgagatcaaggtaagtatat

SEQ ID NO: 148437 - DNA, 293 bp, Homo sapiens
ggtgaactcatgtgtcccagattcacagctagtgaatggagaaggtggctttgaactcaggccctctcactccagagcgtgcactcccattgtggcatgacactgccttgctgggccgtttagaccacctgtccccaccttcctcacttggaggaacaaggctcagacaaggcatttgctgacttttacgttggagacgtaaaagtctgtggctgtggctcccggggggaagccctgcctgcttgtatgcctcttcctcactccctcattcccagatacttcttgtctgcctg

SEQ ID NO: 148438 - DNA, 401 bp, Homo sapiens
attagatctgaaaacagttacatgagttatagaaaaaataaagctcagaaaggaaggattgataggttactaaaaatgcctatgtggttttatttttggaatctgtaactttgtctccccaggaaggttttcactaactagttcaaagtaaatcttgggccaagtgtggtggctcattcctgtaatcccagcacttttggaggccagggcaggtggatcacttgaggtcaggcgggcgtgcacctgtacctagctacttgggaggctgagacaggagaatcacttaaaaccgggaggcagaggttgcactgaggcgagatcgcaccactgccctccagcctgggcgagagagtgagtctctgtctcaaaaaaacaaccaactaaccaacacccccgccacc

SEQ ID NO: 148439 - DNA, 548 bp, Homo sapiens
atgggaagacagaacagatgaagtttggtaagctactaaataacagttgtgggctaacagccaggttatcagacaagcaaacgcaacccaaatgaagcttcttacctgcatttctacatcagctacaatggtcttggtgtatctctacattccaagccttcatgcatcctttgtaaatactaagaatcaggggtatttaggttgacaaagtaactacattaaccacataatcatacctctacatcattatcaccaagaacaacagtattccaaatattagactcataactctaaagcaacaatttcctcccctcactctctgggaaaaaagaaagaaagaaaaactttgcagaggaataaagtgggaagccagtgttctaatataaacatgacaagcccaattctatcactgcaatatactttctgacttcagtacaaaaatcttttctgaccatctggagctactccaggcatgaggccaaaactttgtaattccttttcaaagtaaatgacagatcagtaactgccacgttgctaatgcacagcca

SEQ ID NO: 148440 - DNA, 500 bp, Homo sapiens
ccagttcacagctcagttacaacagctccagttacacagctccagttacaacagctatgaaatattcttatgaaaaaattgaaccagaatctgatcaagtctctacatttagctaccaattttaggaactagaggacacagaaacatgttgaatgataccacaagaatacaatcaacaaaatataattttagaaaatttaaaagacaaatgacttaggtttttaaacaaataaactgcaagaaaaattagagcagataagaacttgtagatttaaagaagcttaaaggacatatcaactaactgcaatgtgaggattctagttagattgattcaaaaaactgattaaaaaagagagagacagacagagacagacaatccagaaaatttaaacacattaaaatatttgttgatattaagacattatcattggcttatttgtatgtgataattgtatggttatgtttaagacatccttgcccatgacagagacatactaaat

SEQ ID NO: 148441 - DNA, 1006 bp, Homo sapiens
catggtggctcatgcctgtaatcctaacactttgggaggccaaggcaggcagactgcttgaagccaggagtttgagaccagcctggccaacctggtgaaattctgtcactactaaaaatttaaaaattagccaggtgtggtggcgggcgcttctagtcccagctactctggaggctgaggcacgagaatcacttgaacctgggaggcagaggttgcagtgagcccagatcacaccactgcactccagcctgggtgacagagtgagaccctgtatcaacaaaacaaaacaaaactatatggtttcaggcacctatggaggtctgacatatccctagcagataagggggagttactgtttaatgtggaatagagtggggatcgcagcagcatcatcttgctcctaatttcaaagaggaggtttttagcattagagtatttgtagatacccttttataattttaaaagaagttattttctatttctattctattgtcaaaaaatttttattgctcgttttaaccataagttgatgttgaatcttaatcaactacctttcctacatttgaggattttataagttctatcttttagtctatcattggggttatattacattaattgattactaatattaagccactttgcattctaggagtggcataaatctaattatgatgtattatcatttgaatatatatatctagattctgttgctaatatttagtttatagttcttgtatctatgttcatgagtaaaattggcctgaaaatttccttctcttactatctttgttgactttctgatcaaggttataaattaagctgaaaattactctctttttctatatatggttggaattatttctttcttgaatcttgggtgaaacttagttaacttttaaaaaataaataatgtaattacaccgaagtcagaaaaatggtttgtataatttcaagtctttgaaatttgttgagacttgttgcatagcctagtatatggtcaatt

SEQ ID NO: 148442 - DNA, 788 bp, Homo sapiens
gtttagatcaagaactggcttctagtctgtgtgacggaaatgacgacccgtgtgtctttataaagaaaacaaaactatatggtttcaggcacctatggaggtctgacatatccctagcagataagggggagttactgtttaatgtggaatagagtggggatcgcagcagcatcatcttgctcctaatttcaaagaggaggtttttagcattagagtatttgtagatacccttttataattttaaaagaagttattttctatttctattctattgtcaaaaaatttttattgctcgttttaaccataagttgatgttgaatcttaatcaactacctttcctacatttgaggattttataagttctatcttttagtctatcattggggttatattacattaattgattactaatattaagccactttgcattctaggagtggcataaatctaattatgatgtattatcatttgaatatatatatctagattctgttgctaatatttagtttatagttcttgtatctatgttcatgagtaaaattggcctgaaaatttccttctcttactatctttgttgactttctgatcaaggttataaattaagctgaaaattactctctttttctatatatggttggaattatttctttcttgaatcttgggtgaaacttagttaacttttaaaaaataaataatgtaattacaccgaagtcagaaaaatggtttgtataatttcaagtctttgaaatttgttgagacttgttgcatagcctagtatatggtcaatt

SEQ ID NO: 148443 - DNA, 132 bp, Homo sapiens
ccctgtctcaaaaaaaaaaaagaaatatttgttgcatgtgtatgtatttgtgggcatgttgtctgtgtgtgactgcacaagacgggtgcacgtgcaatgcatgcgtgtgtgatgatgtgttcttggacgttg

SEQ ID NO: 148444 - DNA, 407 bp, Homo sapiens
ttttatgggttaatgtatcactttcaattccttactccagctgttgccagcagataaattagctaaattaaaagcagacagactggaggagttttccgaaataaatcacttctcttctgttataccagtgttggttatactagccatccccattcccagcagtgagaggaacagggctggtcttcaaatccaacatgcccccttttctgccacacccttatagaaccaaagctttggactattgagggcctattatttttgttaaaagactaagtaatgtttccagaaaattgttgggagttacaagcagctggttttctggggtaactagatactaagccacggtctatcacaagccacggtcaacccacaagccacggtcaacccacaagccacggtcaacccac

SEQ ID NO: 148445 - DNA, 501 bp, Homo sapiens
  misc_feature (493)..(493): n is a, c, g, or t
ttttacgtatgaggccacagaaaattaagtttattttaaaatactttttcaaaatctcatctctgtgaaaaaatccaagaagattaagaaccttttttttcttcaaacgaattcaattttgtcctttagttttgcagtgcacagaagaataactttcaagtttctattacatttgaagtggatttttcccgaaattgtaaaatatcagtatcaacaagacaaatgatgtttgaagtgctttacacatgataatttagctttgtgcgggttttttgtttctgctgttgtttttgtttgtgtgggtggttttttgtttttgttttgctacccaatgtcaataatagcatccagttgacttgagactttttatagttctctgcaagccttccacacttttctggtctcagttatagctatctccaccatactcatcaagactcctagctcaccaccttgctctctcaattcatgaagtcttgatgagtatggtggnctcgataa

SEQ ID NO: 148446 - DNA, 456 bp, Homo sapiens
tctgaacctgcggttcctctcgtactgagcaggattacaaacatcatcagtagggtaaaactaacctgtctcacgacggtcccctatcgtcaacgatggtcctcagctgtgaagcccaaacactgctgccgatttctggtttagacaaacagctcctgcaggactggaattgggcaagactggagtcaggaaagccatcaggagcttaaaggaattcaggcaggcacagaacggggttgttagaaataatgagataacggtatcttcaggtgttttgagaatcattattttaccatgaaataagagcatgaaacaatattccgcataacttgctacactctaattgtttcctggactctcttcagaagctgtgtgtgcctagtgaatggaaaccgtaactacttcttgctagctgtcactttatctcacctttcatgtgaagtctgatgccagaca

SEQ ID NO: 148447 - DNA, 495 bp, Homo sapiens
ttggctgcatgctgtaatcacggaggcaagcttggagaacggtgttggccctgcaagaagagcttcagcagggcaaatggtctttgcacacaggaaccatttcccagtgttggccttgaatcactcatgtgccttccagaatttcagaatcttatctataactctcagaatgagtctcaggatagagttaaactcctgtcggaatgtagtcatttggggttctcttgccaccataggaactgggaccatcatctgtgatgctgcaccagtgaagtctgtgctgataacccattaggacttgatgacaccagggctgtatcatgacaaagactgcatatgctgagacctcaagagttggatatggtgtgtggacgatggcaatatttataagagcttttaatgcactgaatcagtatctgcaggcctagagtccttaaataatacaagtatactttggactgcatgatgatctggaacacaggatattggagaaac

SEQ ID NO: 148448 - DNA, 732 bp, Homo sapiens
cgcatcgcatggccagaaggcggggagccagaggcgccaggaccctagcgtggcgctccagcaccccagaccgtggcggcgcctcgccttagggaagagcaagggaagaactttatttgaaccgcgaacattttttggtcactgagatcgagtctcccagtgctttggcttcccgcctctttatcgtgggtttgatccctgagctgctctcctttccctcgctgccccgcagatgcggatggccagccagtagcgggcggtggccccgcgtcccgggagcgcacagcaatgcaggcgcttaacattaccccggagcagttctctcggctgctgcgggaccacaacctgacgcgggagcagttcatcgctctgtaccggctgcgaccgctcgtctacaccccagagctgccgggacgcgccaagctggccctcgtgctcaccggcgtgctcatcttcgccctggcgctctttggcaatgctctggtgttctacgtggtgacccgcagcaaggccatgcgcaccgtcaccaacatctttatctgctccttggcgctcagtgacctgctcatcaccttcttctgcattcccgtcaccatgctccagaacatttccgacaactggctggggggtgctttcatttgcaagatggtgccatttgtccagtctaccgctgttgtgacagaaatcctcactatgacctgcattgctgtggaaaggcaccagggacttgtg

SEQ ID NO: 148449 - DNA, 496 bp, Homo sapiens
cctgagagagcatggagagctggaacactgtctatttcagaatttggacacaaagtcagaggacatatgtggtataaacaagcctgaagaagcagtcaggttgggcatggtggcttatgcctataatcccaacactttgagaggctgagatggaaggattgcttgaacccaggagttcgaaaccagcctgggcaacatggtgagacccgtgtctacaaaaagtttaaaaaacaaaaaagaaattagccaggcaggatggcatgcacctgtagtcccagctacttgggaggctgaggtgggagatcacttgagcctgggaaatggaggctgcagttagaaacacaccactgcattctaacctgggcaatacagtgagacctcatctctaaattaaacaaattaattaaattaagttaaaattaaaataaactaattcggaagtacatggagagcaatgaattttaagacagtggttattatgctcagacttgccttt

SEQ ID NO: 148450 - DNA, 561 bp, Homo sapiens
ctctgccttttcatctcctgaaaaggtagatttgctagtgcaagaagatattaaagactcacaggcaccaaactaacattttctccaccacataatcacgcccactgaatgtgacctgcaaagggtctgtctcattgcaggatccaaagccatttaatgccacaagtgtgaactgctcccaatgccctcacccatcacaggtggtcccacactggaaaacattgcttcaagcagcattaacaactaaggatgtcacaaatgcagatttatttgccaagaaatcagggtgcttctgtaggttttttacataatgagaaatcaaagctatcaatgtaaagtactgcttttaggttcaatcaatcattggtaaaatgatacaatgaggaaaacctggcttggctgcagttcctgtggaaagggactgtggtttgggctgaccacaagatcaacatcagccaagagtatgacagggttctgaggtgagagaagggactcttaggctcattcctaacctgtcagggattgaatcaagggaagggagatcctgtcctcacagtgagc

SEQ ID NO: 148451 - DNA, 478 bp, Homo sapiens
aggtgactctagaggaccccgctgcgcctactattaccagctaatttttgtatttttagtagagatagggtttcaccgtgttggccaggctagtctcgaactcctgacctcgtgatccgcctgcctcaacctcccaaagtgctgggattacaggtgtgagccaccacatgaggaggtttttacaagtaaattttatcattgtcattaaaaatagatgaaaaaatacttagcatttcctctagctggtttcccatagccatgaatagatataaataaggatgctttctgattagcaagaaatagaatggatcatacaatgttgacgattctctttcttttcattctaaaagaaaatgtttcatgtttgttaaaaaggagaaggacaaaattatagaaaacattttcaaacattttaaggaaaacatgacataaccacaccatgtttaaaatgtttctcattgtcagtcattataccaca

SEQ ID NO: 148452 - DNA, 407 bp, Homo sapiens
agcaattctctcctgcctcagcctcccaagtagctgggattaccagtgtccaccaccacacccagctaatttttgtgtttttagtagagagcgggtttcgccgtgttagccagggtgatctcgaactcctgacctcaggtgatacgcctgcctcggcctcccaaagtgctgggattataggcgtgagccaccacacccgacccatcactttcaactacatcatgaaagttcttttgaaaggaaggggcatttaatggtagaagtgacatttcaggtgaaaagtgaaacactttgtttatacattttaggggtgaaattgcttggaaacataacccaactgggattgtcttaacctaacataaaagtaacctgtttcaacacagaaacatgaatatcattttgtcctc

SEQ ID NO: 148453 - DNA, 241 bp, Homo sapiens
tttattggttttcaaatgtctaatctttcatagtattttcctatctgttttatgatttattttatttgtacttcttaaagaattctacttttatctgctggcttttcctcctgtagatggtatgtatgtaggcttaatctttccttctatgataatcctatgggaccctattagaaactctccctaaagggcagtttttgtatttgtttctgctggggtgccagaattgattttattttct

SEQ ID NO: 148454 - DNA, 297 bp, Homo sapiens
cctaacttctttaaactcagtatcttcatctgtaaaataggtatgataaaatgcctaacttgtaagattgccacgacaagtcagtaagatgctttgcacatagtagatgctaaataaatagtaaaatcaattttttttcttctccttctcttttcctgtctttattttttttggggggcggggtaagctttccattctttccattcctcctctttctctttttcttcctctatcaaatggaaaggtgaggaaaggcagacattggcccattccacccccacctgcagtgtgctcctc

SEQ ID NO: 148455 - DNA, 422 bp, Homo sapiens
aagtaccagaaactgggtggcttataaacaacaaatagatctctcatggttgtggaggctggaagtccaagatcaaggtgccagcagatgtggtatctggggagggcctgtttgctggttcatagatggcaccttctccctgtgtccttacatggtggaagaggtgaggctgctctctggggcctctcttacaaaggcacgaatcccattcataaagggctccaccctcataaccataggctctttaaaatgccgcacctcctaatatcatcatcttggaggttagcatttcagcatatgaatttggcagtggggagaggacacaaacattgagaccacagtagcaagcatttaggcatgaagaatgtcacgggaacaaggcttggcttctcattctgcctcccaccccccttgcccttctg

SEQ ID NO: 148456 - DNA, 365 bp, Homo sapiens
gcagaactgcaaactggtcaggacttgcacgttacactagaaattcagggcccatcatgaaaagagcctaggagaactcataggcattgaaagctggtccccagaatctgggaagttataaaataggggtgaatgggggtgaaggaacttgcattatttgatctacagaggagaaggctaaggtatgctcagaaaatatgtaaacacataaataactgagttatttttataacccggcatttaataactgggttttcatcttagctcagctttaattatggccttctggaatatacaaggctcttacccagactaggaggtatgctttggagtcagacagatctgagttcaaatcctaatgccag

SEQ ID NO: 148457 - DNA, 1148 bp, Homo sapiens
tgcactccagcctgggtaacagagtgagactccatctcaaaaaacaacaacaattaacaacaacaaaaaccaaagctaaacaagagcagaatccagattattaaaataacaatttaaaaagcatgattgtcacaagcttcaataattacctgcctgctcttgagtgtttaggttggtcttggaatcggcctgtccctgtgcttgaggagtggaccctcagggtgtcactgcccttctttgtgatctctttttagcctactgtccttcctttggtgcctaactcagaaataaacattcttaatctgttcagcttaattgagattcaaacctcttaaaaagtagttttgtcaagaggcgtgtgaaccagagcaactccattttgaataggagctgggtaaaatgaggctgagacctactgggctgcattcccagacggttaaggcattctaactcactggatgagatagttggtcagcacaagatacaggtcataaagaccttgctgataaaacaggttgcagtaaagaagccagctaaaacccaccaaaacaaagatggccacgagagtgacctctggttgttctcactgccacactcccacaagccccatgacagtttacaagtgctgtggcaaagtcaggaagttactctatatagtctaaaaaggggaggcatgaataatccacccctcgtttagcatatcatcaagaaatagccataaaaatgggcaatcagcagcccttgggctgctttgtctacggagtagccattcttttattactttactttcctaataaacttgctttcactttactctagggactcgtccagaattcttccttgtgggagatccaagaactgtcatttgaggtctggattgggacccctttcctgtaatagtttgaatgttaaagtttgtgccattgcattctttggtgtgattgctttattctgaactagaggtgaagaatgtggggaatgtggaataaaatgaagggaatatatcagtacagatggagctcataatttatggtgaatttctcattcctcacaattggagggtatatgtttgaagtgagtcaatttctgaatttattacctaatttgattgtatgccttatacattatatttttaagaaaaaaattaa

SEQ ID NO: 148458 - DNA, 315 bp, Homo sapiens
tggctctctgcgtcggggtgggccctcgggcctgggcactgcgcgtctggcccgacgctcgggcggaaggcatggctcccaccccggccctcctccgcgtcgcccttcccctagagctgatctcccgcggcggcctgagggtcgacttttccacagcttgggccgagagagcccggcaggccctcggctgagggttagggctcggtatctcagggctcggggtccagtccccgcgccgccgccccccacgggctaagccactttaactctccgagcctcagtttccccatctgtacgatgaatgggcctcgggag

SEQ ID NO: 148459 - DNA, 225 bp, Homo sapiens
aaccttttcccagtattgtcaaatgggaattcaaaaatccaataaacctgtaaaattgcttccaaaacagggactatgaaaaatgaaaatgtctaccattctccctgaagtccattaagggattcaaatacctataatgacttaaataagtttctttagtccggatttaggaaattgaaggttgaagtacaaaaaaagaaaaagaaaataagtaatgtatgcatt

SEQ ID NO: 148460 - DNA, 1032 bp, Homo sapiens
gctctaattttaaagactaaggggcaaattattaaatcttaataaagtgttgaatgtgagaggtgttggctggggagtaagtttgcctaggagttaggagaaatagattttaatcctccttaggcaaataaggggacttagacttttttttaaaacctatttgaatttttagtttctaattcaaattttttgttgccagaagcctaaaaactgtacagattgagttttattaaaagcagttttgtttttttttttttggaaacggagtctcactcttgtggccctaggtggaggttgcagtgagccatcgcaccactgcactccagcctgggcgacagagtgagaccccatctcaaaaaaatgataataattgattctaaactggggaatagagagattcccaatttaaaatcttcacagtggttctcaaacgttagccaacaccagaatcaatagggctagttaaaacagattgctatgatctctaccacaagggtttctaattaagtaagtctggggtgggccctgagagtttgcacttctagtaagttccaggtgatgatgctcatgcatcactcattctgagaggtgcccctttagaagaagggatccaaacctcaggcaggttttgacaaagaataacctagagatactttttttctaaaactatctctgagctttaggtaaggatactttttttctttgagagcctcacactgtcacccagattagagtgcagtagtgtcatctcagctcactgcaccctctgcctcccgggctcaaggggtgccctcagcctgctgagtagtgctgctaattttttgtatttttggtagaggcagggtttcgccatgttgccaggctggccttgaattcctgagctcaggtgatccacccgccccaagcctcccagagtgctgggattacaggtgtgagccacgccgcctggcctcaaggaatattcttgattgaaaatggtgctaaagttggtctttttatgagtggtagctcttcagtttaacataaataaca

SEQ ID NO: 148461 - DNA, 901 bp, Homo sapiens
cgggtggatcacgaggtcaggagtttgagaccagcctggccaacatggtgaaacccccatctctactgaaaataaaattagcttggcgtgctggcgctcgcctgtagtcccagctactcgggaggctgaggcaggagaatcgcttgaacctgggaggtggaggttgcagtgagccatcgcaccactgcactccagcctgggcgacagagtgagaccccatctcaaaaaaatgataataattgattctaaactggggaatagagagattcccaatttaaaatcttcacagtggttctcaaacgttagccaacaccagaatcaatagggctagttaaaacagattgctatgatctctaccacaagggtttctaattaagtaagtctggggtgggccctgagagtttgcacttctagtaagttccaggtgatgatgctcatgcatcactcattctgagaggtgcccctttagaagaagggatccaaacctcaggcaggttttgacaaagaataacctagagatactttttttctaaaactatctctgagctttaggtaaggatactttttttctttgagagcctcacactgtcacccagattagagtgcagtagtgtcatctcagctcactgcaccctctgcctcccgggctcaaggggtgccctcagcctgctgagtagtgctgctaattttttgtatttttggtagaggcagggtttcgccatgttgccaggctggccttgaattcctgagctcaggtgatccacccgccccaagcctcccagagtgctgggattacaggtgtgagccacgccgcctggcctcaaggaatattcttgattgaaaatggtgctaaagttggtctttttatgagtggtagctcttcagtttaacataaataaca

SEQ ID NO: 148462 - DNA, 287 bp, Homo sapiens
aaagtgctgggattacaggcgtgagccaccgcgcccggccttcatttcttaatggaggagtagcaaggttctaaaaagtcttgaagataaatattgttgcaatcatatttggcaaatacagtctgccacagtctgaatttataaatgcttcttgagatccaaacaccaaacaagtgcctgtgtggcataataagtattacactctacagaaagtgcaaaaggagcctagatgagaaagctggggattaaagaaaactctggaaagccttttgaaaaggagaggattg

SEQ ID NO: 148463 - DNA, 218 bp, Homo sapiens
atactaaagagcttaacttaaattcaactaaacactatcatttttagatggggtaagattttgttcaaattgttttaacgtggttaaagatatttttaaaacattctaatttgcaaccagggtatataaaattttaacaacagtaatttatagttaaaatgatagcttcagagcagttcaacaataggttttctagaagctcgtctctagtaggttat

SEQ ID NO: 148464 - DNA, 473 bp, Homo sapiens
cagggcaagagacagttcccagaccaggaagaggggagtgcccaaggacagatgagggctcagaggggaggagtcagtgagccccagaggtggggcccgagagccaggggtagaaggatttccacaaatagagtgtggaatttggggaggaggtggaaaggggagacagcaaggtggtaaataagggctgtggctctggaagagatagctttttaaatttaccatgttcactgttttttttaagatacagggtctcgttctgtcatgcaagctggagtgcagtggcacagtcatatcttactgccgccctcacaacagacgcccaccatcgcagtcctgttggacatatggatatgaactgggcctaccgactgcaccaaccacttccctgagctgtgtcccttccttgtcacagcaacccctgaaggaagcgctgttcttcaccccactgtacagtttgggaaatggaagcc

SEQ ID NO: 148465 - DNA, 327 bp, Homo sapiens
ctcttttagaattatggatatcgcaaacattgaggagatgcaaattagcgtatgttgtcatctacaataaaggaagaagatatgcaaagggtgcatttttaggtgagatgataaagaaatctatctctgaagaggtacgaatttgagatgtgattaaaggtaaaaaagaacatgttggaatatcttagagaaaaccgtttccagaagtctgaagaacaagtgcaaagaccctgctgacagatcacgccttatgtgtttaaggagcagcaagatgtctactaggtctggagaaaaataaaccagtgggagaatttaagagatgagaaa

SEQ ID NO: 148466 - DNA, 232 bp, Homo sapiens
gatgagggcaagacccctctaaggcactcccccacaccctatcactcctgctcttaaaggacccctgaagggcactgaaggggttggacttctcagtgcaagccaacacccacacctccgagtaccaacagccccagagaacagcaggggtcctcaatcctgagcacccctccaaggaggtcaggagaacaagccttaagccagagagtgaagaggatcagtgtctcggacc

SEQ ID NO: 148467 - DNA, 516 bp, Homo sapiens
gagacactggctgctgaaagtattttaaatgatgtagatactgacaacctaatattaagtacaactgtatacacagcatgaaaacaaccatgccaagtgtacacacaccttatacacagaggaaaaacaggaagaaggcatgccaagagattaacactagtcatccctgcactgtgggactacagcggctattttattctttatttttcagatattcaaaattgttttataattttttttcttttttaaaaagggcatgtttctttttctctctaaaatcaggctgtggggccaaccctggagacaaaaactatctttcgcagactactgcctttgcaggcttagtttctttcctgggcaaactaggataatagccatgaatcaaatggaataatagatgccagagctcacccgaatgtttcagatgcttgcaaatactattgcacaaaaaaactgttacttatactgctgttgtggtgttatagtttatcatcaaaaaacagacataaacatcat

SEQ ID NO: 148468 - DNA, 854 bp, Homo sapiens
cgctcgcgcccgtgcccgcgcaacctagcctgctggccggggggcggggcgagcgagccgcggcgcttccgctttacacgccccagccggcgaccggttccatctggctcgggccactctgacacctttagtttcggcaagggatatggtggcgaaggggaggcgggggcccgaaggcttcggaaaacgatgggggagggggcagaggatacccgtcgaagcccccccctcccccaacatttcgatattggaatcactttccttcttcctcgggccagcctttgctctgtcccctcaggtcaactcaaggtagacagtgtggcgactggagaggtcggggaacaagctttgtttcagctaaggggaaaacaagcgttcacaggagtcccctgacacctcccactcggaagatagctaacgggggtcctgccaacccttcccatccaacttccatctgaaaaggattttctgctaaagttgggtccatggccatccagcacctgtaaggccggcaggagcgtctgccctctactcagttaaagcctgaagtcgtttcctttcgatggcccttaggaggcccaaaagaggggcgacagaacatgatgttgacacgggctgggcgcccccagaagcccgggaacaaacgtttctactttccaggtccactggtgtttggtgtacccatgtgactaatttgtccaaagagagatttacctcagaagacacctgtataaaaggaagaggtccctatgaagtggtgatggtccatgaggaagaggcctggaaatctaagcagggcttccagctccctgcttcctgtctaagtccaggtacttaccccacctataggtgag

SEQ ID NO: 148469 - DNA, 918 bp, Homo sapiens
cgctcgcgcccgtgcccgcgcaacctagcctgctggccggggggcggggcgagcgagccgcggcgcttccgctttacacgccccagccggcgaccggttccatctggctcgggccactctgacacctttagtttcggcaagggatatggtggcgaaggggaggcgggggcccgaaggcttcggaaaacgatgggggagggggcagaggatacccgtcgaagcccccccctcccccaacatttcgatattggaatcactttccttcttcctcgggccagcctttgctctgtcccctcaggtcaactcaaggtagacagtgtggcgactggagaggtcggggaacaagctttgtttcagctaaggggaaaacaagcgttcacaggagtcccctgacacctcccactcggaagatagctaacgggggtcctgccaacccttcccatccaacttccatctgaaaaggattttctgctaaagttgggtccatggccatccagcacctgtaaggccggcaggagcgtctgccctctactcagttaaagcctgaagtcgtttcctttcgatggcccttaggaggcccaaaagaggggcgacagaacatgatgttgacacgggctgggcgcccccagaagcccgggaacaaacgtttctactttccaggtccactggtgtttggtgtacccatgtgactaatttgtccaaagagaggtctcagctgaaatgaaacctcctcagaaaaatttgttcctgacaaattataactcaaaaatcaaaaatttctaaggcctttgttattctctttatcacagcattgtactcattttcttcttagtacttagaaacgtctataattgttttacttctttgtttaccattaaatgtctgtatcctttaaaactgtaggtcctatgagttcat

SEQ ID NO: 148470 - DNA, 466 bp, Homo sapiens
gcaactcttcatcatctatttccaggtttctactttccaggtccactggtgtttggtgtacccatgtgactaatttgtccaaagagaggtgagtgaaagtgatgtgtcacttccagatggaagctttttgggcaagtatgtattttctagctcttttcttctgtgttatagaaactaggaatattccagttggtgactgaccccttagttgggttcctagagtgagtttgatgtggaggagcccaaaatgacctgcagtgaagttggagtgtgagcaagaaataaacttttgttttttaattttctgaggttttggaagttgtagattataactgcataacctatcaatattgatatgtttcaattcttaatgaaaatttctaatattctttttgattatttctaacttattaacttaaaatgtcaaatatctataatttcagtatattctgtatcctacatttaa

SEQ ID NO: 148471 - DNA, 1040 bp, Homo sapiens
cgctcgcgcccgtgcccgcgcaacctagcctgctggccggggggcggggcgagcgagccgcggcgcttccgctttacacgccccagccggcgaccggttccatctggctcgggccactctgacacctttagtttcggcaagggatatggtggcgaaggggaggcgggggcccgaaggcttcggaaaacgatgggggagggggcagaggatacccgtcgaagcccccccctcccccaacatttcgatattggaatcactttccttcttcctcgggccagcctttgctctgtcccctcaggtcaactcaaggtagacagtgtggcgactggagaggtcggggaacaagctttgtttcagctaaggggaaaacaagcgttcacaggagtcccctgacacctcccactcggaagatagctaacgggggtcctgccaacccttcccatccaacttccatctgaaaaggattttctgctaaagttgggtccatggccatccagcacctgtaaggccggcaggagcgtctgccctctactcagttaaagcctgaagtcgtttcctttcgatggcccttaggaggcccaaaagaggggcgacagaacatgatgttgacacgggctgggcgcccccagaagcccgggaacaaacgtttctactttccaggtccactggtgtttggtgtacccatgtgactaatttgtccaaagagagaaactaggaatattccagttggtgactgaccccttagttgggttcctagagtgagtttgatgtggaggagcccaaaatgacctgcagtgaagttggagtgtgagcaagaaataaacttttgttttttaattttctgaggttttggaagttgtagattataactgcataacctatcaatattgatatgtttcaattcttaatgaaaatttctaatattctttttgattatttctaacttattaacttaaaatgtcaaatatctataatttcagtatattctgtatcctacatttaaaaataaaaaatagaatgttgaaaatgaaaaaaaaaaa

SEQ ID NO: 148472 - DNA, 756 bp, Homo sapiens
cgctcgcgcccgtgcccgcgcaacctagcctgctggccggggggcggggcgagcgagccgcggcgcttccgctttacacgccccagccggcgaccggttccatctggctcgggccactctgacacctttagtttcggtcaactcaaggtagacagtgtggcgactggagaggtcggggaacaagctttgtttcagctaaggggaaaacaagcgttcacaggagtcccctgacacctcccactcggaagatagctaacgggggtcctgccaacccttcccatccaacttccatctgaaaaggattttctgctaaagttgggtccatggccatccagcacctgtaaggccggcaggagcgtctgccctctactcagttaaagcctgaagtcgtttcctttcgatggcccttaggaggcccaaaagaggggcgacagaacatgatgttgacacgggctgggcgcccccagaagcccgggaacaaacgtttctactttccaggtccactggtgtttggtgtacccatgtgactaatttgtccaaagagaggtctcagctgaaatgaaacctcctcagaaaaatttgttcctgacaaattataactcaaaaatcaaaaatttctaaggcctttgttattctctttatcacagcattgtactcattttcttcttagtacttagaaacgtctataattgttttacttctttgtttaccattaaatgtctgtatcctttaaaactgtaggtcctatgagttcat

SEQ ID NO: 148473 - DNA, 731 bp, Homo sapiens
agcaggagaagatcagagaaatctgctacaaaaccaaggaggtgagggagaagaggaccaaatactgacctagcacatgctcactcttctcacaggatcaaggccatcaagctacagatggtcttacaaatggaaccccaaatgagctcaactaacaacttctaccaaggacccctggactgacctgctggccctttcactggcctaaagagttcccctctggaggacactacaattgtagggccccttcttcgcccctatccagcaggaagtagctacagtagtcatcgcccaattcccaacagcagttggggtgtcctgtttagaggggggattgagaggtgaagccagctgggcttctgggtcgggtggggacttggaaaacttttctgtctagctaaaggattgtaaatgcacccatcagcactctgtaaaaaatgcaccaatcagcactctgtgtctatctaaaggtttgtaaacgcaccaattagcactctgtaaaaatgcaccaatcagtgctctgtgtctagctaaaggtttgtaaatgcaccaatcagcactctgtaaaaatgggccaatcagcactctgtaaaatggaccaatcagcaggatgtgggcagggccaaataagggagtaaaagctggcctctcaagccagcagcagcaacctgctcaggtccccttccacactgtggaagcattgttctttcactcttcacaataaatcttgc

SEQ ID NO: 148474 - DNA, 592 bp, Homo sapiens
agtgtatgtgtatgtatgtatgtgtatatatatttgttaaacaaaagccaattctgaatccttttcccccatgacatggatggagatatcctcagttcccatgggattattcaaaatttgagtgctcatgatttttgatattcctccttatctccccaagaatatgctgtctattctacctctcaacaggacaagagactcatagattatatctctgaaatgttctatctccaataacactactagagtccaatcttcattgcagtcttagaaatcttaacatttacatgttagagaactataacagctaagtgccccaagtagaaaaatagagattttaatctgagaaattatatataacaatttaacaattttctgacttccttttctagcctgttttctctctagtccaggggttagcaaactccagcttgtgggcaaaatccagcctgttgcctcttttttgtatggccccgatctaaaaatggtctttaaatgactggacaaatcaaaataatattctgtgacatgtaaatattaaatgaaattcaatttcagggtccataaataaagttttattggaacacagcca

SEQ ID NO: 148475 - DNA, 466 bp, Homo sapiens
aagccggtggagggttgataaaattctttggctgctgtgcagagcaagagtggaagcaaggatttcagtttaaaggctttgcagccgcccaggcaagccgggatattgttctctgcaaatgaacactctgtcctatctggttcatactgacattctgattgagccttacatgaattaaatgcctagtgtgtgtttggctagatgattttcagtctaaattagatcattatgtccttagaatatcaaggttccactgacctattgttgagaactcttgaagcgtttgctgtgatctagctactccgaatgtacccctttggaaacaacgtcaggcatttgagaaatatctgactagggccagaatcagaggcccatgaaatggaagaattcactggtaaagaaacagtacttagttcacagccttgttcatagctgtatccccagccctcagcatagaggctgacac

SEQ ID NO: 148476 - DNA, 209 bp, Homo sapiens
aaggctcaccctgtggggtgcaggatgcgggatgttgctgctgctgctccctccccttgagcctcctgcctcctccctcacccttcacaaccagataggacagtgactttctgaaatgtgggtctggtctgttgcctccctgctgcaggacttccctattgctctcaggaagaaggccagagtcttcgcccttctcctcaagaccctcc

SEQ ID NO: 148477 - DNA, 329 bp, Homo sapiens
ggaccatatagcataaagtagaggctacaaaatgttagctttggaatgatcagctagagtcattagtcctgtcaaaccagtggctatgagggcaggaagtctgactgattgtttaccattacagacccacttcctaagtacctaagaaaaatgcctggcacataccagatagtcaataaatatcagttagaagcaactcaataagctaggccctgaaggaatccaaatcttggagaatccccaaaagaaaaggtctaagaagctagaacaatgttatagttaatatgggtacctatactgggcctcaagaccaccttagtttttttttt

SEQ ID NO: 148478 - DNA, 239 bp, Homo sapiens
ggaccatatagcataaagtagaggctacaaaatgttagctttggaatgatcagctagagtcattagtcctgtcaaaccagtggctatgagggcaggaagtctgactgattgtttaccattacagacccacttcctaagtacctaagaaaaatgcctggcacataccagactgtatttttatttttattttttattttttgagatggaatagtgctctgcaacccggctggagtacgtgg

SEQ ID NO: 148479 - DNA, 280 bp, Homo sapiens
tcccaaatcctgttgtaccagaggcttagaaaggcttaaactgttaaatgcataaacttcctcaatcaacgggcctctcttgccagattctaaagcccagccagatgaaaaggcagtggctggagggcggggaacttcccagctgtttatggtcctgctggagtgatctggaggcagcctatgtgttttcagggtccagatgagccagtctggggccgagagaggacagtgcagggctccagggtcagatgccctgggttctaaccctacttcttcctag

SEQ ID NO: 148480 - DNA, 396 bp, Homo sapiens
agctggggcacagggaaagcctcgacatagctagagacttgggcacataaaacgcgtatactttaaatatattcagagaacagagaccatgggtaatgaactaaaagaaagtataagaaatgtatttcaccaaacagagagtatcagttgggatagaaattataaaaaagaactgaatagaaattctggatttggaaaaaacaataaccaaaatgaaaaatcacttaagagactcatgagcagatttgggttggcagaagaatccataaacttgaaggtaggctgattgaaattatttagtttgaggaacaaaaagaaaaatgaagaaaaaagaacagacctgtactatagaacaccatcaagtatatggataagaggagtcatagaagcaaagga

SEQ ID NO: 148481 - DNA, 210 bp, Homo sapiens
tctgtccacaactctcaggtcatcactcttattatcttgagcctgggtggcgggtagatgagagcttacactttggctagtaaggttgtttccattctcatacgtgctgggtgttcagctgatcatcgttttgtgtattgtgggcaggagggggacccaaatctcttctgcatcctgcctctgcctcctaactcacctggtctgtgtctc

SEQ ID NO: 148482 - DNA, 409 bp, Homo sapiens
ggctgggattacaggcgtgagccaccacgcccagcctgcttgaacggtcaaacctaactggatgccaggaagcaaggagagccgggtgatatcacctgaaacccacagcaatcagcttcatggagcaccgagcacagtcaggaggggtagaaaagggatccaaggtgggtgacgtgcttgaagagcgaacattaaccaacccctctaggagggtgtggagcaggaactggaagggtctgggccttgaggctagctgggaaactaatttggaagttgagacaagaatttataaaagccggaatcagggctgtagcatagagatgcgaggaagagctaaatgcatgaagagccaatgagatggatgctagggtctgtggagagtgaaggagaggagtctaggacaatctca

SEQ ID NO: 148483 - DNA, 148 bp, Homo sapiens
gactctagaggatacctggcacatagctcagttgggtggcgggggagatggggcacgaagggttggtgtttctggacccagagattgagacgccccaggaggcctgaggcgagtgtcaggctccagtccagccgcccagagctcctgc

SEQ ID NO: 148484 - DNA, 285 bp, Homo sapiens
tcatgtagtccagctactcggtagctgaggaaggagaattgcttgaacccgggagacagaggttgcagtgaaccgagatcgtgccactgcactctagcctgggcaacagagcgagaccttgtctcagacaaaaaacaaaaaaccctaaaagaaaacaaaagaaaataaaacaaaaacaacctctgagataatcaagtgagagctatacaaatctccaagttatgagggaggaaagccaggagtgagactgaaggcagagggcttggctgctctgaatgaggttaa

SEQ ID NO: 148485 - DNA, 110 bp, Homo sapiens
gccaaattggggaggtcattgatgatacataggactgtggtagaatttcaaatggcagttggagtagaagatttgggagctatgggatttctatgctgcatacaattatc

SEQ ID NO: 148486 - DNA, 379 bp, Homo sapiens
actgtgaggtgttctgaaccaaatccagtttattaaaatgggactcaggtgtttgaatgtgatcccttctggcatgaaaggttaattgaaacttgaaaggtggggaaaacagatgccatttaatgtgaggagctttgatgaattgcttcagcccaacggttaaataactcaagacttgatgttccattttagtggctttgattgtttttaggtccctgtgtgttttttgcatctgttttattttgcagtaagtatctgactattgtgttgaagtaggctgaaccttgaaaacactgatggctgtttcagcatttttaagcctagtcacttatggagacaggcctaaaacaatcccgttcatcctccccattctcacatt

SEQ ID NO: 148487 - DNA, 460 bp, Homo sapiens
gacctcaagtgatccacctgccttggcctcccaaagtgctgggattacaggtgtgagccaccatgcctggcctcatatcatttataaataagagtaatttgactagttcctttccaatttggatgtctttatttcttccttatgtaatcgctctagctaggactttcagtactatgttgaataacagtattgaaagtgggcatcctttttgtgtttcatatcttagaggaaggcttttaatataatactaaatggggaaaacagtctgttatgggtctgttgtatatagctcttactgtgttaaggtatgttccttctataaccaatttttgagagtttttgtcatgaaaggatattgagttttatcaaatgctttttcaacatcaattgaaatgatcatatggtttttgtcttttattctgttgataggctgtatcacattgatcgatttgtttatttg

SEQ ID NO: 148488 - DNA, 112 bp, Homo sapiens
ctctgttccttccaccttggaattgctttaaaatatttccatccattatcctaatactatcttagtattctagcccttcccccttaccatgtagacctgacaaagcaaaaca

SEQ ID NO: 148489 - DNA, 576 bp, Homo sapiens
aatccaggaggttgaggttgaggtgagctataattgcacactgtactgcaccctgggcaacaaaagagtgaggccctgactaaaaaataaataaacaaataaaataaaaggatggttaggatttcaacaggagtctagtaaagatgcttaatataataaaaaaattatgtcaaatattacagccccagattgactgttcagtcaccagttgtacaaattcagccagattacttaatccctctgattgtcagctttctcatctataaaatgggaattgagtaatagttatcatagaaggttttaggaagatgaaatgagacactgtgatatgaacatgctttgtaaagtataaagtattgtataaatgttagtaaattttatagtaagtaggccaggcatggtggctcacacctgtaatcccagcactttgggaggccaaggcgggcagatcacctgaggtcaggagtttgacaccagcccgggcaacatggtgaaacctcgtctctactacaaatacaaaatttagccaggcgtggtggtgtgcacctgtagtcccagttattcgggaggctgagg

SEQ ID NO: 148490 - DNA, 463 bp, Homo sapiens
aagcagctgccagaacagaacagtgaactcaaatcccttggagccatggccttggagcagcacgaacgctggtggctctgtccagaacatgcgaccctctgtaaccaaagccagcaggttcagcagaatctctgtcttcacccaaggtgactgcattggcagcagtaaatgtgccaatgcaggaaggatctccaggccaggtatggcactatatgccccagaaatgtgcaaccaggtcacctcatcccagtctatcccgaaccttctcccttgttcagcacagcagcagcaggagcagcagcagcagcaactttgtgctctcccacccacgcctcagcaacagccacccttgaataatcacatgatctcacagacagatgacctcagcaagtcctttagacaaatgagccctagctgccaaggttctactaaagcaactgactgatcggcagctctgttccag

SEQ ID NO: 148491 - DNA, 332 bp, Homo sapiens
tatcagcttcttattgggtaaatatgtgtgtatgttgtaagatttttctgaggctaccaggtaagtcatgtaaaggatttaaaacagattctcagtatatggtagctgccacagatgggattctagtctgaatcaaacacaatttgatataatgttttgtcttccttacaagaggtaaactcaagacaatcatcatggaataaagccattttccctttttcatgcttctccacagtgcatgttatctctcttttggcaaagaaaattccaagggtgagataatcatttatacggccattcagtgttttttgcagtgctcccaaattcgggtg

SEQ ID NO: 148492 - DNA, 724 bp, Homo sapiens
tatatggtcactcagcttgcaaggggagaagcctggatatgaactgctcttgtctaaaaaatacccacctctgaggctgggcgcagtggctcacacctgtaatcccagcgctttgggaggtcaaggtgggaggatcgcttgagctcaggagttcaagactagcgtgggcaacgtatcaagaccctgtctctccaaaaaaatacaaaagttagcctggtgtggtggggcatgcctatagtcctagctacttgagaagttgaggtgggaggatcgtttgagcccaggagattgaggctgtagagagctatgattgcatcactacattccagcaagggcaacagagcgaggccctgtctcgaaaacaaagaaaaaacccacttctgagcaggcagtggttgctcatggccatttgcacaggtggggacagctcttcactgtttgctaggctggttcccactaaatgctgctgctctggccagagggttagagatagaaaaaggggctgaagacctcctcctagccctcccagccccaccatgtcttcctactcccccaggcctcagtcacagcagacaataaggatgccctaaccccttatccctgtcctgaggctctcatgttcttgaagatctcctcctacctccccggcagcctcctctctacctcctttgcaggcccctctgaataacagtgccctggccaatgcattggggtgcccattgtc

SEQ ID NO: 148493 - DNA, 297 bp, Homo sapiens
attttaaagataatggctaaatgcatttactgcatgttttattgagctccagtgaaatcggtcacatcttgtagtttgtcctaattaatagccaccccagaatgtaatgtcttctgttaaaaaaagagaaaacctgttcagctggttcagctgtcttaacctaaccaaattcatattttaactttgagtatggtaatgactaccaaattacagatattttagatactattttcagcttctaaaaggtttgggcattgtttaaatactattgagtaatgaagtgggatgaggggaaca

SEQ ID NO: 148494 - DNA, 423 bp, Homo sapiens
  misc_feature (353)..(353): n is a, c, g, or t
  misc_feature (389)..(389): n is a, c, g, or t
  misc_feature (400)..(400): n is a, c, g, or t
  misc_feature (419)..(419): n is a, c, g, or t
attgggccatctttatttttcaaattataatcagtaaggtggtgttaaaaccacaaatcaaataggaatatgtctaccagttaccctggatcattgtcttattcccagcaatcttcagcatgtcccctgatgtaattaaacagtttgtggagtttccctgttcggaactgatattcaaagttcagttacacaaaagaaagaccaacccagattgctgtctcacattctccctggcacagaaaaacatgcaaggacagtgataaagagtaatagacttaaaggttattgtcttccgcctgtctgaatccagtgctttcctccgcatgttgttgtctttctaaagaagataatgncaacctccttcatttttttttaccttgctccactgncttgggtgttnctcttccttctttccaggnacag

SEQ ID NO: 148495 - DNA, 377 bp, Homo sapiens
tgaacgcctccagtagcacagaggtttctacggcaagaagttgccccttgccagcctgtcaggccctgtgcttgctacactgtctagcccccagctctggtgggtgtgaggggctggcaccaaatatgccggtggcagcggtgccaaagcctccctcagaccctgagggcatgggtctggcggcagtggcaggggagagatcaagctcgcagtcctgaggctggtgagtctgagcaaaatgatatatttaacatcaaatatactcaaggactattaggattaagtattcaagatgaaggggaaagtgaaaccctctgagctgcagatgaggcatctcattagaagcagcgcttttctgttttctcaaagcctgactt

SEQ ID NO: 148496 - DNA, 256 bp, Homo sapiens
ctcaacgctttatacttctgccattttaagttataacattaccacaccactgctctgtccctcaccagcaacagcccatggaatctgtccattgtctattctcttaggccaatatcatccttccaaactggtcagcctgcttcctgtgcattctctatcatgcaggcagagtgatctttctaaaacttaaagccaatcatttaattttcttgcttaaaacacttcagtggttaccactgaagtataaagcgttgaa

SEQ ID NO: 148497 - DNA, 890 bp, Homo sapiens
ctgttgcctaggctggagtgaaatggcatgataattggctcactacaacctccatctcctgggttcaagcgattcttgtgactcagcctcccaagtagctgggattgcagaagcctgctaccatgtccagctaattattgtaatttttgtggagatggtgttcacaatgtttcccaggctggtctcaaactccagacctcaggtgatctgctcacttcagttttccaaagtgccgggattacagtcatgagccactgtgcctggccataatcttaattttagaaactttatttttgaatgtatatattgaatgtgttttatgtataaaggataaaaaatagaataaatctttgtagctgatgagaatcatgctgtgattactttttatatatcataatatgaattatataatattatataatatgcattttaatacatcatcttgtgatgtgttttaattattaaagttgaatagccccactccaaatgatacatgtattggaacttcttttgcaacaatttccctatcttgtatttctgaaaatgtaatcaaatgatttagctaattcataactctttcaaagcacgttttaaaattaggaaatggtccgggcatggtggctcacacctgtaatcccagcactttgggaggccaaggtggttggatcacctgaaatcaggagttcgagaccaggctggtcaacatggcaaaaccccatctctactaaagagacaaaaattagtgaggcgtggtgcgcttgcctataatcccagctacttgggatgctgaggcaggagaatcacttgaacttgggaggcggaggttgcagtaagccgagattgcgccactgcactccagcctgggcgacagagtgacacttcatctcaaa

SEQ ID NO: 148498 - DNA, 111 bp, Homo sapiens
ctgagagcagggagagaaccaggtctccaattgatgtagctgtggggattaaaataaaatgaacagaatccaggtgatatggtttgaatctatgtccccacccaaatctca

SEQ ID NO: 148499 - DNA, 527 bp, Homo sapiens
cgccatggctgactcttgaggatacacttcctctcctcccacctcggcctcccaaagtgctgggattacaggcgtgagccatcacaccctgcccaactgttcctttcttaaggggcttcaaaggtggggagaaataaaaagtagcttttcttctgggaaatgttacatgaggactaattcagtaaaatataatgtccctgtatcattcaatcttacagagtatttgagcagtctttctagctcccagttttaaagagggttttgataaatttgagcacttgtctaagaaagacagtgctcaaaggatatgggaagaattgtgaaaatatctgcatctctttatttgaagaaaaattctattgacaagaggagttaagtttatttcatgtggcttcagaaggcagaagttggattactgggtggaggcagcaggaagtagatatctccttaaaataagaactttctaacatatgagagtggaattggacaccttgtgaagcagggaggaccctgtgcttggagtcttt

SEQ ID NO: 148500 - DNA, 270 bp, Homo sapiens
tgcccacgatgcctgggtaaaagagaccctaaatggtcccagttctgggctgtttagactcagatgctgatggtcttaaggacctgttcatctccagcccagtgcctccctgacaaaggcttggtctaggaagagctgaagggagaaaccaagagtcagtctttgggtgcaactaaacctgccccaagtcacttagattttgagaacctaaaggatgctcagaaataatctggcttacctacccacttagaaaaactgtggtgttttttg

SEQ ID NO: 148501 - DNA, 187 bp, Homo sapiens
tcagaaaaattgaagttaatcatcattaactgttgggggagtagctaccaaatttgataaaaactcaaaaattcgtaataattcagaaattgagaatagcggccgggcgtggtggctcacacctgtaattctagcactttgggaggctgaggcgggcagatcacgtgagctcagaagttcgagacca

SEQ ID NO: 148502 - DNA, 421 bp, Homo sapiens
gcaagccggtgcagcgagagcgggctggggagaggtaaggcatgcagcctggctgacccacatcgcggagtatcgagcacacaaagcaccctcctccacggatacagaggcagcaaagacagcagccacaagacagcccaagggaaatgtgcacctgggagcttcccataacttctcaggtaaagaagtgatgtcaggcaaggaaccacagcccagagcaagcaagctcatcccaacctcaaactgaaatatgtgacatcaactaatagctctacgagaatgatccaagcactactcttaaaggtttctgaactctctgcaacgatcaatgttttcgactccctaaagcacatcagcaatttaaataaactcagaacaatttaacatcttaaatccatcagcctcaaatgtgatcgcacaa

SEQ ID NO: 148503 - DNA, 105 bp, Homo sapiens
aacttattctctgattgtttggctggctggtttgtagaatcacttgagaccccgataagaaaagaagatgaaccatgaactgcttttatttacatgtcagctgcg

SEQ ID NO: 148504 - DNA, 379 bp, Homo sapiens
gggaaacatgaatcagctgctgcattccgttcactcattcactcattcgctcgttcatttaacaaatgtttactgagcacctgctaggtgttggctgccgttctaagtacaggggacccagcagtggacagaatgggcaaaaatgccaaagctctctatactccttcattctgtgagcactgactgagcacctcctgtgtgctgggggcgcaggcagaccaaggccctgcctcaccaagctgatgttctgatggggagagagtaaagaagtggacaaataaggggaaatcaggcagccatcagtattgtgcagacaaaacagtgtgaagccggagtgcaggagggagggtggccttggggctcggtctgactggagggt

SEQ ID NO: 148505 - DNA, 365 bp, Homo sapiens
acctctcaagtagccggaattacaggcacctgccaccacacctggttaatttttgtattttttgatagagacaggctttccctgtgttggccaggctggtgcctctttttaacatggatttttaaaagccacgtgtatggagactattccttgttgtatgttttgcaaacattcttcagtttctctccagtctcgatactgtgtttttgtatggaagctgcaaattcttaccaagtccatcctgtccctatttatattttatgttttccattttaatctggtaagacgggcttcccccctaatatttttacctgcttttcccttttgtgtgggcagagaggagcccaagggggtggggagagggc

SEQ ID NO: 148506 - DNA, 191 bp, Homo sapiens
acgaatcgcttgaaccgggggggagatagcagtgagccgagatggcgtcactgaactccagcctcggcaacaagagtaaaactccgtctcagagctggcgggggtaacctcccaaaaggatttttatttgtaaatcatactgagatttctgtttctcgtttctaattcattaccttttcttttaatttcct

SEQ ID NO: 148507 - DNA, 417 bp, Homo sapiens
gtgaatcagaggtggcagagatgtgtatagacctctgcctgagcatggtctatggttaaccacgtcagatccatggacttctagctcctccctaacgttctccaaggagaaacccttgaagcaacatcctgtgtagtctgttgttctattattgaacaattcattctgttaaaaagttctttgtgaaatcggtggccccttatatactgaggggggtcccagaggttccacctgccttagaatatctcattgtcacatgcttcccttgtttcttctcccctgcttgacatggtcctaatgttcacacctcctacctgacaagtcctccatgagcaccttgggtctctctgctcacctccagacctctgcactgtacagcacaggatggttgtgaggacctgcaatcccacagtttct

SEQ ID NO: 148508 - DNA, 369 bp, Homo sapiens
aagctaggagtgactccttgccaacagcaagccaaaaaacagggatctcagtcctaccactgcaagaaactgaatcctgctgacaacctgaacaagtttgaaagaggactctgagctccagatacgagtgtggtctggctgatatgtttgttttggccctgagcagagaaccagctgcactctccctagacttctgatgtatagaaattgaaataggctgggagtggtggctcacacctgtaatcctgtaaaggctactcaggagagtcacctgaacctgggaggtggaggttgcagtgacccgagatcgtgccattgcattccagcctgtgcaataagagcaaaactccatctcaatttacaaaacaa

SEQ ID NO: 148509 - DNA, 352 bp, Homo sapiens
gggacaatgaggaaggcatttggctggaggaacagcgggagcaaaggcagagaggcgtgaaattgcgtggagagagccctagatctcagcaataaagctgcggcccaggcagggcagggaggggagtcctgatccataaaaagctgtggccatgggtgagcagaagaaaggcaggaaagggctctgcgacgccacactcagtctgggtggctctccccagccttcgcccaggctggtactggaattgacagttacgggatcctcagcccagccctcagccataccacggccagagaatcgggcagggcctccgaagccaaactcatttctgtgtctctcagccccttctgtt

SEQ ID NO: 148510 - DNA, 231 bp, Homo sapiens
cttctgagaaggtgacacttaacagtggagtgccccaaggctcagttccttagacctcttttctatctatatcccttacttagtgttctcttccagtctcatgattctatgctggtgactctttgtatctcaacctggacctctgccccgaattccaaactcatgtatccatttgcctacttggcatcaaattttcatgtttcaaccctaatgctgcccaaactgaattct

SEQ ID NO: 148511 - DNA, 672 bp, Homo sapiens
tgggacggagctcgctctgttgcccaggctcaatgttacagtgaataagagggacaatgagttagaaaaccaaagagttagaagcaactctgaagctagaacacaatctagagctctttccaaggcattaagctgccttgcaagggaatctggaaacaatgaaatacaactactatttataaatgtgaacacaatggggacagacacagaaatgttttagggcagtttagaaaagttagcattacgttttacaacggaatttgtgaatctcattatttaagtagggaaactgaggcctagaaactcacaaggccacagttatcaagtggcaacactgatcaggaagtgaatccatgtctgtctgtacttgttctcctaaccacatatactgtctggaaacatactcagctagagggaatatagctgtgttttacaaagtatgaaaaaataacactgattttgtcaatttgactatgggctaatgaatcttaaagaggaagtacacgttactgagaaaaaatacatagcttgaccagcctctttaaagctgaaatttctgtatctgctggaatattctataatttgaacgtactaacgaatagattaagagaagaaaactggtttcttgtcccaggttcaccattaaccatttgtaccattttgagaatgtca

SEQ ID NO: 148512 - DNA, 510 bp, Homo sapiens
tcgagctcggtccaatcatccagtgtatcatcttattaaaaagtacaaagtttcatgaactttcaacaagactgcaaaataaatatgccaggtaggttgagcctatccaagtgaaaacaaggttatttgacatttagtgagagtcaatgaaaatatgaattatttcaaaggaattcatgatccaggtaggaggatttagatcctacggtatgttagaataaagctagtttctagcagattctgttaacagctccagactagaggggacggagtgtgctgctttccattctcttctctacttctgtcactggggagaagatacacggatcacagctctgagaagtgtgcattaaagcacatttgctaggctgagcactggaatggtgtgggctggtgtgaaaatgaagcctacgtcttcttggaccctcccagagcccttcacctcaagggttagacatctctccttctctaaactaacagcagcactcaatccctggtgtgtccgaagtg

SEQ ID NO: 148513 - DNA, 319 bp, Homo sapiens
gtatgccactaagtcatcttaactgaatggtttgaaagtaagaggtgagaaataccaagtagccttttctttctctctctttctttttgtaccaattaaattgatttggaaaaggagaagcccacattaagaaaatcatttatgcctgggtgcagtggctcatgcctgtaatcccaacactttgggaggccgaggcaggaggatcacttgataccaggattttgagcctgggcaacatagtgtgaccctgtctctacaaaaaataaaatcagctgtgcacacacctgtagtcctagttactcaggaggctgaagcacag

SEQ ID NO: 148514 - DNA, 337 bp, Homo sapiens
agttcgacggagactctccccgagaagccggcgggagccccggggagagtctcttttctctgtgagtgtcttagggaagagcattgagggtaaagagaacggcgaatgtaaaggccttgaagggtatgtttgaggaacagcaaatagaccccggagtgcagaggaaacgagaaaggtagaccttagtgatctgcataggtcattgtatggatttgggctatttactgtcagtgaaatggagagtactgcagggttctaagcagaagagtggtgatcatcaaatacttaggatgctcacagggctcgggtactgagggtgtacaggtgaattcttcca

SEQ ID NO: 148515 - DNA, 138 bp, Homo sapiens
caaatcatgaaaatgccagggttcacgccaagaagcaagaatgaaattaataacgaagcacatcttcagagaggtttatcactactccagcatgacccagccagtgagtagtgcaagggaatacaaatccccttggac

SEQ ID NO: 148516 - DNA, 436 bp, Homo sapiens
tttttttctgcggttggattattcatatatccacccacgaaaaaaggccttaggcattcctgtaaacttatatttcatgaagaaagtcagagtacttgttgcagatgcaatgctaggtcttcagccatgtgctatagaaacagaaggtgacaaatataaccaaggattgggaggagaaaaagaagaaagccaatttgggaaatgagactgtaaagtttataatgctactgattttcaaacattttcagaagcaatggaaagaagaatgcgaagaaaatgagtttattttccaaaatgctttttttgttattgttttgcaatttccctttgttaacatcatataggttatgggggtttctgttttgaaaaaaataaatactgcaccgtgtgtggattgctactcagcactcagcaataaacaagtcaatgaatgctc

SEQ ID NO: 148517 - DNA, 367 bp, Homo sapiens
ccttatctgcctaaagcaaataccacttaagctctaggaactttcctgcaccctccttccctgcccatgtagatgtatgtgtgagattttttggcaagtttctctaatctggaccgggaggatggaagagcaaggaccccatttcagtagtgctcggaaaaaggatgcgttgaatttctcagcccttctccacctcacataaacacccgcccaccctgcacccggatcctgggtcataattttaataaatgcagaaagagaaagtggttggaggatggagcacatggaattcaggagaaaacccacaaagacccctgcatgtcagacacaccctgtcccggagcgtggtgtccccttgagctttaat

SEQ ID NO: 148518 - DNA, 513 bp, Homo sapiens
tggggtgggcatgtgtgagtgggcacgcatgcacatgtgtgtatgcttggtttcaatgatgacacttaagatggacttagttcttaagccactgtgtaaacttgttcagactctctacaaataaaaccactataacttttttttgacagatggaaaccaaacatcttaattttgcagattcgtatgcactgataactgtgagaaaaccattcccaaagccctatagaaataaatcattttgcccatctaaacatacctgagggatgggacacattactgtcagaatcagtggaatgatacccagacagctttgagccaaatatagggatcccaaataaaaatcaaggctcaactttttgtttgtttttaccatatcatgttgtgaatgagttcttccataaattttaatgagatgaaatttttggtgccatcaagggcccccaaacacctaattcaattcaactaataaaatgattagaagagagaaacaatactaaaagtatagattgacta

SEQ ID NO: 148519 - DNA, 268 bp, Homo sapiens
tgcaaacacctcatcttccgttagatcagccagcttacctggagcctgcaaaacctgaacttggggctcctggcctctattccattttttccatttctgtgagggttaagaggttctctgaaaaagcctgggaaattttatagtacaactgaaagggtgtgcactactttgtggaggctaaaagcttaacttgaaatgcatttttttttttttttttaagggctggtttggatttccaatgggctggatctaacgaaaatcctggggt

SEQ ID NO: 148520 - DNA, 234 bp, Homo sapiens
tgtggtgctggtggtagcagccagaaaatatagaagataaaagcattaattacatgaaatagtatattctgtattgcacaggagtatttttggttttgaatgaaagctgtgccctggaaaggatagcattcattttttaaggttttgagaaacactggatgactagtttggatatacattttggcacattctgtttgaccatccagctggagaataatatactaagcttaagca

SEQ ID NO: 148521 - DNA, 358 bp, Homo sapiens
aaaaaagaagtttttttatatcccctaaataaaaagaagaggtttgtagaatattcggctatagtaaatacacactgaattgagggaggaaaggagactaaggaaaccacaatcaagacaaatccaagggtcctgagaggaagggttaagtaggtcagacacaggtaacagaattccattcaaaacacaaacttctccaactgtttacatttcctcctattttcattccaaacctgctctatgcactgaccttctcacccattctcccagaaccattttacaaagacctctagtactcctgtaatcttaaactatggtcaaattcttgagccaggcactgtgctaaacattcataagc

SEQ ID NO: 148522 - DNA, 301 bp, Homo sapiens
aatttgtgatgcatcatattatgaggtttcatgatatttgtcaggataaggtcaaatgtgcaatccacactgtaaaaagcatagcttacttctatttatgtaattaattggagtctttaacagaggaaaatctttaagtgtttttgttgccttaaaaaatagctcacatgccctatttacaaaaagtaattgggttatctgagaacttacaacacttgagtatcattatatgaaggaagaaagtgatcctgaagaagctatatttattttctttattataaaacttgaactattttaaaat

SEQ ID NO: 148523 - DNA, 257 bp, Homo sapiens
ccgcgcccagccaataaaatttactaaaaaagcaaaactcttaatagctccagctacacactattcaagcaatctactctatcattacatgctaggcatttttcaaaatgccttttgattgatttttggaattctctaaaagcactgaactcttagaaaagtatcaaaatgataaccatctgaagactaagaaaatagagtccttaaagtcaagctgagtctgctgttagcctcctaaatgaaaggatagacagaac

SEQ ID NO: 148524 - DNA, 584 bp, Homo sapiens
ttcctctccttttacctcctgtcaatctagattaacagcgcagatccaggctaaattttgctactatcagtagtgattagtgtgagttgatgaaatcggattatacaggcggacctctgccttccccctcagcaagcaacaccgtgtgattagaaagcctgttgtccttctcttcaccggagtgaagcattctggaaggttctgctggagggaatatgctaccaagaaaacatttggccaccagaagctgctcagaaacaaatagaggtggaaggaaccatctatttcactttttactttttcttccaaattctgatgttcttttagattgaaaggtcagttacaacagaagaaatgcatgttattattttatttcattgagtttttttcttcctgggagaatggtcactttgaccaagagattgaggtgatgggaggtgacagagggagccagaaactggatgtcacttttcttgagcttctattatatgcacaaagacatttatatatactcagcctcaagcaatctgggaaataggtattaacataaacactttaaagaaaaggaggccaggctcagtggc

SEQ ID NO: 148525 - DNA, 752 bp, Homo sapiens
atagcggaacacgggacgttgcaggacattgattgcaaggactctggattttgctccacatgagctgagaaaatcttcagaggtttttgagtagagggaacgatatggtctaactgagatggtaataggatccaatggctgctgtcttgagaaaaacctaagtgtcaagggagatgtatatggaggccatcctaaaggtccaggtgacagatgacagtggtttacaccagggtggtgggtggtagcagtcgaggtggtaaggaacggctggactctagctggaatttgaaggtagagccaacaggatatgctgaaggattgtaaatagggtgtgaaaagaaaagaaaaaagtgagtcccaagttttggatttataaacttggaggctgaatctccactggctgagatagaggagtgtgggaggagccggtttggagggtgaggaggaggagcaagagcttatgaaagtgtcaatcctcatgggcggtgtattatttttaaaagtgtcttactacacataggtttgtcctgttccagctacagtgtgaggctgaagggacttatcaagtacataattcattgaaaggctacgaagggataaagaaaaataacagaaggtccctgcagcctctggcttagctggggagacaggatatggacccatcatgaaacattaacaggatgtgacagagaaccagctgtcaccagacagcacaggactgtgttgtcatgcccacaccatgtcgcttacca

SEQ ID NO: 148526 - DNA, 409 bp, Homo sapiens
tacttagcaaaatgtgttcagaatgagcctctgtggagagtcaggcgagtcatgtcccatggtagtttagcccattttaatggactaaatccaggtcactggtctgtcaagattatgtaactaatggcatatccaagactaagcacctgtctctgcacttctgctcctacttttgcccactccaactcacaattctttgcctagtggtacttcatgaatactgtagactatggaacactcctggtttttttttttgagacagagtctcactctctcgcccaggctggagtgcaatggcacgatctaggctcactgtaacctctgcctcccaggttcaagtgattcttctgcctcagcctcctgagtagctgggattacaggtacccactatcatgcccggctaattctt

SEQ ID NO: 148527 - DNA, 240 bp, Homo sapiens
cagtttttaattcacttagggtccaagccttcatatgaacttaatttggcttattacttcctcaaacatacttttgactagcgtatgaaaaattttcccaaaaactgatttccaaaagggtacaaattttggagactaatttttaatcagctaaccttcccccaaagagaataacaacagaaattttattgagcaccccattttatgccacagattataccaggcacattatatataatt

SEQ ID NO: 148528 - DNA, 229 bp, Homo sapiens
cccaccttagttttgtttttctctctcctttctagtttatggtagtaattaatggtagatgttgtgggttctccaggaaggtattgttaagataacagtttctgaagactgataagtctgacatgacagatgactacttgcagtcacattttaaacatactttgaactgatgaaaatcatttcaaaaaagagaggccgggtgcggtggctcacatctgtaatcccagca

SEQ ID NO: 148529 - DNA, 393 bp, Homo sapiens
caggtagatgctggctgggtacagaccaggggcctgttctgtcatctttgatgggacctggcccccaagtaagtcatctgtttgggtgtgccctacaacacaccaataacttttggggcctcagagaggctgtttttcaacaggacaagcaggctgcggcaggatgtgggtcagggctctggggacctaattcctttcctctcagtggtgcagtggctgtaccagggaggtgcagatgtgtttcctgttgcttttgcagcaggtgaaatggtaggccccagctggccttctcctctcccctatatttcctaccattgaaggggctatacctgcccccagcccctccgggggctccccacatagtccctgagattcccaggaaaaactcgccta

SEQ ID NO: 148530 - DNA, 377 bp, Homo sapiens
cttaacatctgtttctgtaacaacagcattaattgtgtactcacttttatcaacttaaacatcatccattccataaattttcatcaaaataccggttgaaatagcctacttatctaccatacagtttgacaggatttgatttgaatatttttgtcccttccaaaattcattttgagactggaaactcagtatgacaatattaaatggtagatgaccaggttatcaaggtggagccttcataaaaggcttgtataagcacccttatacaaggggtgaaggaacaacctagctagtcctcttgtatgtcctcttgtgaaggggtgggttgcccctccacacctgtgggtgtttctcgttaggtggaacgagagacttgg

SEQ ID NO: 148531 - DNA, 273 bp, Homo sapiens
ctaacgtttctagtaaaaactttaatgacaaagaataatactttacattttattgtactgttgggatagctatcacataaccattctctttatcaagccggtatttgcctatccataatttccactcaagtctttttttttttattgagacgaagtttcactcttgttgcccaggctggagtgcaatggcatgacctcagctcacggcaatctgcgcctcccaggttcaagtgattctcctgcctcagcctttcgagtagctgggattacagg

SEQ ID NO: 148532 - DNA, 543 bp, Homo sapiens
acaacccctgtgccaggttaagggatttatcattttgtcacctgataaatgattcttggatatctgcttgacaccagcacaattataagcagatacgacgatggaaaacacttcctgagcccttctgtttctgctgcgtgaagaagacactaatcatggtcacatataaggggccgtgatgtgacggtgtgaaatgctgtgggactctgcaggtgcagtcgcttgagcgagtcttaaagaacgagaagtgcttcgccacgtgtgtgggggattatgggtattccgggcagagagaggggaggtgcaaaacaagagccacaggacggacccaggaaccctcagaggactgcagattctccacttgagcgaaagcacagggagctcatatgatgaaggtcagtggggaccagatgacaaatgccccgcattcttcctgcagcaagagggaaatgagtgaaggacctgctctgaaaggaccaccgtaggagaactgggagaggtgaccttaaccctgaagctattctcagtcttgaaggaaccaag

SEQ ID NO: 148533 - DNA, 391 bp, Homo sapiens
caatcaccccagaaagctccctcgtgttatccctttgtcattccattcctctcctacccctaattcctaacagatcacgaatcattgatctgttgtctatcactatggttttgtctttcagaaaatttaatataaatggaatcatgtagtatgtaaccttttgagactggcttcctttcactcagtgatatggtttggctgtgtccctacccaaatctcaccttgaattgtagtaatccccacatgccaagggcagggccaggtggagataattgaatcatggaggtggattcccccatactgttctcatggtagtgaataagtctcatgagatctgatggtttgataagtggtgttcccctgcacaagttctcttgccagcaactgtgct

SEQ ID NO: 148534 - DNA, 221 bp, Homo sapiens
cctggttgacttacactctttggagtgctgactagtatagactctcccaatgctgccttttggatgaatcctgtgatgccacattttccagccttaggacaaatgataacctaccctgtagtctgtccatgctctggagaccctgctggtcttacaagatgaactggacaactgctttcactgataggcctgaaggaaaagggttggaactgtcaaggttc

SEQ ID NO: 148535 - DNA, 429 bp, Homo sapiens
acataaataaataaacaaacaaataaataaagttggcagagtatatagtctgaaggggtttgaggaaaggggattcaggtgactgagaagttccgatgggagaagtaggatccaatagagagaacagagaggcctcacagtgggaagaaaagactgccagcccaggagtcagggagtgaatccccattcagaatgaagagccacaaggaagaccttccaacccaggaagtattatacctttcaaaagaaggctgggaccttaaaaatcaaaatctgtccttaccagctaaaataaaagtttttctacagtcatggctcaggagtttgactcaccagtagatccccaatcagccagtcagaagacaaaggctgcaaagttgcacattgagagtcctgggtcagaggcctgtggcaccacaaccattaaag

SEQ ID NO: 148536 - DNA, 465 bp, Homo sapiens
tgtttcaggaaccgcaggcctaggcaggagcacattcaaagtaaacagagtgattctcctttctagaaagaaatgctaattccctccaatccagtaagtctacgggtaaggcaaaggtcgaacagcaactttttaaaagaagcaaagcctgctgtctcctttggaacacagaaaactgttccagcagctgggggaaaagtcccgacgctgggcacagggctagagacgccctgctacaaaacgcttatgcatgaagagctaatccttgtgccaagtagacacggaggctggctgagtgaagatgggctggagaattaactctgcatcacacattgaacaggtggaactggccaggactcccagctctccaacggtgagacggacacccaggtggacaaggtggcggcctctccacatgcatatgccgagccccctgtcccatcccaatgtaacgactgatggttg

SEQ ID NO: 148537 - DNA, 156 bp, Homo sapiens
ttacccaaagaagctggagttaagattcatttgttcattcaacagttggtcagtgtgttcctgctttgtgccatataccaagctggcatatggtaatatagtcatgagtatgatattggcctttctacaaggaattcagtggggaacacaaacatt

SEQ ID NO: 148538 - DNA, 409 bp, Homo sapiens
gagacgattagctctgggaacggctcgttctggcaggacaggctgagttcagaagcagcctcctgcaggaacatttgaccaatggctcggcaaagacctaacctgcacgtttccctgtgctgcatgtgtcatgtgttcagcgcatgtagctccagggctcgggacttgtttacttggtggaagaggcagcggacctgcggagtcaggccatgtgattgttggctctttggctgatcatggacagctgacccgccggactgcacacactgccatctgctgccaggggtctgaaggtagccaagggagggtgaaggagagtattccagaagagacaacagcttaggcaggcaggacctcgccatggaggaaggtgctttctgatcactgcgggacacctgtgtgatagctc

SEQ ID NO: 148539 - DNA, 514 bp, Homo sapiens
atttacttgtttgcttatgctgcctcccattctgatttttatttttgtaatatgtagaataataacatgctttcaaaagtcaaaattatacaaaaggcatacattgcttttgtatcccttccatgccatttttcttcagttttcttaggtaaccaacttaaatgttttctgtcttatccttcccatttcttttttttgatggtatctgtatgttttatttatttatttatacaaaagatagcgtactatatatactcttgcactttgctttttttcctacttaactgatatctcctggaaataatgccctatcatgccaaagagatctttcccattcatttattttaattgtagtaaaatttacagaatataaaatacaacttttttttcttttaaagactgaatttggctcttgtctctcaggctgcagtgagccgagatcgcaccattgcattccagcctgggaaacagagtaagattgtgtctcaagacaaaaaacaaaagacaaaagaaa

SEQ ID NO: 148540 - DNA, 561 bp, Homo sapiens
gattatagggagatttctctgatgtcaatgctaaggcagccagaattctggagctatgaaaaatagtaatggtattttttttctttaaagtggaacatgagcctattaatatgcccagtagcatttgattggggtcctgaaataaaggagcccttctagggatagacttcacatattgaagtactctgtccccaaatttaattatcttagggcataactacaatatatgatagaatgtacccttttatccacagcctccagcaatttgctgagatggaaaggtggcctattattgaatatatctccagaaaaaaagagatttcataaatttaatcaatagtacattccagtagcttacaactctcagaagcatcacggtctcccttgggcactacctataatcctctggtcataatttaaaccaatttcttttcattctatcctctagttgccatctgcctcccatatttctctcatccttcagctttatcttctactttattttgtcccttcaacctttccttaacagattctgcttcctaattcttgaatcattttcac

SEQ ID NO: 148541 - DNA, 309 bp, Homo sapiens
cagggccaaactatcacaaatcctatgcaaaaccttgagcacagctaactggccttctgtttagtctacatttctctatccagtcatctgagaacatgtaaagcttcattacattcttcatcaaaagttagacatactctgtcaaagtcattcattttcatgatatgcctatcagtctagaaaactcatttttaaaaaagggggaaagaaaaagacacaataggttgttgcacctgataataggtgggacacacaatgggcttctctaacccattaagtttgaaagttaattcctatctttgcttagaa

SEQ ID NO: 148542 - DNA, 424 bp, Homo sapiens
ggtgtgtgcccaagagaacttgaacaggtgttcaaacaaaacatgtacatgtgaggcaggaggatcgcatgagccccagaggtcgaggctgcagtgagctgtaatcgtgccacttcactccagcccgggagacagagcaagaccctatcttaaaaaaaaacccacatggacatgaacgtccatagcagcactactcacagccaccagaaggtggaaacagcctacatggccatcagctgacaaatggataagcaaaacgtggtccgtccgcaagatggaatactactcagccataaaaacaaacaaacgcctggcacagtagctcttgcctgtaatcttagcactttgggaggctgaggtaggaggattgcttgagcctaggaattcaagatcagcctgggcaacatagtgagaccctgtctca

SEQ ID NO: 148543 - DNA, 428 bp, Homo sapiens
tctaccaccgtcttcccttcttttaatgagcatgttgtcctttcagatacataaatacaactccagaccattttctatttgcctaatgatggattcacctcttacttttatcaactaaagtgaaaaaaaaaaaaaccaaacctataccatctttcctaaacaaagatgtttctcttgactcatctcaaaagtctagtttttctaggattggattggtaccaccgagtcagtcacattcatacagctctccttgaaatcagttccatcactttgagtcagtcaatacttgagtagtaatgtctgtgaaacagacttcttcccttcacaaaactttagctgagaaccaagtggcatcagttctcatctaatcagctagaagttaaatagccactgattaagtttcatgggcttaaaataatttgtaagaa

SEQ ID NO: 148544 - DNA, 557 bp, Homo sapiens
caattaatctcagctgagatttataacctttccaaacagcaagatgcaagacagaaaaatgctgctccaaaagttgctgaacttcttgcctatctagaatgaatgtatcaaatatatgcaggctagcactggccctgggagagaaactgaaataaaagagactccgaagtgatcaagcaaatgatatactgctgctttataaaaacattcttcagtttcatgtgtgttccgtctctacatcattaactgatgctcaaaagctataccttctcccagcactttgggaaatcgaggcaggcagatcacctgaggtaaggaattcaagaccagcctggccaacatggtgaaactccatctctactaaagatacaaaaattagccaggcgtggtggcacgcacctgtagccccagctactcagaaggctgaggcaggagaatcacttgaacccaggagcaggagttccagcctcaccaacacggcaaacctgtctctactaaaaatacacaaattagccaggcatggtggcgcatgcctgtaatcccagctactcgggagg

SEQ ID NO: 148545 - DNA, 299 bp, Homo sapiens
cagtgttggaattacaggcgtgagccactgtgcctagctgcattgcagtattagaacaatactgttcttttaggatggattcaatgacctctaccaagcagacaatgaagaaacagaggtgtatatttcatgttatttaaaaatctacttaggtcgggtgcggtggctcatgcctgtaatcccagcactttgggaggccgaggcgggcggatcacaaggtcaggagatcaagaccatcctggctaacacggtgaaaccccgtctctactaaaaatacccaaaaaaaaaaaaaaaaaaaa

SEQ ID NO: 148546 - DNA, 399 bp, Homo sapiens
tggaaaaatcaaaggaaggtcttgttaagatcaaagagtaagtctagaagcagaaatgagtgagagaaatggaaagttgaagaggataggatactagaatttaagtttctggaggtggagtaatttgaggcaatcaatgagatccaagattcatccaagaatgggggtgactaaagttacatggaggtcatagggttgacaaggtcaaggagctgttggatgggttatgtacatggacattgtggtcactcatggtgattgtgggacccgaggtggatcggggccagtacgatggtagtaggtcaaggaagagggctgtggtttaatgcggcagcctgaaattcaacagaagaaaagtttttacttgagggcatagaagcaagggtctgtagaaggcat

SEQ ID NO: 148547 - DNA, 203 bp, Homo sapiens
cgatgagtagaaacgcaccaggttcttgaaataggacgctggacaggaaataatttctgttgccccacttttaaggaaaaattctacaaacaaatagagctctttatcaacagttcagaagtaaaggaaggcattttaaaagggtcaatcagatgtagactttcaatcgtgtttgtgccaaggacagagcctcaagcgtggct

SEQ ID NO: 148548 - DNA, 614 bp, Homo sapiens
accacactcagctcgagttttatagttttagctcctgtatttaggtctttgctccattttgagttaatttttgtgtatagtgtgaagtagcatatagatatccagttgtcctagcatcattatttgatttgtatgtggatatccagttgttccaacacatttattgaaagattgcctcttgcctaatgaatatttttggcagttttatcaaaaattagttgacaatataaatgtaagagtttatttctgggctcttaattctattctgttgatctatatgtctttctttatgccagtaccacactgccttgatggctgtagctttgtaacatgttttgaaattgggaagtgtcagtcctccacctttgttctttttcaagattgtatcagttattttgggtcccttgcctcccttccccttccccttccccttccctttcgacagagtctagctttgttgcccaggctggagtgtgcagtggcgcgatctcggctcactgcaacctctgcctcctgggttcaagccattcttctgcctcagccctgagtagctgaggaccatcgttgcaacgatggtcctcagcttctacctagaagctgatggaaaccgattt

SEQ ID NO: 148549 - DNA, 126 bp, Homo sapiens
attaagagtaagaacaaaatgctgggaggtaatagactatagtgactttggagcgtggacttggaatcaggaattctgctctaccactcctgagttatgcaacattgcacaagttatttcacttcc

SEQ ID NO: 148550 - DNA, 797 bp, Homo sapiens
gaaggagggaaaattccttggcaggctatgtagccctgctttagggctttgctttctggatccaccgcttttcttctgcattttattgtgcatactaaaaaggtgtgagtaggtcaccaaggcacctagtctcttgatgactgatcagctgcccccaaagcatttacattagtggccttatattctatgacaggaaggagttgccgtaagtcagcatttctcaaccccttcaaaagtttgaaattctatttccaaaaaaaatcatttttctctctgctactctatgcctgaaatacaacttttgaatattgtcgtgtgtttgctgtttggttttactacttaagtcttattattactactcctgattattatttaaaataatggttcctctcttcaggtaagtaaggaaacatcaaacctgggtgttacacaagctttacccacagggacactgttgactgggagaagggaaaagcatgtgtgactgcggtgtttattggaggggtttcctgataatattgatttcctaaaaagggggcatcccatcttgtgctggggaaattggaagcctggcaccacaatcccatggggattgaaacggctatccataaatctgcacagtgtgcctgattttgtccccattgagcaactgtaataagaattctatagacactgcaggagctgaatcaagactactgagcaaaagaaggctattgtcagtgctgtgtatgcattaaacacagtagattgccgggtgtgcatcctggaattgtacaatttctcaataaactaagtcc

SEQ ID NO: 148551 - DNA, 153 bp, Homo sapiens
ctgcctttgatgaaggagttaagaaggcccaaagtgactcatgtcacttcctttctgtggcctgcaactccaaaaggagaagaggagaggacgagggagggtgggaaggccattgctcctggttccggggtgcctctccccttgcctgctcag

SEQ ID NO: 148552 - DNA, 416 bp, Homo sapiens
aataatttttgatttatcatatctgaagaaagaaatgataatacatgatattaagtcattcaaaccatatgaagtttaggtaggagaaaaatgtattcttagtgggaacacaaagtcttgactccataaatagcaattccttttctctgagatctggtttatactttcattttttaaaagtcatccccccacagataagtctaaagcctgaaaagctaactttaatattgtaagttcagaggctgactcttggaggtattaaattaaaacttgccaatgcccttgttcagagctcttcacataggatgatattctgcacacacacgtgctccagttatttttgcttcaacatgcgagtagcattttgatagaagtgtatgtccagcaaagaattgctgctaactgattcaaaccag

SEQ ID NO: 148553 - DNA, 358 bp, Homo sapiens
acaacaagagaaagaatttatgagagaattggtcagggaaggaataggattgctcagcaaaggtcagaaaataggagacaacatatttttgaaaaatcaaaagcaaataaagatcacttcaccagactagcttagcaagcagaggacagtgcgattcaagtgctgtggattgtgtgcatcaagccagtcagcgtggagcagcccaggaaagattcatcacagtcatgcatttggaaagtcctgtggggggtgttacagagtgaggtgcttggtattagaactaaatgcctcatctatcataagggactaaccagacaatatttaaaattaatgaaaagccctgcctggccaacattag

SEQ ID NO: 148554 - DNA, 762 bp, Homo sapiens
  misc_feature (139)..(139): n is a, c, g, or t
  misc_feature (151)..(151): n is a, c, g, or t
  misc_feature (166)..(166): n is a, c, g, or t
  misc_feature (263)..(263): n is a, c, g, or t
ggatcactgccatagccagacactgaactaactgatgagaagtgggtgtgtcatagctgtccggtgtcttggggtgcaggaaaattaggtcaagaatcattgcgttagaggtagatgctagagtaagaaagaggatctntgcagcttcagncaaagcacctgtccngcagagcacgtttcccatctgttttttatttgaggtgggatctctgcagcttcaggcaaagcacctgtcctgcagagcacgtttcccatctgttttntatttgaggtgggttcccactctgtcacctaggttggaatgcagtggtgtgatctcggctcgcttgagcctgggaggtggaagttgcagtcagctgagatcgtgccactgcactgcagcttgggtgacagaatgagatcctgccttaaaaaaaaaaaaaaaagatgccaaattgcttatcatcccagtttatttttgtacagctatacagtttcgtagtagaaggcaatacgcaaaaattctgattgtggtcatactgtcctgggtgtgcagatgactacctattttctgtaattgtcaagaattaccattagaatcaggaaatattttgcaataactaaaacatttaaaaagtaaacaaaactgtacaaccacattataactaaacgagatgagtgattctcaaagcaggataaacccctctgcccagccaatgtggattcccacagggcttttccccaactccaggagaggccctcgaccctggtgaggatcactgc

SEQ ID NO: 148555 - DNA, 343 bp, Homo sapiens
acactccaatatgcgggatctctgggagggttgaaatgtctgcctagggcttcatagagggctgcatgctgaagagtgtgttgaagctggggttttgaagttcaagtaggagtgtaccaggtagacaagagtaggaagaacagtccgggcaaagaaggcctggtaaggcagataataagcaggtttaagatattttagcacctctctaaaaaactgaggccaaaagccaggcacggtggctcacgcctgtaatcccagcactacgggagtctgaggcaggaggaacacctgaggtcagcggtttgagaccagcctggccaacatggtgaaaccccatctctac

SEQ ID NO: 148556 - DNA, 448 bp, Homo sapiens
aacatggcaaaaccccatctctaaaaatgcaaaaattagctgggcatggtggcgggcgcctgtagtcccagctacttggaaggctgaggcaggagaattgcttcaacccaggaggcagaggctgcagtgagctgagattatgccactgtactccagcctgggagacaaagcaagattccctctcaaaaaaaaaaaaagaaagaaagaaagaaaagaaacagcgctagcaaacaaaacaaagtccctgtccttaaggaacttgaattctggctgtgaggttgacagtaggaggcagataatacatcaataaacatatgtcatgtcgggattaacactatgaagaaaaatgaagcaggataaggggtgagagtgatggggtactgtcctatctagaatgacatggaagtcccctctaaggaggggatcttgagcagtggcctgaaggaaa

SEQ ID NO: 148557 - DNA, 481 bp, Homo sapiens
  misc_feature (1)..(1): n is a, c, g, or t
nccagccggtacccagttacaacagctctagattttttggaagcaaattccagaaccacagagttgactggtcgatatgtctcttgagtttgttttaatctataggcttctcttcctcacctcatttaggtgaggaagcaggatttgggttttgtatgttcctctgttgccttttcctggaatttggtagttctgtctagagccatgctgtgcagtgtggaagccactggccacatgtggcaatttacatttaagctaattaaaatgaaaaattcagcttagctgtcacatttcaagtgattaatagccacaaatggctaatgactaccaattggattgtgcagataagaaaatttgtattgtcacagaaaattcccttggacagtactaacctagaggcttgatccaatttggtctttccaaggagctctggttccttttagtaggaaatggtgttagagacacaattcgaggtgctggg

SEQ ID NO: 148558 - DNA, 475 bp, Homo sapiens
cctttagtagaagccatcccagtaactgccgcctgccacactgcggcccttcccaccttctcaaccctctagttttcctttggtttccatgcctcgacactggcaattctcaccttttgacataccaaagtttaaaatgttaggtggaattaaaattaaccatcatccacctcctaaaagctttccccctaaacttcttttccttttttagacagggtctcactctgtcaaccaggctggagtacaatggtgccatcatagctcaatgcagcctcaacctcctgggcaacatggcgaaatcccatctttacaaaagataaaaaattagcttgatgccatggcaggtgccccatggtcccagctactcaggaggctgaagtgggatgatctcttgagttcgggaggttgaggctgcagtgagccatgatcatgccactgcactccagcctaggagacagaatgagatcttgtctca

SEQ ID NO: 148559 - DNA, 646 bp, Homo sapiens
ctcagaggatcccctcacgcttatacttccctactttgaaaaaaagatttgtatcaacactacaattttccatcattaagactaataacacagagcctagtatacatcaaggggaataaaaagaaaaatctcacattcaagtggcggctgggtgctgacctttgttccctttttttgtgtacgacttaactctttacaaaaaagagccacacgccacaccaacatgcaggtgaactccagctagtactagcaaagcatagcattcagttggaaaatttgataaatctccatgcaggataatgcatttcattacatattcactacattaattctagctacattaaaaaaaaaagaagaagaagaagaagagtagaattgaaagtgacattggattttagctatctggatacaaaggtcagttttcacagagtatgaatttgcatgtacaagcttttttgaaaaccagatcagtcagtcccaacaactgcacttaaaaaaactatgtggaaaataacagacaatgaactttttacttgtaccctaatacatttcattatttagatggtttatgtctgccgctagaaaggaaactggccccgattctaacaaatatttgttctgatgtgttaaagcagtgtttctggac

SEQ ID NO: 148560 - DNA, 396 bp, Homo sapiens
tgtgggaccaagacctctcactgcagagttcagagttatgaagaggtgcaaagtaccatatgggtcattaaaagtgatggcacggaggggaggcacctcttcttctactctctttgcatctacccctaggaataaatgggttccaagacccatttattcttcatattggggcacatgctatataaggataattgatccagtacatactctgtatcttggagtatggcatcctatccttgtagaatttgcctatgagctggtgttcagctgtaccttcagcaggttgttccaatgttctatcaagctgacaaattccaagtggtgaaaaaagtgatattattagtggatcctgtggatatgggtccactcctgcgcttggttttccataaaataggt

SEQ ID NO: 148561 - DNA, 333 bp, Homo sapiens
gtagctgggattacgggtgtgcaccaccacacccagctaatttttatattttgtagacagggtttcaccatgatggccaggcttgtctcgaactcctggcctcaagtgatccacatgcctcagcctcccaacgtgctaggattacaggcatgagctgccacacccagcatattcatacttttgttgttgaacttatgaaatcaatgtaaccccaaaaactgaaaagaaagagcttgtccttttcctccactgagtccacacagcctttcatttgtaaatgctcttgtttcacccccaattctgcatgtgctacatgggtatcagtggtgcatc

SEQ ID NO: 148562 - DNA, 592 bp, Homo sapiens
gaacctgtggtcccagctactcaggaggcttaggtgggaggactgcttaagcctagaggtagaggctgcagtgagccatgattataccactgcactccagcctgggcaacataagacccctgtctctgaaagaaaaaagttttcagagacttaataaaagcaagatgctaaaaacaaacaaaaaaaaatcaccttgccaaattagatataagggaacaataaaaaacaaaagtgggggtacctttaaaaatccagaaggattccaattcagatagctaagcaactattccacttaaagggacagaccatgaaaattatgtataattaactaaggatgtggtttatactaggatcatgaggaaagttaagttaatggacccgatatacgcaaggaaaagccctgacctttcatcaaaaagttggcaaataagctgggtgcggtggctcaagcctgtaatcccaacactttgggagaggccaagcgggcggatcatttgagctcaggagtttgagaccagactgagcaacacagtgaaaccccatctctaccaaaaatacaaaaaattagctgggcatggtggtgtgcacctgt

SEQ ID NO: 148563 - DNA, 409 bp, Homo sapiens
  misc_feature (208)..(209): n is a, c, g, or t
  misc_feature (211)..(211): n is a, c, g, or t
  misc_feature (216)..(216): n is a, c, g, or t
  misc_feature (224)..(224): n is a, c, g, or t
  misc_feature (234)..(234): n is a, c, g, or t
  misc_feature (241)..(241): n is a, c, g, or t
  misc_feature (243)..(243): n is a, c, g, or t
  misc_feature (249)..(249): n is a, c, g, or t
ccgacggggtggaaagtaagacagtaaaggggtctttccataagggagttgagacccagatgacccatctctccaggttttttgaccctggttggtataatgggtgttgattcctgaaagggtcaagagcaggcagtaccttttgtccaaactcctgaatggcttgtattttttttttttttttttttttttttatttttttaatttnntngggtntcctgtanagagggggtntggccangnggccgnggcgggtcttgaatacctgggctcaggtgatccttcctcctgggccccccaaagggccgggattccgggtgtgacccaccttgttgggcacgcaaatttttaatctcaactattgtgggagagagggggccccccaatgttggcccagtgtgggtgtcaa

SEQ ID NO: 148564 - DNA, 545 bp, Homo sapiens
ctgatgcatagcatttgtaaaatcccactaaaacaagcaccatgaaggtgttctactatggaagcagaggaagtttctttcgtgaaccttgattctgctctctgggagaaatcccttgtccttttataatcatggcattttaatctgcttgtgggagtttctttgttgattgtttgtttcttctccattgcctcatgtgaggtgttttagaatatgccttccttgaaggcagcttaagcttcctagctctcctcctgatagtggaatatgggggccctaagttgtttaactctcaaatggtcaaaggcatttatttattgttgattgatggactagttgattcattgtttaggcttatgatttctttggcaatccaatttccccagatgcttggtaggcaactcatctttttccttacggttgcctctttatgacaatagctatacatcattcctagaataattttttaactttatgtataccttggctttctggtccactaacctttctctttaaacctaatggaactaccctgagtctatctg

SEQ ID NO: 148565 - DNA, 272 bp, Homo sapiens
ttaaaaattcatctgttttgcttcaccctgcattcctaagacttgagaatgaaatagctcttcagtcaaggatataactagtgagaaaaggggaagactaggggagagaaaaagacattgtacatattctttaagccctagattacacggtatatttatagaagcaagtaagttggaatgtgctctcctaaacaaaacttgcgctattaagaacaccgtgaaaagtcattctcacataaatatcaaaatttcttttttttttttcctttttt

SEQ ID NO: 148566 - DNA, 830 bp, Homo sapiens
  misc_feature (40)..(40): n is a, c, g, or t
  misc_feature (68)..(69): n is a, c, g, or t
  misc_feature (83)..(83): n is a, c, g, or t
tctcttaatttccaccgctacacagacagggtctctgtcnccccagctggtggagtgcagtggcgcanncatgtaaactcaancacctgggctcaagagatcctcttgcctcagcctcccaggtagccaggactacagagtctttctgtcactcagcctggagtgcaatggcatgatctccgctccctgcaacctccgtctcctggattcaagtgattctccagccttagcctgctgagtagctggggctatagatgaagaaatggaggatgaaagaggtcacgcgccttgcccaagattacacaactactaaagggaagctgaagaggatgctacaggggaagaatactaggagctacctaaaagctacaaggatgacagctctgatgaatccagtgttataaaggatgagtacaagagagacagagacgagtgttgtcatgggattggttacagttgctttcctgaatacttcctccattattctggtaacaacaccctgattttcctctggaaaaccacccccacccccgaccccagctccagaggaaggagacatgaataaacctggtggggccgctatccttcagggggggtgacgccagaacctagctaactgactcgcgatccacagcgaccccgtttaggtagctgtatgatgcaactcgaaggggagaaccggggttcagaagataagggggagacgccgtgtcgggtcggcgagacgtaacgcgtacgcaatccactgggggacacagtggagactacctacccggagggagatggtagaatgctacacgtcacatgaggccgcgtaattgcgacgtgcg

SEQ ID NO: 148567 - DNA, 419 bp, Homo sapiens
ccttgggtgaggctctgggacatgctggcttcaggtaccagcacagctactggggtccaaaatgccaagtgtgctcttggggtccccagttccaggacttgacccttggatggcatttctggacctgccctgggccagtgggaagtccactgctctgaagggtgagtcccagaccaggtggcattcactacaagctgacttaagagcctttgggccttaagggaacatcagggctagtctggcagtactcctcatggtctggggtagtggtgattacagggtgaggctcctctgcctttggaaaggggagagaaaactgggaaggactgtattttgtgttttgagtgtcagctcagcagcaataccaggttgatgtctaagacttttgactctagttcctgacccccagatggcacctc

SEQ ID NO: 148568 - DNA, 408 bp, Homo sapiens
agccagagtgctgcccctcctcgccgatgctggggactctcctaaagcaggaaaactcactcctaatatggttgctttagttcaccgagatgctgtttccagctgtagcctggaaccaagggacttggatcctgactgacttttctgcctcaaactctaggaccatgaacaaaccagacaattaatatgaaatttcagcagcttaaggcacttgctagggtttttacagctgcttggtgatcctgatcctgataagctcagcacatcttggcctcagtgtgtttgtccaaagccgtcaaagctgggtatcccgtaagttggaagtggtgcacatactacaaattcagatccatcggcagtgttcgcccttcacagtcatctatgcccaaaactcaaacaatgaaaaac

SEQ ID NO: 148569 - DNA, 142 bp, Homo sapiens
ttcaacaactcctgggaaattaaatattaaaagaaaaaaaaaagcagtgtgttttgtaggacacatcactaaaaacaggtaactaagatttccctgcacagaggagttccaagactttaaactgtgtccaacatttcacagg

SEQ ID NO: 148570 - DNA, 428 bp, Homo sapiens
acaacagctaaatttgttctgctttcatccacatttacactttccttacaagtatgtgtaccactttattttcttagtagaccaggaagatagagttctaggaggcattacttctggcccaaatgagatcatatcaaaatcaagaaaatcaggaagaggggtgtgtgtgtgtgagagagagagagagagagaggaagagagagagagattccttaagtgtgcaaattttgagtccagttttacacatagaagggtgagatacaaacaaacattgcatgccagtggggattaaaactgtagagcttttggaaattggctcctccctgtgtttgccaaaaccagtctggtgctttgtgtcacacttccctgccatatgcaggcaggctggctcttttcctagggaaactgtttattttaaaacccacccg

SEQ ID NO: 148571 - DNA, 319 bp, Homo sapiens
ggaaatgactctgtccacagaagagcttattgtactgcacctcgtcaggctgcagacttgaagtcattgctgtgctgccatgggcatctctttccacttgtagctatatttagagcatgaaaatgctgaacatttccttcctgtttctttagaagacagagcggggagggatttcttgtattcaacacaaatccctcggataaccatatgaaaagataatgggaataataatttttcgttctttgtttaaaaaaatattaacgctgaagcttggactagaatagtctctattttttttttctgcttcatttttctatgt

SEQ ID NO: 148572 - DNA, 345 bp, Homo sapiens
tgtaagggcttccatgaggagcaaatgtgtggggccacagagctgccaggtcaggcctggcctgcagaggggcctggtgagggcgaccgacgtgcctggggacaggtaccccagcctataggaggccacacaattcaagttagaacgccttgccccaaattctggaactctttctgttggtgttggaggagaacacaccctccctctccaaggagctgggcctgttgcatcctggcagggctgacgtggcacctgctgccccgtgccctgggaagctgaaccagccggacgcagctcccggacgcagcagaaacggaataaccactcggcccaccggaagctgtg

SEQ ID NO: 148573 - DNA, 250 bp, Homo sapiens
ggcatgagccaccatgcccagccctctcccagattttttaatgtagtttttgaattgtttgaaaataaattgcagacctttagccctgaatatttcagtgtgtatttcctgaaaacaaggacatcctctttcattcccacaatataatcaaaatcaacaccttttaaaaactttgccatttgttctaataatgttctttgtggaaaaaatgggggtaaattttttttatttctggtcaagatccaatcca

SEQ ID NO: 148574 - DNA, 547 bp, Homo sapiens
ttgctgtgtggcgttgggcttgtcattcgcccttgctcaggctttgtttccttagctgtaaaggagatggtgatggtggccttgtgacctgatgccatgccctacacatgctggatcctcagcaaatgccagcctctctcctgtccctcaccgggtcctcctatcactgccccagggctggataagcctttgctgtgtgtggggggagggcactggcctgggagttcctggatgtgtagcagcatccctgatacacctgactgatgccagcgccaccctcttctagtcacagatgtctccaggcattgccacgtggcccctggggtgtaaaattgccccgggttgagaaccactgcacggtgagaaaagatgtggaaggacaggaaactggcagttactgggatccccgtcttggccttggacggagccagactggggttctgcagatttttctgggaagagctgaacagtaaatatgttcagcagcacaggtcacaatgatacctgctgaagcgactcaactgggctgttgcgtagaagcagccct

SEQ ID NO: 148575 - DNA, 320 bp, Homo sapiens
ttccttagatgctcagctatctgctggcagattggctgactggttagttgtttgaatggttgattgattgaatagttgcttaattggatggatgagtgggtagttggttaacaggtggatgggtagttgactggctgggtgaatgattggatgggtggatgggtgaataggtggatgggggaatgaatggttggctgatggttgggtaagtaggcagtagggatgttggtttggtcactaactggttaatgtcttccctactcactgcacaatctctccttccggggtccttgggacccaaccaactcccttgaccctga

SEQ ID NO: 148576 - DNA, 355 bp, Homo sapiens
caaagagttcttttttcagctccacagctggaccgtcttaataatatgacagcacagatgaagagttttaaaccttttgttggcttttctttcgtatctttttggcaagggcacatgaaaattaagtactgataatatcacaatgaaagcagctgtgtcattcagaccagtgaccattttaggtttgatgaacttttcattaccatcatccagggtctaaattctccattgtaaggtaaggattctccagggtggtggtgaggtgggttgagattgcatttgtatcatttgtgtttttatgaactctgaagatccatgtcgggtgaaggaaaggatgggaggagaaaaggaaata

SEQ ID NO: 148577 - DNA, 315 bp, Homo sapiens
tgggcccagtgacccaagccatgtgtctgtcattggtggaaaaacagcccctaggtcagcttctatggggcatggggtcctgctggcctggacttttactgtgggctggtgatggttgtgggtctgggggcagcttcctgatctcagaggacatagagaggtgatttcatttttactgcaatcatgaatgggctagttggtgaccactccctattttctcgccatcccagtcccctgagagcttggttattggttgtctgtcagctgccctgaagttctgccatcctcccataacgttggaccaaccctttcccc

SEQ ID NO: 148578 - DNA, 281 bp, Homo sapiens
agcagtcttcagaccagagtcagtaacccttagtcttatgtggaaatgagccaaatattatgtttgagcttccttccagctgaagtcaaaaagcagccaatagccaaataagttttctattaaacaccagtctgcaactaatagactaaaaaaaaaagcttcctgattaatatgttattcctgaaactgctacacatatacagcctatagaggtaggaaagcctgtttaggccatgctattatttgataacaatataaagctaattctggaaggatacaaa

SEQ ID NO: 148579 - DNA, 405 bp, Homo sapiens
ctgttcatttccccctacaatgtgcccttccctctccacctcctttgctacttccctacctctgcttgttctctctcacctagaccacttgacgggctcctaggtggttcctctgactcccacatatccatccccaatgctgtgctcggggtgctccaagtcataattcctattatttcactcccgggattaaaacctttcaacaccttctcccaaattacagaataaaaggtcggcttctctctctgctgcacaagcaagacttcatgataggctcacaaccatacctccagctactatctctaccaacctctttatacatctcaagctctggtgaaaccaaatggcctgcagctctctctccctccttcccccggcctttgcgtgtgctgttacctctacctg

SEQ ID NO: 148580 - DNA, 426 bp, Homo sapiens
ttgccaaggaggggtgagttatagtatgtaattataacatacagaagttttttgtatgctggtaactaattttaatttcctacatttttatgtagatttctgctattcttgtcctattttcctaatcatctttctatatgaatgactacataattctgagaataccaaaagagacagacacagaaccaatcggattcctttcttcttgaagcttctgcacagcaaaagaaactatcaacagagtgaacagacaacctacagaatgggagaaaatttttgcaacaatgcatgtgacaaagatctaatgtccaacactgataaggaacttaaacaaatttacaagaaaaaaaaaaatctcattagaaagtgggcacaggacataaacagacacttcaaaagaagacacacatgcggccaacaagcata

SEQ ID NO: 148581 - DNA, 410 bp, Homo sapiens
agctcgaattccgaattccgggcatgggatccaactgagtcactcattatggcagggaggggaaaagtcaaaggggaacatctggagctcaggcaaagcaatttgatcccactgcaacagagggcctggagggaggctttcagatggggtgcaagaacagcacatctgggaaaggggtccagcttgggcaaggggacccgcttcctcctcctcccatcccagggctgtaggtgaccttgcctgcatccctgcccctccctgggcctcagttttccaccagtacaatgaaggggaggagaatgttcctatcagttcaaacattgtgtgatttctttggtgagctgggtggggctgcgaggtctagaggttaagaagacaactggagtcacattgttccctggagatccttt

SEQ ID NO: 148582 - DNA, 858 bp, Homo sapiens
gttgctccccgtgttcaggtggagtggttaggggtaggagcagtgcacagagggcagagccagcctgggagggagttgctccccgtgttcaggtggagtggttaggggtaggatgagaggtaccatggccagcgccccaggaggaatgggctttagcttcaggccttacctgcagcccagcgcagcagggagcctcaaggaacatctagccactcctcttccaaccccggcagctcctcacagtgacacgcgatgttttcaaaagtccatctttccacaggatgtttacagcacccagcgggtaggcagtgctatttattaaccctgttgtactgatgaacaaaccagccggctcagggcagggggtgagcttgatcaagatcacagacaggaagtgacagcggggtctcagcccaggccatgcctgacacccacactcttctctggtgggggcgcttccacctttgtccctggaagcccagcctgacagcttctgcagtgcctctggcagccgcccacaaacccagccaggcaaaatcccagggtgccagacaccaggagaaatttccaggggaatttggccatttggctgtctcttcacttccctgaaaagccaaacagagaatggatttcttatcacactgtagcaaggcaatcaactggaaaagagacaggaggagaagtgtgaggaccaacagtcacagggacccaggaatcgtgttagccacaagtgatcttccagtatccctgtaaagagagctacaggcccattttacagaggaggagaccgaggttcagagagggtaagaagtgaattagccgggcgcagtggctcacacctgtaatcccagcactttg

SEQ ID NO: 148583 - DNA, 507 bp, Homo sapiens
atgccactgcactccagcctgggcaacagtctgagactctatctcaaaaaacaaaataaaataaaataaataaagtgatttgctttcatgctattgtgttgtttgagtcccttatctatttggatattaaccccagaacagatatatggcttgcaaatattttctcccattccatagcttatctcttcactgattgctgcttttgatatgcacaagctttatagtttggtattatctcatttgtctattttagcttttgttgcctatacttaaggggtcatagccaagaaaatcttcgcccagaccaatgtcatggagcttcccccacctatgttttcttctagtagttgtacaggtcttacatttaaggtcttacatttaagtctttaatccgttgtgagttgatttttgtatatagtgtgagatgagggtatacttttattattctgcaggtagatatccatccagttttcccagcaccattcattgtaaagactatctttttcc

SEQ ID NO: 148584 - DNA, 708 bp, Homo sapiens
gctcagcccgggtttccgccctcagtggccacttgctcctgtgaaagcctggggaccagcgagccagaccccttgttgctcggcatttctacgtctccttggtgagatggaaagctctaaccccctgcacaccgagccacgtggtgaccttgtgccagctcatccttgtcagcttctccctcctctggggaggagcaaggaaggggagctgagttacttgtagactcgctgagggtctgaaattcttgaagtgggtgagatgatgtttggaagtggactgctttcccttttgtgtagtttgctctttgtctctgcctaatgtctgtagccagcacaagctggttctcatggagataagcattcaggcctgtgactaacaaaaggggctgatgtgaaagagaacccaggatctcgaaatgcttctgtcatcaaaaatgattgccttgtgtttcatttaaggcaagcgtgtttaattctgtgtctctgcaaactgactcaaagttatattaattaattaaattaattaattaaaatacctggttaagtagcagcacccaaattcttaaaatttccatacaatggattttggaaattttaaaaatgaaaatatgttatttgtgatatgtaaaggattgattggtgtaattttgaaatgaatgaatacatatttttaaattcctcagtttaatttctggtatgagaaacatc

SEQ ID NO: 148585 - DNA, 338 bp, Homo sapiens
tcaagctcctcctcctggttccgctagaggcccaacacttccctcaaataaactcttctgcccagctcctgtccagctcacggcagccactgtcggcatgaaaattcctcaattcaagctctctaggcccaccttctgcctcccactggcctggacacgcccagctccaacctgacaatggtctctacaggcccagctcctgcctcccagccttctctccaggccctgaactttctcaagtcgacctcaccaggcccagctcatgcttctttgcagcctctccaggcccaactcctgcatcttggtggcccctccaggcccagcctgtgcctcccgtc

SEQ ID NO: 148586 - DNA, 499 bp, Homo sapiens
tcaagctcctcctcctggttccgctagaggcccaacacttccctcaaataaactcttctgcccagctcctgtccagctcacggcagccactgtcggcatgaaaattcctcaattcaagctctctaggcccaccttctgcctcccactggcctggacacgcccagctccaacctgacaatggtctctacaggcccagctcatcgggctctgagggacctctccaggccaagctcttacctcacggaggcttctccaggtcgtttctccctgtcttcaggcagtggtgacaggtcagctcctcctccacagtggcctcgtttgggcaggtcctgcctcttgcagcctctcaaagcccagctcctgcctctgagtggcttctgcgcacccaaatgtcctccagtcagcctgtcctggctgagctcctgcgtcctggctgagctcctgcctcctgtcggcctctataaacccagcctctgctgtatggtggcttcttcaggcc

SEQ ID NO: 148587 - DNA, 373 bp, Homo sapiens
gatcactggccttcagacatgctcagcctattggcccagtgtcaactggtttgttcttgggcagtattaacatccacagattgttgtccaacctcaggtgccaacctcaagagaaacggtcagcctaaatatgatttttttttcagacggagtttcacttttgttgcccaggctgtgcacggtggctcatgcctgtaatcccagcactttgggagatcgaggtgggcagatcacctgaggtcaggagttcaagaccagcctgaccaacatggtgaagccccatctctactaaaaattacaaaaattagctgggcatggtggtgggtggctgtaatcccagctactcaggagctgaggaccatcgttggggtac

SEQ ID NO: 148588 - DNA, 407 bp, Homo sapiens
ccactttggtatcttcctagaataatggtcagtgcctagcatttaaatagctgagccaagagcatgtgaaccttacctctgtcagcagtgtctttatcttccttttgaccgaagcatggtgaaaactaagccccatgcatgtcacagcaaacatcatttctctgagattgtcttgatttttaggctttagtgtaagggatttaaccttgctacttcttctgccatgctacgtagttgaattgctcactagatggagcccttttattaggaagctctaaaaagtcagcctgttaagtaaaaactcaggtaatcataatcaaagaggtaatccccgtagagctttaagaaaacaagctatggatgaagtaaatcagaaagctatcatataataaaaatacactcagatg

SEQ ID NO: 148589 - DNA, 399 bp, Homo sapiens
agtgctgaaagagtgagccaggacagcctttcgacattgaacaaggcaattcccaatctcttgagccctggctgtgttcactgaatggatctagtctctgaaaattcaccgacatttttggcttggcgctgtggctcatgcctgtaatcccagcactttgggaggttgagacgggaagattacgaggtcaagagatcaagactatcctgggcaacatgatgaaatgctgtctctactaaaaacacaaaaaattagctgggtgtggtggtgcgagcctgtagtcccagctactcaggaggctgaagcaggagaattgcttgaacccaggaggcggcggttgcagtgagccaaggtggcgccaccgctctccagcctggcaacagaacgtgactccgtctc

SEQ ID NO: 148590 - DNA, 217 bp, Homo sapiens
agtcagctgctccgggacagtaggtggaaagtcagaattcactaagatggggacttttccaggcaaacagagcagaagggtcatttagcacagtgtctggtacaggggaaatgcccaaaacacacagcttgttactatctagcgccagcctccccttcccttctcccttccaactgcgcatgggactctccctctctgactgtgcagcatgtagagc

SEQ ID NO: 148591 - DNA, 481 bp, Homo sapiens
tcttgctatgacattttccccatccccttcttgataagctataacatctgaggtttacagtgggatggaggcagagacagtgtggtttagactgcagaggaaagagcatgggttttcaagaaatacagatctagctttcagttctgattctatcactaactttgtggtcttgagtgagccccacatacttcctgaatcttctttttccaaatatgtgaaataggggcaataatatacgcaaagaagtttagtttggagaattaggtgacgtgatatattcaaaggggctagcactgtgcctggcacataccagaaatggaataagcactagccccttacctttcctgaaatcagaggcacacatgtgggctttggacattatctagtttattagaccagcagtgctagccagactagaccctagaaatttgaagccccaaatacaactgagggggcagagagaaaatagcattatctgacc

SEQ ID NO: 148592 - DNA, 2834 bp, Homo sapiens
ggaaagcatcagagctggaaagactggcactctggcctggactagcagcctctcccagcacagtccacagcaagccagtctcagatgtggctcgaccggcctggcttgggccaaaagcctggcatgaatgtgagatgttagagctgctgcccccatttgttggcctgtgtgcctccctggcaggccactccagtgcttggcaggcttacctgtcactgtcatccacagtgctgggtcctgcacctgggccagggcctgagccactcagcctcctccagaagctgatcctgtggcgcgttctgcgacctgagtgcctggcaggtgccctggcagacttcaccactagcctcctgggtcggcccctggatgaaaacacgtatgctcccaccatgccctttaaacatagtcaggctactcagcccatgctgatcttgttgccaccgcctggccacccctcagccactctgcatcctctgactgtcatccagaaactggctgccaagtatcagcaggggcagaagcaactgcaggtgatagccctgggctctgaagcctgggacccagtctcagttgtggtcagcactctatcccaggctatgtatgaggggcactggctggtgctggacaactgtcatctgatgccccattggccgaaagagctgctacagctcttgctggaactgttaggcagagccaaggtggttgcagacctggaatcagaacagcttttagaccaacctgaaagcaggaatgtaagcactgttcacagagattttcgtctttggcttattgtgcctgcagagtctagtgcttctttgccagctgtgctgactcagcactccatgcctgttttctggaaccagtccctggagctgggccatgttttgattgacagtgtggagctagcccagcaagtactctacatgcaaccccccacccaggcactacctctgctcctcctccatggcctcctgctacaccggcagctctatggaacaaggctgcaggcacacagggggcgctggagtcaagtgactctaacccaggttcttcagacccaagaccagctgtgggcaagtcttagcaatccccgtgctgccatgcaagagctggctggtgagacccttcctctcccccttggagtcatcagcccccaggagagcctggaagagggtgggggtgggatacaattcacagctttggttttggcggtggtggaaactgaaggtactggaactgagagactctaacctcatcttcagcttcagttttctacgggggtcctctgggggacactgaggacagggaggccctgattagcctcacacaagcctgcctgagccccagtagtgggagctgggtccagccacacacacctcagtctttgctggccacgctcatgcccctcccaggtaagcctcactcaggtatctgttttggggtagggaatagtgcaatgcaatgccaccccccacagaaatgtggacagcagtctcaataaaggtatatgagggggtaatattcatactgttatgggggtgatggcagtaaaggctcagaggaaggcctactctctcgagtctagggtggggagagtccatcttgtccctcacccctcacctctatccccaagagctaagggagctggatgcaatggcagagtgcaaggcccagatgcacctactgccctcaccacctgaaccccggctctgcggactgagtgagggcccccaagcctggctgttgcgacgccagagtcgcgctctcttgagtgcgctgcagcggagttcacccgtgtgggttcctgagtctcgaagaggcgcccagcttgcggaaaggcgactgcggcaacgcctagtgcaagtcaaccggaggctggagtcactgcaggatctgctgacccacgtgattcgccaagacgagtccgacgccccgtggtcagtgctggggccaaatgcacggcggcctctggagggcgtcttagagaccgaggctctagaactgagccagttggtgggcacgctacaacgcgaccttgattgcctgttgcagcagctgaagggcgcacccccgtgcccctcccgccgctgtgctgcggtggcccacgctctctggactggccgcctacccttgccttggcgacctcatgcgccggccggtccgcagccgccctggcactggctgcgacagttgtcgcgccgtgggcaactgttggttcgttacttgggcgtgggcgcggacgcgagcagtgatgtaccagagcgcgtcttccacctgtcagcctttcgccacccgcgccgcctgctgctggcattgcgtggggaagctgccctggaccagaatgtgcccagctcgaatttccctggtagccgaggctcggtctccagtcagctccagtataaacgtctggagatgaacagcaaccctctgcacttcagggtggagaatggtccaaatcccacggttccagagagagggctgctgctgatcgggctacaggtcctacatgcggagtgggacccaatagctggagccttgcaggacagtccttccagccaacccagccctctgcctcccgtcagcatcagcacacaggccccgggcaccagtgacctgccagccccagccgacctgactgtgtactcgtgtcctgtgtacatgggagggccccttggcaccgctaagctgcagagcaggaacatcgtgatgcatctgcctttacccaccaagctcacccccaacacctgtgtccaaaggagggtccatgtgtgcagcccacccctgtcttgagcccgtctaccaaaataaagttgtagtgattccatgaaaaaaaa

SEQ ID NO: 148593 - DNA, 552 bp, Homo sapiens
gagagttacttgcgctatgcgcccgatcctagttacgagtgaagagaaaggttacattttaagagagagggtaaggatgggtaggaggtaacccccacttcccacctgccacctcccagcttcctagccttgcctgaccagcttctgacgcccccaggtggagaatggtccaaatcccacggttccagagagagggctgctgctgatcgggctacaggtcctacatgcggagtgggacccaatagctggagccttgcaggacagtccttccagccaacccagccctctgcctcccgtcagcatcagcacacaggccccgggcaccagtgacctgccagccccagccgacctgactgtgtactcgtgtcctgtgtacatgggagggccccttggcaccgctaagctgcagagcaggaacatcgtgatgcatctgcctttacccaccaagctcacccccaacacctgtgtccaaaggagggtccatgtgtgcagcccacccctgtcttgagcccgtctaccaaaataaagttgtagtgattccatgaaaaaaaa

SEQ ID NO: 148594 - DNA, 1511 bp, Homo sapiens
ggaaagcatcagagctggaaagactggcactctggcctggactagcagcctctcccagcacagtccacagcaagccagtctcagatgtggctcgaccggcctggcttgggccaaaagcctggcatgaatgtgagatgttagagctgctgcccccatttgttggcctgtgtgcctccctggcaggccactccagtgcttggcaggcttacctgtcactgtcatccacagtgctgggtcctgcacctgggccagggcctgagccactcagcctcctccagaagctgatcctgtggcgcgttctgcgacctgagtgcctggcaggtgccctggcagacttcaccactagcctcctgggtcggcccctggatgaaaacacgtatgctcccaccatgccctttaaacatagtcaggctactcagcccatgctgatcttgttgccaccgcctggccacccctcagccactctgcatcctctgactgtcatccagaaactggctgccaagtatcagcaggggcagaagcaactgcaggtgatagccctgggctctgaagcctgggacccagtctcagttgtggtcagcactctatcccaggctatgtatgaggggcactggctggtgctggacaactgtcatctgatgccccattggccgaaagagctgctacagctcttgctggaactgttaggcagagccaaggtggttgcagacctggaatcagaacagcttttagaccaacctgaaagcaggaatgtaagcactgttcacagagattttcgtctttggcttattgtgcctgcagagtctagtgcttctttgccagctgtgctgactcagcactccatgcctgttttctggaaccagtccctggagctgggccatgttttgattgacagtgtggagctagcccagcaagtactctacatgcaaccccccacccaggcactacctctgctcctcctccatggcctcctgctacaccggcagctctatggaacaaggctgcaggcacacagggggcgctggagtcaagtgactctaacccaggttcttcagacccaagaccagctgtgggcaagtcttagcaatccccgtgctgccatgcaagagctggctggtggagaatggtccaaatcccacggttccagagagagggctgctgctgatcgggctacaggtcctacatgcggagtgggacccaatagctggagccttgcaggacagtccttccagccaacccagccctctgcctcccgtcagcatcagcacacaggccccgggcaccagtgacctgccagccccagccgacctgactgtgtactcgtgtcctgtgtacatgggagggccccttggcaccgctaagctgcagagcaggaacatcgtgatgcatctgcctttacccaccaagctcacccccaacacctgtgtccaaaggagggtccatgtgtgcagcccacccctgtcttgagcccgtctaccaaaataaagttgtagtgattccatgaaaaaaaa

SEQ ID NO: 148595 - DNA, 708 bp, Homo sapiens
gcaactgttggttcgttacttgggcgtgggcgcggacgcgagcagtgatgtaccagagcgcgtcttccacctgtcagcctttcgccacccgcgccgcctgctgctggcattgcgtggggaagctgccctggaccagaatgtgcccagctcgaatttccctggtagccgaggctcggtctccagtcagctccagtataaacgtctggagatgaacagcaaccctctgcacttcagggtatcttcgcgccgcccctcgttcgcggttccagtcccctcgaagtctctaattacacctcgcagttaccccttcttggtgatcttgcccccggtaaccctgctagcttctccgatctcgcttcaccacgacctcctacccgctaacccccacttcccacctgccacctcccagcttcctagccttgcctgaccagcttctgacgcccccaggtggagaatggtccaaatcccacggttccagagagagggctgctgctgatcgggctacaggtcctacatgcggagtgggacccaatagctggagccttgcaggacagtccttccagccaacccagccctctgcctcccgtcagcatcagcacacaggccccgggcaccagtgacctgccagccccagccgacctgactgtgtactcgtgtcctgtgtacatgggagggccccttggcaccgctaagctgcagagcaggaac

SEQ ID NO: 148596 - DNA, 2467 bp, Homo sapiens
ggaaagcatcagagctggaaagactggcactctggcctggactagcagcctctcccagcacagtccacagcaagccagtctcagatgtggctcgaccggcctggcttgggccaaaagcctggcatgaatgtgagatgttagagctgctgcccccatttgttggcctgtgtgcctccctggcaggccactccagtgcttggcaggcttacctgtcactgtcatccacagtgctgggtcctgcacctgggccagggcctgagccactcagcctcctccagaagctgatcctgtggcgcgttctgcgacctgagtgcctggcaggtgccctggcagacttcaccactagcctcctgggtcggcccctggatgaaaacacgtatgctcccaccatgccctttaaacatagtcaggctactcagcccatgctgatcttgttgccaccgcctggccacccctcagccactctgcatcctctgactgtcatccagaaactggctgccaagtatcagcaggggcagaagcaactgcaggtgatagccctgggctctgaagcctgggacccagtctcagttgtggtcagcactctatcccaggctatgtatgaggggcactggctggtgctggacaactgtcatctgatgccccattggccgaaagagctgctacagctcttgctggaactgttaggcagagccaaggtggttgcagacctggaatcagaacagcttttagaccaacctgaaagcaggaatgtaagcactgttcacagagattttcgtctttggcttattgtgcctgcagagtctagtgcttctttgccagctgtgctgactcagcactccatgcctgttttctggaaccagtccctggagctgggccatgttttgattgacagtgtggagctagcccagcaagtactctacatgcaaccccccacccaggcactacctctgctcctcctccatggcctcctgctacaccggcagctctatggaacaaggctgcaggcacacagggggcgctggagtcaagtgactctaacccaggttcttcagacccaagaccagctgtgggcaagtcttagcaatccccgtgctgccatgcaagagctggctgcttcagttttctacgggggtcctctgggggacactgaggacagggaggccctgattagcctcacacaagcctgcctgagccccagtagtgggagctgggtccagccacacacacctcagtctttgctggccacgctcatgcccctcccagagctaagggagctggatgcaatggcagagtgcaaggcccagatgcacctactgccctcaccacctgaaccccggctctgcggactgagtgagggcccccaagcctggctgttgcgacgccagagtcgcgctctcttgagtgcgctgcagcggagttcacccgtgtgggttcctgagtctcgaagaggcgcccagcttgcggaaaggcgactgcggcaacgcctagtgcaagtcaaccggaggctggagtcactgcaggatctgctgacccacgtgattcgccaagacgagtccgacgccccgtggtcagtgctggggccaaatgcacggcggcctctggagggcgtcttagagaccgaggctctagaactgagccagttggtgggcacgctacaacgcgaccttgattgcctgttgcagcagctgaagggcgcacccccgtgcccctcccgccgctgtgctgcggtggcccacgctctctggactggccgcctacccttgccttggcgacctcatgcgccggccggtccgcagccgccctggcactggctgcgacagttgtcgcgccgtgggcaactgttggttcgttacttgggcgtgggcgcggacgcgagcagtgatgtaccagagcgcgtcttccacctgtcagcctttcgccacccgcgccgcctgctgctggcattgcgtggggaagctgccctggaccagaatgtgcccagctcgaatttccctggtagccgaggctcggtctccagtcagctccagtataaacgtctggagatgaacagcaaccctctgcacttcagggtggagaatggtccaaatcccacggttccagagagagggctgctgctgatcgggctacaggtcctacatgcggagtgggacccaatagctggagccttgcaggacagtccttccagccaacccagccctctgcctcccgtcagcatcagcacacaggccccgggcaccagtgacctgccagccccagccgacctgactgtgtactcgtgtcctgtgtacatgggagggccccttggcaccgctaagctgcagagcaggaacatcgtgatgcatctgcctttacccaccaagctcacccccaacacctgtgtccaaaggagggtccatgtgtgcagcccacccctgtcttgagcccgtctaccaaaataaagttgtagtgattccatgaaaaaaaa

SEQ ID NO: 148597 - DNA, 125 bp, Homo sapiens
gtttaaattggtgatactggcaccagaaatgctagggtaggacaagaaatatcgcatatttttaaaccaaccaaacaagcagcaataaaggaatactgcatttttatcaagaaactctctgctgt

SEQ ID NO: 148598 - DNA, 460 bp, Homo sapiens
  misc_feature (136)..(136): n is a, c, g, or t
  misc_feature (178)..(178): n is a, c, g, or t
  misc_feature (185)..(185): n is a, c, g, or t
  misc_feature (244)..(244): n is a, c, g, or t
  misc_feature (253)..(253): n is a, c, g, or t
  misc_feature (338)..(338): n is a, c, g, or t
  misc_feature (358)..(358): n is a, c, g, or t
  misc_feature (453)..(453): n is a, c, g, or t
gagagaacatgtggcattttttctataaggaggatgtccacagaagtcttcactgagtgagttaaactggaacgagaattacaacagtcatcatctaaagaaagcaagagaatattctttcagatactgtgtactnatgaaactgctgactcagctggtctgaaggaccccactggcnctggctngtctgaaggaccctgctgatcacaacttgcctgaaggaccctactgacatcagctgttntccaaaggncgccacaagaaactgactcaccaaaaaatgcatcctgatgatttcatcccccttaacccgaccaatcaacaaccccaaatctacncagcccctttccctccatgnttcctacaaaactccagcccagaactcctcagggagatggatttgaaggtctcctcccttctacttgcttgatgccctattattattaaactctntgctaca

SEQ ID NO: 148599 - DNA, 201 bp, Homo sapiens
ttaaagcataggaatacagaagataatttttttagattttggaggtcacatttttagaacttggctatgaattggacaagggacacatcaaaaataatgaagtttctagtctgggtgacttgaaggtgagtagtatcaagtgtgggttaaagaagttagtaagtgggctgggcgcaatggctcacacctgtaatcccagca

SEQ ID NO: 148600 - DNA, 374 bp, Homo sapiens
cattctccacggagggaccagactgaatgacagcctccatgaggaagataggacacatgcttgtgatttgtaaaactctaagtagcctagagtggctgcaacgtcacggcactgtgggaaggagggggaaaggcattagacagtggacagctaggctgaaaaatgaggtaggaagccaagcatggagggcaatgatgtcagactataaaatgtcctttactggacacgtttgggcaaaagacctagtacaggtgaaatgtctatatctaaatgattttaagatgatgcctcttatatgtttaatattatattaagagtatcacctgtaatcccagcactttgggaggccaaggcaggcggatcacgaggtcagg

SEQ ID NO: 148601 - DNA, 782 bp, Homo sapiens
agacaagcatagtagatgaagattaactttttcctggaaagagtgcatgaagaaaaagtgtaagactatgcacttacaaaagaaccctcacttggaagagaaggagagaaaatggagacatagaacgtccattgcatctaaaaatgccacaaactttccaaaatcttttttgttccaatttattaatgtcagtatttgacttgatcctatagcacataatcccattcagaaaggcaacattgttataaattttctgcctacgaaatatttcctggtactccacagctaatttacccctggaaggggcagattttaaaatgtgctaatgtaactacaacttcagggcagctctttggagacaagaatttatttgagtcataaatatatttttcttttgtgacttattttccaaaataataagaagaaatcatcattaggggtttctccgctcaccaactgctactaaaaaaattatagaaagacattctacgtaaatataggtcatgacttgaactagaatgcagaaatgaaaaatcatgtggactgatgacagaggattgacatctaagaaaaagagatattttggcagaaaagttgtattgtatttaattgtgccagaaatatttggaaacattgttcacagttttttgacttgcatatgttggcttggagaagtaaaacaaatcaaagattattaaatacataaaaatgcactgaggaaaccaacacttcattacaggttaaacatgtgtttttactcttatgccttggtttttgtgctc

SEQ ID NO: 148602 - DNA, 343 bp, Homo sapiens
ttgagtatgctccgtcatcccgcaacccccgtggtgacagggtgggagtcctgtaacctgtcacaccagcatgtgagggccacatgccccacgagggggtgatctaaggctgagtttgggcagagaggccaaaaaaaaggtgccaggcagctcacggacagaggtgctcgtgccacacagaattctcagttctgggaatttttgtcaccaaaattgctgaggactcgggcagctacgtcgtctgtaccaggggtgcgcctgccccaacagtgcctgctgggccccttaaatccgccagcctcctagctgagccatcagtggctccttggtggcctcgcaggtc

SEQ ID NO: 148603 - DNA, 176 bp, Homo sapiens
agtttacagcagttctgtattggcttttactgatgtgtctgaattgctccacttaacccagaatttcccatgattttactaagagccatgtatttcctgctcaaggtactagttttcctgtttacatttctctataatatggtgtacgctcataaccttggacacacactcttcct

SEQ ID NO: 148604 - DNA, 548 bp, Homo sapiens
tggctaatttttttgtatttttagtagagacggggtttcaccacgttagccaggatggtctcgatctcctgacctcatgatccgcccacctcggcctcccaaagcgctgggtgggattacaggcgtgagacactgcgcctggcaaatatagtccatttttatcaccagataaagtttctttgtgcccctttccagtccgctctgcacctccaggcacctactgttctgatttatttcaccatagattagttttttctatcctagaaattcgttaaatgaaataacacagtatataatcttttttgttgatatttgtcactcaatgtaaggtttctgaactttatctgtgttgttgcttgtattaatagttcattgtttatccattctcctactgatggacatttggattgtgtctagtttggggctattatgaataaagctgctacagatattactgtacaagtatttttgtagacatgtgttttcatttttcttgggtaaatacctaagagtaaaatgctacctcataaggtggatgtgtgttcgat

SEQ ID NO: 148605 - DNA, 477 bp, Homo sapiens
tggctaatttttttgtatttttagtagagacggggtttcaccacgttagccaggatggtctcgatctcctgacctcatgatccgcccacctcggcctcccaaagcgctgggtgggattacaggcgtgagacactgcgcctggcaaatatagtccatttttatcaccagataaagtttctttgtgcccctttccagtccgctctgcacctccaggcacctactgttctgatttatttcaccatagattagttttttctatcctagaaattcgttaaatgaaataacacagtatataatcttttttgttgatatttgtcactcaatgtaaggtttctgaactttatctgtgttgttgcttgtattaatagttcattgtttatccattctcctactgatggacatttggattggttccatgtctttgctattgtaaacagtgtggcaataaacatatgtgtgtgttcggttgagcggaga

SEQ ID NO: 148606 - DNA, 276 bp, Homo sapiens
ttgggaagccaaggcaggaggattgcttgagcccaggagtttgaggctgcaatgaactatgatcgtgccattgcactctagcctgggtaaaagagtaagaccatatcttgaaaaaaaaaaaaaagaaagaaagaaatgaaaaaaaaaaaaagacaatactattacatttcagtagcagtaataacagtccctactaaacagtaaatgctaaacaaatattaatttccgcattttacaggtaagagaattgaagtagggatggattaagtaactttt

SEQ ID NO: 148607 - DNA, 133 bp, Homo sapiens
agaagtcagggaggggaaatggacacaactacaaggaaagatgctgcaggaggagaagccagggaggggaaatggacacaactacaaggaaagatgctgcaggaggagaagtcagggaggggaaatggacaca

SEQ ID NO: 148608 - DNA, 555 bp, Homo sapiens
gcctagccagtaaagaaaaagcaaactgattaaagtaattaattaattgaaattatggaattctggaactttgaggacaccccagaaagcacaccctggctcattttacagatgaggaaattgaaattcaaaaacatgaaataactgagccaaaatgaggagtccaaggaccctgaaccttgcctaatcattcaattattgcataataactgtgacccaggcactatgctaggtgctggtgacacaaagctgaataacatatggttcattcttttatcagctcacagacacgtaagagaaagattacgatgggatgtgatcaattcaatgattgagacacacagatgacattcagtaagtgaagaaggaagtctatgtgaactcaggctgagatagtcaggaaagctacctaataataataatatgggaccaattgtgcttctctccaaaatcatgttatgaatgtctcatttagccatgcgaggcagaggattgaatttgtagagttcttaaattggacaagggtcagaatttcgtgaaagacttgttaaaaca

SEQ ID NO: 148609 - DNA, 388 bp, Homo sapiens
aggtcatctccacccaggcctgcctcgccgtggccatcagtggtagggtgaaggcagttctgggctaaggacaacataggctagggcaggcaatgactctggtctgatatgacacacctagaatggctacacagtcttcctcactccctctgtggagttgaatgagcatcagcagtagctgagagcctcataggcttctgagcctcctccaaaacacacacacgcatacatgcagcatgcatgcaggtgagcttacacacacacgtgccacacatgcagagaaacagatgcaaacctgggtatgtggacagctggagtcaaatgacccagctcccatcttgtaagacatgatgcactgtggccaagacgtagagagtcttactcctgt

SEQ ID NO: 148610 - DNA, 505 bp, Homo sapiens
gtacatccaatagataaaaaagccctggttccttgcctcaagagtagtgacctggatttacttttcagagcaagcaatagagggaggcgaggctaactgagagcatgtcctcacttgtctctccacactcctccttccctatcctgcttccctttcctccgacatggttttcctgcagtatatccgtttcctcaataaactgcatgtaccgaattcctgtctcaggatctgcttctagaaaacttgacctaaaaccaagataggaaatttagaaatctcttcattattatgtttctgtctaattaagaaattctggtttcttcccttgttacttcagatcagtgaaatacagagtagcaaaactaatgaagaagcatgagaaattaaaaaggacaattcattccttcctcccaaactcatatccagtgtggtctattcctagcatccaggatctcctggagcacctccagtttttattcttttaaagctcaggccaatccaaaga

SEQ ID NO: 148611 - DNA, 248 bp, Homo sapiens
ctgttctaatatatgctcttccttctgagaacccatttactgtcacagatccaactttcttccaaaggcaaatgactccaaacccatatctgtgttgtgatccactgttaaacttaatttccctccctgggctctgacatctacttagctataggatacaattactaggatgaccttttgatattggtaacttatacacaaaactgagttccgtttctcctcatcctcacaaataagcaaccattctc

SEQ ID NO: 148612 - DNA, 290 bp, Homo sapiens
ggcagaaagcgtggaagacttggaaagtcaacatgactatgctcggacttagcactttatgccaggagaaaatggcattatgactcacggaaaagggaccttcagatgggaagggtacagacaggctacccagcaacagccctgtgaaccccgttcctctgtgcccttcctgaggaacctaaaagcgaatgagcctcagacaactgaccagggaaagggatgggaggagggtgtgagcaggtcagtctcctgagcccgaacatgtctcagtcggccaagacctgcacctg

SEQ ID NO: 148613 - DNA, 293 bp, Homo sapiens
cagctgggtgtgtattggagctggcatgaaattaaatgaaagtgaggtcaggttttggaccaatcccattcgttaaaacctcagagccttttggattactagtcagtgatggagatgtgttataaagctgcctctattagcaaaggacatcagatcagccagtcactgcaaactgggaggcttatctttttttttttctttttctttttttcttctttctcaccgtggccattaagtgcacttgttccacaaggtgggccttaaggctggggcagctcttgattaggagactg

SEQ ID NO: 148614 - DNA, 699 bp, Homo sapiens
taacaaaatgaagtttctgcagtaagttatcaaagcgaagagaagccattgtgaagatcatggcattgtatttcaggtagtaggaagatcctggtaattgtatcagggacagtttttacttccccacacccccacctcctcagaatgggggaatgaaagcattgtccagtaattgcaaagtatctggtggttattcagatgataatggacatttttacaactggagtggaaaattatttatttctgaaggtcgaatataagtgaccactgtactccttgttgaagagagatcttgctttatttcttgaagttttctgggcagttgtagaaaatggaatgtaaaggagcaactagaaaatctttattttacaaagctgagatcttgaaagagaagtaattataagctttgagaatgctgtattagtaaagatacactgggaaaacctgtttgcttgataaaaattcccattctttattaaaacaaatgcatgcttatttgaacacagatctaccaattttatattacaatatctaattagtattcagtcttagctttttttgcctatgagacattttcctattaatcataatggtgcttctctaccatatagcactatagtaaagtaagtggattatttagaagaaatgcattcttaacattatctcctctacattttttgaaatctagggtactgatgt

SEQ ID NO: 148615 - DNA, 355 bp, Homo sapiens
agggacttacacaaaaacttggcagagttaatatatgcttataaaactactgataaaaagaatattgctgtgatgatactatacttcactatgaaaaaaacctcgtaatatttccaactgggcaatgtttcacaatgtaaaaacattcaagagtaatgaataaaataattagtaacaaatgcaaagagatgggtaaatattgaggcatacttttctggtagcattcttgacataaagattgagtaaagatgaccttttctcttcatcttctatgtctcagtacttgctaatagatcctcagtagctattcactcaagtgaataatagtaagctttgcaacttccttcacacaggc

SEQ ID NO: 148616 - DNA, 529 bp, Homo sapiens
ggacgagaaaccttaaaacctggcctctcccgattatttgtattggatgaaatggaccctggccctactccctgggaagagaggggctcttgggacatgacttacctctaggtcttaataattacagacttgcaaagagcttgacttactgacacactgtccgccggagactcctacagggcgggcacacatctacttactcccacagcggcgccgggcccgtattcatgggatgcagccgcgtcgtcacacccggatctgcggaggtgctgggagacagactgccaacacaggggcgggcatccctcctgtgcagctcctggctgccctgactgcagccccctcccatacaggaaaacccgctggcaggtgtggacgaaccttggatcttggcctcttctctaaaacaaacaggacagtgcagggggtgaagaagcaccactttcaggtcacatggcccatgggcaattccagggaattccagtttgtgaagagaaagaaggcaccaaccgactcatctccagctgag

SEQ ID NO: 148617 - DNA, 531 bp, Homo sapiens
cactagacctaagaaggagactactgggcattaaactgtgatgctgaactctgagccactcacaatagtagtaactggatggggcttcatgctgcctcacttagggaggaagtgttatgttctgcaagccagaggggaaaggaccggatcaagccaacacagttggaaaccctctgcagttaacattttcctgggaagacatacacggattgttaatacacaaacttcacagaatgcatgtaatcctcaacatgatggtttcaatgtttatatgaaaaaaatgtacattttgtctcaaaatttactcaacatttttaacaaagaaacatgtaggaaaagtttcatgttgaatttcaaataacactggaagaacgtcagaatcattactcattttggtaagtatgtcaaatctcaaaagagatatgtagtctccaaagcaatttctttcattctaaaccttggtccaccaaggttggccatcataggaagattaaagtttgcgagttcagggagctccacaggaacaccaac

SEQ ID NO: 148618 - DNA, 131 bp, Homo sapiens
ggacacaatagtggacatttatttattctgacttattttaacctaattagggagaaaataaataagagttcccttccaacctgtctagtcttttcctagaccgagacaaagataattctggagaaagcagg

SEQ ID NO: 148619 - DNA, 393 bp, Homo sapiens
taatatgaagtctaagtgtatccatccactagatgtcagcattaggcaagatggagtggaatggatgtagaataatagccagaagctcagtaagagatttagtctaacaagtaaactgacttgtataaaggcacgcattttatgatagagtcaggactagaaatcaagtctcccaatttttaatccattgttatatcacatttctttaagtcaagtgagttaactgcatgtaatttagtagctaaaattaaaatatatggatcttaacatttgctagggcttcatggggagattttagtactactatgttgatattaacactggcatccaggaatacctgaatcctgttgtactaatctctctgtctcttcctttacatttcacaaaagatgg

SEQ ID NO: 148620 - DNA, 391 bp, Homo sapiens
caattctaaccaaattgtataaaattgtccaagttagtatacacttatatcagcaataccgaaacttggccttattatctaaaaattaccaagtcagctttcctttgttaaattttctccacatatcaacttagtaaactcagctaacaagtgcacttatttttataattattatggagcttataatagacctaaacactcttggtgagttcagcaacagtaatttacaaaagattgctttcaatattgcagcaatggtccaatgaaaacagttcaaaagctctaaaaatttcaaaatgttagttcaaaaaaattactgggttattacatgacaaaattataaatatctgaagtagggataacaggttccatatggttacaaaagatttat

SEQ ID NO: 148621 - DNA, 812 bp, Homo sapiens
ttctacaggtgctcccggattttgctctccagcttccggttctccgcctccaggatcctcactctttccaggtaggaggccaggctgtcgctcaggctttgcatggtctccttttagttctggatgcctcccattcctgccagaccccggccatccctgccgccagacccccggaccccaagccacccaggaagctgttggagcggaacacggagatccgggaaccagagcccccggcgcttgcctagaagctggccgcgctggttagcggtcgggcgcggtagctgggcggctggacggagcccagggaccggtagttggtgcagaaggtggaggaatggtgaagctcatgctgtctggggaggacagcgagagcacaggactcagactttgccatctaaaatatattttcatagatcagggtgtaatagtgggggggtggaaagtagctcatgggccccaatttttctcatcattcataataggaatttagaaagtagtatctaagattgatggaatagcaagcaaagctttaagtatattatttagagctattaaaataatcaatagaagaaaacatgttttaatagaccatggaagattagatgggaagtttgtgagtaactcaaatcttaacttttaaagtgagaagctaatggatactatttaaagaccataaatcaataaattgatgtaaaagcctactatttacattatgttcataaccatcacataaactacaattagaaatgttggaaaatgattttacctgagagtgagataggtgggaatcagatagataagatggatga

SEQ ID NO: 148622 - DNA, 574 bp, Homo sapiens
ctcccaaagtcctgggattacaggtgtaagctactgctcctggcctgcgtttgtggttgcttttaaatagattttcatctaattgcaaagaatgagttgattaattcacctgaggattgttccacccctgacttgcacattggaattatccaggcaaatttttaagatactgaagatcctgattagtatggtatgcatactatggtggtgggcactgaaagtttttaaactccttaggtgattgtgataaatggactgcttcaacaaatgatgtcacttgggaatggatggacagagaggaaaagcttaaacagttataattctcagtagtaaaaaattttgccattatataccctctaaaaagtattattttgtttttgtttgtggttactgttttgtgtatactgtgtgtaccccctgtctaaagggtttataatgtaaaatgtataatgtaaaataaatcaacattttcaaatgttacatcttcaccctttattcagttaactgcacttttattccatctagactcaaaacttttagtacctatcatttcattccaaactgataattatat

SEQ ID NO: 148623 - DNA, 670 bp, Homo sapiens
ctttccagccacagagtattatgagtctgtgatttcttgagtcacaaagcaaggtcatttgatatatgtgagatgataataagctgtaatcggggaacattctccagtcgtaagcatgaaacctctgagttattcgggactactcctttttctctttcagcccacatttagcaccttgggcacgcctctctgattttcatttctgtgttcactccctgagcataggccttcctacctgtagcagggatgacgggcaaatcctccttcctcatctcccatcacaagagttcagaatttccctcgtcattccagcctacacaccaccacctgacttgtttctaaactcagaactgattttgtttcctctgcttctgtggtcctccattatttttcagtttggcttccaagtcctctatttgacacaaacatacccttctaattacatcttttattcttctccattcaaaccaatgttccagctgttttctggctatggcccatgctttctcctcttaatgtccttgctcatataattacttgacgacttccatctggatttcctgatcacccacctgtgaatctctgcttatcccacctgtttttcaagattaaaatcaaatgccctttcttccctgaagctttttaaattttctcaacagggcaggatctg

SEQ ID NO: 148624 - DNA, 561 bp, Homo sapiens
aaagacatgattttattttttattatggctgtgtcctattccacagtgtttatgtaccacattttctttatctaatccaccgttgatggacacttaggttaactcctgactttgctattgtaaataatgctgtcataaacgcatgtaaactcatacttctctaacttctgattttgtgctcttaaccacagtaaacaactcagttccttgtaacaggtcactactgagagatcaggaaaaaaacagctctccaagattgtcccaaggaccccctgcacctgcaagtatccaacaagtccatcagcccttggactactgttgcatgaatgagacagacatgagaagacttgagtctccatgtggtctttctcagtcaccttggggccccaccaagtgttggtgtttttaccatttgctccttgacagaaagaataggaagttcatgaaggttaatgtgtcataaggcatgagaacactggaaggttgaatgaatcacttgctttggaggcctttgaaaacaaaaacaaaatggcaacaattaaaaacaattactgggtacct

SEQ ID NO: 148625 - DNA, 401 bp, Homo sapiens
aacgcaaataagcaacaaaggacagagaaaaaagattggaaggaaaatggcaaaatctgaacaataattctctccagatggaaagattaagagtcatctttctacttctatttttctgtatctggtaatttctgcatagtggcgcaagtcctgatggttaaagggagaaaagcaaaaatgttaatgacactggagttgctggcagcggactacttggccggagactgtgctgtgtttgtttgtcccctccaagtcttatgctgaaatatgatccccagtgttgggaggtggggcctggtgggaagtgtttagatcatgggagtggatccctcaggcatagcttagtgccattcttgctggagtgagttggcactcttagctcccatgagaactccttgttg

SEQ ID NO: 148626 - DNA, 507 bp, Homo sapiens
ggaacacacagctacaagatctggactgactatattcccctgcttttctacacacagactctagcagagaagttaaacttcatgaggatagaacgttttaactcatgttttccaaccaccattcagaagagaggctggaacacaacgggcattcaacaaaaatttgctgaatgagtatgtatagacttttagcacaaaataagcaaaatgacgcaagggccaacacatttttgcctatgtagttttatactgtaaacaatgaacatatcacactcttcagagttgggctcattttctcatttgaaacagggcccatcactcaaactcacagattgagttttctttaatgattgtaaatactgttatttttattagaagagttgtaattcacatatggcagttgtggaagctgcttgatagaatgaacaagcgcaagcgcagtcagatagacctgttaactccatcctagacattttaagagtcatttctaatccttacgacttacaa

SEQ ID NO: 148627 - DNA, 518 bp, Homo sapiens
  misc_feature (478)..(478): n is a, c, g, or t
  misc_feature (511)..(511): n is a, c, g, or t
  misc_feature (518)..(518): n is a, c, g, or t
cagacaaacagactctttcaaagagtcagtgatggaaagtctcccaggtggagcccaccatgtggggcagaagcagatgctccaagaacctgctggtttggccatgtgactgggagtggagggaaagaagtgatgctgccagcttggctgtgcagatgggagttggcagttggattcagcctctgcccacctccaaggagttaggtgctttgaagaccgatgagttcacccttcagcaaatgaacaacagcgtttgtgagaagagcagaggggcccatggctcagttgtttccagaattgctttgtcacaggcccttgtgattattcagaaattaccaaatgttagcttcttgagctgaaatgttttatgcaaattaaaggtgggagatcaagatgcttttatctttctcctaccccccaccatttttcttctcctcaatgaatcccctctatcaccagcacaatcaaataaacactntggcctcgttggcctcagcggtggagctctgcngccggan

SEQ ID NO: 148628 - DNA, 387 bp, Homo sapiens
ccaaaattatcttttttatggggcacctcaccttactgctaaaacattacagtaactttaaggtataatttctaaaattcaatctctagaccatgacatttaaaatcaccaaatgctttcattttttagtagcaatcggcatttccattgcaattaatctttctcaccatcctatacctccacccatacccaaccatgttccctcttctacttttaaatttttgcttaatccatccacatttccccttgcagtattccttctgttttatctatcaataaaacttggaagatcactgattgatttaatattagttgcaaatggctttcaatgatttctatttataattactcccattacaataataacaattcagatcaaggggaaat

SEQ ID NO: 148629 - DNA, 583 bp, Homo sapiens
tacatgaattaaataaaatgatgtttgtgaaaatgttataaaaatgcccaaatcagaaattgtagttactgtataggttaatttcctatgaggttgttaaacattttcatttttttcttccaatttaaaactgtgcatattttaacagacaggttgagctacttggaaattcaaagtactttaaacatttatgtaatgtcacatacttagtgcaaaatgctctgtctgctttgcctcttttccagaatttagacaagtctagactacagaaacacctcaaatagttaatgcgtaattagaactttactttcactcatttttaatttttacatatctttaagtgaaagcatatacttgtgtttataaatgtatttgataattagcaactcaaacttttaaagcattgtgtttgccatcttatcaaactactatcaagtgcaaacatttttcccattgattacaaatcttacatgttagacctataggcatccttgactggcaattgattttgaacatatttggttaactgctgagtcaactttctgtttagatcttaggcaaatgtgttatagccatataccta

SEQ ID NO: 148630 - DNA, 522 bp, Homo sapiens
aacaggctgaacttacgtggatgccaggaggaatttttgttttccctgttctctatgagttgtaggcggactttcacaagaatggctaggaaatcagttgggcacagtggctcatgcctgtaatcctagcactttgggaggctgaagtgggcagatcgcttgagcccaggagtttgagatcagcctgggcaacatggcaaaactccatctctacaaaaaatacaagaattagctgggcatggaggtgcacacctatagtcccagctactcaggaggctgagagaagggaggatcacttaaccctgggaggttgaggctgcagtgagccacagtcttcgcctgatatcaggcgaagactgtggggaggaatggggtgggttttgtatgttcaaactgtcattttatttttacgttgttagatatggggagtagtgtgattgaggtggagtagattaggcgtaggtagaagtagaggttaaggagggtgatggtggctatgccacagtcttcgcctgatgggta

SEQ ID NO: 148631 - DNA, 202 bp, Homo sapiens
gttatccccccagacttagctacagcaagtaagtgaaaggacctgatagatggtaatggaaaacagctttcctgttgcatgcagatcaggacagatcccctttggtggatataaatgtagtaataatggagtaaacatttaaaatgttaatatatgctccatctgcagcttctcagtcttttttttttttgagacggagtct

SEQ ID NO: 148632 - DNA, 335 bp, Homo sapiens
tagaaattgaagacaagtgtggcaaaacctggaatgtttctattaaagtaagagcacttgagatacatttctagaagatccattaacaaattcctcatgtagtacctagaagtaaattggcagccagaaaagtgataaaacagtgcttgggagattgtgcagctatttgtagctctgtgttttccttatgatttaaaagtttatattttgctgtcaggtaaatatggaaagactgttacacatattggcatctctggtgtttcctgcatatatattctggacgataagattttcaaacagcaaatttaatgactagtttttagaaatagataata

SEQ ID NO: 148633 - DNA, 617 bp, Homo sapiens
  misc_feature (548)..(548): n is a, c, g, or t
gcagcaacatggttggagctggagaccatcatctttagtgaactaatgcagaaatggaaaaccaaatacatgttctcatttataagtaagtgctaaataataacacatggcaccctgggaggcagagcccagcagatcagttgaggtcaggagtttgagaccagcctggttaacatggtgaaaccctgtcactatttttaaaaataaataaattagccaagcgtggtgacaggtgcttgtaatttcagctactcaggaggctgaggcaggagaatcacttgaaccctgtggttggagatgacagtgagccaggattgtgccactgcactccagcctggacaacacagtgagactccatcttaaaaaaaaaaaggaatttaatcttcaggtctattctgaagccacagggaagaattagggataacctcacggagatgaaagctaataccacaaatgcctagggaaggttcacttactgttccagcaagagagtaaggtgtctccccattacaattatcattaaaacaaaaagggtcttctgcaccttntggtgctgacaggaagtgacaagattcattccatccgtacaagttcagagaacaatttaagggtaagcc

SEQ ID NO: 148634 - DNA, 440 bp, Homo sapiens
atatcccagaaaaatacaggaccagacgccagcctgatcaaaatgctggctgctttgaggacaaccatcccaccaagtccattagttgctgggtctgaggacctgtctgagtgtctggctgttggagcaaagcaaagatcccgattggggtcagtgttctcatggtgagttggagggcttctcaagtgtttgaaggcagatccgtaggctcatatatgggtcctttgttctagctttgagcttatctgactaaagtggacagagagatggaggggatcatagtggctgggtggcaggactagattgcagcttcagacagagcagcatctggaggcttccatggtgaattttagctccagatcaactgcaagaaaaaaccagcaatcccaaaaggacccacagactctctgaaggaaccagactgctcctgcaggacccag

SEQ ID NO: 148635 - DNA, 361 bp, Homo sapiens
ttctttctttctttctttctttctttctctctttctcttttcttttctttttttcttttttctccttatctgtttttggtattagtgtgatgctagcctcatagaatgaattagggagaattctctcctctttggcttttctggaatagattcatgagggttgatattagttcttctttgcacatttgggtgaatttggctgtggatccatcctgtcttgggattttctctattggaagccttttttgttactgattcaataataatactcattattggtctgtttaggttttacatgtcttcctgattcaatcttggtagattgtatgtttccaggaatttattcttttttttttctagg

SEQ ID NO: 148636 - DNA, 285 bp, Homo sapiens
gtgggttctcagtaatgaaattcaagcattcaggataccagattggctgaaatattaatattttaggaaccacccagccttataaaaacagggcgtgagaaggtggcgaggcctataccgttagggatggtcctcaggtgtcaactctgagggttcagaggacttggggctacccaggagcactacagggtaactgaagcccacttccagaatatcagaacctttgcttccagtgaaaccgtcacgtaaggtggagtttacagggttgttttgtggctgtgtctg

SEQ ID NO: 148637 - DNA, 444 bp, Homo sapiens
tagagggatgtctgccgcgagtcgtgtgatattcgggcctggtgtgaccatgtccacctgtgatgtcatgcttattgatgacagcgagtatgaagaggaagaagagtttgagattgccttggcagatgcctctgacaatgcccgcattggaagggtggcgacagccaaggtgctcattagtggtcccaacgatgcctcgactgtgtccctgggcaacacggctttcactgtcagtgaggacgcaggcacagtaaagattccagttatccgccatggtactgacctctctactttcgcatctgtctggtgtgcaacgcggccctcagacccagcttctgccacaccaggagttgactacgttcccagctctcggaaggtggaatttgggcctggtgtcattgaacagtattgcaccttgactatcttggataacacgttcgcgag

SEQ ID NO: 148638 - DNA, 295 bp, Homo sapiens
tgaaactcctcctcgcgctacggacgctgcacttgtgggcaatctgcacctgttctcccctcccagaggccagctggaagggggtcccccaccattctacctctgttcccatctcaaacagggctcagaaatcctcagtacaatactacaattggtcccacaccaaagacttttcacactccaactcattctatccttaccaaaacactcttactttacccaggagacacagaaatgtggcaaagcttacctgggatcacagatttagggggagtgaagggggcgtccgtagcgc

SEQ ID NO: 148639 - DNA, 326 bp, Homo sapiens
atgagtacttagttggcagatatttatcagttgcctactctatatacatctctttgttagatttgatgggctgctcactctgtccctctgcccacctgatgttagttaatctgggggacaaccatgtaataagttacttcctagtatctatagtgaccagttatttgggagtcacctgattgaccaaagactgtgtttttacagtgttgtctcctttatttttttcttaggattctttttgcttttcttttttacaacagcctactgtgtcgcatcactgaatctagtttatagtttttcgtttctctacattccatcattttaga

SEQ ID NO: 148640 - DNA, 265 bp, Homo sapiens
cgctagttcatttttccaggcgtaagtcctccagagagagttaggaggcctgagataattattctaaaactgcccacagcattttacagcttaaggcgagtgtttaacaaaatcagttcctcccaacaatactgagctaaatattattatacaatctctaccgataaggaagttgaggttctcagaagattaaaactaaaaacaaaaagaaacaaagaaggctattcaaggatacttggaaccgcttctgaagttcactctggag

SEQ ID NO: 148641 - DNA, 339 bp, Homo sapiens
caagggttgggcaatgtattccacatctataatttgatggaggcagtgggacagaggctgtttttcaagaatgcatttggagaagcggtaagagtgcaggtgataatctttctactttataggatatggcaaccagactaccaggaaaaatgaagttatcactctacttccaatcaagcagtgaattttgatactcagcagtttcagttttttccatatgcattaccacatatatttatatctcctaaatcagtgggagttccttaatggaacgcataaggtactactctgagcactaaatatgtttgctgtgatagtacaggctaattccaatccttg

SEQ ID NO: 148642 - DNA, 109 bp, Homo sapiens
aacacattgcagtcaacaaaatccatactgtaggaaaccacagaacaaatgtatagaacaaatgacctggtgtctttaaaatataaattccaaggagcaggggagttgg

SEQ ID NO: 148643 - DNA, 356 bp, Homo sapiens
gtgggtggagggggagtatgaaaaaagaaatacgttgatcaatgtgggataaagttttaaacaggtgcagttagttttagtaacctattgtgcaaaatgggaattgtaataaataagacattgtaaataaaggaatgcaagtatagtaggtagggcaaacaaaagaaaaacggaaagaaataaaagagaagcactgaaaataaaaaaggagaccaccaattaagcactcatattttcaattcataggaaagctgtcgttagaaaaagcagaaaatttgtatctcatcaaagcagaatttatgcacaaaaataaaaaatgagtatcagcatggaactaaagtatgtttacaaatagc

SEQ ID NO: 148644 - DNA, 341 bp, Homo sapiens
cgagctcggtttccgaattccggcatgggataagaaaatgaaatcataaaaaattactaggaaaaagatgagaaaattgttcataaaactgaagtgtggaagatcctttatgccttacactgccctgagtgatctcattcatacccatggcttcaattgtcatgaatcccaaattcattcctctgtcagaactctcttctgagcttcagacccacatactcagctgcctactggacacctctacttgaatatcacaaactcaactcaaaagcaaacctgtcaaatttaattactagtagccctaccccaaacaatcttcctgctcagtgaatgacacccat

SEQ ID NO: 148645 - DNA, 377 bp, Homo sapiens
agcaagactagaagagccaggaatggcctcctgtattgatcaatatctaagctcagtctttgaaatgaaatgaggtactaagtaaggatggatgattgtagatgggtaaagaacttcaagcagtgagaaaataatgaccaaagttacagaactcgaggtaggctggtttttggaggaggtgagatgtatggtaggtagttttcctggagtggagagatggagctagatcagcaagctgaagcataaacatgaagactttgtgcactacaaaggctcaagatagatctgtaggaaatgggatgtgactgacaatcttgaaagagagtgctgtgttcacatttatattttatataggtcatactagtggccatgtggag

SEQ ID NO: 148646 - DNA, 134 bp, Homo sapiens
ctatttactaaactatgcaactgatcatttttgttattttaggtacataatattatcagtgttgtgcttctatttctgcttttgctatttagttcaatgatttctttttcatcccttatttaattggttagact

SEQ ID NO: 148647 - DNA, 341 bp, Homo sapiens
agagtcaacagagtaaaggaatgctctatgatttttatattggtcaggaagaacataaaaatgtcagttaatgttagtctttgatgagtgaagtatacatgtgtaattcctagaacaactactaaaagattagtaaaagagatgtaaaagacatgaaagagcacattccaaatgaacagaaaaaaaaaacagaataagaaaaagtgttaaatcgtccaaaaaggaggaaagaaaggggaaaaaaagtaacaattctaaatctttatgtgcctgataacacggcttcaacacatcgaataaaatgtttacagaactgtaagtagaatcgcagcggaagattt

SEQ ID NO: 148648 - DNA, 400 bp, Homo sapiens
actgtaaactagttcaaccattgtggaagtcagtgtggcgattcctcagggatctagaactagaaataccatttgacccagccatcccattactgggtatatacccaaatgagtataaatcatgcttctctggaatcttaagtatagattgttgagttcattctcttctattcatggcgtggatatcatttggcctgagcgggcttcctctgtatattattttatttacttattatccccacttccttcccttccccacattttaatgtattaatgtgtcatccttctgtgcctatgtgttcttttaacacatggtgtcggggtctcagcagctcaggcgggaggagcggcagtggccaggcagcctagcttcaccagggctcttacgtgcagcggccgc

SEQ ID NO: 148649 - DNA, 252 bp, Homo sapiens
cattgatgttatagatgaaagtcaatgacaaaggaaataaaagccatgtcacacccaaagacatgaccaacctcaaaaatttggttttaagtagctagatctctgactgggaaagtgttattgtccccaggattttaacacctagatggcatttctgagtttggtagatgtaatggccataagaggagtgagacaaacattgactttttctgtcttaaagcagttattgggaaatgatggcttctctttgag

SEQ ID NO: 148650 - DNA, 361 bp, Homo sapiens
acggggtcatggttatagctgagtcatgatgtcatacaaactgtagtgcagcggtataattggagctcactgcaacctgtgcctccccagttcaaaaaattctccggcctcagcctccagagtagctggaactacaggtgcccgccaccacacttggctaatttttgtatttttagtaaagacggggttttgccatgttggccaggctggtcttaaactcctgacctcaggtgatctgcctgccttggcctcccaaagtgctgggattacaggcatgagccatcgtgcccagcctccatcgctttgagcatgtaatcttttcaacagccctgtgacatgggtgttaatgttatacccattt

SEQ ID NO: 148651 - DNA, 425 bp, Homo sapiens
tgacgagatgcatactacataggtaaaagatggggacaaatactttctatttgcttataaaagggaagaggcagctattccctgctatcctgaatgtgtctctttgaaatgttatgaatattaactccaactctttggtatataaataaaatcgcttcaggagccatttgtttagccctcttggaccaagagacatttccaaattcctggaaactcattctgtattgaaatgtaaatgcttagggagatctccatagtcttcttggcacctctggacttaacctaggaacctctctttgctgtaatctcttaatctaccccacttgatgctctcagggagataaaataagttttattattgtggagcagagcaattaactagataaatgactacagatctaaatcttaaggtatgcatctcggca

SEQ ID NO: 148652 - DNA, 132 bp, Homo sapiens
tcctaccacataaataaccattctgggtcatacaaatacatatgctcttgcaaagatgcaaaaaaagatgctaactatacttatctccttctgggtcagtatttacaggtttgcccccattccttatttcca

SEQ ID NO: 148653 - DNA, 375 bp, Homo sapiens
ctggtgattagttagtgttaaagcaatcaggattaaagtcagggaggccacaaaagaaggataagatattgatgactgtggaattgtcagtcggaaagtacatacatagctttacttttatgtgttagtaagaaatcagtgatgagaaatatgagcctgggtttcttctcactttaaagggtcatatcatcaaagcctggagtgctccacctcttcccaaaagtccaaccaagcatcttaccagaattgtttttaactatcagattctagcatgagaggtcagaaattggggattgacgaggcaggttggggaaagcacgaaccaagacattcagattggtttgttgtatccaagtaaagagagaaatttatctc

SEQ ID NO: 148654 - DNA, 143 bp, Homo sapiens
tattacattcttgagtatgtttaccatatgataaattatatgtggaaaaagctttgcaaactgtatcctctataaaggtaaagtatcatttcttccacttattaacctttgatcctttccctttctgtatctccctccaagaa

SEQ ID NO: 148655 - DNA, 228 bp, Homo sapiens
acaggcccaggcacgttccagctcacagcctgtttagcaaatcgggtatcagtttaagattatgaggtccagccccagccaacggatgcaggacacagcagtaaggacaacccaaaggcgtaagggacaaatatgtctgcttttcctttgttcaggagtgctctcaccatcgttccatctgcaattgagcaccctttctgcataaagtaaaaattgccttgctgagag

SEQ ID NO: 148656 - DNA, 480 bp, Homo sapiens
agatcgcaatgtttcgggggatcgcaatgtacggggagacggcgatgttcgggggtaccgcgatgttcggggggaccgcgatgttcggggagaccgcgttactcggggggacggcgatgttcgggggggatcacgatgttcggagggatcgcgatgttggggtagaacgcgatgttcgggggcatcgcgccggtgctaccagaagcctcctggcctgcggggcaagcagcagccgcaggaatcagacccggcggaaaggagccgcggaggggaactgagtgccttcagccgggcatgttcggcgagatcgcgatgttcggtgagatggcaatgttcggggagatcgcgattttcggggagaccgcgatgttcggggagatcgcgttgctcggagagagggcgatgttcggagaggccgcgatgttcggggagaccacgatgttcggggagacagcaccggtccttccagaaacctcctgg

SEQ ID NO: 148657 - DNA, 271 bp, Homo sapiens
ctaaaaactttaacaatatttccttaatagcatcaactaaccaatagcatcaacttaatagcatcaactaactaatcagtattgaaatagctctaattatctcataatttcttttcacattggtttatttacatcagaatccaaatataaaccacatattgcatttggttaatatgttccataaatgtctatcaatttatccctcatttttattcttgtaatttgttaaagttctttgagtgttcacaaattttagttttgtggattgtgt

SEQ ID NO: 148658 - DNA, 243 bp, Homo sapiens
ttagccatcaacatggagaattccacaagcagatttccacgactgatccatctttgatttgttaaaatgaacctcacttggctgtggtgctatccttttattcattgctagattatctgcgtttggatctactggttacagaaaatctataaaacttttctagttcatacttgtttcatttttattatttctttccttgtttattcattgatttttaattaaaaagacaaataattattgtat

SEQ ID NO: 148659 - DNA, 521 bp, Homo sapiens
tgggaggagggctgttttaggagttcttattttccttttaagagagtggtttttgagctacttatgaccttcatgccatctaatgttggaaactttcgctgagcagatagcttattataaaaagtatttgtacaacatccgcatttcagagaatgggatgctagctgccagttgcgtggtggtgtggaaacttaggagtgatcttaattttccaaaattcttcaggtctagcacttgaagaaataataggtagatttgaaatgaaacaacccagggatattcctgaaaacagcagcattgaccgcagccaatgtaaatcaggtgtggatcgtcctgggtagtaggagtttataaatgccacagaggatgtttgctgccagacatacctgaattttaggacctgctgttggttaactctgggttgatccacccttaaccccttgaaaatcagaatctgtgttaggtaagtctgtgtatgattaggagacaggccaattgaaatcaaaactgcttggcaaatc

SEQ ID NO: 148660 - DNA, 544 bp, Homo sapiens
atcccaattatgcattagcatgcaaaaagtcactctcagcagcaccatgacagtttacaaatgccatggcaatgtcaggaagttaccctatatggtctaaaaaggagaggaaccctcagttctgagaactgctcacccctttcctgggaaactcgtgaataatccaaccctcctttagcatataatcaataaataactataagtagccttagtccagcagcccaaactactgctctgcctatggagtagccattttgtattccttttttttttttttttttttgagacggagtcttgctctgttgcccaggctggagtgtaatggcatgatcttggctcactgcaacctctgcttcccgggttcaagcgattctcctgcctcagcctctcgagtggctgggattacaggcatgtgccaccacgcccggctaatttttgtgtttttagtagagatggggttttgccatgatggcctggctggtctcaaactcctgacctcaggtgatccaccctcctcggcctcccaaagtgctaggattacagg

SEQ ID NO: 148661 - DNA, 154 bp, Homo sapiens
agctaagaagacagggaggaaagagccatgaaaccatgaggagacagatgaactcaacagctaagaagacagggaggaaagagccatgaaaccatgaggagacagatgaactcaacagctaagaagacagggaggaaagagccatgaaaccatg

SEQ ID NO: 148662 - DNA, 197 bp, Homo sapiens
ttttataacaatgattactttaaaaaaaaagctacagaaaaatagttaatacaattacctttaactctacgctagtatgtagcttaccaagtcaattcagaactaacaagaaaaagacaagttattacaaatatttctttatttttatttatttatttctttttttgagacggggtcttgctctgtcgcccaggctg

SEQ ID NO: 148663 - DNA, 217 bp, Homo sapiens
tctctggaggaaagcactctgctgttaacccttaaacacccttaggagatgggcacttatggaaggaaaaaaacctctccgggtgtcaggctctacaccccaggtggaagttcttgctctctgggggttatctgagaatctggtgaaaacttagaccctcttctgaaaaacatatcccacaccacaccaaacttaaagaaagttctgtgggggtggg

SEQ ID NO: 148664 - DNA, 297 bp, Homo sapiens
gtctgtgtttgctcatcaccatgtcctcggaaccagcccagtgtgtggtacattatttgacactcaataattgttgaattaataaatgtgagaaactgtggtctgtgtttctcagaatcctgttggtctatgggagaatgctctgcatgttgtagacattttgaaaaaaactcacgaaccatttgaaaattaaagaagcatataatacaaaaaaagaatagcaaacgagatatttcaggaaggtagatgtcattgtgaactgttttcatcagagagttagaagactgaaggttgtgt

SEQ ID NO: 148665 - DNA, 470 bp, Homo sapiens
tcatgcaggttgtcagggaagcgggggaaagctggcagtcacaggcctcacccagctcccacacaaacggaagggccagtctcactcccaccatgccccctcaacagccccaagtctgtttccaggcagtaggggatctgggcctgagaacttgccccaggctactcacctcccagctgtgaaagaaaaaggcttggttctttccccacctatggagtctgcacaccggattcgtgccctcccccttctggccaggaggcttctcgccagttcaaattgttacaaagttcagctggagacttccttctccctatagtgtttcccctcctattcctctggctgccctcccgaaggatccctgtggtgccaggcaggaatggcctgcttgaagacccagcgagctcccaaggctttcctgctgcttcctctacttctatatttcgctgggctctctaaattgactcagctcc

SEQ ID NO: 148666 - DNA, 309 bp, Homo sapiens
ttgaggagaacgtggcaaaggagaatgacaagtatacatgtacaattaaatagacattcatcttaaaatgtatttaatttaatttttttatttttttttaaagagatgaggtctatgttgcccaagttggtctcaaactcccgagcgcaagtgatcctcccacctcagcctcccaaagtgctaggattacaggcatgaaccaccaagcctggccttaaaatgtattttagcaagtacatactgtgtgtcaggcatcattacaggtgttggaccacagcagagaacaacagaaaagttcaaagaaccctg

SEQ ID NO: 148667 - DNA, 398 bp, Homo sapiens
cagtgcacctttcaagaccaagctcaagtctcatgcttttggtgacacattctctggcttaccccatccaaatgcattctgcctgcctctaattcaccagaaaactctactcattgagcaccaaaacatgaatacatgtgtcccctaccctgggtggccccctcagccttgcaacctaaccagagcccagagcaacaccttaccccatccccgctggtgagtgactatggggaggcaggggctgctatcaccctcttgtatagacactgaggctcacagcacgtgggcacacaaggccatgcagctgctgaatctaccctaagcacctcaacacgatgcctggaaggaaaagcaggagcagaggaaggagaaggtagacaccaggaggatgaggatca

SEQ ID NO: 148668 - DNA, 440 bp, Homo sapiens
cattctaagcagctttatagtgaaacatttcatttagaaatctggaccatctttcttcagtttactgtaatccacattcactgagtagaacttgtattgctcattggaacccagtttattccagggccctgggtcattctttctggcccaactaacatctggattgaaatgccagatgcaagacatacagtgctgctctggtacctctagctccattaaatacaaagagggggatcaaactcagttccttggcctgaccaaggacctggtggagcatgttttcagcaagggcatctgatttaaaaggagagaactagcttagctgccaggcccttgactaagtagtatctcagaataaagtaattgaaaattaatgagtatctacttagggtctctaaatatatttaattttctatggagggaactttttaaattgaaaa

SEQ ID NO: 148669 - DNA, 419 bp, Homo sapiens
aatgggtgctgctcagcgggatgtcagacaggaatccctggttgcttggaaaggcatccccgaaaccggggactttcaactattggcgggtccttacttggttcaaatatcaattaaaatatcaggaggactattacataccccaaaaagagctgtggaaacacctcatagcgcacacgtttctttaaaaaaaaaaaaacaacagacaccataggaaagtctcatgtatttaaaataaagggagttaattagtaaatttgttttttctgaaagcagtcttattgatacaaaatagcccaaaccgggttcacaaaggttgaaaacagagttagcttataattagcatttcaactgtccacaagcggatcttctagattgtcagcacaaggaaattctgttctcttcattggcgtaaatgc

SEQ ID NO: 148670 - DNA, 597 bp, Homo sapiens
aaatgcctctgctgctgctgctgctgctgctgtacactgctgcttcaataaaagttgctaacaccactggctagctcttgaattctttcctaggaaaagccaagaaccctcttgggataaacctcagttttggggtttgcctgtcctgcaacataatcaccaaatgtttctttttgtttgttttaggtattttcacatatatcatttcactcatttaaacctcacaataactattatgttagaagaagagactattgtaaagaagaatgagaaagtaccttagcatactggaatgagcatacttggaatcaaacagttcagggttagaatcctacctctgccatgtatgaactgagtaactttcaacaccttactgagcttctcttcatctgaaaaatgaagtggactaaataacacaacttaaaatacccagctcatacaaggtatttaagaaattgagcagagctcaagaccaggctggccaacatgctgaaatcccatctctactaaaaatacaaaaattagctgggcgtggtggtgcgtgcctgtagtcccagctactcgggaagctgaggcgggagaattgcttgaacccag

SEQ ID NO: 148671 - DNA, 261 bp, Homo sapiens
accagtgcaggaagatttgtttctaggtttaccttcacagcatttatggccttccaagctgacctgaggcaataaaagcatcctagactggtagtctccatgccaaccaagctctttactcattctttgcacttggcagtttgcattgccacttgctatgtcattttagtttttcctttcatgttttgtttaaataaactttattaagtatgcagttagataaattttaacaaatgtataccactgtataacaaacaccac

SEQ ID NO: 148672 - DNA, 530 bp, Homo sapiens
tgaaggtgtctgggattgccagcaatgagcattggttgcatggatatgtttagaatggaaaattctgaatatatgtgaaccttccaaaaaaaagtttttaaagttgtatcagttcattacagtacaaatgtaaaattaggggaattgtttaggagtacccctcttagacccctaattaggagttggaggtctcagtctgtgaccaggattagagttcgttctatggctggaatctgggctcagccaggataaggttctgtgtggatccagtactaatcatcgctgcatcagggctctgcctggcaggagggctcgggagcctttgctctgtgtccacagctcgactgctgccgttccaggatctgaccacttgatgtctccacttcacaaattgccaagtgaggaaagagctggatagagctgcctagacacgtaccggccctgagctgggataggttggaggccatagctcagggaaagacttggaaactgcagagaatgaatccaagtggcagcaaagctggctgggc

SEQ ID NO: 148673 - DNA, 369 bp, Homo sapiens
gtgatagttatagcaagattagcttctattcctttttcttcacggctatgtaccaacctgattcatggggtatgaatgagacctgcttcatctgaaaacttttaaaatagtaattcacttttatggttcttttcttactttttaaaggaagagacttgtattatctgattatgatttgcatttattattgctgttaccttggcttctaaattaaaatctgaaacaaattattttacttttttgggaattcataaagttttcttctttaaatttttatttattcatttattttttagagatagggtctcactctgtctcccaggctggggtgcagtggtactatcatagctcgctgtagcttgaaactcc

SEQ ID NO: 148674 - DNA, 373 bp, Homo sapiens
agtgcggcattgagtattacccagtctcgcctttcagtcttgttgttacgtccacatcatgacatgcaggcaaccgaggcaggtggcctgggctaccaggagccaggacaaggctgtgggggagctgagccaccagcttgaagtgccttgtgggagaaaacccgaattggattatagtccccggatggaatggagtgtggcaaagccagttctgctggggtgggaggaaaacagtgagtttagaattcaaaggacagctgaatcctctagccactcccttctccatcccctgggctgggagggcagatgtaggcaaggtgtgccttcggaacaggagggggctgtctgtaaggcatgagtgtgtgtgtgtatg

SEQ ID NO: 148675 - DNA, 247 bp, Homo sapiens
cgaaaatgcagggtgaccctggcgcaggatcgggtctgagagctgctcaccgacccatgcctcctctagcaaatcgcctctctcacagtcacctcaacagcatctcagccgttgtccgacactgggtgattctgcacgcccggctcggaaccctgtgcattgcccatctgtgagccgacctcctgcctgaagccaccttctcatagcgctcagtactggggaccctggccgggaagtttgcacagag

SEQ ID NO: 148676 - DNA, 465 bp, Homo sapiens
gacaagatttctggagtttggaaagggtgagagattgggtcagcaaaagacacattctgatctttatgctgggatgcaatttatagatacagggatgagacccaaaaaagctgggagagatttgtcatcatggttgcaaggcaactgccggtggctgatcccgtaaaggatacacatacctagaacagagcctaaaaaagcatcaagcatgaagggtggagccacgatgcttggactcgagttctgctcctgtgcattcctcggtaacttaaactacctgtgcctcgatttttcctggggaaaaaaggaagtttgtagccagtacattggtgcctgccttaaagtagaactactccatgggctgaagaggaagttcagctgggcgtagtggctcacacctgtaatcccagcaatctgggaggcccaggcaggtggatcacctgaggtcaggagttcgagaccagc

SEQ ID NO: 148677 - DNA, 157 bp, Homo sapiens
tgatataatgtgagatcgcatgctggtcaatacaatactaagtaaactcaaatggtgatactgactgaggctctgcaaagaggaaaagcaaactcctatctggaaattgtgtctatttctatgacaaggaaatgctggtccttccagtgtggaaggg

SEQ ID NO: 148678 - DNA, 128 bp, Homo sapiens
agtgttaggaacttttggttctcagccagaacaaagaaatcttgggtatcaaatgtgctacgctgcagcagccatagtggtattcacggatagaatattctagcagccctgcagacgaatccctttgc

SEQ ID NO: 148679 - DNA, 404 bp, Homo sapiens
agtatacatggcttcttgtgaagattgagaagaatgtttggtaggaagttaaagaagggctcaaattgaaatttgagttttaaaagagtgcctagataaaacctaattgcttacctgaggaagtttggttaacactacccaaataagcagaatagagaagggtttttaaaatgattgtctgaagaatattatgctggtgcttgtttgtaggtatttgtgtaaaaatttattttttggcctagtaggttttagaaattctgaaataggtagagttgacaagttctgcagggcgtttgtcagtcatcagtgtgctttgtcacccttctgagtagaatgtatagtttatgctgcttcccacatgttgaataaatatttgagaagcagcaaagtaataatgccacttg

SEQ ID NO: 148680 - DNA, 397 bp, Homo sapiens
tctagaggatccacagcggccgacctttttttggccaactttgttttaaaaggcagaaaaataaggatatttaaactggacaaagatggccaaaaaaagggaaaattcatgaagggagatcctattcataataggaacataaatcacaagactgcaaattcctatgcataggaataaccacatagcaaacatttattgagtgctatgtgttgcaagcacatttgaagtgcttcaccagtatcgcctcatttaatcttcacctccaggatactcagtatcccagttctattgatgaaggaaccaagactcaaaaagatggaataacttctctaagctcatacagctaatcaacaatggagttgagatttaagccaatttcccccagtcctcacaatgg

SEQ ID NO: 148681 - DNA, 693 bp, Homo sapiens
aaaggtacaatcacagacacaatgcgaacagcactgtaagagtcagagccttagatgctgctgctgcctctgccccgctccgcgcggggagctgcagttcagagttcgcttcctttcatggacttactctgtttgcacaggctcttggatattctcttccttttccttccctttattgaaaatacatgtgacatactgctgtgagttacttttttctaaaacaaatttctcatgtacatagttatatatcaattttaaaaactcttcttcattgtagtggccacgtggtattatgtcatatgcctgtgccatttcttactgaatcagtccccagttgatggcaaccttagactgtttctatatttaataataagctggattgcagtaaaaattcttaaagttctatctttgtatatatgtgagttttcttttgggtaggttcctagatgtggaattgctgtttttaaaagtgtatgtgcattttaaagtttgccaaattgctcaccaaagaggttttctagtttatatttttgtcagtagtgtgtgtgtgtgtgtgtgtgtgagagagagagagagagagagagagagagagagaatgcccccttttttattgaaggagaatttgtgttattttgatgtacagaaaactcaacagtgttcatttcacccagtttattggcaggttctgtggcc

SEQ ID NO: 148682 - DNA, 299 bp, Homo sapiens
tgcccactacagaaaaaaagttgatgtgtaatcaaagcccaccttagctgggtattttcacatctccatcgcatgtaatgttcctaaacaacatgatgaatttagatacatggaaattatatatccataaatagattaggttggagcaatttgtccaaatcatggagtcagaatataaacttgggtcttcttgactcagagtccaccgctccatttaaacatcatttgtagagttccctggcatcctgctttaataaaccaatctcaatgtaccagactgttccagagagcagagttga

SEQ ID NO: 148683 - DNA, 387 bp, Homo sapiens
tttgaggcagaaagatcagcaacaagagattaccagctgttatatttttatgaaaactgtttcttacttaaaactttcaagtatctccaagagcattcatcaccgggaatgatgtatttctaatgcctggcatttgaagaatttccattatacttgctaagtagtctctataaagctgtctttgagtttgattagtgtaccttaatccacagagcataatgactctggatgaattgatggcctcaaaaatagaagatttgttgtaatttctggacctggcacacgtaaggactaaataaatcttaactactgacttgaattgtaaagcagaagacccaacctggattgtagtaatcccactaagatactgctctccttagagcccta

SEQ ID NO: 148684 - DNA, 126 bp, Homo sapiens
gtaagtgggatcctgggcatggctgcagaaagtagcctcagttttccttgtctgcagaatgggctggtaggatgagataatgggggttgagcagtcagaggccttgaccaaaagcttttttttttt

SEQ ID NO: 148685 - DNA, 1135 bp, Homo sapiens
ctctctcctcagcctcccaaagtgttgggaatattggcattagccactgtgcccagcccaattatatgtaagatatatttacacatgcatatatgtacaatgtaataatcatttgtgacaacaaaagaattgggggtggaactatttcaaccagtagaataatggtgacaaaatgatggaacacacaatggaattttatgcagctataaaaacaaaaaagggccaggcatggtgggaaatatttcattacataccttttaaataatactttctgggttttgtatcatgggaaagtattatctatttaataattagataaggaatttaaaatagccattaaaaacttgtcagagatatatagatggttggagacaaatttatgagatataaaagaggaaaagctgaaaatgaatgagctaggcattcatttcaagaagttgaacaaacagtaaaataaacccagaaaagtagaaggaaggaaaataaagattagagtagaaattaatagaaaacaaatacaacagagaagctcaacagagccaaaaattgtttctttgaaaaaactagtaaaactgactaacctctgatgtgactgaccagtaacaaattagtgatgcaaaaataacccatgaggaatgaaaagaggaacctaattacagatgccacagagattaaaaagatagaagaatacaatgaactttatgccaataaatcttaaaagttagatgaaatgaactcctgaaaagaaaacttaaactgtcccaagtagaaacagaaaactttgaatattcctaaaactacttcagaaaatgaatcagtagttaaaaatctacccacagccaggtgcgggtggctcacgcctgtaatcccagcacttcaggaggccaaggtgagcggatcacttgaggtcaggagtttgagaccagcctggccaacatggcgaaaccccatctctactagaaatacaaaaattagctgggcatggtggcacacgcctataattccagctacctgggaggctgacgcacgagaatctcttgaacctgggaggcagaggttgcagtgagccgagatcatgccactgcactccagcctgggtgacatagtgagactctgtctcaaaaaaaaagtaata

SEQ ID NO: 148686 - DNA, 257 bp, Homo sapiens
cagctgataagcatggggacctcctattctgataaaaattccaaaaaagtcctgagtgattaataaacagcacattgaaaattagaaatgagttctatggcaggggatgaaacaggcaacaaagcctattttctttgcaatgaagcgcatcagatattaataatagccattgtaattatctttatcatgtattaagcattttgtgtttttcacttttacacaattagatgatccccataggtattaccgcctttttt

SEQ ID NO: 148687 - DNA, 1418 bp, Homo sapiens
ggaatgaccctgcataaaaaggcagctgaagatagactggcaagcacaggctcagggcagtcatttctggcgaggcagaggcaagcgaccagcagcagaagatcatacccaggccacgtgcagccggccacagcaaggtagagaagttgtgccgctcaatcacagacacctgcacccacaacatacttctgttacacacaagaacatttcaggaaactcagccagcttattttttgtttctcttctatgtcaatacttagtgtttctcattttgaggactttttctctctcctgtatctttgttttagtttctttggtttttattttgtagtcctttcagttatttttaatgtgccaaaaatttgtacatgttcaattaaaaatgttgtataatagtgtaatacttttctttgtatgaaaatgtcctcttcttcaaaggtataggctttgtaatgaattagattttctgccaataattgatatacaatttatattctttattgtgcctgtgtgttaccatgctaagaatgtctttgtttaaagggaattaatctttttatgatgtattaatctgtgttttcaattgttttccaagtacagttcaaataacttgcatatttactatacaaaatggttgacaagtgttctttttgcaaagacttgaatacattggcagaggtgctaatcacatcttccctaaggcacctggaagaattatttgaggaaaaaatgagttttcacattgttttataggaaattaaatttgtccaaagatttggagactatttttaaaacataaatacataaaatttcattatttcctgctatcttgtttgctggcagaagtgaatgtttggtgaggttattttgggataaattacaaaagaaaaaaaattagacactgcattaatttcttgttcttttggaatatcttagtaactgaggatcattttctaacaatgtggttgacataccttcagttgctttccacatctaaaagagttatctttcatatatgtacaagttattggtagtcttatttttgggctgtttgttgacttatgccccatttgttttacttgttctttaatataaacccttccattttttaacaattcctaacacttgatatcttaatatcagtcactaacattagtaacttcttgtatgttatattatggcagatctctttacgttttttctcacatctatctgctagtccaggaatttgttactaaatagattttcttggatatttggttgcctcaaagtgcttacatttgttaacagattgtaaaccacatttatttacattgatgaatgggctgttgaataatcattgtaaagcactttgtatatataaggtgctatataagtgtgaaatatcattcatttataaatgaaatgccttctaactt

SEQ ID NO: 148688 - DNA, 233 bp, Homo sapiens
tgccgggacgacctagaggacccgtcaattctactccaggaatttgttactaaatagattttcttggatatttggttgcctcaaagtgcttacatttgttaacagattgtaaaccacatttatttacattgatgaatgggctgttgaataatcattgtaaagcactttgtatatataaggtgctatataagtgtgaaatatcattcatttataaatgaaatgccttctaactt

SEQ ID NO: 148689 - DNA, 3044 bp, Homo sapiens
cccgacccgtgcgagggccaggtccgcgcctgccccgccaggcgaagcgaggcgacccgcgtgcggccatggcttcgctgctgggagcctacccttggcccgagggtctcgagtgcccggccctggacgccgagctgtcggatggacaatcgccgccggccgtcccccggcccccgggggacaagggctccgagagccgtatccggcggcccatgaacgccttcatggtttgggccaaggacgagaggaaacggctggcagtgcagaacccggacctgcacaacgccgagctcagcaagatgctgggaaagtcgtggaaggcgctgacgctgtcccagaagaggccgtacgtggacgaggcggagcggctgcgcctgcagcacatgcaggactaccccaactacaagtaccggccgcgcaggaagaagcaggccaagcggctgtgcaagcgcgtggacccgggcttccttctgagctccctctcccgggaccagaacgccctgccggagaagagaagcggcagccggggggcgctgggggagaaggaggacaggggtgagtactcccccggcactgccctgcccagcctccggggctgctaccacgaggggccggctggtggtggcggcggcggcaccccgagcagtgtggacacgtacccgtacgggctgcccacacctcctgaaatgtctcccctggacgtgctggagccggagcagaccttcttctcctccccctgccaggaggagcatggccatccccgccgcatcccccacctgccagggcacccgtactcaccggagtacgccccaagccctctccactgtagccaccccctgggctccctggcccttggccagtcccccggcgtctccatgatgtcccctgtacccggctgtcccccatctcctgcctattactccccggccacctaccacccactccactccaacctccaagcccacctgggccagctttccccgcctcctgagcaccctggcttcgacgccctggatcaactgagccaggtggaactcctgggggacatggatcgcaatgaattcgaccagtatttgaacactcctggccacccagactccgccacaggggccatggccctcagtgggcatgttccggtctcccaggtgacaccaacgggtcccacagagaccagcctcatctccgtcctggctgatgccacggccacgtactacaacagctacagtgtgtcatagagctggaggcgccccgtccggtcagccctcgcgccctctccttcttgtgccttgagtggcagaggagccgtccagccacaccagctttcctcccaccgctcagggcagggaggtctgaactgcggccccagagcctttggcctaagctggactctccttatccgagtgccgcctctatccccttccccacgttccagcccctgcagcccacattttaagtatattccttcaagtgagttttcctccagcccctgagagttgctgtctcccagtggaatgttcactgacgtcttttcttggtagccatcatcgaaactaatggggggacagacttgatagccaaggtcccttctggtccagttttctgatttagggttctctcaagattaataaaggaagatggggaaatttgactcattaatgagctcgctaacctacgatctggtgataattttgtgtgcacagcccaaggaccacgaggctttctgcactttctgcacccccttccaaagtgaccacaaaatttcaaagggactcatacaatttgagaaaaaacagtcaacctgatttgagaaattaaccagtatggctaactatatcacagaaaatgggattgagttaaaactattttattttaaatatacattttaaagcagttctttttttttgttaatttgtttattatacacacacttcaagagccaccgcgcccagcctacatttataattttcattctcttttacctataaaattcagtgtattagtttcattacataggagaaattatatttctaaacattttatgatgtttaaaaacaaaacaggctgttgtaaaaaaaaaaaaaaaaaaaacttctgaatatactttaggtatcagaaagccaagaataaaatttagctctaacggtggcaactccatgtccggtgtccagctttggacagggtttatgacgtttctgtttctctagtaatgattaatgattcctcaggagattcgtgatgttgtctggtctatctggaaatttaaagtcactaggagctttgcctcatcgtgagtgatgctgtgctgtatttttacaaactctcgcatacagcaccttcctggggccacgttggcttgtgcagtggagcttgtccaggcaccagcatggagcaagtacagggttgctgtgttgggttggagcacactgtcaccacagtgtctgaagtcttataaacaggaagatcattttctgttttccttctaaccagggtgagaaaatacaaagtaaagaactaaagaatattaaaacctagcatttatgttccacagtgtgtatttcagaagtttgtaatccagaaaatatagtagtgtataatatctgaaaagagaatcaagtatacaattgtacatatttttaaagaactttgaaaaactccgtcatatcttttaccatttgtctatttgatagtaatgcagaaaaaagtccctaaagaccctgtgttccaaaatttaccaagattgacatttctattagacatccttaacctaagtgttttaattagattattagactataataaggatgaaattgctgtctgtaattttgttgaggttttattgttaatataataaaagctcaactgtacaaaattaagctaaatgttatccagtcagaaacatcagcctgagccaccgcgcccagcctacatttataattttcattctcttttacctataaaattcagtgtattagtttcattacataggagaaattatatttctaaacattttatgatgtttaaaaacaaaacaggctgttgtaaaa

SEQ ID NO: 148690 - DNA, 2184 bp, Homo sapiens
  misc_feature (2149)..(2149): n is a, c, g, or t
cccgacccgtgcgagggccaggtccgcgcctgccccgccaggcgaagcgaggcgacccgcgtgcggccatggcttcgctgctgggagcctacccttggcccgagggtctcgagtgcccggccctggacgccgagctgtcggatggacaatcgccgccggccgtcccccggcccccgggggacaagggctccgagagccgtatccggcggcccatgaacgccttcatggtttgggccaaggacgagaggaaacggctggcagtgcagaacccggacctgcacaacgccgagctcagcaagatgctgggaaagtcgtggaaggcgctgacgctgtcccagaagaggccgtacgtggacgaggcggagcggctgcgcctgcagcacatgcaggactaccccaactacaagtaccggccgcgcaggaagaagcaggccaagcggctgtgcaagcgcgtggacccgggcttccttctgagctccctctcccgggaccagaacgccctgccggagaagagaagcggcagccggggggcgctgggggagaaggaggacaggggtgagtactcccccggcactgccctgcccagcctccggggctgctaccacgaggggccggctggtggtggcggcggcggcaccccgagcagtgtggacacgtacccgtacgggctgcccacacctcctgaaatgtctcccctggacgtgctggagccggagcagaccttcttctcctccccctgccaggaggagcatggccatccccgccgcatcccccacctgccagggcacccgtactcaccggagtacgccccaagccctctccactgtagccaccccctgggctccctggcccttggccagtcccccggcgtctccatgatgtcccctgtacccggctgtcccccatctcctgcctattactccccggccacctaccacccactccactccaacctccaagcccacctgggccagctttccccgcctcctgagcaccctggcttcgacgccctggatcaactgagccaggtggaactcctgggggacatggatcgcaatgaattcgaccagtatttgaacactcctggccacccagactccgccacaggggccatggccctcagtgggcatgttccggtctcccaggtgacaccaacgggtcccacagagaccagcctcatctccgtcctggctgatgccacggccacgtactacaacagctacagtgtgtcatagagctggaggcgccccgtccggtcagccctcgcgccctctccttcttgtgccttgagtggcagaggagccgtccagccacaccagctttcctcccaccgctcagggcagggaggtctgaactgcggccccagagcctttggcctaagctggactctccttatccgagtgccgcctctatccccttccccacgttccagcccctgcagcccacattttaagtatattccttcaagtgagttttcctccagcccctgagagttgctgtctcccagtggaatgttcactgacgtcttttcttggtagccatcatcgaaactaatggggggacagacttgatagccaaggtcccttctggtccagttttctgatttagggttctctcaagattaataaaggaagatggggaaatttgactcattaatgagctcgctaacctacgatctggtgataattttgtgtgcacagcccaaggaccacgaggctttctgcactttctgcacccccttccaaagtgaccacaaaatttcaaagggactcatacaatttgagaaaaaacagtcaacctgatttgagaaattaaccagtatggctaactatatcacagaaaatgggattgagttaaaactattttattttaaatatacattttaaagcagttctttttttttgttaatttgtttattatacacacacttcaagagccaccgcgcccagcctacatttataattttcattctcttttacctataaaattcagtgtattagtttcattacataggagaaattatatttctaaacattttatgatgtttaaaaacaaaacaggctgttgtaaaaaaaaaaaaaaaacagtctgtgaactactcactgaatgaattttgttctgtgagatgagaggttttcattttcatttnctatttacagccccagtgtcctgcctctaagggat

SEQ ID NO: 148691 - DNA, 1347 bp, Homo sapiens
aggttaggtcacttaatataggaggatgttttctcatgtacttgctatttgcaagttcaggtttcatttggttctttatgttaaatacgaataagtaacctcaaatcaagctaaatgtaattaagaattttcagcaactatattcaagtgtttgatttttaaattctttctttctttttaataagaaagatgacctaaaaatcagtggtatttgtttgtcctcagaagccgtagttgaagaaagatattagagtatacacagaactggagccatacattgtgctaattttttacattaagtacagaagtctgagcacagcatgaatgcttctgcctgacaggaccacaaagcagcagaagttagggataaatggagatagccatgagtagaactgctgtagggcttcaggaggctacgcagacctgatcaactgcaaagtttccaaagtaaaagattaaaaactttcagacggttcttacctctacccgtgtttcacaaatagcctgaggatccaactatttttaaagcaaattggggccagacgtggtgcctcacgcctgcaatctcaccatttgggagacctaggtgggggtggatcacttgaggtcaggagtttgagaccagcctggccaacatggtgaaaccccatctctactaaattacaaaaattagctgggcatggtggcatgtggctgtagtcccagctacttgggaggctgaggcaggagagtcacttgaactcaggagccagagactgcagtgagctgagatcgcaccactgcattccagcctgggcgacagagtgagactctgtctcaatcagtcaatcaatcaatcaatcaaattggaatatgagcactaaccttggtaagttaaaattttgggaaaattgtacctgcagaatatgatggatgaaaacaacagccaggtgcagtggctcacgcgtataatcccagcactttgggaggccgagacaggcacatcatctgaggtcaggacttccagaccagcctgtccaacatggtgaaactccgtctctactaaaaatacaaacaattagccaggcatggtggtgtgtgcctgtagtcccagctacttgggagggtgaggcaggagaattgcttgaacctgggagacagagattgcagtgagccgagatggcgccattgcaccccagcctggcgacaagagcgaaactctgtcgcaagaaaaaaaaaaaaaaaaaaacagtctgtgaactactcactgaatgaattttgttctgtgagatctacccagatattttttctctatctgggttggaaaggccccaggcttttagaggggagttttacttctgacttttt

SEQ ID NO: 148692 - DNA, 2883 bp, Homo sapiens
ggaatgaccctgcataaaaaggcagctgaagatagactggcaagcacaggctcagggcagtcatttctggcgaggcagaggcaagcgaccagcagcagaagatcatacccaggccacgtgcagccggccacagcaaggtagagaagttgtgccgctcaatcacagacacctgcacccacaacatacttctgttacacacaagaacatttcaggaaactcagccagcttattttttgtttctcttctatgtcaatacttagtgtttctcattttgaggactttttctctctcctgtatctttgttttagtttctttggtttttattttgtagtcctttcagttatttttaatgtgccaaaaatttgtacatgttcaattaaaaatgttgtataatagtgtaatacttttctttgtatgaaaatgtcctcttcttcaaaggtataggctttgtaatgaattagattttctgccaataattgatatacaatttatattctttattgtgcctgtgtgttaccatgctaagaatgtctttgtttaaagggaattaatctttttatgatgtattaatctgtgttttcaattgttttccaagtacagttcaaataacttgcatatttactatacaaaatggttgacaagtgttctttttgcaaagacttgaatacattggcagaggtgctaatcacatcttccctaaggcacctggaagaattatttgaggaaaaaatgagttttcacattgttttataggaaattaaatttgtccaaagatttggagactatttttaaaacataaatacataaaatttcattatttcctgctatcttgtttgctggcagaagtgaatgtttggtgaggttattttgggataaattacaaaagaaaaaaaattagacactgcattaatttcttgttcttttggaatatcttagtaactgaggatcattttctaacaatgtggttgacataccttcagttgctttccacatctaaaagagttatctttcatatatgtacaagttattggtagtcttatttttgggctgtttgttgacttatgccccatttgttttacttgttctttaatataaacccttccattttttaacaattcctaacacttgatatcttaatatcagtcactaacattagtaacttcttgtatgttatattatggcagatctctttacgttttttctcacatctatctgctagtccaggaatttgttactaaatagattttcttggatatttggttgcctcaaagtgcttacatttgttaacagctgagattacaggcacgagccaccgcgcccagtcgtacttctgacttttcttcagcatctgttgtatgctattattttgatgtttacatttataattttctttcttttttttttttttgtgagatgatgtctcgctctgtcacccaggctggagtgcagtggcgcgatctcggctcactgcaagctccgcctcccgggttcacgccattctcctgcctcagcctcctgagtagcggggactacaggcgcccgccactacgcccgactaattttttgtattttttagtagagacggtgtttcaccatgttggccaggatggtctcgatctcctgacctcgtgatccacccgcctcagcctcccagagtgctgggattacaggcgtgagccaccgcgcccagcctacatttataattttcattctcttttacctataaaattcagtgtattagtttcattacataggagaaattatatttctaaacattttatgatgtttaaaaacaaaacaggctgttgtaaaaaaaaaaaaaaaaaaaacttctgaatatactttaggtatcagaaagccaagaataaaatttagctctaacggtggcaactccatgtccggtgtccagctttggacagggtttatgacgtttctgtttctctagtaatgattaatgattcctcaggagattcgtgatgttgtctggtctatctggaaatttaaagtcactaggagctttgcctcatcgtgagtgatgctgtgctgtatttttacaaactctcgcatacagcaccttcctggggccacgttggcttgtgcagtggagcttgtccaggcaccagcatggagcaagtacagggttgctgtgttgggttggagcacactgtcaccacagtgtctgaagtcttataaacaggaagatcattttctgttttccttctaaccagggtgagaaaatacaaagtaaagaactaaagaatattaaaacctagcatttatgttccacagtgtgtatttcagaagtttgtaatccagaaaatatagtagtgtataatatctgaaaagagaatcaagtatacaattgtacatatttttaaagaactttgaaaaactccgtcatatcttttaccatttgtctatttgatagtaatgcagaaaaaagtccctaaagaccctgtgttccaaaatttaccaagattgacatttctattagacatccttaacctaagtgttttaattagattattagactataataaggatgaaattgctgtctgtaattttgttgaggttttattgttaatataataaaagctcaactgtacaaaattaagctaaatgttatccagtcagaaacatcagcctgtggccaggtgcggtggctcacgcctgtaatcccagcactttgggaggccaaggcgggcggatcacctgaggtcaggagttcaggaccagcctggctaatatggtgaaaccccatctctactaaaaatacagtattagccaggcatggtggcaggcgcctgtgatcccagctacttgggaggctgaggcaggagaatcatgtgaacccaggaggtggaggttgcagtaagccgagat

SEQ ID NO: 148693 - DNA, 2549 bp, Homo sapiens
aggttaggtcacttaatataggaggatgttttctcatgtacttgctatttgcaagttcaggtttcatttggttctttatgttaaatacgaataagtaacctcaaatcaagctaaatgtaattaagaattttcagcaactatattcaagtgtttgatttttaaattctttctttctttttaataagaaagatgacctaaaaatcagtggtatttgtttgtcctcagaagccgtagttgaagaaagatattagagtatacacagaactggagccatacattgtgctaattttttacattaagtacagaagtctgagcacagcatgaatgcttctgcctgacaggaccacaaagcagcagaagttagggataaatggagatagccatgagtagaactgctgtagggcttcaggaggctacgcagacctgatcaactgcaaagtttccaaagtaaaagattaaaaactttcagacggttcttacctctacccgtgtttcacaaatagcctgaggatccaactatttttaaagcaaattggggccagacgtggtgcctcacgcctgcaatctcaccatttgggagacctaggtgggggtggatcacttgaggtcaggagtttgagaccagcctggccaacatggtgaaaccccatctctactaaattacaaaaattagctgggcatggtggcatgtggctgtagtcccagctacttgggaggctgaggcaggagagtcacttgaactcaggagccagagactgcagtgagctgagatcgcaccactgcattccagcctgggcgacagagtgagactctgtctcaatcagtcaatcaatcaatcaatcaaattggaatatgagcactaaccttggtaagttaaaattttgggaaaattgtacctgcagaatatgatggatgaaaacaacagccaggtgcagtggctcacgcgtataatcccactgagattacaggcacgagccaccgcgcccagtcgtacttctgacttttcttcagcatctgttgtatgctattattttgatgtttacatttataattttctttcttttttttttttttgtgagatgatgtctcgctctgtcacccaggctggagtgcagtggcgcgatctcggctcactgcaagctccgcctcccgggttcacgccattctcctgcctcagcctcctgagtagcggggactacaggcgcccgccactacgcccgactaattttttgtattttttagtagagacggtgtttcaccatgttggccaggatggtctcgatctcctgacctcgtgatccacccgcctcagcctcccagagtgctgggattacaggcgtgagccaccgcgcccagcctacatttataattttcattctcttttacctataaaattcagtgtattagtttcattacataggagaaattatatttctaaacattttatgatgtttaaaaacaaaacaggctgttgtaaaaaaaaaaaaaaaaaaaacttctgaatatactttaggtatcagaaagccaagaataaaatttagctctaacggtggcaactccatgtccggtgtccagctttggacagggtttatgacgtttctgtttctctagtaatgattaatgattcctcaggagattcgtgatgttgtctggtctatctggaaatttaaagtcactaggagctttgcctcatcgtgagtgatgctgtgctgtatttttacaaactctcgcatacagcaccttcctggggccacgttggcttgtgcagtggagcttgtccaggcaccagcatggagcaagtacagggttgctgtgttgggttggagcacactgtcaccacagtgtctgaagtcttataaacaggaagatcattttctgttttccttctaaccagggtgagaaaatacaaagtaaagaactaaagaatattaaaacctagcatttatgttccacagtgtgtatttcagaagtttgtaatccagaaaatatagtagtgtataatatctgaaaagagaatcaagtatacaattgtacatatttttaaagaactttgaaaaactccgtcatatcttttaccatttgtctatttgatagtaatgcagaaaaaagtccctaaagaccctgtgttccaaaatttaccaagattgacatttctattagacatccttaacctaagtgttttaattagattattagactataataaggatgaaattgctgtctgtaattttgttgaggttttattgttaatataataaaagctcaactgtacaaaattaagctaaatgttatccagtcagaaacatcagcctgtggccaggtgcggtggctcacgcctgtaatcccagcactttgggaggccaaggcgggcggatcacctgaggtcaggagttcaggaccagcctggctaatatggtgaaaccccatctctactaaaaatacagtattagccaggcatggtggcaggcgcctgtgatcccagctacttgggaggctgaggcaggagaatcatgtgaacccaggaggtggaggttgcagtaagccgagat

SEQ ID NO: 148694 - DNA, 1891 bp, Homo sapiens
aggttaggtcacttaatataggaggatgttttctcatgtacttgctatttgcaagttcaggtttcatttggttctttatgttaaatacgaataagtaacctcaaatcaagctaaatgtaattaagaattttcagcaactatattcaagtgtttgatttttaaattctttctttctttttaataagaaagatgacctaaaaatcagtggtatttgtttgtcctcagaagccgtagttgaagaaagatattagagtatacacagaactggagccatacattgtgctaattttttacattaagtacagaagtctgagcacagcatgaatgcttctgcctgacaggaccacaaagcagcagaagttagggataaatggagatagccatgagtagaactgctgtagggcttcaggaggctacgcagacctgatcaactgcaaagtttccaaagtaaaagattaaaaactttcagacggttcttacctctacccgtgtttcacaaatagcctgaggatccaactatttttaaagcaaattggggccagacgtggtgcctcacgcctgcaatctcaccatttgggagacctaggtgggggtgtttcaccatgttggccaggatggtctcgatctcctgacctcgtgatccacccgcctcagcctcccagagtgctgggattacaggcgtgagccaccgcgcccagcctacatttataattttcattctcttttacctataaaattcagtgtattagtttcattacataggagaaattatatttctaaacattttatgatgtttaaaaacaaaacaggctgttgtaaaaaaaaaaaaaaaaaaaacttctgaatatactttaggtatcagaaagccaagaataaaatttagctctaacggtggcaactccatgtccggtgtccagctttggacagggtttatgacgtttctgtttctctagtaatgattaatgattcctcaggagattcgtgatgttgtctggtctatctggaaatttaaagtcactaggagctttgcctcatcgtgagtgatgctgtgctgtatttttacaaactctcgcatacagcaccttcctggggccacgttggcttgtgcagtggagcttgtccaggcaccagcatggagcaagtacagggttgctgtgttgggttggagcacactgtcaccacagtgtctgaagtcttataaacaggaagatcattttctgttttccttctaaccagggtgagaaaatacaaagtaaagaactaaagaatattaaaacctagcatttatgttccacagtgtgtatttcagaagtttgtaatccagaaaatatagtagtgtataatatctgaaaagagaatcaagtatacaattgtacatatttttaaagaactttgaaaaactccgtcatatcttttaccatttgtctatttgatagtaatgcagaaaaaagtccctaaagaccctgtgttccaaaatttaccaagattgacatttctattagacatccttaacctaagtgttttaattagattattagactataataaggatgaaattgctgtctgtaattttgttgaggttttattgttaatataataaaagctcaactgtacaaaattaagctaaatgttatccagtcagaaacatcagcctgtggccaggtgcggtggctcacgcctgtaatcccagcactttgggaggccaaggcgggcggatcacctgaggtcaggagttcaggaccagcctggctaatatggtgaaaccccatctctactaaaaatacagtattagccaggcatggtggcaggcgcctgtgatcccagctacttgggaggctgaggcaggagaatcatgtgaacccaggaggtggaggttgcagtaagccgagat

SEQ ID NO: 148695 - DNA, 1925 bp, Homo sapiens
  misc_feature (1890)..(1890): n is a, c, g, or t
ggaatgaccctgcataaaaaggcagctgaagatagactggcaagcacaggctcagggcagtcatttctggcgaggcagaggcaagcgaccagcagcagaagatcatacccaggccacgtgcagccggccacagcaaggtagagaagttgtgccgctcaatcacagacacctgcacccacaacatacttctgttacacacaagaacatttcaggaaactcagccagcttattttttgtttctcttctatgtcaatacttagtgtttctcattttgaggactttttctctctcctgtatctttgttttagtttctttggtttttattttgtagtcctttcagttatttttaatgtgccaaaaatttgtacatgttcaattaaaaatgttgtataatagtgtaatacttttctttgtatgaaaatgtcctcttcttcaaaggtataggctttgtaatgaattagattttctgccaataattgatatacaatttatattctttattgtgcctgtgtgttaccatgctaagaatgtctttgtttaaagggaattaatctttttatgatgtattaatctgtgttttcaattgttttccaagtacagttcaaataacttgcatatttactatacaaaatggttgacaagtgttctttttgcaaagacttgaatacattggcagaggtgctaatcacatcttccctaaggcacctggaagaattatttgaggaaaaaatgagttttcacattgttttataggaaattaaatttgtccaaagatttggagactatttttaaaacataaatacataaaatttcattatttcctgctatcttgtttgctggcagaagtgaatgtttggtgaggttattttgggataaattacaaaagaaaaaaaattagacactgcattaatttcttgttcttttggaatatcttagtaactgaggatcattttctaacaatgtggttgacataccttcagttgctttccacatctaaaagagttatctttcatatatgtacaagttattggtagtcttatttttgggctgtttgttgacttatgccccatttgttttacttgttctttaatataaacccttccattttttaacaattcctaacacttgatatcttaatatcagtcactaacattagtaacttcttgtatgttatattatggcagatctctttacgttttttctcacatctatctgctagtccaggaatttgttactaaatagattttcttggatatttggttgcctcaaagtgcttacatttgttaacagctgagattacaggcacgagccaccgcgcccagtcgtacttctgacttttcttcagcatctgttgtatgctattattttgatgtttacatttataattttctttcttttttttttttttgtgagatgatgtctcgctctgtcacccaggctggagtgcagtggcgcgatctcggctcactgcaagctccgcctcccgggttcacgccattctcctgcctcagcctcctgagtagcggggactacaggcgcccgccactacgcccgactaattttttgtattttttagtagagacggtgtttcaccatgttggccaggatggtctcgatctcctgacctcgtgatccacccgcctcagcctcccagagtgctgggattacaggcgtgagccaccgcgcccagcctacatttataattttcattctcttttacctataaaattcagtgtattagtttcattacataggagaaattatatttctaaacattttatgatgtttaaaaacaaaacaggctgttgtaaaaaaaaaaaaaaaacagtctgtgaactactcactgaatgaattttgttctgtgagatgagaggttttcattttcatttnctatttacagccccagtgtcctgcctctaagggat

SEQ ID NO: 148696 - DNA, 3142 bp, Homo sapiens
cccgacccgtgcgagggccaggtccgcgcctgccccgccaggcgaagcgaggcgacccgcgtgcggccatggcttcgctgctgggagcctacccttggcccgagggtctcgagtgcccggccctggacgccgagctgtcggatggacaatcgccgccggccgtcccccggcccccgggggacaagggctccgagagccgtatccggcggcccatgaacgccttcatggtttgggccaaggacgagaggaaacggctggcagtgcagaacccggacctgcacaacgccgagctcagcaagatgctgggaaagtcgtggaaggcgctgacgctgtcccagaagaggccgtacgtggacgaggcggagcggctgcgcctgcagcacatgcaggactaccccaactacaagtaccggccgcgcaggaagaagcaggccaagcggctgtgcaagcgcgtggacccgggcttccttctgagctccctctcccgggaccagaacgccctgccggagaagagaagcggcagccggggggcgctgggggagaaggaggacaggggtgagtactcccccggcactgccctgcccagcctccggggctgctaccacgaggggccggctggtggtggcggcggcggcaccccgagcagtgtggacacgtacccgtacgggctgcccacacctcctgaaatgtctcccctggacgtgctggagccggagcagaccttcttctcctccccctgccaggaggagcatggccatccccgccgcatcccccacctgccagggcacccgtactcaccggagtacgccccaagccctctccactgtagccaccccctgggctccctggcccttggccagtcccccggcgtctccatgatgtcccctgtacccggctgtcccccatctcctgcctattactccccggccacctaccacccactccactccaacctccaagcccacctgggccagctttccccgcctcctgagcaccctggcttcgacgccctggatcaactgagccaggtggaactcctgggggacatggatcgcaatgaattcgaccagtatttgaacactcctggccacccagactccgccacaggggccatggccctcagtgggcatgttccggtctcccaggtgacaccaacgggtcccacagagaccagcctcatctccgtcctggctgatgccacggccacgtactacaacagctacagtgtgtcatagagctggaggcgccccgtccggtcagccctcgcgccctctccttcttgtgccttgagtggcagaggagccgtccagccacaccagctttcctcccaccgctcagggcagggaggtctgaactgcggccccagagcctttggcctaagctggactctccttatccgagtgccgcctctatccccttccccacgttccagcccctgcagcccacattttaagtatattccttcaagtgagttttcctccagcccctgagagttgctgtctcccagtggaatgttcactgacgtcttttcttggtagccatcatcgaaactaatggggggacagacttgatagccaaggtcccttctggtccagttttctgatttagggttctctcaagattaataaaggaagatggggaaatttgactcattaatgagctcgctaacctacgatctggtgataattttgtgtgcacagcccaaggaccacgaggctttctgcactttctgcacccccttccaaagtgaccacaaaatttcaaagggactcatacaatttgagaaaaaacagtcaacctgatttgagaaattaaccagtatggctaactatatcacagaaaatgggattgagttaaaactattttattttaaatatacattttaaagcagttctttttttttgttaatttgtttattatacacacacttcaagagccaccgcgcccagcctacatttataattttcattctcttttacctataaaattcagtgtattagtttcattacataggagaaattatatttctaaacattttatgatgtttaaaaacaaaacaggctgttgtaaaaaaaaaaaaaaaaaaaacttctgaatatactttaggtatcagaaagccaagaataaaatttagctctaacggtggcaactccatgtccggtgtccagctttggacagggtttatgacgtttctgtttctctagtaatgattaatgattcctcaggagattcgtgatgttgtctggtctatctggaaatttaaagtcactaggagctttgcctcatcgtgagtgatgctgtgctgtatttttacaaactctcgcatacagcaccttcctggggccacgttggcttgtgcagtggagcttgtccaggcaccagcatggagcaagtacagggttgctgtgttgggttggagcacactgtcaccacagtgtctgaagtcttataaacaggaagatcattttctgttttccttctaaccagggtgagaaaatacaaagtaaagaactaaagaatattaaaacctagcatttatgttccacagtgtgtatttcagaagtttgtaatccagaaaatatagtagtgtataatatctgaaaagagaatcaagtatacaattgtacatatttttaaagaactttgaaaaactccgtcatatcttttaccatttgtctatttgatagtaatgcagaaaaaagtccctaaagaccctgtgttccaaaatttaccaagattgacatttctattagacatccttaacctaagtgttttaattagattattagactataataaggatgaaattgctgtctgtaattttgttgaggttttattgttaatataataaaagctcaactgtacaaaattaagctaaatgttatccagtcagaaacatcagcctgtggccaggtgcggtggctcacgcctgtaatcccagcactttgggaggccaaggcgggcggatcacctgaggtcaggagttcaggaccagcctggctaatatggtgaaaccccatctctactaaaaatacagtattagccaggcatggtggcaggcgcctgtgatcccagctacttgggaggctgaggcaggagaatcatgtgaacccaggaggtggaggttgcagtaagccgagat

SEQ ID NO: 148697 - DNA, 3023 bp, Homo sapiens
cccgacccgtgcgagggccaggtccgcgcctgccccgccaggcgaagcgaggcgacccgcgtgcggccatggcttcgctgctgggagcctacccttggcccgagggtctcgagtgcccggccctggacgccgagctgtcggatggacaatcgccgccggccgtcccccggcccccgggggacaagggctccgagagccgtatccggcggcccatgaacgccttcatggtttgggccaaggacgagaggaaacggctggcagtgcagaacccggacctgcacaacgccgagctcagcaagatgctgggaaagtcgtggaaggcgctgacgctgtcccagaagaggccgtacgtggacgaggcggagcggctgcgcctgcagcacatgcaggactaccccaactacaagtaccggccgcgcaggaagaagcaggccaagcggctgtgcaagcgcgtggacccgggcttccttctgagctccctctcccgggaccagaacgccctgccggagaagagaagcggcagccggggggcgctgggggagaaggaggacaggggtgagtactcccccggcactgccctgcccagcctccggggctgctaccacgaggggccggctggtggtggcggcggcggcaccccgagcagtgtggacacgtacccgtacgggctgcccacacctcctgaaatgtctcccctggacgtgctggagccggagcagaccttcttctcctccccctgccaggaggagcatggccatccccgccgcatcccccacctgccagggcacccgtactcaccggagtacgccccaagccctctccactgtagccaccccctgggctccctggcccttggccagtcccccggcgtctccatgatgtcccctgtacccggctgtcccccatctcctgcctattactccccggccacctaccacccactccactccaacctccaagcccacctgggccagctttccccgcctcctgagcaccctggcttcgacgccctggatcaactgagccaggtggaactcctgggggacatggatcgcaatgaattcgaccagtatttgaacactcctggccacccagactccgccacaggggccatggccctcagtgggcatgttccggtctcccaggtgacaccaacgggtcccacagagaccagcctcatctccgtcctggctgatgccacggccacgtactacaacagctacagtgtgtcatagagctggaggcgccccgtccggtcagccctcgcgccctctccttcttgtgccttgagtggcagaggagccgtccagccacaccagctttcctcccaccgctcagggcagggaggtctgaactgcggccccagagcctttggcctaagctggactctccttatccgagtgccgcctctatccccttccccacgttccagcccctgcagcccacattttaagtatattccttcaagtgagttttcctccagcccctgagagttgctgtctcccagtggaatgttcactgacgtcttttcttggtagccatcatcgaaactaatggggggacagacttgatagccaaggtcccttctggtccagttttctgatttagggttctctcaagattaataaaggaagatggggaaatttgactcattaatgagctcgctaacctacgatctggtgataattttgtgtgcacagcccaaggaccacgaggctttctgcactttctgcacccccttccaaagtgaccacaaaatttcaaagggactcatacaatttgagaaaaaacagtcaacctgatttgagaaattaaccagtatggctaactatatcacagaaaatgggattgagttaaaactattttattttaaatatacattttaaagcagttctttttttttgttaatttgtttattatacacacacttcaagagccaccgcgcccagcctacatttataattttcattctcttttacctataaaattcagtgtattagtttcattacataggagaaattatatttctaaacattttatgatgtttaaaaacaaaacaggctgttgtaaaaaaaaaaaaaaaaaaaacttctgaatatactttaggtatcagaaagccaagaataaaatttagctctaacggtggcaactccatgtccggtgtccagctttggacagggtttatgacgtttctgtttctctagtaatgattaatgattcctcaggagattcgtgatgttgtctggtctatctggaaatttaaagtcactaggagctttgcctcatcgtgagtgatgctgtgctgtatttttacaaactctcgcatacagcaccttcctggggccacgttggcttgtgcagtggagcttgtccaggcaccagcatggagcaagtacagggttgctgtgttgggttggagcacactgtcaccacagtgtctgaagtcttataaacaggaagatcattttctgttttccttctaaccagggtgagaaaatacaaagtaaagaactaaagaatattaaaacctagcatttatgttccacagtgtgtatttcagaagtttgtaatccagaaaatatagtagtgtataatatctgaaaagagaatcaagtatacaattgtacatatttttaaagaactttgaaaaactccgtcatatcttttaccatttgtctatttgatagtaatgcagaaaaaagtccctaaagaccctgtgttccaaaatttaccaagattgacatttctattagacatccttaacctaagtgttttaattagattattagactataataaggatgaaattgctgtctgtaattttgttgaggttttattgttaatataataaaagctcaactgtacaaaattaagctaaatgttatccagtcagaaacatcagcctgagccaccgcgcccagcctacatttataattttcattctcttttacctataaaattcagtgtattagtttcattacataggagaaattaatacactgaattttataggtaaaaaaaaa

SEQ ID NO: 148698 - DNA, 513 bp, Homo sapiens
ttgcatctcgaaatcccaatcaaaatttccagtttaacatcctgtttgactaacattattcagtgcttaataaatgatggattttttttttttttgagacagggtctcactttgtcacccagctgtagagcagtggtatgaacacggctcactgcagcttcaatttcccaggctcaagtgatcctcccacctcagccccccaaacagctgagactacaggtgtgcaccatcatgcccagctaagttttgtagtttttgtagagacagggtttctccacattgcccaggcttgtctagaactcctggcctcaagcgatctgcccaccttgacctcccaaagtgctgggattacaagtgtgagccaccatgcccagccttgagttaatttctgtgtatgttgtgaggtaatctcattcttttgcatatgcatatccagttgtcccagcacaatttgttgaaatgactgttctttcccgactgaattgtcttgacactcttatcaaaaataaattg

SEQ ID NO: 148699 - DNA, 460 bp, Homo sapiens
cagcatttaagccaggaagacagagaaatgttggtagaatactgaaggacatagctagttaggaaaatagaatcaattaggaaaaaggaagtgaatgcttagttttcttgtatgaaaccagaggcaggagtaggctatcccatctaaaaaagatgtcaggtggatcaggtttgatgtcttatgcctgtaatcctagcactttgggagaccgaggtgggtggatcacttgagtccagctgttcaacaccagcctgaggaacatggcaaaaccctgtctctacaaaaacaaaacaaaaccaaaacacacatgaaaaaacaattagctgggcgtggtggtatgggccagtaggcccatccacttgggagactgaggtgtgaggatcacttgagcctgggaggagaagattgcagtgagccaagattgtaccactgcactccagcctggatgacacagcgagac

SEQ ID NO: 148700 - DNA, 878 bp, Homo sapiens
cgccaccacacccggctaatttttatatttttagtagagatggagtttcgccatgttggccaggctggtctcaaactcctgacctcaagtgatctgcctgcctcagcctcccaaagtgctagaattataggagtgagccaccacacctggccagattaggcatgtttttaatagatacgttatatcatacaatgtgggatctgccccagtttattaatcattccccattaatggatattcccattcatttcttcaggattcttctcatcgcagtgctccaggcagccactaccaatcgattggagttagcctgtgaggtaaaacctatttgtcatgtctcacccagtcccgctccttatcctacattctagagaagagaacagactagctccgtgatcaaagtgaatcagtggcttgggcaggactagaactgaattttcttgactttcagcatttcctctatcccatgttgtcactcccttggagtcatctaccctgcttttctcctctagagtaaaagaacaaatataatttcttttctgcgtgctacctcttcagatattcaaagtcagttatgccattccccttgagtcttctcttccccagaggaaaatctcagtgccttcaaatttttttttcttaaaacaaggttttcaaatccctttaccatcctatgagctgttccttctatcttcttcccccctagggctatagaaatcccaagtgtggcttccacattcaccttctatagctatttatttattcaataaatatatattgagcaccttctacgtgccaggcactgttgtagcactggctgactgtatggcttgcgttttggtcagtagagagaaacacgtcgattcgatacctgagag

SEQ ID NO: 148701 - DNA, 220 bp, Homo sapiens
cgccaccacacccggctaatttttatatttttagtagagatggagtttcgccatgttggccaggctggtctcaaactcctgacctcaagtgatctgcctgcctcagcctcccaaagtgctagaattataggagtgagccaccacacctggccagattaggcatgtttttaatagatacgttatatcatacaatgaaagtgtgctcggcgccgaaggggcc

SEQ ID NO: 148702 - DNA, 476 bp, Homo sapiens
atagggagacagtggggaaccgggcacagtcctcaccctcagggaggttacagtctgacaacaaactaacagacgtggatccatgttggcactgccagctgggcaactcacttagtctttccaagcctcagtttcttcatctgcaagatggagatgataatagcactcatttatagggttcctgaggcttatcaggagacaaggctgcaaagtgattcgtagaatgcctggcacattaaaggctctcaaaaatgttaattattcttgttattattgtgacgaatgacgctgttactgggaattaggtaggaacttggagctgcttagaaaaaagataaatgaattgcttttcatcctctgggcaaaccagttacccttaggaggcagaacattcagaatttcaaagaaggaggattgagtaggcatggatcttaaaaagttgaggtaaaaagcagcaaggcaaagaaacaaaaaac

SEQ ID NO: 148703 - DNA, 373 bp, Homo sapiens
ttgttcttactgtgcatgatattttattgtgatttagaaaaaagatgtatctgcgaaaaatagaaaatatactggccgacaaaataaagattacaaaagagctcatcagggtagaataaagggccaagattaacgaaagtacaattcacaaggctaagtgttaaggcccaagtagtcaactgcacaagaatcagataaggaattctgattccagtaaaaactctgaaaaaggaacttgtttagctggtgtatttttcaatttgaggctcagtaatgaggatgcacactgaagaacaatatccagaaaataaggtagaacagtcctcttctggattcattagaccacacttggtatacagagtttgcttctatc

SEQ ID NO: 148704 - DNA, 235 bp, Homo sapiens
atacaaaaaactaaaaaattcagaaatgttgggtgtgctgggccaactgcataccgcattaaatacacaattaagtccccatatatacttctttatctttaggagtgaattggttactctcagttctttgctttgattccaatttatgtgaatctatagcttatttgagagctcattcctatctattaacaaggtataactctccatttatttattccacagcatctttctacaa

SEQ ID NO: 148705 - DNA, 205 bp, Homo sapiens
gagccatgcggaccctgggggagccaaggagaccacaaatgcaccggacgtggggcaacaaacccaagtgatcaccaggagttgtggattcccactagtacaacctgtaaaggttttctttcttttcttttaaattattattatttatttttgaggcggagtctcgctctgtcgcccaggctggaatgcagtggcacaatctcgg

SEQ ID NO: 148706 - DNA, 417 bp, Homo sapiens
gtaccaaatcatgggatccattcagcttggtggttaagaggtgaagagctatgccatctgaaagaagtaccaagatggaaatcttgcagggaggtcaggtagaaatcagtgaaggagagagcaaccaaggtttcccaattagatggaaagtagaaaagagcagaatggaaagacatacagaaaaccatgtaataacatgaaaggaattaaggaacatttaagtcctttagaagtgtgctgagtctgaagtagtttgtagtgcaaggttaagatgactgtagcattttttgagtggaatacactgaggagaaacaaaaacagtctaatgatttccgtggcttctagagagttgcaacattcattttctgcagtttaaattatgtttcctatggcaagaaaatagctgcatagataaac

SEQ ID NO: 148707 - DNA, 327 bp, Homo sapiens
tgctgttgtttcttggtgctgcctggcactgccaccctgatggtcggctctgagttggaggccagctttcatggcagcgttgttggtgggcgtgcagggtgtgtctgacctgggcctgggcatcaggtcccattgtggttgggtccacagggccccttgcctcattcgtggaggtgctgggggaattctacaggctgaggacgtgtgaggctccagggtccagcgtgcaggccggatgttcctagcgttgccggccacgcagacagccgtgccaccaggaggttccctggcaatgggagacaattgtctgctcagttcagccttcag

SEQ ID NO: 148708 - DNA, 332 bp, Homo sapiens
tattggcagatgacaccaaattactgttgtttgaaagaagaaccaggactggattgggaaggagtgggtagatccatgctgttgataacattctagttcatggattggccagtgagctcacagatgtttgttaagttacatataattaaaataaaagagggtcttgaatggaccagtgatgagagagtgttccatgacccatgatctaattctgggcacctgaagttaaggaaaaagaaggttatgctaattccaagatactttcctctgtcctgctagagtgttacctgaatgcaagattagcatttctcaaggaaatccagcatgttcct

SEQ ID NO: 148709 - DNA, 383 bp, Homo sapiens
cctgggcaacatagcaggatcccatctcaatttaaaaaaaggagtaattcagaatatgaaaaaaaaagtatgggaaaaggtcaataaagaaatagaagtatggccaggcatgttgcctgacacctgtaatcccagcactttgggaggctgaggtgggtggattacctgaggccaggagttcgagaccagcctggccaacatggtgaaaccctgtctctactaaaaatacaaaaaattagccaggcatggtgtgggtgcctgtaatcccagctactcgggaggctgagacgggagaggcacttgaacctgggaggcggaggttgcagtgagctgagactgcgccactgcactacagcctgggccacatagtgagactccatctc

SEQ ID NO: 148710 - DNA, 439 bp, Homo sapiens
gccagacgagggtgggcataaactggggaaccctatggcttctcttcccctcccggatcagagaaaagggtgccgctaaggctggaggttgtagaaatccaactgggtccccagacttccatttctgtgggcaaggtactctggctccaaacccatgcacaagttgctgttctcatagcaacgctaatccctgtgcctgagggcacttccgccttgcctgggtgctggttgtgttggggcatgggagacaggtgcacctgcagaaggaatttgcctgcttctcatgccaccacacccatttaacatttcatgccccaaatccctggtgtggtcaggcagatccccaaggagcctgaatcacccccctacccgacagtaatttcactgctacagtcaaacacatccttctcctccatgctggcctgtggttcactggggg

SEQ ID NO: 148711 - DNA, 354 bp, Homo sapiens
cagattttcccgaacagaacttctgccttcagctttctggcataccctaaagcagtttcctacagttcatgctctgacccgaatttaatactcctatccagcctggcctcaggttagaatcacacatgtatcttgcaactacttgccgctaaaccccagcttaggctgaaccctttcttgagagcagagactattgctcacactgtaactagcatggtgcctgattcccactagggtctcagaattattcattaaacgagtaagtatcaggtactaaaactgtgccaaaatgtaaagacagaaacaattactaataaattgttactctattattatcagcaagaatacttttaa

SEQ ID NO: 148712 - DNA, 1466 bp, Homo sapiens
gcggccgctgctgcgcctggtggcgctgcagtcgctccagatgggcgacaaccggctgcgcgcgctgccggccgagctgccgcgcatgacgggcttgcgcggcctctggctctacggcaaccgcttcgaggagttcccgcccgcgctgctgcgcatgggccgcctgcacatcctcgacctcgaccgcaaccgcctgggcggcttccccgacctgcacccgctgcgcgcgctgcgcgtcttctcctacgaccacaaccccgtcaccgggcccccgcgcgtcgcggacaccgtgttcctcgtgggcgagggcgccgtcgagcgcatggcggagcgcgacgagcccacgccccggcctccgccccggcgcccagcgcgggcctttgaggatgaggaggaggaagacctgctcataggcggcgctggttcccgggctctgggcgcccccgggggcagcttccgcgccctggaagccgctccaggactgggcacctgagcctatgttctggctgatgggcttcagccactctgagaggaggggctctaggaagctttggctggttaggcctgcgggactggtgggtccctacttaggtcaatggaacggctacttttggcgagttgccgggcacaggcagggctggggctcatcttcagacactcctaggtagtaagaggactgactataccctggctgatctgtgggcaattgtcagaccaagaagtctgggctgggtccagtccccgatggagccactgataacagaggcaccagcttcctcctggaaccagggtctctgagggccacagaattgtcacgtctccctgagtctggatgcagggcacccaacaccctccctctttctggggtttgggtctcctaggcccaccctttctaggacaggagccgctacctctgggatggactgcgtgcctgtgtggggcaggactgcccttgcgaggagggcctggccaggagcaggggcttggagtggggctggtgcccgggacagaagtgggaaatagatgggggccccaacaccgaagctgccctcacccctccatcagggctgatcgtacatacctccctcctcggccccctgagattggtatggggcacagaaggcagggggtcacccccaccctattctgttctcttctcccagcctcccagcatgtgcctggaaccttaaatgggcacagccagggtggctggcatgggactggcactctgtacctccactccgtcaccagggacagccccgagggggtgaggagaggggccttgctctgcaattcccagagccagatcttcctcatccaagcaataacgggacgagggagccagggccaaggacactcagggacactgttggggcagcggccccacatggtaatgttttctttagagagaagaaaaaacaactggctgtaaacgtaaattatatttcttggagaaagaaaaaaaa

SEQ ID NO: 148713 - DNA, 1639 bp, Homo sapiens
gcggccgctgctgcgcctggtggcgctgcagtcgctccagatgggcgacaaccggctgcgcgcgctgccggccgagctgccgcgcatgacgggcttgcgcggcctctggctctacggcaaccgcttcgaggagttcccgcccgcgctgctgcgcatgggccgcctgcacatcctcgacctcgaccgcaaccgcctgggcggcttccccgacctgcacccgctgcgcgcgctgcgcgtcttctcctacgaccacaaccccgtcaccgggcccccgcgcgtcgcggacaccgtgttcctcgtgggcgagggcgccgtcgagcgcatggcggagcgcgacgagcccacgccccggcctccgccccggcgcccagcgcgggcctttgaggatgaggaggaggaagacctgctcataggcggcgctggttcccgggctctgggcgcccccgggggcagcttccgcgccctggaagccgctccaggactgggcacctgagcctatgttctggctgatgggcttcagccactctgagaggaggggctctaggaagctttggctggttaggcctgcgggactggtgggtccctacttaggtcaatggaacggctacttttggcgagttgccgggcacaggcagggctggggctcatcttcagacactcctaggtagtaagaggactgactataccctggctgatctgtgggcaattgtcagaccaagaagtctgggctgggtccagtccccgatggagccactgataacagaggcaccagcttcctcctggaaccagggtctctgagggccacagaattgtcacgtctccctgagtctggatgcagggcacccaacaccctccctctttctggggtttgggtctcctaggcccaccctttctaggacaggagccgctacctctgggatggactgcgtgcctgtgtggggcaggactgcccttgcgaggagggcctggccaggagcaggggcttggagtggggctggtgcccgggacagaagtgggaaatagatgggggccccaacaccgaagctgccctcacccctccatcagggctgatcgtacatacctccctcctcggccccctgagattggtatggggcacagaaggcagggggtcacccccaccctattctgttctcttctcccagcctcccagcatgtgcctggaaccttgctgggaagagagagctccccctccactccccaccccatagcctgagccttccagctgtcaagtttgaaaagaagccaccgtgcctccagggcctcctgcaccgcagagaggggctctctgctctgggaggctgctcagcgcctctcccacggcctgcactctcctttcccttaaatgggcacagccagggtggctggcatgggactggcactctgtacctccactccgtcaccagggacagccccgagggggtgaggagaggggccttgctctgcaattcccagagccagatcttcctcatccaagcaataacgggacgagggagccagggccaaggacactcagggacactgttggggcagcggccccacatggtaatgttttctttagagagaagaaaaaacaactggctgtaaacgtaaattatatttcttggagaaagaaaaaaaa

SEQ ID NO: 148714 - DNA, 259 bp, Homo sapiens
acattgcccagtgctatgcttaatctggtatgtacacgtcaacaattcccatatctctaagttccagcctcttctccttaaactcctgactcatttatccaaccactgcagatgtttcatggtcatctcaaacttaatgtgtccaaaagtcatgtttctagtgttcccctgaaacctgctcttcataaattgttacccatctcaataaagagcaactccattctttagttgctcaggccccagacctgagcaagccagg

SEQ ID NO: 148715 - DNA, 141 bp, Homo sapiens
cggccagtctctgggttcgtggaagaggaggccacgtagaaaaagtaggggacaaggcagggtccctcactactgtgtgggaagcccgcgtggggtgagctgggagctctgagtgcagcgcacctggccgtggggcaggcc

SEQ ID NO: 148716 - DNA, 491 bp, Homo sapiens
aagcaaggagtgctcaagaagggaagaaaaacaaaatggaagagacagactaacaccacatggataaagagactttattatattttaaaattatatacagtaattattatatacattcattcataaattctatataagtaaacattctaatcacagtgtttcaattccatttttctcaaaacacacacacacacacacacacacacgaaaagcctgtaacctttgaaagcctaaaatgtaggagttcctccaggtactcacttcatagttcagatggatcttaccagattattagcaacaagaattcagtgcctatatcacagttaaaattatagttaaaatatttaatagagggacacccaccctcaatgcgggtgggcaccatccaattggtcaggggtatggataaaacaaaaatgcataggaaagctcgctctctcctggacctaagacaccctccttctggtgcttttggacatccaaactccagg

SEQ ID NO: 148717 - DNA, 324 bp, Homo sapiens
cgagctcgctacccggccactctagtccaaacaccaccaaatgacagagatgcagaccaagacaaaaggaaaaaacaacagaagggatttttgtccttgagacgtgctatgcaaattcttttcaattagtttcctattaatgattccatcttgaacatttagagctgctcaacccaggcagcatctacgttttgaagtagtaagttctccattcctagcagagtcggaggagaagctcagctgttatccaccagaaattctattaaaaggatgaaaggttgaactagatgacttctcattctgaagactgtaattcagcagaac

SEQ ID NO: 148718 - DNA, 172 bp, Homo sapiens
aaaaaaaaaaaaaaaaaaaaaaaaaaaaaaggcaatcatctgcaacccctaactggccttctaaatactgcacatttgaatttataaaatatatttatgctaacagaatgacttcttacctgttacttatatgaatcttactaagtttcattcaaagaagggtcctacttct

SEQ ID NO: 148719 - DNA, 365 bp, Homo sapiens
gcagttggttcaaagttacaagtgcttgtgaccctcccttgagctcctccaggcccacccctgtacagaattcaagggccacctgaacaaactccttgctttttctcatttttgggctccttcgttcatgctacaaagaggatctgagggacagagtggcgtctctactagctggggtaagggaggaaatggacagtaatgggggacagggccaagaagagggatggtgatgaatactccagagcaggatcgggtagcagggcactgggtctctcagcatgtatagcccttccaggcccaatagctccatgcgcagctcatcttctagccctagccccaactccaaccctgctactgacacctca

SEQ ID NO: 148720 - DNA, 481 bp, Homo sapiens
cttcctggttgtttattttcttgccctcagtgaggccaggctctctgggggtggcgaccctgagggacccatttgactgagaccgcctttctccagccacccgaggccttcccaaggcagcagcagcagtgccctcccattccaccctcataattcaaggtggctgtgccccattgcactgagaaatggcaagaaggaggcgtcagcacacccatgagtgtgactctgcagagtctctcacaactgctggggggataagcatgccagcctagctcgtgtacatgccagtgctttctaagccctaaagcccacataggcacagctgccccttcagtgaccagtgggatttcctggggcagggatcttgtatcaccctctgcctcctggtctccacagaacaggaatcccaccttctgtatgtgcacagcagtgcaacaacagtgcatccattctgaagggagggctaatggcaggatcagag

SEQ ID NO: 148721 - DNA, 444 bp, Homo sapiens
tggcttcacccccaagaggccacacctggccgcagcacagtttatctggcccgtttcagaagcagcgtcagagagtcacagagtggcgaacgcaggagaatctgtgcgcgagaatctgtgttctagcatccatgcaagcgagggaaaggcgtttcgtcgttagaaaaatgcaaaatgagtgattctcacccacacgtgagactggattcagcaccacagtgtggctcccgtctgctgggagccagtagtgtttgtgctttggttttgctttttagctgcagagttcacgtgaggtgtggacatttgagttgctctatcgttacagggagcttgccttttctctgctggttggttttcacttttgctgtctctgtttagaagaaggcactggaacgggggtgtggtgggaagggccctgttgccgggatgggagcacagtcaggg

SEQ ID NO: 148722 - DNA, 296 bp, Homo sapiens
agctgagaacaagaaacaaaaagaggaacccaaggatatcttggggcacttgtcaagcgtctggctgaggacagggtgctgaggacacagcgggagccagatgctgtccctgtccttgagagcttactgtgcagtcagcaagcgaggcacatcaatagatcatttccatagaatacagtaagtgagacaatggatgcgtgtttgtgtggctccaggaatttggccaaaaatggtttagcagaaagcactttggctccctgccgaaggggaaatggacagcctgtcttccctcttct

SEQ ID NO: 148723 - DNA, 570 bp, Homo sapiens
gcagtgtacttgctagaagtgaggcatagatttgcttcaaatttctcccaccatatatcctcactcatggctctgaacttccactttacagaaagacctagggatgagcacaattcagccacattcctagccactttaagggaaggatggcctttgctccattttccgatgagctattcttctttttctcctgagacctcatcagaatggcctttattgtccacggttctaccaacattctaatgatcatcacctaaataatctctaagaagtttcagaatttcctcacagctgtcttcttctgagtcctcaaaagaatacccctagtgttctagtcatggcaatctagactttttataacctgatcctccaaattattccagtctctgtgcattactacttccacttctacattttgggatatttgttatcacaacagccccacctcttgatactgattttttgtcttagtccactttgtggtgcaatgagtgaataccacacactggctaatgtgtaaggaaaagaaatttattttctcccagctctagaggctgggaagtcaatgtc

SEQ ID NO: 148724 - DNA, 421 bp, Homo sapiens
agaacacaaaatctgcagtgtctgtataacctatcatgtgtaactgggcacaccccaccgtaaaaacattaagcagcctacattatgctcatatcagggacaattattcctcagactgctttatagtaaaaaatccattagattagcaatagcagcccttatacagataaataaaatgaggatcaggagataaaaaccttggaactgttgcataaactgcaccaaaatggaaaaacagggatttgtaacatccttgccagatgttagctgtaaggtatgtttctgtaagaagtggatttagacacagactagtgcagagaccatcttccaggcaagatactgcctgactcctgggcaaactccttttgtggatgcctccagccttttttcttgaattttttctcttactcattttctactg

SEQ ID NO: 148725 - DNA, 291 bp, Homo sapiens
acaatagctgttgtggtgagaatagactataggatggcaagggtgagtgcagggaggccagtcaggaggctattgcagtaatccaagtgagaaatgatggtggcttggaccagggtggtaggagtagaatactgagaagcagtcagattgttgggtgcattttaatgtaaaagcaggatttaacaaggctttacatatttgaggagcctctgtctagggtgatatggtttggctctgtctccacccaaagtctcatcttgagttgtcatcctcataatccccatctgtcaa

SEQ ID NO: 148726 - DNA, 642 bp, Homo sapiens
tggtaataaatcagaagaataaacaatgagtatcttagtttctacttacgcacaaagctttctcataaactctcccattcatgacacagtgttctcaatagcagtttgacatagctgatgcagacattcaaataggaacatgagttatgaagatattcaaataggaagaggggtataaaaaagacttactgataggagagcagagaaatgataattttgatttcggtcagattactctggctgttacatagagaactgactgcaggaaatacaaagggaaattaggaagctacttcagtggtgtggtcaaaaaattacgacctccaaaaatgtccacacacgaataatccccagaacctgtgactatgttaccttacgtggtgaaagggacactgcagtgtaattaagtggacacaccttgagatggggagattattccgcatttctcaagtagcccaatttaatcgtatgaattcttaaaagcagagggtctttctggctatgtcagaaagataagatgtgagaaggactcaatctgctgctgctggatgagatgaagaagaggaccacgaactaaaggaatgtgagagtctctagaacctggaaacaaccctcagctgaaaaccagcaagaaatctggat

SEQ ID NO: 148727 - DNA, 275 bp, Homo sapiens
gtctgtgggcttttctgggtccaccctgaagactccctgagtgtccttgactcatcattgtttgcttacgtggagcttaaggagagttctcttttccctgacacatgtactcaataattttgtatgcgatctgctgctttgggggtttttagattatcaaatggataaataatcttagccttggcacaagaaaagctctttagttcttaacctgaagaagacttgaatgtgatttccaagtaagaaagttggaatgatgttgacatgggagtgga

SEQ ID NO: 148728 - DNA, 271 bp, Homo sapiens
caacatgctaaccacggtgctgcttgctttacgtatattgtatcttaaacaatcacaacggctgtttccatccagcaattggagattgttttcgagcatggttacttgtttccacaggcatgctattaacaggtgtcaagcaaaaggaaagctttttttttttcctcttttaatgaacaggaagactgagtttacagctcctgatgcgaaccagttcaagttcagttgcccctcaatgtactcctttttaattagaaaaacaacaaatgta

SEQ ID NO: 148729 - DNA, 417 bp, Homo sapiens
gctcaaaagccaaaatcacctaacagtttctcaaaacagcactgttaacttttgggcacacaggtctttgttgtggaggggcaatcctatgtggaggttttagcagcacccctggcctctgcccactagatacagtagcactcccatccaccctgcctcctacattgtgacaataaaaaatatttgacagacattgtcaaatatcccctaggggcaccccccaacactggttgagaaccactggcctaacaccaagaattattttctcaatatctaacatttagagtcacctttgaacacattttttaaaaaaaaacagtttggccggctacagtggctcatgcctgtaatcccagcatttgggaggccaaggtgggcagatcacctaaggtcgggagtttgagaccagcctgatca

SEQ ID NO: 148730 - DNA, 418 bp, Homo sapiens
tgacctcatttttatggcatcccactgtatagctgcttcttcactcttatttaggcagtgtcttcgcagtttcctgccttgaatacctcttgtatacatttaccaccttaattatttgctgtgtacattttccttgatgccttctccccactatgacagcagattccctcttctgattttccactgatcagcacggcccttcaaaaaccttcacaaaagcccgttagaaacagattgagagacgcatttgtgaagctatttaacaaatttaagtgtcatttttaaagtattcattgtaaattggagcattgtttcatatcggtatcattggagcattgtttgatatcggtaacttgctttaaactgattaagcacatgtaaagatacatgctaccaatagaagaggatgaaaccgaga

SEQ ID NO: 148731 - DNA, 497 bp, Homo sapiens
ctgagattgtcacattccagcaatgacatcaccaagttgtgtaaggattgttgtatgtattaaaactgaagatcacaaacttttgagagcacaaatctatgccttcacttgcataagcttaccgagtgcctttatgtggatttattggcatgtgttcataggaaagaagtggtcacaattttaatgcataatgtgatgtgtcagtaagtgtatatttggattatttatttgttaaacaaatgtgtattgggtacctcctttgcctggcacaccattagaaactaggaaactgaaagtcagtatgacacttctgtgccctcatgaaggttatgacctgatgcagaagaagtaaaccaaccattaggagacagtacaacaaccagtgtaatagaaataggcccgggaaataggaagtttctttcagatgaaatgggatctacagagacaactgcattgtctgggagaaacctggagggaagggggcattcttggcagaa

SEQ ID NO: 148732 - DNA, 406 bp, Homo sapiens
aacctggatgatgctaatctagaaggacattcacagctcatgaaagaatcatcactgctaatcaaatcagagagaaaacccaccactctgcaccactggagacatttcatgtactgaatatttcataagatgggggctgtaactgaagcagaaattctcaacagcttcaggttgcgtgcaaatatttacttaaacattccagcacagtccaactggtgtgcagcaccagcaccagtgagcctggagtgatctttataaattatggtaattatatgtgacatgattcttgctaggtcacaggagcttgccttggtctttcccgctttgccagtagttcccctacttgaatgattaagtgggcaggatgccacaggaaaccggatgcaagcacaatgacaaatgtctg

SEQ ID NO: 148733 - DNA, 295 bp, Homo sapiens
ttttgaccttcagtaactaatgaatattctagaaatgtcaccaatttaaaaaaaatcatgatttagatgagaggcaaaatggggtttacaagcttaagctcatcttgattattctactttgaaaatattctactttgaaaataacacttttatgaaattattaactatgtatgtttgaagcagcaaattttaagggtgacacagctggcaggcagaaaaacaaataaccacacctctttcttggcaaaagtgagaactgtttgaccttttgcttgaaggagtactgtttaaacac

SEQ ID NO: 148734 - DNA, 358 bp, Homo sapiens
gattcagatgcagggagcatctgtgaacttcagggtgaaatccccgattcggtcctggtactcacatgcacttgtaagacacatctttggggacagctgtaaggttcacccccaaacgccaccagggaagggagctggaggagacctttgcctttcctgcctataaagcagacccagtagaggctgcaattggggtggggcaggaagacaaaccctgcacaaggtcagtgccacctctgtctagctagctgccctcagcctgagcttttccacggagaatattcctctacccaggaaaatcattatcagcccggcagcaacagcagcagctgttctctggcccaggaagaaaggttcc

SEQ ID NO: 148735 - DNA, 287 bp, Homo sapiens
cagcaaggttctccttctctagaaggcttctcatgacacagaggcctagtattctgaccagcatctccatagagtcctttccttttattctctttatgctttgttggaatgattggccatgaaatattacaacctgtggcatgtccagacgcgagcgggcccccgaaagcagagtgctgacggctgcgtttgctgtgctttgaggctggcatgcggggcctgacctagatcaccagccagcccttgttctcctggatgtcttagggctctgtcctggcacaggggcc

SEQ ID NO: 148736 - DNA, 443 bp, Homo sapiens
ccaggatgagtgtatcccccctttcttcctaacaggctctgggtggtgcagagcaaaggggtggtgacgagaaggggagaagaggagagagggaaggagagcatgacacatacaggaagagaaccgataaacagagtcaaaggaggctctggcagacggattacatggagcataaaaagaatttcccaactgggaagcatgcctgcaaagacatttgctatcttaagaaaaataaatctcacatcctcgagtctggccatggctggtgaatctccacttggggaagggcggctcagccccaaatctggcttctaagactcttcaggtgcctgagattccgtctgtcatcaagccatcttcccccactcttctggcctcaagagctgctccctcgcttgccatcctggcccaattttatacacagtcccatcctttaatcctcc

SEQ ID NO: 148737 - DNA, 438 bp, Homo sapiens
tatttaatgcttcagcattgtatctctctgccttcatgttggttggttcttccaggaagcagacaccaacatgggattagaaatgcaaaagatctattggggaaagataatagggaaagggaaaaagagtaggtagggaaactttagactgcaataccaagtgagacacatgaaaaagaaaggaatcaagtacaatcagataggaagagcattgtactgcaatgtaactctgagcaacaaggaacttttgtgcaaagatcatctatagaggagtccccattggttgggagtggcaagccttgcttggttattggctggagctaccttagtagagcatgacctcagcttcaaagccgtggcagatcctaaagacacccacagctaggagctgtcagctaactctactccttgtggcagattttgtcttgaaaataaatc

SEQ ID NO: 148738 - DNA, 490 bp, Homo sapiens
tgtgcatctatcagagaggatgcagggcatgcaaggcaaggcaaaaagtagtgcctttaaagacacaggagggctgctatggctggaagaaaaatgactcacaaaaatgtactactgttgcacactagtgctctggtgactgaaaaggcttgggtaaagatgagagatatctgtccagatgtgtatggggatggggataagaagtgggtgcatgtatagctgcactatgaaggcatgtgtgaatacatatgcatatgcatatgcatgcagtgagattgcatccacacgcttgcatgcagcagtaatgcagaacaggtaggtgtgcagtcttccttctaggaattatcctcagcccccaccccatctttcctgcttgggttctagttctggctctgtcacttactagctggatcatcttggacaatctgcttaacttctttggatccctgtttgtccatctgtgcatggaccggggatccttagagtgacc

SEQ ID NO: 148739 - DNA, 497 bp, Homo sapiens
  misc_feature (1)..(1): n is a, c, g, or t
  misc_feature (12)..(13): n is a, c, g, or t
nattttactttnncccggccgcagagctccaccgctgaggccaacgaggccaaggctttattgccttaaaaaaaatacttcaagcacatatgacaaaatttgaaaagttaatatttctaggtgttaacatttctaggaatataggtttttgttacatcatcctttatactttctcaaattaaaataccacaagcaaataggacaaaatttgaaaagttaatatttctaggtgttaccatttctaggaatatgggtttttgttacattatcctttatactttcccatatttttattttatttcccattaccctttatactttcccatatttattcaaaacaaaaaaatggaaagcttctgtgcttattctgagctgttatccaagtgtgggtagaacatgaatgaactccaaagcagtccaggttcaagtccatgaagtctagcagatgagctcagctcccgtccggagcagacacagggctgtaatgcatcccccat

SEQ ID NO: 148740 - DNA, 815 bp, Homo sapiens
cagaaatatctggggagaggctttggaatcataaagagtcggaattaaaatactgttgtgccacttaccaactttgggacaagccgatctgtctgcacctcaatctcccagtctgtgaattgggaccagtgattcctaccacctgggggtactgtggacattcaccaacacgatggatgtgaaagcatcccacttatctcagtggttaagttgcaagaatatttccaaagcagatgccaaactgtacgctgatgccaaaagcaagtatttgcaaaactgtaaaggaaggagaagaaaacatcagcctcttgggaagctaccaaaggagagagaacctggactcagtttgttctgctctcttttagggaaggaggagtgagctcctagctagtgagaggcctctgtacgttgggactgtgcattcactaactccactgtccttacatttgccatttatttgaaaaagatgacctgtgtgtacgaggacctgggtttgaatcttgacttgttatatatgggttgtgagaccctggataaaccactgaactttttcgggcttcagattcctcatctgtgaaacagagaccataatgccaaccttattctaattttgtggaaaaagaaaagcataataacaaatgcaaaatcctagcagagttaataggacagaaaaggtactcaattggctattgtttttaattaatggaaaaatgatattaaacaatagctttctagaaaatgtatatgtttgtggtatattaacataaaaacatgttaaaaaacaagtaataaaactgtatatgcgttcttcaata

SEQ ID NO: 148741 - DNA, 830 bp, Homo sapiens
  misc_feature (13)..(13): n is a, c, g, or t
  misc_feature (83)..(83): n is a, c, g, or t
  misc_feature (86)..(87): n is a, c, g, or t
acatacaagttgnccatggcatgctctggcctccagtcctctacaaagatgtagggcaggaactaccagttgtcagcacagcnccnncccacattgctcttctaatggagcctttcacctcagatgttgtttctcgactgatgggaaggatccaagtatgtaaagattatgttctagatcagctttggtctgtcctttcacaaaagatgtcttttctgcctttagttgcaagaatatttccaaagcagatgccaaactgtacgctgatgccaaaagcaagtatttgcaaaactgtaaaggaaggagaagaaaacatcagcctcttgggaagctaccaaaggagagagaacctggactcagtttgttctgctctcttttagggaaggaggagtgagctcctagctagtgagaggcctctgtacgttgggactgtgcattcactaactccactgtccttacatttgccatttatttgaaaaagatgacctgtgtgtacgaggacctgggtttgaatcttgacttgttatatatgggttgtgagaccctggataaaccactgaactttttcgggcttcagattcctcatctgtgaaacagagaccataatgccaaccttattctaattttgtggaaaaagaaaagcataataacaaatgcaaaatcctagcagagttaataggacagaaaaggtactcaattggctattgtttttaattaatggaaaaatgatattaaacaatagctttctagaaaatgtatatgtttgtggtatattaacataaaaacatgttaaaaaacaagtaataaaactgtatatgcgttcttcaata

SEQ ID NO: 148742 - DNA, 519 bp, Homo sapiens
tacttacacagggtcttgctgtgttgaccaggctggtctggaactcctggcctccagtagtcctcctgcctcagagtccctgagtgctgaaattacaggtgtgagccaccatgcccagccagaagcatccattgaaatataggtgacatactagtaagagatacttgttatcccaccgtcaaaattgatccctaaggaatttttgtattttttgtagagatgggtctcactttgttgcctaggctggtctggaactcctgggctcaagcgatcctcctgcctcagactcccaagtagctgtgactacaggcatgcacagccatgcttggaaaaggtccctaaagaattctaatcctcccttccccatcattccagtttgcggacattttttaaaataaaaactaaaggggaaaataaagatgagatcactggttgccttgtaaccagtgttttactgtatttgatttatttggcctgtaggtgttttccatttggggagctaaagaccctgggagctca

SEQ ID NO: 148743 - DNA, 516 bp, Homo sapiens
  misc_feature (37)..(37): n is a, c, g, or t
  misc_feature (496)..(496): n is a, c, g, or t
ccttttctaggactcttcaccaaataaccaggaaagnattaaccacagggagaaaagagactaaagtcagttgtcatcacatccagataaactttccatctattcttctgaagacagctttgagagattacctgggagacattatctgcacgatgagacaacatttgttcacagtgaagttccactactcaccttcccatcacctcccccaaagcacagaggaactttgtcctagtccattgttcttttgagttattcatttcccctggaaattatttactacccctcacaattgcttacatttccccttctccttctcccctatgaagatggtatataccgaccgtccaacctttcgagtttcatattttatgtggctcccacgcatatgcacattaataaattcatatgccttttatcctaaaaaaaaaggagaaagaaataaagatcaatccatatccaaaaaacaaaaacaaaacaaccggacaactaattnttggggcctttttggcctca

SEQ ID NO: 148744 - DNA, 204 bp, Homo sapiens
taggtaaacttccaggattttgccagtcgtgtgggacaaaaaagagagagagactacagagggaggcttctgtctgttactgtctggtcacccttagtaagtagcaggcaaatacattagaaactcagatttctgtgtatgagacacaccagagtgggccgagggaagagagaatcctgtttggagtgaggaggaggcaggagt

SEQ ID NO: 148745 - DNA, 249 bp, Homo sapiens
tccctccagcccccagctcgggcatgggggagggtggttggacaagatgacctctgaggtttcttctacaaagaggtggattcctctctctgcctggctgacagctgagtgacaggcctgctctgggaggacatccagatgccagtttctggtgcacccggggaactggagttcaaacaatttcacccttccacctgcccagctctgcgcttgttaccgagagctgcttctcgggctatggaatgggcg

SEQ ID NO: 148746 - DNA, 211 bp, Homo sapiens
ttactcatctgtagcacaaagggttccttatcttccctcagtttaagttaatggctgttagccaaaattcttgatttctaagacaaaatttagggaaataataaaaactggccaaactactactaaacatactatttttcatttctttacattgaggtatgtgaattaaagacaagcctgttctttccagcaataagatccaccttttttt

SEQ ID NO: 148747 - DNA, 122 bp, Homo sapiens
cattagtcagattcaccaaatagcagcacactcttattccattgctatggaggcataaaatatatcctcttctggctggtcgcggtggctcatgcctgtaatcccagcactttgggaggccg

SEQ ID NO: 148748 - DNA, 551 bp, Homo sapiens
ggcagaaagccagggggaaaggttctggcagaggggagcgtgaagtgtgtaaagttaggaagtatccagagaggaagaagaaaagaaagggtgtgcaggtttaaggagtccaacaagcagggcacccaggagaaacttgatggcaagctctagaccttacaccagaccttggaatcactttcttagagaagatgtctctctctaaaccatctcctaggaaaggtcaggagagctgcggcagagtctgggagcactggagagtgctgtgctgcaaggcgcaacgtccacctcccctaaggacagttgggaaaggttgaccatgaaccctcttgcttccactgttctcttagaacgctccagaatcaaggcgctttctgtggaactctacttcaagggcctctttcttggtgggcatgtctaactagcaggtggataacagttctttgtgacattggttatttcttaagagaacctccaggtctgccaccaaaagtgcacgagtaattgcaatgggaaaggaactgacgcttattacaatattaataccagga

SEQ ID NO: 148749 - DNA, 285 bp, Homo sapiens
cctggacaaactttgggttctagcgaagtgggctgagcccagtggaatagattactctttggtaataaagaaccatcaattcttagttaattgtttaggtccctacagaagaatgataaagacagcagcctcctggctttcaattcaattcaccttgcttgtgggggtgctgcagaacttacagaagtatttccagaggaggccacgcctttaaacagcctacaacaaaacatttggcctttggcacttaatgtattgaccatgactaagagcctgggtgtggga

SEQ ID NO: 148750 - DNA, 491 bp, Homo sapiens
actcagcgaactctctgatctttgacaaacctgagaaaaacaagcaatggggaaaggattccctatttaataaatggtgctgggaaaactggctagccatatgcagaaagctgaaactggatcccttccatgctgtggaagctttgtactgtcactctgctcaataaagcctgcagctttttattctctcggtctgctccatgtctctctttcaccgtgggctgccgccacaccaaatctttggcgtggctaaggcaagaacctgctgggattacaggtgtgagccactacaaccagtctcatcttgcattttaaatggttctttttttatgcaggatttttgtgctttggccattttgaaaatattgattcaatgagttgtagacttccaaatgttgacatagttcattatatagtatcgaaaactacatttattactatcaccacaaatttcataagaaaagtattttaacactagatggctgggcgca

SEQ ID NO: 148751 - DNA, 520 bp, Homo sapiens
cgatactgggactataggcactatagtaccataggtaccataaatacaacatagctgtgcgtggtagtgggtgcctgcaatcccagctactcaggaggctgagatgggaggatcacctgagtccagaagtttcaggctgcagtgaggtataatcatgccactgcattccagcctgggtgacagaactctgagaccctgtctgaaaaaaataaaaaagttatcctgggcagacaaacagcttttatttctgaagcagagacattgtgcctggtggtaaaaataagaaagaggagagagcttctcatttcctttcacctctctgagaactaaaatttgttgggctcttaaatgctagataatcctcaccactaccctagaaggtaggtagtatatattttattgtgaggagtttgagactgaaaagctaactcacttattcaagaaatgttcattggtacctgctatgtcataaatactgtgccagattctataaaatattccgtggcttcatggggcattg

SEQ ID NO: 148752 - DNA, 249 bp, Homo sapiens
aaagatttttaaacggagtaatagatcacatatctgtgttagaaatacaactttaagatggcagataactgcatcttttttctgaggggcaaatccagtaatctcattaaaaaataattaataacagatttttttttttttgagacagagtttctcttttgtcgcccaggctggagtgcaatggtgtgatcttggctcactgcaacctctgcctccttggttcaagcaattctcctgcctcagcctcct

SEQ ID NO: 148753 - DNA, 741 bp, Homo sapiens
agaatcagaaacccacgatcaccagattttacccacatttgatcacttcaggaaacaggagttttctctgtaggaagctagaacccaaattctgctttaacatcaatgactgaatcaatcaaagcagactgtgggcaaggaagactgcagctttcccctcccctggtgtacatcttcccgcttcctcctctagactcaaaattcctgccacaagaaaaccagaagggatgagctcagaatgtatttctccctgtcactgccttcctgttgccccacctgtgccacctgatctccctacctcccctcagtaatgatctacaacatcatgtcaccccctcacaacaggggcattctcctctcagacatggagtcaccctgggactgagtgatcagcctggggatccccttggggctcaggcccccccttcctggctagcttgcggtaggggagtaggtgagaaggcaagagtggcttcagaattacagaatccagttgtttaatccctggcctgatcctctgggctccaaggctggggctgggtcctgagctcctcagaataggataaagggaggaaagagtggggcagtgatggagccaggtgaccttgggattatctgggttataaagcatacctttggtcagcagcaggggaggggacagtcctccttcctgtataccttctccctctgcccccacccaaggcctccttaccctttccctgcctgaggactttgagcacg

SEQ ID NO: 148754 - DNA, 413 bp, Homo sapiens
tgtatgctaaggctctccctggataaagtacatacctttcatgaggtagcccttgtgtctcaagacagcttcctgtcacactgcaacattcatctctccaggcactgagactgggacaaggacgagaagtaagtggtggtttgtgttttctttgcatttatgctcctaaccactgggtacacagcacactaagttagataaggttcaacctcaacaacagaccaggggcacctgtctgcatcttctaacaaccaatagctaatgctcatttgaaaaaaaataaatgaagggtttgacccaaggcatcaaagctttggattctgattttcctttgtctcaatggcttttagatttctaagacctccctttccgtttctctccatctgacctccaaccttccccagattcctaat

SEQ ID NO: 148755 - DNA, 441 bp, Homo sapiens
ggggtgactcttggtcagaggttgagtgtttccctaggtgtggaggtgcacggagaagagaggggtgcagttcttaaaggacacatggcttatgccacaccccctgccccaacccccggagtggccagctttcctttgactggggaggaggcagctgtccagggttgtcctcacctctcctcctggagaatgtggtcccttcagaaaggggacccagtagtgggtgacctggtgcaaaccacccactgcctcctctgggccttcctggggctcttcggctctcaggagaggagggagctcaggctgtggctgctctgtgagttggacacggacgctccagccgctgggcccagcagtgtgaatggccatagagaacaggggcccagaggctgctctcgaggacactggcagcagttgtgctctgggctcgccatccttgaa

SEQ ID NO: 148756 - DNA, 154 bp, Homo sapiens
tgcaaagcaaatctctctttttacaggcaaggaagctgggctaagtgagggaggctgggagagctgtcaagcggctgcattgcggtttgtgtgggggcagagctggggctgcttcccctctcgggctctgggagcgctgaggagggggaggctg

SEQ ID NO: 148757 - DNA, 545 bp, Homo sapiens
aaataagtttttgtctttataaagggatggtactataagccctgacagttatagtctttttaacgtcaactaccatacctaaacattgaaacagaaagatatccacattattcaaaaacagatcaaaagactgatttttttaaaaaaaatccatcatgattaaaaaagatgagtttaacacacaaacatgtcacctctgccaagtgatgtggagaaactccacatcaaactcaaaactgttcttcaatttcaaatcaagctattatcagaaatatttttaatagctccagtttgcaaagaggtgaatgtcaatttatggaacatttgccattgagcgaaagactgataaagaataagtacagttaacagatcttgcaactcccttactgataatccccagtgaaattaaaataaaggctgggggtggtggctcatgcctgtaatcccagcactttgggaggtcaaggcaggcagatgacttgagctcaggagttcaagaccagcctgggcaagatggtaaaaccccatctctaccaaacatacaa

SEQ ID NO: 148758 - DNA, 110 bp, Homo sapiens
tcccaaagtgctgggattacaggcatgagccaccatgccttgccaccattttttaagtgtacagttcagcagcatttagtgtagttgtgcaagcatcaccactatcccat

SEQ ID NO: 148759 - DNA, 311 bp, Homo sapiens
tgcctcagcctcccgagtagctgagattacaggcatgtgccaccacgcccagctaattttgtatttttttagtagaggcgggatttctccatgttggtcaggctagtctcaaactccagacctcaggtgatccacctgccacggcttcccaaagtgctgggattacaggcgtgagccaccacacccggcgagtaatagttcttaagtagaggaatgagatgttaagtgtgtgtcagaaaatgaatccctcctgccttattccattgtcatatccctttgggatactaaaatctcggggagggaaagcctat

SEQ ID NO: 148760 - DNA, 408 bp, Homo sapiens
aaactatctgaaaaggaaattagaaaaataatcccatttacagtagcaccaaaaataataaaatacgtaggaacaaacctactaaggagatgaaagatttctattctaaaaactacaaaacattgatgaaaaaaggtgcacaagacacaggaaaatggaaagttatcccatgttcatggattggaagacttaatattattaaaatgttcattcttcctgaaatgatctgcagactcactgaattcctatcaaaatcccagtggcattttaaaataaaaatagaataaataattctaaaattcatatggagctataaaagaccacaaataaccaaatcaatcttgagaaagaacaaaactggaggcactacattttctgatttcaaaatatattacaaagctacagtaa

SEQ ID NO: 148761 - DNA, 371 bp, Homo sapiens
ataagagtgtctgtgtttactctcctgtttaccaagccagtgctaaacacaacagcaccgagctgtttctcagctttcctctggtcccaacaaagaacccccaagtcaccacatcctatagggtttgaagtttcagcactacattctgccacttctttgttgtgttttttgttgttgctgtttcgttttgtttttttgagagagtctcactctgtcgccaaggctagagtacagtagcactgtgtcagctcactgcaacctccatctcctaggttcaagcaattctgcctcagcctcccaagtagctgagattacaggcgtccgtcaccatgcctggctagtttttatatttttagtagagacggggtttc

SEQ ID NO: 148762 - DNA, 384 bp, Homo sapiens
caccaaaagccactacctgaaaacaatgaccaatctagtattgggaaaataacagaaatgaaagcaactacttccaaaaagttatagggctgcttgagaaacaaacaaacaaaaacaagcagtttgttttgtttttgtttcatttaaagagtgttagtgttaaatataaaagaaataatcataaattatttttgtttcattttaaaaaatgattaaataaatgcatactgaacacagaaaaacagatttctgaagagtgacaggaagacaactgtattgattttctaggagtgaaacatctcaatcaaattcaaataaattaaatcagagcactaaaatgtgaagaagctgataagctttagaggagagagatgcttaaagcca

SEQ ID NO: 148763 - DNA, 178 bp, Homo sapiens
ccccattctcatgaaaacaggaatcataacaatgaagaaaaataaagtatgacctactgcaactatcatcagcaccccacagagtgggtacgcatgtgagtgtgtggtgtacatgtgggaatgtgtgcaagtgggcgcctgtgcatgtcagtgtgtggtgcgcgtgtgggaatgtgtg

SEQ ID NO: 148764 - DNA, 325 bp, Homo sapiens
taaaataaaaacatcatgttaacccaaaatgaaacaattgcaatattgaaaatgtatcttttaaactttagtggatgtttttccattttttattttctgttaagtattgctaaagggcctggcataaaggagggccactgagattacggtaagaaaagggttcattttcttcctgtggcaggtgttctgaccagttgaacactagggatgcaaagatgaaaggcaacaggatttttctgtaaggcccgtcatccagcaggaataggaaagtgcattgttctatgtaaagccatagagactggcctctggaagtggctggctctca

SEQ ID NO: 148765 - DNA, 229 bp, Homo sapiens
gaagaaacgaggataacactgactagagactataagaagaatgagttttgtttcatgaagcttttgtttccattacatgtatataagttcccatgcgtgtagtgtgttagtgctgtactacatgcttcttactgtgggttgtagtcaaaaccgctgcattatttggtagaataattggtgttccagtcttctgaaaatggttaatatctccaaatctcacactgtgaat

SEQ ID NO: 148766 - DNA, 135 bp, Homo sapiens
aagaggaagatgggaaaagcggattgggatattaaagttcagaggctgttaggtcaggaaggtgacctactccaaggataagagtagtttaaaaagagactaaaatctctgagaacaattactataaccccctca

SEQ ID NO: 148767 - DNA, 363 bp, Homo sapiens
tgcccgcctcggcctcccaaagtgctaggattacaggcacgagccaccacacccagctaaaatgggatccctctttcattcctcatgcattcaaaacctctcaggcaggaattttgtctgcttcacttttgtggtattttcagaacgtggaccatgcctggcccctggcatttagttgggaagtaatgaggcccagtgcagagaaggacaagcagctcatggttacgccctgctgtgcctgcaactctgtcacaggggaggccacgagcagggggtgcagaaaacagagctcgcagtgctgagtaggccctgtgcatgggagatgcctttgccctgggccctgcggaggtttcagacagatgg

SEQ ID NO: 148768 - DNA, 332 bp, Homo sapiens
ctcctgcctcagcctctcgagtagctgggactacaggcacatgccaccacgcccagctaatttctgtatttttagtagagacaggtttcaccatcttgaccaagatagtctcgatctcttgacctcgtaatccgcccgcctcagcctccgaagtgctgggattacaggcgtgagccaccgcgcccggccagcagcctttctttccttgaggattcttgccctgcccaggtgcagttaggccttagccaaggtcttagggaaacgcttatgcaacttttatgccacccctctggcacagttcccttccttcttgtactgtatctactaactct

SEQ ID NO: 148769 - DNA, 789 bp, Homo sapiens
ctaggctcagagaagaatggaagcagaggctggaaacaaagctgaggctgcggaacaatccagaggacactgaaaagaggacaaatgttggctgagagcttcctgcttcattgacacaagaagatgcaaaacactgaggtcactttgctagaagtcagtgcaaattcctgagtccctttgctataccaatcagctctcacactattgtttccccacctgggagaggacttacctgtaaatcctttcccagtgtttgatggcagttattggccaagtcagtcctctgtgcatgggcgccaggttattatcccaaatgtctctaaagatagcttatttaatatcgaagctccatgcagcattccttgcttctatataattatcttctaattttgaaatccaaatattttaaactctaaacacaccaagaggaatcctcaaccttcatggtcaaactttaaacactgtacagtggtattgccccaccatttcacctaggaaacacagctttatggaattcttgttttctttttatgagaagagaaatgcacctatctgcagaaattaaaaaacaattatcaatagtcaaagtacaatttgaaaataaattgatctaatattcttttttcttcatataaatttaattagctttttcaaaagtatgtttaccaagaataatatcagaataattttaataaaacttggttgtcctgtcatcactatgcacatgccttcattttattgctttattttaatctctgcatgtttacactggttggctctctgtcagcc

SEQ ID NO: 148770 - DNA, 512 bp, Homo sapiens
tttcacttctgtaaataaagggggagaaaatgaaatgtgattggaccaccctctccttctaccacctccttaataaagatgaggctggccccagaatcagaaattctgctaaattctcagggttaggaaagaatctgtagttcttccttttgtccttaattgttggatccctttcaatttgtgcagattctacaattacaggatcagccagcaggggtcagcaaggctccttaactgctatcaagcatagagcaagcctgcttttttccattatgagtataaataccagtgatagtaatactccatgaaacagcctaatgaagatagttatcccaacaatctctgtaattttcctactctgtcaaaagaaggccattcttcctatttcttgctcattctccccacaaagtggatctcaatgattgtatttaaaatttggaaggaataattctaagccattgccaatgaaggcagcattctagaaactttgtcctttaaaacacacacacaca

SEQ ID NO: 148771 - DNA, 584 bp, Homo sapiens
catgttgctgatatttgtcttgatgggacttttaatatttgcaaactaatcaggatagcaaggttataccaataatttctgaagacaaaaaactttctgcattattttattatattgaagaagaaaacttaaaaaaaaattccagtgtcttagcctcaataatctgtacacttttttgcacacatttatctcctaaagattttaattggacaaatggccacatctcagaagcactattgaaaaatgtgtacaagaatgtcacatctgggttcagtctagtcttttattagtgcttgatcagcatgtattggacagaatcgttaacacaaaacaagcaaggtaaatcatccactacacactaccaccctgataaccaccttgtgccactgaataaaaatgtggatccaggagaaatcaaaggacatccttcactcatttgatttgattccagtttagacagggggttaagggtgtttctgcttttttggggttttagtggttctttttagtttaaccaaataccctagctgatcttgcagaaagtcttctggactctgaaataggatggatcatctcatctcagc

SEQ ID NO: 148772 - DNA, 342 bp, Homo sapiens
tgttggggtagttgcttcccaatcctattttctcaattgtaaaatggaaacaatatcttatccaattgaaataaatattaaataagatactttaaacaaaagataaaggtgctttacaatttacaagtatgaggtataacttaaacagctaactggaagacattaacataatctacatagaatgaccttcagagcaatatggtttgcaatttaaggaatgaaaggaagataaattgtaatacaaatgtacctttctcagagaaggctgaaaggtacaacgccaaaggcattatctgcggactcaggcttcagattacctttgccacttcctacatgtgaaat

SEQ ID NO: 148773 - DNA, 540 bp, Homo sapiens
atattttcccattttccacgttataaggaaacttaaaaatccttttcctaactctaaaacaagcctcacatgcccttggatgcgtaacaacccattctaaaaagcactcatgcatcttggtgtggaaacggatcatgggaactctggagacctggcactcaagtagttaaggaaatgacaatttcaacagatttctgcaaagctcctttatggatagcccagcaggtgtttcttccattaaaacacagaatattaacggaggccttgatttacattctaagcctgatttacacaatggttttgttatgcaccagcctttgtccccaagtattaattctgctaaatatttcccaggcagtcactgctagatctccccaaggaatgagcaatgataatacagcctgtacctgctattttgccagcatcccatttcatcaatttatggcaagaggtaaaattggcaagttcagaaatgagacagtaaggtacacagtttgagtatttctgtcttttctctaaggagatacagctattctgcag

SEQ ID NO: 148774 - DNA, 320 bp, Homo sapiens
ccctcccaccattgtgtgaaacagtgccaaagaatttcattaaactggctgacttcaaggatggtgaactaggactgcttctaaaaagcaggctgatagtaactgagggaattgcctaataaggaatagacgggaggcatgctgcccctacataatctcttccttataaagagagaagtatggatgggatatgttgagagccttcttagagtcagtttgttgcaaatttcacctactctgttcttttccatccatccccctgagtcagttggttgaagggagttattttttcaagtggaattcaaacaaagctcaaacca

SEQ ID NO: 148775 - DNA, 457 bp, Homo sapiens
ggtgggggtgaagaagagctgtattcttctaaatatgaagaaaatcatgcggaagatgggtgaacgagtttgatcccaagccctacaatgacaagccaggctaaatgtagcttagaaccttcttttcccattgagtagtttccttaatttaaatataaaaataaagaaacaacactctggggattcctctgttgcttctctcaaacacaaggggaacttccttccgtgttgcctatccccgtctactttccactctttacctccagtgctgtctccaatctcctgagccctcctgaccaatttccaacatcgttgttccatatttcaattgtacccctctttccccctcaatgctcgagctttcctcatctttttggcaccattttgtcccttctggacctcaatcaccagcagggcacgtgcaccctctgcccatgcgaagaggcactgttggcag

SEQ ID NO: 148776 - DNA, 277 bp, Homo sapiens
attttttccactcccttcctgcagtatcttctgctctcagagtctcagaaaactcccccaccccaacctcacagccttctggacccctctaaacctccacttgttcttgcctggacattttcacctccccctcactgcaatactgagtcttggggcatcttctccgttggaacctccaggccccctctgtgttcactctgtgtttaacactcttcaacctccacgccaactcccatctcaaggactttccccataaagctccagacttcccccaagc

SEQ ID NO: 148777 - DNA, 346 bp, Homo sapiens
cgcaaatctagatgtttcagcctggatcgagcgagggttagagggttagtcaggccagggtcaacttcagagtcatgggctccctaaatgcgacttctagggttgagttgctgtggacgagcgacccatgtcggaatcccgcgcccacgtggctgcccaaagttccgagtctccgggctgcaggttctagtcacggaaccgagttgggagagtcataggggctgggacttggaggatcggctgaggtccggtgctcttggctgtgttcgcggctcggagccgtcgcctgactgaggggcccgtcacagatgtgtgatgtataagctctgcacgcaacaggagctca

SEQ ID NO: 148778 - DNA, 778 bp, Homo sapiens
gagacggggtctcacccaattggcccaggctggtctcgaactcctgacctcgcgatccgcccccctcggccaccccaagtgctgggattacaagcctgagccccggcgcccggcccgtagactttactttttagagccgtttttggtttataccaaaatggagtgtggtgtgtcctgaattccccctttggacagcctcctgccccacagacacccccccccgagtagagtccctcagggacccatcactcacatcggggtgcatgcctggtgtgtggggggatgaggaaccccatgagagcatcacgcagtgcagctccactccctgaagaccctctgctgggcctagattttaaatattttctttccatagcaagtggaattgttacctggaaaactctggaggtgccactttggttgtagtttgctagttcatgtttgaattaaacaccgtctgtcacgcccaacctgtgcctgcgccccgctggctggaatgtagcctgggtaagcgagtggccggcacgccgcggtgccacgtgctggtgagcccaagcgaaggtggactcagcagccccagccacggagtggatgccatttcgttgcttaaaacacttgtttgtgccaggaaatgagaaaagaggagtgtttgtgtcggtagttgtcaatcttagctgacctgaacgggctgggatgaggtcctggcatctgtgtttagtgttcacattgtttgtacggacctactgagcagcccgggctcaggacagtgcatgtgggcccc

SEQ ID NO: 148779 - DNA, 605 bp, Homo sapiens
gagaaataaaaactaaccacacaatccaaacattgtaggatactcactagtataaataataatttacttattaaccatttattaaaggcctcccaagctgcaggccctgtgccaggttttgcacagacattacagcaaaacattatgtaaatcaggtggcagtttacttgcctctgtgttcttcagctaaagcatttgcccacgtcttttacctttcttgggtgaagatcaggatcagcacttgataaggtttgggttcagccagcagtgggatcattcaaacagattgaaggcaaaaagacatgcgtttgtttgagcccaaaagtgattagaaatggactgggtttgaagtgagggatgggagaaatcttagccgcctgtgattaaaagagaaaggaggggctgagacgtgcggatcacgaggtcaggagttcaagcctggccaacatggtgaaaccccgtctttaccaaaaatacaaaaattagccgggcatcgtggcgggtgcctgtaatcccagctacttgggaggctgaggcaggagaattacttgaacccaggaggcgtagtttgcagtgagctgagatcacgccactgcactccagcc

SEQ ID NO: 148780 - DNA, 130 bp, Homo sapiens
caggcacagtcaggagggtctgaagatacacgctccactgaagggctgtggctttagcaggggaaaaatggaaagttcgattttcagtaactttcgaagtcattggacagagcatgtgttaccgaccaca

SEQ ID NO: 148781 - DNA, 462 bp, Homo sapiens
cgcaacagcagcaactcccttattcctcaaaattgtgttattgcaattgttacagcctagtacagttttgtgactccataatcatgtgtgtacttaacaaacattaaagtatgttaatgatgtgttctaacaacatcatatctctattaatctgttttctaatatatctgttttctaatataaacatagaaataaataaccaactcaatatcatatatttatataaaatgctaatattcacttttggaaaataccaggccaaagcattgtatcgtgatcgtgaggattaacaagtcaggattactttgcagctttacaagaggataatattttagaggaattgatccttcccataaaatgttcagccttcgggttagtcccttttcttattaatggcaatggctgtctgaaatccaaagttaagtgcccaaagcttttctaaagaaagataaactcaccttt

SEQ ID NO: 148782 - DNA, 378 bp, Homo sapiens
gtgctctgactctgttagtcagcatttcagatagagcataatacattgatttgataaaacatttttctgaatccctctttctacattaatgtttatattttcaaaacgattgtttgaaagaaagtgtcttatagaatccattgtttggcatcttggtaaccaaagaaatgggtgtctgactgaattaaacctttttaaaaactggagtgcactcaatatagttgccatatgcatcctagtctattttgtatttgacttaaacccagacgtgaagctgtatgaaattgtagtccagaatttagattaaagatttaatcgtttatctttgaagaacttgtagtctttttttcttagtccacaaatataattacattgcaa

SEQ ID NO: 148783 - DNA, 535 bp, Homo sapiens
cctgccagatacacaatttgttcaacttcttcatgttcttgatgatagtccccaaaaagaaagcgtcaaagaccaagccaagcaaaattccatttactcaatcacacatgcaacttccagccagctctgttttccccttcactggggtaaatgcctccagtagaggcagcacacagaattgagagttatgtgaggtggacttaaaatattcacagaaagcttccattcagagtctattattaaatattctaattttcttccccatttgcctgccctccctgcctgctgtagatctgcctgcagcaattaactaacagcccatcaagactccctgctccaaaatcatccacacctttaagcatagttatcccacacttgggaatttatcctagggaaaaatctaaaagaagacaaagcagtatgtgcaaagataatataatgcagccactaaaaattattacaaacacaatgtagaaataaaaaatatttgctgaataatattaacagatgaattccacacaaaagttgcataaag

SEQ ID NO: 148784 - DNA, 421 bp, Homo sapiens
tctagagggagaccagtgctgcctctcacagtggcagttttttctctttgcaagaggaggggctgttcaattccatagaccagtgggcagatagccagttgaatactctgtgcatggtttgatcctttattagttcgctctaatatttttctgtagatccttttgtcctggactcaaaatctaatccatgcattgtatgataccgtagctctcctaaggtttgtgtttccttcaaaatgttttagttttcttcaactaaatttgatttttgctgttagaagtgacatatttttatggtatacactatgttccttttttctactgcgagtcaattttttgaattttcgtgagaaagaatatatctacaaattgcacgaaagtatcataaaaacagtactctagacttttcttttcttttctt

SEQ ID NO: 148785 - DNA, 233 bp, Homo sapiens
gtggctttaccataggacttaaaacagctccatatatcggttttaaatttaattatacacatgatcttatttttttctttagcctgcaattgcttgaaaacagtgactgtattttatttttgtctgtgtaccatctataacaggcagctcctgttaggcactacacaaatatttgttaaatgaatgaatcaatgaatggaataagacatacttgctgaattgcaaaaaaaaaa

SEQ ID NO: 148786 - DNA, 192 bp, Homo sapiens
atttagattggagaggacgaaggccctgaggtccaagaacattgaaacctgacagtggacgtcaatggctgcagggaggagcctggcgagacgcccacgctgccacgtgcccagcaacgttggagcctgtagcacttctcccctgccctgctctattttatcttttttaataaagatggctcctgataaatg

SEQ ID NO: 148787 - DNA, 191 bp, Homo sapiens
cagggcctatgacaagtgctttacatgccccatctcagctgtgggggacaaagaagaccacaagccattttccctgtggcatggggagacatttgagcagagcctaagaattgagtaggagtcagcagacacaggggaggcaccaacacagtcagggggccacatggtttgtctggaaagccaccagcaga

SEQ ID NO: 148788 - DNA, 582 bp, Homo sapiens
ttgcttgaacccaggaggcagaggttgcagtgagccaagatcgtgccactgcactccagcctgggcaacaaaacgagactccgtctcaacatacatacatacatacatacatacgtttcctgatcagcattataatcacaccaatgtagcaactttcaagagaacgtaaaaggttccatttaaatgtagtgattggccagttgcagtggctcacacctgtaatcccagcactttggaggccaaggtgggcggatcacttgaggccaggagttcgagaccagtctgggcaacatggcgaaaccctgtctctactaaaaatacaaaaattagtctggcatggtgacacacgcctgtaatcccagctacttgggagactgaggcatgagaatcacttgaactcaggaggcggaggttgcagtgagctgagatcacgccactacactccagcctcagctaaagagcaagactgtctcaaaaacaattaattaattaattaatgtaaatgatttagttaattactgtagaaagtaatatgaaacttggcattttgttgacccagaaacacaactcagcattccatgt

SEQ ID NO: 148789 - DNA, 296 bp, Homo sapiens
aaagtcaacagctataatcttacataagattaaggaaatataaaaaacttacttggatacactgttggcaactacttcctgtaagctggctgctgtcaaaataccagtttcttttctctagtgtccttttagttccccaaaaaattggctgggtgtggtagctcacgcctgtaatcctagcactttgggaggctgaggtcaggagtttgagaccagcctggccaacatggcaaaaccccatctctactaaaaatacaaaaattaactgagtgtggtggcatgtgcctatagttcca

SEQ ID NO: 148790 - DNA, 626 bp, Homo sapiens
ggttgtactacagtaacagtaggagattttcacacctcacaattagcaatgcacagatcatgcagacagaaagccaacaaggaaacatgagacttaagctacactatagaacaaatggacctaaaagacatacacagaacataccattcaacagtggcataatacattattttaagctgcacatggaacattctcaaggatagatcatatgtcaagccacaaaataagtcttaacaaatttaagaagatggaaatcatatcaaatatcttttctgaccacaatggtataaaactagaaatcattaacaggaggatcttcagaaaattcacaaaaacatggaagttaaacacatgctcttgaacaaccaataggtcaatgaagatattaaaaaacaaattaggaagtttattgaaaaaaatgaaaactgaaacacacagcatacaaagcctatggaatacagcaaaagcagttttaagacagaagtttttataacaataaacactgacatcatatgtcttctgcaaacaggaacagtttaacttcttttccaattaagatgccttgtatttctttctcttgtcttattgctctttctaggacttccagtattatgttgaacagaagt

SEQ ID NO: 148791 - DNA, 408 bp, Homo sapiens
gttctatttttccacatcattctaatacttcgtattgtcagcattcttaatttttttttgttttggtgggtgtgcagtgatatctcattgtggttctaatttctatttgcctgatgactaatatgaaaatttcctcatgtgcttactggtaattcatgtatcttcttcttttctgtttttaagtcttttgctcacttttctattgtttgtatttttataattaatttgtggttgtaatttattcattctagatacaagtgctctatcagatacatgttttatgaatattatttcccagtttgtggcttacctatttattttattttatttattaagacatggttttactctattacccaggctggagtgcagtggcatgatcttagctcactgaaacctctgcttccc

SEQ ID NO: 148792 - DNA, 234 bp, Homo sapiens
gctggcccctgggtgcacagctagcaaggggctggctcttcagatcccaagtttcagactccgaagcctggagtgttagctacaatctcgcatttcctttgtcaccctggagtgtgagagtgtgtgtgtgagtgtgtgtgtgtggtctgcatgcctatgtgttttgtgtgtatgcgtatatgtgcgtatatctgtatacatgtgtgtatgtcttcgtgtgtgtctgtgtgctgt

SEQ ID NO: 148793 - DNA, 249 bp, Homo sapiens
cttatctgaagtaggctgtagctaacatttgactcatgaaaatgaagtaagcattcaaaatgtttttttcctcaaagctaacaggccaactcggaatagggatatcgtaatattaaagtagaaaggcttttcttttgtggcaaagctgtaggcaactttgagaagtactggatttagaataaaatttctatcctctgtttgtaacagagttagggctaaagtttgtgggtttctatcatctgtcagagg

SEQ ID NO: 148794 - DNA, 228 bp, Homo sapiens
atattactggcatttggtaatggactggttcaagatatcctgagtacatcatgtaacaggatatacactgaaactgcatgctttggagtcgaaaaggcttgattctaaatctgttcaaatctgagatgacacaggctaggcaagatatttaagtcctgagacacgaaataatacctataccttccagtgttgtatgtacaggacccaaaaccattaacaccagcaggt

SEQ ID NO: 148795 - DNA, 463 bp, Homo sapiens
gatcagctcggacttacaccacgatcacctcattgttattttttcttctttttctgtggattatagtatcctttttttttttttctagtttcttaaggtagaagctgacatcattgagaccttcctttttttctaacacatgtttactgctttggatttctctgtaaatactgcttttgctgttccccagagattttgatatgctgcattaattccctttgatttcttctttgacttatgggtcatttagaagcatgttatttatttccaggtatttgaggattttcgagttgtattttttatcactgatttctgatttaatttcatcgtggtcacagtttaaatgacttgaatcttttaatgttcatttgttgttattccttccaagtaactgcttccaaataactaaactgcttgaaactatttttagactatttataattgaaatggctgtatgaaagtg

SEQ ID NO: 148796 - DNA, 810 bp, Homo sapiens
tttaccgatcctttgcactgctcggatggagtagcaggaggcaaacgtggggaagctattggagcagccctgttgagaaatgatgagggtctcaaatgagttgggaacagaggggtggacagaagggagggagccaagagagcttccagaagcagaagcaacaggacttgatgatgggctggggaagagggcacatgattctagtgccgtgatctgcactgggacaggaagcagaagtagcatgtttgaaggatgagggaaacagttcatttggttttagaaattggtgacatggtagaaatgcattcaggtagttggaaatatagtcaggactgtcactcaggagaaaacgggctagaaccaggaatcctggtgtcatgggtacacaggtggcagacaaagccactggtagatgagaaatcctgctcagggagaaagcattaagggagaagaaaggatggaagagagaaggccagggaaggagacggaggagtgggcacagaggtgggagggcaaccaagagcacatgatgggacccagaagccaagagagaaaagactagaaaaatgggacaaggagggagaattagctcattggccgaattggcaaccacagttttagggaagtgaactaaagcccttcatttttcttcctgcagcatctctcagggcctgatgttgccttgtagttgtttacttggatattacatatctgcctgctacagtgtcaggtgcctggcatgtttttgcaggacagtattcacagcacttagaacacgtcttccttatagatggtgctcagtgaatatgt

SEQ ID NO: 148797 - DNA, 264 bp, Homo sapiens
ctgtgccctgtaacatggggataattctagtacccagaacccccaaaaagtggggagggtgaatcaagataaaatgtgcaaactgttcagacaagaggccaggcaggtgagtgctgttgaagtgggggctgctgcaatgactgacaaggcgaaactgacgcgctctgcatgccacttccgggatcccagtggaatttaaaatacaagcttcccctagctctccaatgctgggtttgtctaatttcgtgcttcaaaactttggca

SEQ ID NO: 148798 - DNA, 971 bp, Homo sapiens
aacactgtcttcaggagctaacagtcccgctgggtcagggagcttccatgcgatgactagagctgcacattaggattacctggagagatttaaaactatcccattgctgggctgcgccagagaccactgacatcagaacacagatgggtgaagcccaagcctcaggatgtttaaagtccctcaagagattccagagtgcagctagggttgagaagcactgaattagggaaagttggtatgaattttttggtgctagagggaagttcaggggtgggagggaggcaggaagggctttctagaagagcagcttctagagtttcccaagggaaggccctagaacggcactgtctgggacaggagctatgagcccccagttgttatgggtcatctgaaactgcattgagcaaaatacacacacacacatacaaacacaacacaccatagaatactattcacgccataaaaagaattgaaatcctatcattggtggcaatatgggtgaccctgaaggacattgttaacgtgaaatacagccaggacggacaagacacataaggcataatctcactcattgtggattcctaaaaaagctgccttcatagaagcagagcatagaattagtgttcaccaggaggcagggcgagggatcggacgcgcacaggattcatgcagacagatggccaatgggtacaaaagttacagctaactagggatggaataaattcctggtgttctacggcagaatcagagtcgggagtcgacgcgtattactacacattatgaagtgtaccctcaacttgggggaaaggcttaaagccctattgatagcaacagagacgaacacaacaactcctctatgggttggaatagactcctataggactggcagtttctggcaccacagggcaaggggtcttacacgtcccactttgagcctccagcaaagcacacataagggcttggccaaaccg

SEQ ID NO: 148799 - DNA, 378 bp, Homo sapiens
ttctcctcatcggagtatgcagtccattctcccagagatgacaccaataccaagtcgtcctgggactggcttattgtctgacaaagtgctgtgaggatgtgacactttagctatgtaagaggattgtgagtaaaacacaataatctgatttttttttgtaaattttttttgccctctcagcattaggttttgaataatttattattccttcttcatatactcctggcggtgaggttaatttggtcatcttgcaggggcctggctggtaatgaacatttttatatcaggcctcggagtactttctccgtaagacataccacatgtttaccacttaattgcccaagttgcttgagagtgttagcgtctgggggggttgga

SEQ ID NO: 148800 - DNA, 115 bp, Homo sapiens
gagtcgagatcgcaccaggtgacacagcaagactccatctcaaaacaaactaacaaaaaacaaaactcaaactgcacattaaataacagtgcattggccaggtgcgttggctcac

SEQ ID NO: 148801 - DNA, 338 bp, Homo sapiens
cttgggggacattcttggttcctctctttcccacacacccacatttggccaatagcaaattctaacagcttcaaaatatatgcagagcctgaccacttctcactaccaccacagtcaccgcccagttccaagccaccatcatctctcacttgggtgactgcaactgcttctgcccttgagcccagcaatttgctccccaaatagcagccaaagtggccttttcaagagggaagccaggtcatgtcactctctgctcccagcctaccaaggctcccatctcactggaagtaaagctttgggttgcttaagaagtcccatgttttgggtgctcaaaaagt

SEQ ID NO: 148802 - DNA, 342 bp, Homo sapiens
aatggggatagcagagaggatattatgcaagcatggcgcggcgcccgcatactgattagttttacaacctaccttcaaaatatatgcagagcctgaccacttctcactaccaccacagtcaccgcccagttccaagccaccatcatctctcacttgggtgactgcaactgcttctgcccttgagcccagcaatttgctccccaaatagcagccaaagtggccttttcaagagggaagccaggtcatgtcactctctgctcccagcctaccaaggctcccatctcactggaagtaaagctttgggttgcttaagaagtcccatgttttgggtgctcaaaaagt

SEQ ID NO: 148803 - DNA, 354 bp, Homo sapiens
tactatgtatttgctacacactcaacagaatatatgagcttttctctttcctttattcttcttttttaattggaaggcactgctcatgaaatacaattctttgatttgttctctagacagtagaaagacgtcatggttatttcttccttggtaaattaagccccattgtcaaacataactagtgagaaaaataaatgcattgtgtgaaatcctaacctttaaacataccacatttgcttacatatttttctttctgtttcccttatttttactctaaaatatgaagattcgtaggcctcatctgtcttttcatttttcccatattttcaacaaaggtagccactcctccagagt

SEQ ID NO: 148804 - DNA, 417 bp, Homo sapiens
cctgggttcaagcgattctcctgcctcagcctcctgagtagcttggactacaggcacccaccaccaccctcagctaattttttgtatttttagtagagacagggtttcaccatattggccaggctggtctcgaacccctgaccttgtgatccacccacctcagcctcccacagtgctgggattacaggcatgagccaccgcactcggcagtcccagagtcttatttccttatttttcttataatgacatattcattatttgccagctccttcacaatgggagaggctctgcagaatttactgtgatgagtttgcaaggtgaaagcaaaagaacaattatttttcttggtagtttaaatgagatcttgctatggaaaagtctgaggtaaaaccccaaagctgtttctcccccaaaaaa

SEQ ID NO: 148805 - DNA, 247 bp, Homo sapiens
gtgtagaggaagttctggaataaatgtggcagttgttagaagacattatagttagaagacattatagttagatggatagacagtaaagaaggggcttttgtattaaaatagaggaatagtggttgggaatagaaaatatggagctaaaattatgccaacccacttctattaaataaattctatgacaccttagcctttgggaaaatgactagccttcagtggagcacatgtcaagggaagcattgtc

SEQ ID NO: 148806 - DNA, 481 bp, Homo sapiens
gatatctcaaatactgtaaaatacagtataactaagaataattagccatgaggtcaaacttcaatttcaaacattataaaagtaaaattaagagttaaaatctaaaaccacatgaaaatttattcttcattataatctcaaatttgaaaacgttatataagatttatgcattcattagaaagtgatttattgtaattttataagatttgccaatttttaaaggtgtatttttgatcaatgcaattaaatgttaaaattattatgctatacattattagttcatgacacattttcaaatatgaatgtgatgtagaaacaggtgattatcagaaaataaactctgtttttagtttaagactaaattaaagctaccaaaaagaaatttagtttcaagataggaaagtttatttgtaaggatgctgggatgtttgaacccaagatgagtgatgtttaaaaggttttgcaatggcattcaatgaat

SEQ ID NO: 148807 - DNA, 396 bp, Homo sapiens
agacctcattcaatcctgattacctcccgaataccatcatattgaggatgagggcttcaacataagaatttttgggggggttttggggggccagggtacaaagatttagtccagaacaatgatacatatgtaaacagagtctggcacaaagttggtattcagtaaacattagtctccttttttctctcccctctaatgtacttaggagtttggattttggatgatgtttaatatttatttagaatttgagctgtgtctgacatgtatttagtaattttgaatatattcaaaattaagcttgttaaatttgtgaattatttgataattgatttattttgcagtattagaaacttgtaaatttaaaaaaattgccattaaatgtttttccacaagtac

SEQ ID NO: 148808 - DNA, 655 bp, Homo sapiens
catggccatagctgattcttgaggataaacttactgatcctcccacctcatcctccctggtagctgggactacaggtgtgtgccaccatgcctggctaatttttgtatttttggtagcgaagaggttttgccatgttgcccaggctaatttcgaactcctgagctcaagtgatccattcacctcagcctcccagagtactgggattacaggtgtgagccaccgcccccagacggatggttttaagtttctattgactggcatcggctacttcagcagaagctggatccataatgcattttgttagctttgtaagagttacagtgagatctgagttaactattccttttcccaaattaccctagtgatgttttaatgctccttataaaccagtcccctgctgtggttccttcatttggtatgaccccaggctacacagccagtaagaggcagagatggggatttaaaacctgatcttcctgtttgttgcttctacgatctgccggcacttcttgagattcatgagcgtgtggccgtatgatcactaatgaattaactcaatcaatatcaattgaatgtctattctgtcttacatttgtatactgtttaatggtttacaaacagtttttgcaggtataatctcatttaaatcttacc

SEQ ID NO: 148809 - DNA, 552 bp, Homo sapiens
ggtagctgggccagggtacagtgagtagggagaagctgggagcaggaggagggcgggcagccccagtgtgcaaaagaggaggggcagcctcgccgggaccacctgtgcagggcagcagcttggtggtctagcgcacacccctctggctgcctggccacagaacagcaccctgacaccctcgactcagcaggatgtaagacacccatgtgggaggcgaggcctgaaacccaggaggcatgggaggctctcctgcagcaagagggacggaaatgaggactgcccgggcccctgtgttggcagcgtctgcctagtggagggagaggagcggtctgctgtcccaccaggccgaggagccaggagccagggaccatgcagctttgtgaaagagtggccttaagggacctccctccgccaccatgctttctagactcctagccagccccttctctctgcgccttgtcctccccctccctccaagagcagaactcttgcttcccattttgcaaccacgtttttctgtctttttcatccaggccacccagctccctaaag

SEQ ID NO: 148810 - DNA, 110 bp, Homo sapiens
tgtagtgagctgagattgcgccattgcactccagcctaggtggccgactgagaccctgtcttaaagtaaaaaattctgaaaaatgctacgaccgtgaggtgaccggccat

SEQ ID NO: 148811 - DNA, 421 bp, Homo sapiens
gcaggcaagggagcaaaactgaggagtggtaataaagagctcagagccctccgcggtcatgccctaggaaagcaagaacacgtgtgtgtgtgttcacacgcatgcttgcagggtcaggacctggcaagtggctgaggaggggctgcaggaagcacctgtcaggacataggattgggatcactgacatctgggttgctggtgaaattctgtgaagagatcatcctccccacccctctggcagggccagctaccatcaccagagcctctagacttcttctgcaacccatggcccatccagggacctatcccacttcctaagtcccttcctggctaaaagccaagaccactggttcccctccaaatctctgtaggttgctagtgcctgcacttcccactctgcttgcctccctacctaatttcc

SEQ ID NO: 148812 - DNA, 296 bp, Homo sapiens
gtcctcctgcctcagcctcccaagtagctgggcctataggagcatatcgctgtcctgttacatcttttaaataaattctctttagagtatcatgttttccacaagatacatttatgcattcattcactccatggatatttatggagtatcttttgttcacatggtgtcttacagacagcagtgcatatactatgcaagatgtagacaccaatgaggcaaagctcctccttcaagaatctgcttagagagacaagagttataacacatagacacaacaaaaaatagtggttgaaaga

SEQ ID NO: 148813 - DNA, 469 bp, Homo sapiens
ccccatctaaatcaatttaaaaatccacaacgaaactctggcaaaagccattcatgcacttctctagcatgagcaaaaatttaaaacataacgctgccttctaagtcttctaatcccagtaggtcagttctaacctattattcatttcggtctaaagtttacttattctcattcatggaaatgctgaagtaagagtcaaagaatgaaagcactggagtctttacccttggaagatttttccttttcgtgtttgcaacttcaccagctcggaaaagcttccattccgttaaagtgaccggcaaagttgtatcttttgtaagctttgaccgcaaataagcctgtgagttctttacttccatagtcttccggtgaaggaactgaggttttggagggagctaaaacaggagaagatgtactggtaagatcacctagttttgctgttgttgcttgtttgtttgtttgagatggg

SEQ ID NO: 148814 - DNA, 773 bp, Homo sapiens
cttagcatggccctagacaaactgtgctcagctgtcacacatggcccctcaaggcctccagcagggtctcttctgttaaagttggggaaggaaaggaaaaagtatattttcttttgctggggactacattctcttaatgggattctggctccaatgtgcagggtatttacaatgctgtgtggggcacgaaatttgtggtatgcatttttgtgcattcatttcattttagctgcattcgaaaaagcagtcagtttagaccctccttatcttgtgatattggtagcaatagccaacagcgattgcatgttttctgtgtgttttttggaggcataccgggtcctgtactaagtgtactatgtgtatttttggccgtttaatccttactgtaactctgagaagtaggccgggactctcaccatcctttatgcatatggggaaaccgaggcccagagcggttccaacaccagtcagtggcggagtcaggatttggcccaggcagtctggctccagagccctgacccataatgttgccaccttcccccacacgtaggccacagtgatagccagacagcaacttatgtggcagtattagaggttctgtcctgcccctcgtggttgcttggagtgggtgtccaccttctgtggaataagacttagcagtggttctcaccctccagggtgtgtcggaattccccagagggccttttcaaactggactgccgggttccagccacagtgtctggcccggcaggtctgggtggagcctgagaatt

SEQ ID NO: 148815 - DNA, 319 bp, Homo sapiens
ctctgggcaagagaattatttgaggttgtggtcaccaaacacattaaccataagaaaccatttagtctgacatcgagtacctgattcttatattctcctgggaattatgaaactctctgggacccatgtgttctgtacacaaaatctttttcttccctcttagcttcagctaaataccaatagtattcaatgagatacaatagatattgcaagtatgtgctagaaaatcaattggtattgatgctctaatcagcagggctgcagctggtatgtagacacaccactggaaatggtgattaagatcatattcaaaagcatt

SEQ ID NO: 148816 - DNA, 661 bp, Homo sapiens
aggctcgagctactgtccttgtggtttggtgtaacctttaagtcacattgaaagattttgagcttctctggttagtggctgcggatgcagctccttcattaaatgcagtacatggaacttctaccagtagcctcttccccacaaatgacccacattgttgtaaagttagcaaccactgacaggaagtggcagaatgcgtctcagccacacagcagatttcattagacactctcccaaagtagctgtttgggtcaatttggcctcagtaggtttatagagaagaatggcttaatccattatttctcattgttacatttgtcttgctgtcatcttagccttaatggatgttttcattagaagcacagtgtcttccttggaagcaagtgcacacacatatgatcagagagaggaacttccagcaagctgagattttaaaaatatttccaaagttgttaccaacttactggagaatcttttgtttattgggtttgtcatttaaatctgtctggagagtagcagctccagtgacaccgcaggagggattttgggctgcactcacctttgtgactgattgctttgaaaggtcagctctatagatgttatatgaaagcagaattcctagggactggctgggaaattaaaatatacttcttgagtcaaa

SEQ ID NO: 148817 - DNA, 592 bp, Homo sapiens
gaacagcctcgtgggtgcccagctgagctgccctatttcctgtccatggtttggcaatcaggaaacccatgatcctgagaaaaggctgaaaagagcctttagacaccaaagattagaattagccaaggacctgacctgtagagattctgacttagggtgggcccaggaacctgtggccacagttcgaaaaacatagtattagctttcactctcaaacaagcagctcagctgcaatgcctctaaaggtgtaagttatgataaaaaggaagtgaagtcaaggtgtgtatggatgtccagtatccaatagtttcacccgaaggctgaaacaaacccaggaagccagcgggtgaaaaatagacgttagtttacaattctgggctttagtcccaagacaattcaatcaagagagacccggcagctattttgatgtgatagctttgtccaagctgctgtccacttcccacccaagtctaaagaaccctgacatttttttagctcagtggttacatggaggacaagagctgttttgaaagaaggctgcagttgggtgcctggtgcaaagggtcagacttaatgtaggttgtcaggagga

SEQ ID NO: 148818 - DNA, 158 bp, Homo sapiens
caggagtcctaactcctattattactttccctttactgacaaaaaaacttaggttccaaacggagtagataatcattgagagagtcttcttagacaccctccataacaagggaaaggacaaacttcttagcccatcatttgattctagctgcttagtt

SEQ ID NO: 148819 - DNA, 422 bp, Homo sapiens
tactaaattctgcttgtagaatccaatggatacatttctgtcttcataggacttgctgcctctgaagcatctgacactgttaatcactcccttcttgaaactctaccttgaatttatcttttccctctctggctactccctttcaattcccccttgcaggctcaaccctcattttcaaggggcctgggacaagaatacaaatggaagcctacataccatgtgtctaaatatttttaaaagttctaaatcaagctgttaaattattattccatccttctatcttgactaataataacctgaaaggccaagttctatttttgagttctcaggttcccttcatgttacgtagggacataggaaggaaaatccataccccttccccttgtctgcagccaactccttttctcttcccacttttagct

SEQ ID NO: 148820 - DNA, 552 bp, Homo sapiens
acgggacatctggattttttttaatgataaggtatcctatttgatcacttatgcatttatggtatttcataagaatgtggagggatgactcaataaacatagccatctgggggaaaaaaagaattgggtgatttggtagattgtattactgttcagcaaatatttactttccccagcccccaccaccacggaaggaatatacttcctcaccctgttgatattgcacttggccacgtgacttgctttggccatgagaatatgtgtggaagtcacaggggccaggcccaaggcacaaagtgtttccattcatccctttgagcaactgtcctcggccatgagaaccacaagtcccagacagtggaggctcccgcaagcgcgccgaggagtcgcagccggtcccgggggcgggggtcggaaaagagcaagaagacgagcaggaaagacacctcgaggaactgctcgagctccacatcccaaaggtcgcaaggcagcacggccctgggcggaggagagaagcagcggacgcccggaggagaccagatccagtctcct

SEQ ID NO: 148821 - DNA, 383 bp, Homo sapiens
tcctgacctcaagtgatccaccttcttcagcctctcaaagtgccacttttcctaatttttgactccctttccatcctgtatacttcttactatctcctgactagaggcattttccaatacattcctgtctcctcacagccttaattcccattttaaaatgaaaaccaaatctacctgccacgatctcacatgaggaacttcattcctcagagggctacgttcccatctctccccagcaacgcatcaggaacgccctccctccatgggaatgacacagcccatgctcttctgctccattctctgacctcagctgtattccctatttccctccctgccactgctttccaacctgataaccttgaaagcactgaactcctgtctct

SEQ ID NO: 148822 - DNA, 219 bp, Homo sapiens
ccagattgttctcttgactctggtccttctaaatccagcttgtaaatggcaagtgcagttatttctggatttgtatctgtaatggtggaagtaataatacacacaatacaagctagcagatgataatgaagtcatttatttatggctctaaagtgatatttttgcatgagctttactcccaattatgttttgcttgaagtcccccccagtatacatctg

SEQ ID NO: 148823 - DNA, 359 bp, Homo sapiens
tggcagtttcctctccagcctcatagtcccaaagccttcactagtccatccatctagtatgaattctattcattcgtcactgccattccagaattgatgctcacagctgcttatcttaggagatctggccaatgtactcctcctgcatgtctttccggagtcttgttcaggacacaatccttggcccttgctacaagtagaagctgcagctgccttccaacacaccttctatgtcagcacacagggctgcaggagctggtccccttcttctgttttaatttttgtgttttcctcattagacatgacaaggaccacaccggagttaactattttggtcaccttacattttcttttttctt

SEQ ID NO: 148824 - DNA, 366 bp, Homo sapiens
aaaatatactatttctatatctgtctctgtgtatttgtatcaaaaaatgttaaaaatttgtctgactagcttcctaatattgaaaaaaccttccaaaaccttcttatgaatattttatagattatgtttaaataacaccagcatgcagtaacataccatagtgcagccataactagtcaaattctacaattgccaatgatggtatttgtttttctactcctaagttttaagcacttcagctttatgtgtacacatgaatgtgttggctgagtccatgactcagtgtatgaaatgtgttttttatgaattttaggaacatttgaaattacaaacacggtcagggttagtggctcatgcctgtaatcc

SEQ ID NO: 148825 - DNA, 619 bp, Homo sapiens
ctctgctttgtaaacttcttaagtaaaagtggccaagaacagagggaaagaacccaggtgaaagagtcaggcctgggctcagatcctagctccatctcttactgactatgtagccccagacaagttgcctcccgtctctggacccatcagcccaatacccatttacagggtggctgtgaaatcagaaagtagtaatgtgtgtaaaacgcccagctcagtgttgggcacttgatcaatggaaggtttcaaggagctttttgaatcagaggccccatcagtaagaaggaagtttggtttctggcacagctgagacccacttctaggctggctttcccctggtgctcgttgaacctgtccccgagggacactgggtcagaaagcacctttgggacaggttcacagggcaagtattctttggggtctctgcctgccccccagaaaataactaccactcatcaaataccttttatatgtacttcgctaaaatcttcactgtggtcctgtgaggttcatggacataatctccattttccagatgaggaaacttagtgtcagaaaagggaaggttcatttgacatttattcaccaagccttttttttttttttttttgagacagag

SEQ ID NO: 148826 - DNA, 204 bp, Homo sapiens
tttaaaccttgaagaatgaatgggaattagccaggtgcagaaatgaggaaaacgtggtaaaatgcttataagagagaaagaagagtctttggggcagagagaacagcacatgcaatggtgctgtggcacatggcagcatatgtgttttgagggagcaaatatatgaggaaaaatcttatttttaaaactttcaaggtccagact

SEQ ID NO: 148827 - DNA, 308 bp, Homo sapiens
gctgtttatggtgcataggacccagatgttgggcttatgacccattccctaccccatcctattgggtcattcagtatccatcatcccctctgcaagcgaggaaacagaagccagtgcccattccaaataataccaaaacctggggtagaattctgccctgggatttcaagtctgatgctcatattttcagagtttccatgtcaagaaatcccacaagccttaatcattcctcacacataaatctacaaatatctctctcccatgtgctctaaacagcaagccgcttggcccatttccctgcttcctcc

SEQ ID NO: 148828 - DNA, 493 bp, Homo sapiens
gaagggagcagacttaagaaaatgcaaaagaaacatataagcattacgtttgaattatggtgctccttggaatctatgacatagcaggcatagtggttaagactgaagtctctggagtaggaatgtctgaatgaaactctggttctgccacttaccagctatgtgacctcctgctgagctgcttgtgcctttgctttttcatctgtaaaatgggattaatattggtacttaacttacatctttttttggggtaatgatgaaataagatcatgaatgagaagggcatagatgatacttgctagttttattacgaccattttcttcttttccaattacattaatgcttttcccttgtggttaacccccacatagctttattcctctgagatcctcttccactggcctctgctcttttattaaataaagaaattagattcagagatggcctcccactcccagccttgaacttgagttgaatctccctagagagggc

SEQ ID NO: 148829 - DNA, 749 bp, Homo sapiens
agaaacatttagtgagcagtattagttgctatcacaagtcccacacagatggccacggtgctcacaaaccacaactcattcgaatgtatctttggtaagcacttaataacaatatgagacaggttctgtgtgcttgactccagcggttctcaaacgtgagctgccgaaccagaatcacctgggggacttgttataccacagactgctgggccccagtcccagagtctctgattcagaagatttgaggtggggcccaagaatttgcatttctaacaagttcccaggtgatcctgatggatgggaactacacttgagaaccactaggcaacggtttctttttcttttttttttttgagacagagtttcgctctgtcgcccaggctggagtgcagtggtgcaatctcggctcactgcaagctccgcctcccgggttcacaccattctcctgcctcaacctccagaatagctgggactacaggcgcccgacaccgcacctggctaattttttgtatttttagtagagacggggtttcactgtggtctcgatctcctgacctcgtgatccacccgcctcggcctcccaaagtgctgggattacaggcgtgagccaagggtttctttactgactcagtttgcgaatctgttacaaagaggcccagcaggtgcatcccctaagtactcagggcttctgctgcgggcggcagcagggagaaagcatgcctcactgcagcgggcaaggagggggagtc

SEQ ID NO: 148830 - DNA, 187 bp, Homo sapiens
taagtggaaggagtcactgctgggggactggaggcctctttggaggatggggtaactggggcttctttgggggttggaattgctggggtctttttaggggagggaacagtcatagctgggggaatgagggcctctttgggggctagagttgctggggtctttttagagagaagagtcgctgttgggg

SEQ ID NO: 148831 - DNA, 202 bp, Homo sapiens
attatattgaagcaagtatcatatatcagattcaaatataagaattttatgaagtagttcttttgtttgtgttttttgtttttgtttgttgttttgttttgtttttgagatggagttttgctcttattgcccaggctggagtgcaatgacgcgatctcggctcaccacaacctccgcctcccaggttcaagtgattcacctg

SEQ ID NO: 148832 - DNA, 176 bp, Homo sapiens
cagaaattcatgtcagaacagagtaatacaaacttttgaccattattaactttgtggttggtgcagtagacccattgtaagctctacagggacaagtattttgtctggtttgtgcactgttttcctggtagctagaaaagtacctggtttgtaagtgctcaatgaatattaaatga

SEQ ID NO: 148833 - DNA, 377 bp, Homo sapiens
tgcccagttggctgctgcattgcttctccttgcaggtggccagcagcccatggtttggcatcctgcactttctgtttggaacacacactggcctatcactctgtttcccaaggtccttgggttgagctacctaagcctggcgcattcaacactgagactcaccctgtgctgcaaacattccctgtgtgttttacaaacattccctgtgtgttttggcttgaccttttaggagcaaggtttgttaattaagggagtaccctcaccttcttaccactgccctcttcgtctctcccagcctctatccccatcgtcccctcttctcagtcctagaatcactttatttcctactgtctctgtttcttcctctcctcctttta

SEQ ID NO: 148834 - DNA, 255 bp, Homo sapiens
gctgtctgcaaatacttaagctttgagttgtttttttctgaagtgcgaacacaatcaattgggttaagtctcccagcccctaagtgggggtatttatgttttttttaggagagaaactttggaagtaaatcagaagtacccagggccaatggccagagtcttagaggaaacataaacctctaggatccagtgagtatccacaaacttagagcactgcgaaggaaacagttgggttagcgttttattaggaaggtc

SEQ ID NO: 148835 - DNA, 289 bp, Homo sapiens
aaaggaagtaagtaagtagatcaaactatgaaagacctttaggttaaagaagtttacatttggggcagaggtcactgggaaacgactatttttttttaacaaagtagtagtttagtaaggagctagataatggtagtgagtcaacagtgatcaatttagtaatctaggcacaaggtaccaagaacttggaagcagcagtagaaagagagaaagaaatcaattattaatccatatcaaataaagtcaagttgattgattacagataaagaggaatcagtgagcaataatt

SEQ ID NO: 148836 - DNA, 809 bp, Homo sapiens
tttcaataattcttctttccacagaaaatcaactctataaaggttaaagaattgaaagcgaactgaccttgggaagctacacctacatgaatcaagcctgaagaatgggaacctagaatgctattttattttgtacctatcaactttattgcctcttccttatttgttatgaaggagtttacagattccacctcaaaatgctatgtgaaaatttcttccctcaaaccatggatattgtttcattaccttcaggagctgcctgcagtgtctgacctagaaaaggctcgcttgaagtgcacccagcagatgtacaagctgtaagagtgaagctgtagttggtgtatggctggagacctagaaaaagcaagcaagaaataaagtgcaccttaagaggattatttattatcaattaagtaccagaagtaacatgcagagttgtagatatgatagccaaaacatttaagagtactctctaaaacactctttaaagaaggtctgaacctcataagaggctaagtattgggcaaaatttcatttatcactgataaactaataaattctcagccatagaaaagaccttaaaattcatgtgaaccatccacccttctcttgattccctatacaagatgtcattgaaaaggctgtcctgcctatcggatcagagcactccgtctctcaaagagcccattacatctttagagagccttagagttatccttattttggttgaaagtccttccttatattgtgatgaaatctttctatcactttcaccccggggacatataggacaaatctaatttcttttc

SEQ ID NO: 148837 - DNA, 807 bp, Homo sapiens
  misc_feature (1)..(2): n is a, c, g, or t
  misc_feature (26)..(26): n is a, c, g, or t
nnggtaagcaatgtcctcgtacacanacatctgtatccaggttaaagaattgaaagcgaactgaccttgggaagctacacctacatgaatcaagcctgaagaatgggaacctagaatgctattttattttgtacctatcaactttattgcctcttccttatttgttatgaaggagtttacagattccacctcaaaatgctatgtgaaaatttcttccctcaaaccatggatattgtttcattaccttcaggagctgcctgcagtgtctgacctagaaaaggctcgcttgaagtgcacccagcagatgtacaagctgtaagagtgaagctgtagttggtgtatggctggagacctagaaaaagcaagcaagaaataaagtgcaccttaagaggattatttattatcaattaagtaccagaagtaacatgcagagttgtagatatgatagccaaaacatttaagagtactctctaaaacactctttaaagaaggtctgaacctcataagaggctaagtattgggcaaaatttcatttatcactgataaactaataaattctcagccatagaaaagaccttaaaattcatgtgaaccatccacccttctcttgattccctatacaagatgtcattgaaaaggctgtcctgcctatcggatcagagcactccgtctctcaaagagcccattacatctttagagagccttagagttatccttattttggttgaaagtccttccttatattgtgatgaaatctttctatcactttcaccccggggacatataggacaaatctaatttcttttc

SEQ ID NO: 148838 - DNA, 229 bp, Homo sapiens
atttaggtccattgtacatataggtccattgtttaacaccatgtaaaagacaggataaggtatgttaaaaacatagaaatactaccatagttggtgaaagtcaacataaccattcctatattacaaaaggaaaacaaacctgacccacaaaataaacatacctacaaacttacagccattcttcatgatttaaggaattactaaaagttctgcttattaggccgcattc

SEQ ID NO: 148839 - DNA, 195 bp, Homo sapiens
taggtttctcctcaatcaaatatttaattgtcagtactactggcaccaacacacaatctggaacatttttttactctctagaacttttcagttcttctaaaaatagcttatatcatacagatcttaaaataattgttggagagaaaaaataaggagcaagttaataagtggcagagtctagagacatacttcttg

SEQ ID NO: 148840 - DNA, 291 bp, Homo sapiens
aagctacatctgttagctcccgtgtatacagcggaaagttaccaagtgaattaagttttaatataaattgctttgttcactattaagattgatgttggacacactgtactgtaagttgcaaactgcaattacaattcgttgcaattatctttggttgttaatagcacaagatagcatgtcactttctaccaagtgtataatttatcatttgtggttttttttgtgaactcttgtggtattccaaatgtataatcttgttgtatttatttcccagtggtccaacaaaatgca

SEQ ID NO: 148841 - DNA, 446 bp, Homo sapiens
tgcttaccctcctctgctagttgtcagcatccatcttaaatcgatgcaatggaacctttccctgtttagattcactgtggccaccttactgcaggtgacaaatactacttgtcattccctcccctttgcggtacacgcgggaatatacttggggctgctcacataattcattctgggcaatgactcgtgttgtgcatcatatccagaataacgagcgtgtaaagaccaggcaggactcgccagtctttttttcagtaacacctacgttgagacaatggggctgaaagaaacagccttgatcactgagttaccagtggaagggatgactgccccggagaaatgcaaactctgcatagcaaactctgtatgtgcaagaaatgaacttttattggataaatcaatgggctttgggggattgtactgccactcagactaagccagtagtt

SEQ ID NO: 148842 - DNA, 479 bp, Homo sapiens
actgctgtcagggctgagcctccacggccctcctgcacctacagaacggagcccttgcatctaaactagccccgacctatacgctccaatttcccccaaccatttccactcccagcaggatggagcaggtgcactttccctgattccacctgctaagaacaatgaaaacccctgggcattctatgctagatgactataagaagactccaaatggcagtctgaagaaggcagaccagctgggacctcaggatccaaggaacaacacagtggtgagcttcctgcatttccttttctgcatatagctcagacttggaactgaggagaccagcaactcagaaatgccaaggagcacaaagagaaaatgccccaacaaatctccctgtttcaagacagaaaacttgtagataataaccactgtatttcagccaaacatcacacacacacacaaacacacaaaacccacagtcctactcacaacc

SEQ ID NO: 148843 - DNA, 402 bp, Homo sapiens
ctttaacaaacttttaaacataaattatttaaaatactgtcctaatgcagttttgaatcattgccatttaacagcatttactttacaattagatataacaaatatatattaagctgtttctcctgtcaatattctcgtgtgtcagttttctttaaaaacattttcagagggcaaatgcctagaatgctgttgtagaactaccttgtttatttgtaacccaccttgagagtgaaaggtactgtttttatactgtctcaactctgtgattattcaagctttttatttaagtcagtatttcaaagaaagaccctggaattttctttttcaaaaagttctgcttgcataaaggacctgtacctgtgtctaaagagaagaaaagcaaggcctccttctggcatcaag

SEQ ID NO: 148844 - DNA, 342 bp, Homo sapiens
taaaaggggaataaaagcctcctagaatggaggcacctactgaaatacagcaaaagctcctggatgaagaacacataacaagggggaaaggaggaaggtgtagctctttgggcccagggcagtctctcctcatcactgagcccagttaccacgcgcttcctaggtacagcggtcacaaaagggacccacggaaggtacaagggagagaactctcattcgggtggggctaagggaggacaacacaggggaggcctcaaagaccgtccttcagggcaggcagcatacggcaggagctcacagtgatgttctagcaaccggagcaacacagctaaggatgctgag

SEQ ID NO: 148845 - DNA, 359 bp, Homo sapiens
gcctcctcatgatctctcaaatgcttcatacatactccaccctccagttctgtctgggtggttcttacccgtctggcctgctcgtgtgtgtgtgtgcgcgcgtgcacgcgtgtgtaactagcctgatctttttggtgtgtgtgtgtgtggcagagtctccctctgtcgcccaagctggagtgcaatggcatgatttcagctcactgcaacctccatttcccggcctcaagtgattctcctgactcagcctcccaagtagctgggattacaggcgcccgccaccacaccctgctaatttttgtatttttagaagagacgagccgggtgcggtggctcatgcctgtaatcccagtgctttg

SEQ ID NO: 148846 - DNA, 502 bp, Homo sapiens
tagatattaaaaggtattagcaggatatcataaataataatttgaaaatatatctgaaatgttaaaaattactagaaaaaaatagcctagcaaaattaactgatagaaaatctgaatcgtactataaccattaaaaattttaaccagtagtatgatatcactcctcaaagagaattacaaaatccaggtaaattttactagtaagaaatgatccttaatgaaaatacacacaaccaacaaaggattaatattcagaatataaaagaaatacaaatcaataaaaagaacgacccaatacaaaaatgagcaaaaatcttaaatgggcacgtaacagataaggaaacctaaaggaccaataaatatatcatacctccctagtaaaattcccattaaaatcacactcagataccattttgaaaccaaaacaatgccaaaaataagaataccgattgaagagaacatggatcaattaaaaactgttagatgttcctgctgaaactgg

SEQ ID NO: 148847 - DNA, 254 bp, Homo sapiens
ctccacccgactggggtgacgacatggggtgggggtcccagtggagaagtatattttacgatgttaatatatatgctttatcagtaaaccgggagaggtggcgcgtgcctgtaatctcagcactttgggagactgaggcaggaggattgcctaagttcaggagttggagaccagcctgggcaacatggtgagatcccatctctacaaaaaatccaaaataatttagccgggtggagccaccccgtcggtggagc

SEQ ID NO: 148848 - DNA, 716 bp, Homo sapiens
tgagtagagacaggatcttactatgctgctcaggctgatctcaaactcctgggctcaagcaatcctctcgctttggcctcccaatgtgctgggattacaggcatgccccaccgcacccagcctgtggctgcgctttcaatgccccagtccaactgggcacaaaccctttgtcttatctccctttagctcagatgtggcagctggaatttctcaaaatctggaaatcttaagggaggacccagaaaataagagtagaagaagagtaaaaaccaggctggcttcaagagaacagagacctcctgcccacctgttttattcccagagggtcccaagaagagatttatttctcccttcttgtcccaaagggttgggccacctctgcaggcacttgctggctttccttcttagcttcctctgggctttctccagggagtgggcgctaaatcaccatccctacccaggtagcctctcctacacagcttagccctccttagttctcccttaatatgcaaggctggaaggaccccaggaaaaacctcaggtcttcagaggaggctttgtctgccacagactggaagcaatgccggcttcatgcaggtctgcagttgaggcagcaactatctaagtgttacccaccaagtccagagggctgttttctcacagaggttttaggtacatgtttctttcattggaaaactaaaattcaaatgtggtta

SEQ ID NO: 148849 - DNA, 363 bp, Homo sapiens
ctcttcacatttgtaggttattgttgaacaatgtgaatagtttgttactttctgtagaagaaaggtaaaggaacaaaaactatgactgaaactttaattacttcgtgtattactgtagtttaattgctattgagaaaactgagcacacatttataaaacctttctattttcacttaattttaaaaagcaatcacatttattgcatgaatgctgattcattttactttttctcttgaatttctaaaccaaattaataaattaaaaaattaaaaacccttaatattgtacataggaaatttccattattttgaaacttcttaaaacgacaatcttcaacactaatatgtaaaatgaaaaagactt

SEQ ID NO: 148850 - DNA, 282 bp, Homo sapiens
gaagcaggtattacacgatatgttaaaaatgtagccagtgaggctgagatgattaaagctccttacccatcatcagatttctccaattctaaggttcatgctctcctttctcaaaatattaataagcaaaccaaaacaataaatcataaaaataataagtaatagtctaatgagctagttctatatggaaagactaccaaggtaacacaagtagaacgagtaagataaagaaaattgtgggtggttgaccccatttgcttaacaaaaggtaaaaattatata

SEQ ID NO: 148851 - DNA, 308 bp, Homo sapiens
tcgaagaggggtggggcgggccgttcaaatttattacaagaaaactagcctggaacaccccaccactatctccacctggttacggagaaaaggccatcaagggtatttataccgtggcctttcctcaacggctgaggcacctgggaagaactgaacccacctcacttgccctggacagcggcgccgacgaacttcgcacgaagcccgtccactggacggctgcgcgctgccaagggaatccagatcccgagcaagcgtggggcccaaggcgagttccaatgaatcctcccccagcctcctgctcggcc

SEQ ID NO: 148852 - DNA, 212 bp, Homo sapiens
atcctttgtggtggggctgtcctgtgccacgtggggtatttagcagcagagcagcacccctggcctctacccactagatgccagtcgcaccctgtccccagttgtgacaaccaaatacctctccagacatcaccaaaggtggaaattgggggttgcgggggaagacaaatcacacccggttgagcccactgattgaaggggttcgtgtgaac

SEQ ID NO: 148853 - DNA, 426 bp, Homo sapiens
tttgaacccaggcagtctggctccagagactgcttaaccactcagctgtcctttgtcttgaggacagtcttgagttaaaactcaaaactttaggtaattttgaatttgagcttagtgactagaattttgtactttgggcacttagattttatacgcctaaagatcattctcaatctttaaagactctcctaccttcataacttgaattagcctaaatttttctcagacttttccccctataagtcaaggttcaggaaaaaaaagaccttctggattatgggatgggagatttctggggacaaaggatgagaatatagcctatataaagaacaaagttgaaatgtcttggaatctttttactgaaatctatgtgacttctttcccttccataataaaacaatgatggtgttttgttttttgtgtgtg

SEQ ID NO: 148854 - DNA, 407 bp, Homo sapiens
tcggtctcgccaacggtagccacagtttacttagtactaatcacctgccgggaaccaagccggtcatgtgattatatatttaactctgatccttaaaacacccctgctaggctggtgtgtgagctctgtcacaaatgaggaactgtcggctcagaggtggcagcgccaagattcgaacccaggcctggctctgaagccaggggcggttcttgctgccacactaccctctggatgtcaacacagggctgggcctgtgggggcctccgaaacatctgctgatcatcccaggcagggtttctcctccttggccctgtggacactggggccatcctgggctctgtgtggtgctaaatacccacagctcacgacaaccaaacacacctccacaccccacacacctccacacc

SEQ ID NO: 148855 - DNA, 406 bp, Homo sapiens
catgtgtgttcattgctgtcttcagtggcttccctttctcctctgttccctgcccttccagcttcattccaacagatcaatgaccacctgttagcacttcccagatatatttggtctccagcctcctcctcccttgttggttcctgctctgtatttctaactacttgtgcaacattttaatttgaatacacagttgtgtttggtaacacaaatttggtgacacaaacttagcgtgtttaaaactgatcttcatgcacttccaaaataccacatttttcatttatctttcttactactgttaataatttctctatttctctttttcttcacttgaaatctctaggtcacctattaaaattctatctctgtcaaggcattattgctagctccctcaagaagtgctgcc

SEQ ID NO: 148856 - DNA, 251 bp, Homo sapiens
caatatacttcataattcaatcaacaatctacgacccacagaaaaccttagttcacttatgtgcattatggtaatattttgaaaatacagaaaaatgtaaggaagaaaactgaaataatccacaatcccacaaagacaatcagtgtcaatatttttgtgtataatttacaagttctttttgtggttttacatatataatatatgaattatacacatatatgtaataaaattggaattaaaatttatacagt

SEQ ID NO: 148857 - DNA, 324 bp, Homo sapiens
ccactttgataaagaggtttaaaggtgaaggggtccggtacaaagccaaattgatcgggattgatgaagtttccgcagctcggggagacaagttatgtcaagattccatgatgaaactcaagagttcacttatgtgcattatggtaatattttgaaaatacagaaaaatgtaaggaagaaaactgaaataatccacaatcccacaaagacaatcagtgtcaatatttttgtgtataatttacaagttctttttgtggttttacatatataatatatgaattatacacatatatgtaataaaattggaattaaaatttatacagt

SEQ ID NO: 148858 - DNA, 252 bp, Homo sapiens
acaaccgacgatagataggcaccaagagtgcacccgccccccgggcctacagttcacttatgtgcattatggtaatattttgaaaatacagaaaaatgtaaggaagaaaactgaaataatccacaatcccacaaagacaatcagtgtcaatatttttgtgtataatttacaagttctttttgtggttttacatatataatatatgaattatacacatatatgtaataaaattggaattaaaatttatacagt

SEQ ID NO: 148859 - DNA, 424 bp, Homo sapiens
  misc_feature (309)..(309): n is a, c, g, or t
  misc_feature (311)..(311): n is a, c, g, or t
  misc_feature (330)..(331): n is a, c, g, or t
  misc_feature (333)..(333): n is a, c, g, or t
  misc_feature (349)..(349): n is a, c, g, or t
  misc_feature (352)..(353): n is a, c, g, or t
  misc_feature (355)..(355): n is a, c, g, or t
  misc_feature (361)..(361): n is a, c, g, or t
  misc_feature (365)..(365): n is a, c, g, or t
  misc_feature (368)..(368): n is a, c, g, or t
acaaccgacgatagataggcaccaagagtgcacccgccccccgggcctacagttcacttatgtgcattatggtaatattttgaaaatacagaaaaatgtaaggaagaaaactgaaataatccacaatcccacaaagacaatcagtgtcaatatttttgtgtataatttacaagttctttttgtggttttacatatataatatatgaattatacacatatatgtaataaaattggaattaaaatttatacagtaaaaaaaaaaaaggcctcgatgggcctagctgggcagatctgcggacctttcccttnantgacgtttaatgaaggatnntngatgactcactctctntgnntngctgcnctcntgnggtcagctgcatcaactgacttcaaagcagtcatacggggatatacagaaattcgc

SEQ ID NO: 148860 - DNA, 393 bp, Homo sapiens
  misc_feature (278)..(278): n is a, c, g, or t
  misc_feature (280)..(280): n is a, c, g, or t
  misc_feature (299)..(300): n is a, c, g, or t
  misc_feature (302)..(302): n is a, c, g, or t
  misc_feature (318)..(318): n is a, c, g, or t
  misc_feature (321)..(322): n is a, c, g, or t
  misc_feature (324)..(324): n is a, c, g, or t
  misc_feature (330)..(330): n is a, c, g, or t
  misc_feature (334)..(334): n is a, c, g, or t
  misc_feature (337)..(337): n is a, c, g, or t
acaaccgacgatagataggcaccaagagtgcacccgccccccgggcctacagttcacttatgtgcattatggtaatattttgaaaatacagaaaaatgtaaggaagaaaactgaaataatccacaatcccacaaagacaatcagtgtcaatatttttgtgtatttgtggttttacatatataatatatgaattatacacatatatgtaataaaattggaattaaaatttatacagtaaaacaaaaaaaagatgtcctgctctgcggacctttcccttnantgacgtttaatgaaggatnntngatgactcactctctntgnntngctgcnctcntgnggtcagctgcatcaactgacttcaaagcagtcatacggggatatacagaaattcgc

SEQ ID NO: 148861 - DNA, 287 bp, Homo sapiens
acaaccgacgatagataggcaccaagagtgcacccgccccccgggcctacagttcacttatgtgcattatggtaatattttgaaaatacagaaaaatgtaaggaagaaaactgaaataatccacaatcccacaaagacaatcagtgtcaatatttttgtgtataatttacaagttctttttgtggttttacatatataatatatgaattatacacatatatgtaataaaattggaattaaaatttatacagtaaaaaaagaaaataaattggcctagttggcctcat

SEQ ID NO: 148862 - DNA, 256 bp, Homo sapiens
acaaccgacgatagataggcaccaagagtgcacccgccccccgggcctacagttcacttatgtgcattatggtaatattttgaaaatacagaaaaatgtaaggaagaaaactgaaataatccacaatcccacaaagacaatcagtgtcaatatttttgtgtatttgtggttttacatatataatatatgaattatacacatatatgtaataaaattggaattaaaatttatacagtttcctgtcttgggacttttt

SEQ ID NO: 148863 - DNA, 196 bp, Homo sapiens
gggtagacagctggatagatagatgaactgatgggtggatggacacactgatggacagacacatgaatggatgggtggacaagtgaatggctggtggataaatgggtgaataggtcgacagattgatagacagctgaacagatggacagatgcacacactgatggacagacagatgggtggatgcacggatggatg

SEQ ID NO: 148864 - DNA, 495 bp, Homo sapiens
cacctgcttttaaacaaagaaaatcatccttgttctgcctcttttaccaagattgagtgaggattctgtgagagcagtgtatatggaacctattagaacacgtgtaaaggaagattttattaataatggctctccatgctccaagactattttctgtgtgaactaggctctggtctggtctgaatacaggccactgttcaggctgtcagtctttatctacctggcagcagtattgcctttcttacctgacttatgatcctgcaggtgggtttatgaagtggtacccaagtgcagagccctgtgaaggggcaaagatagcccccaaaatcaagtagtcacaagtaatccatcaggaaggtgattgagttctgactcatttatctcctgggaaagccctaaaagcacatgcaaggggccctagctacacttacagtggtgatttctctgtctctgatagccccaagtgccctcctaagtaccctcaaatatcttgga

SEQ ID NO: 148865 - DNA, 377 bp, Homo sapiens
ccaggagattatattatttcaaacattacagaaacattatacctggtaagctgcaggtacctccgaatccaaagtgtttcttgaacgctttttcattcgagctgaacccttttctgaggggctgatcatctcagacattgccccaaaaagaagactcttgggagaccgaatactttggactggagaattttctctttggtctgcaagtcaaaaacagcaacaatatttaattctttctcaattcctgttcttccaatactattaaaacagccagccacgcatggtggctcacgcctgtaatcccagcactttgggaggccgagacaggtggatggtctgaggtcaggagttcgagaccagcctggccaacatagcga

SEQ ID NO: 148866 - DNA, 813 bp, Homo sapiens
gaaaaaatgatggcaactctctacagtccattccagaaaatagaagaagagggagtgcttcctaactcattctatgaggccagcattacctaataccaaaaccggacaaaaatattacaaaaaacgaaaactacagatcaatatctttcattaatataggtgtaaaaatcctcaataaaacattagcaaattgaatccaacgatacacgaaaagaattatagatcacagctaagagggatttattctggatatacaaggctgattcaatatttgaaagtcaactaacgtagttaattacatcaacaggctgaagaagaaaaatcataaaactagatacagaagaaacatttgataaagtccaatacccatttatgataaaaattctcatcacactagaaatagagaggaacttcttcagcttgataaatacttatacagaaaacgtacagctaacattatggtgagaaactagatgttttccccctaagactgggaccaaggcaaagatgtcttcacttaccactcatatttaacatcgtactggaagtcctacgtaaagcaaaaatataagaaaaggagatgaaaggtatacagattgggaaggaagtttctgttcaccaaataacatgattgtctatgtataaaatcccaaagaatcaacaatgacaaaaaacaacattcctggaactaagcaattatagtaaggtttcagagtgcaagataaatacacaaaagtcaagtgcttgcctatataccagcaatgaacaattggaatttgaattaaaaatacaataccatttacactagcacca

SEQ ID NO: 148867 - DNA, 352 bp, Homo sapiens
ctgctttttttttttctgttaaaacttgctgcctgtgacagcatctgtgttgccatagcaatacatctttgaaagtggtgacatcatactctgttgccatggagataagattgctctcacaaacaatggattccatcaccaccatgttggagtttgagaaggaggtaagaagttctgttgcccagatgcttgccattcccaaagcagggtttgctgggattcaaatgcagtggttagagggcagctttgtctatttcaacttcagtccctttctgccctccctggttcccaccaggccatttctatcacttgttctgtctttctcagcacatctatttatttgtcccaatgg

SEQ ID NO: 148868 - DNA, 330 bp, Homo sapiens
gccaagggtggcacaggcaggtaagactgttgcatatgcagaccagggcgtgtggccaggatgggggtagccaggatgggggtagccaggatgggactcagccctaagcctttggtcttctccctctcagccagtctcatctgtactcatagcttcaaggaccaaagacctccagattttctctcccctgaggtccattcccctatccacacctgcccctgcctgactcatggccctctgatgtcccaactaatgaccttcccccacaaacactccctcatgggggatggtaccaccacctgccacctgccagacctgggaggcacctgg

SEQ ID NO: 148869 - DNA, 249 bp, Homo sapiens
attaattttggtgccctaaatattggcatgtaaatatataacccctggaagaaaaaaacaaaacaaaacaaagcagaacattaaggctttttaaagataggtaaatcattttcttttcaaatgaaattcagtttgactgcatgaaatatgaacagtaattaaatgcacagtctgtgggccttccatactttaaagcgctttctttaaaaaaaaaagagtactcacctcagacaggccaattacccaaga

SEQ ID NO: 148870 - DNA, 398 bp, Homo sapiens
cccagaaacactaccacagacacattcagaatcattcttgaccaaatttctggccaccccatggcccagtcaaggagacacatattatacagttagccttcacagatcctaatggtgctgccatttactgaggagtagctctgtgcctggcaggtttccaagtgtggctcctggaactcatgttgtcctcagcacagctctgaggtgggtactgttaccaccttcacgtttgaggaggcacagagtaggcagcttaacctcttgtataaaatagggatccttgaggtttagacccggcagcattgttttctgaccctctttaagttactgttcttcattttttttctgttttactaatttcatttactgttaaatggggttttaaattatgaaaataa

SEQ ID NO: 148871 - DNA, 324 bp, Homo sapiens
tacaaatcaaaggtttgtggtaacccctctcatgcagcaagtctatcaacgccaatttcccaaaagcatgttctggcttcgtgtctctgtatcaccattttttagcaataaagcatttttaaatgaaggtatgtagacttttcagacagaatgctattgtacacttaataggctacgatgtagtgtaaacataagtttcatacgcactgggaaaccaaaaaatttgtgtgactcactttatttcgatatttgctttattgtggtagtctggaatggaacctgcaatatctctgaaatatgcctgtatcatagaacagccgcata

SEQ ID NO: 148872 - DNA, 409 bp, Homo sapiens
ccagacactgggaaccataaccaaataggaatactttcaactaagttttcagtttagagattttcagtcctcacaggtagtataaaatctgactgcaaatctttgagtatgggcgtctgcttaggcaatcacatgggaggcttctttcccctctccaaccagatccaagacagtaagaggcaagtctctgcatgcaggacatcttggacatcttttttctactcatgcactgaagacttgcaccctccagggtcccagttccatctgggacagtctccagtaggaccttccactatgcttaggtactacttgtctcttgtccctccactttcctctaatcctacaagaaaccctcagaaccaccaccaccttcagggcttcctctgccttatgaaatgatgcttttttt

SEQ ID NO: 148873 - DNA, 380 bp, Homo sapiens
acaatgggtgaaaaaagaacagagaaagagataagaggccaatcatattcattcccccgagacaaggctgactctgaagctgactttagaaagagaaggggagaagattgatctccaattcaaatgcagagttggaattagcacacaggactgggaattccaattacagaactgaggctgtgttttgtgacttcaagttatgcaagatattacctaacagaggacgaaaacattgtggggcctctttgagttttcactgcaggggagaagaaaacactgagagacaaaaatgaagtcatgttctgctcattctaagagttatgcttgattaaaacacagtgaatcaggaaccaggaggagctgtaatggccctggggtga

SEQ ID NO: 148874 - DNA, 160 bp, Homo sapiens
aaaagaaagaaggaaaataaaagaaaggaaaccgcttttccttctagaacactgttttcaaaaaaattgtttttcaaagcagcttccctttcctcttcccaccatcctgatgtgagcaaagcagagaggaaatgaggcccagggaggggaaggaacttgg

SEQ ID NO: 148875 - DNA, 228 bp, Homo sapiens
gtatagtttaggtcaatagcatgtgtagacagatacgggtttgagtatttgataaatgagtatcgatgatctctctctctctctcttgctctctctctcttgctctcttgctctctctctcttgctctctctcttgctctctctctctctctctttttctttctctctttctttcgtgacagagtctcactctgtcacccagactggagtgcagtggcacaatctcgg

SEQ ID NO: 148876 - DNA, 402 bp, Homo sapiens
gccatcatccacttctcacagtggtagtgattttttaaagaatggatccagggccagctggcaaggcctcggtaggatgaggatgctatgttttgggtgagaagtgtaacttgaacagccatcctgaaattttgtcacgagaaccttaaaactttgatcacttgttccatgtacacgaatctacatgaaggaagtatcaggtgaatgtaaggattgggaacgcccatcacctgtattcgtggcagcctgagtggttttctggaacaggtcagattgggtcactcccttactgtctgccacacacactgcagtctaagcggcttcccagggctccagcaccttcgtgatgggccctgggcacctctccaagctccccctgctcctcccctccacccaggccac

SEQ ID NO: 148877 - DNA, 277 bp, Homo sapiens
tcctaggggcctggacttggagtgtggacctctggtgtttcctctcctatcggcacctgacttctgcaaccttgggctggtcccatggcttttctgggccaccatttccccagcaaagtcagtagcaaggtaaactggatgaccttgaaaatccttctaactgggagggtctctgattctgcatcagtattttctttgccctgggtcccttctctgtgcaggcaggtggagttatgacagctactagaagcacagaggtacctataaacacatgggt

SEQ ID NO: 148878 - DNA, 245 bp, Homo sapiens
gctgtctgccattgtccaaagaccattaatttgttcctactttctctaatttgtttcaacttctctgatttgtttcttcccttattaaaaatttcccttgtgatgtgttacatcacacaacctctcttgaccagacagttctagtactttaaattgtctgtacaggaaagcctctatcacatggccaagtatttaaaaatatagaaataacctttcttcagagatgttaaacagacctgcaagtt

SEQ ID NO: 148879 - DNA, 306 bp, Homo sapiens
tgtctcaaaaaacaagaagaagcacaaaatcaagttactagagactccccaggagaaatggctacttgactgttttttccttctagtctctgcacattgcagtgttccttggatgtcctcatttctaaacaggatgttccaccggcaggttcccaccaaaaagtgcagaattcttcttttcaaggaatgcccccaggcagtttgagttccgcagaaacttctgctctgcagatgaattcactgattgaagccttatctaggagttcctccacctaacttctctccctcttttctccaatacaaatt

SEQ ID NO: 148880 - DNA, 526 bp, Homo sapiens
tataatgtgcatccatactgtgtgacaggccagaaatggctttggattaagtagagccccaggactgagtctcaactctgccactaatttactccataatctggggtgagtcactttccttccaagtcttgttgtcctcatctgtaaagcggacatcatgatacctgttctccctgtcctcattctgtcatttgcgtattcatttcataatggatatgtgaaagtactttgtgatgaaaccgcctgaggaaagttagctgtcgatataattaaggttacctttttttgagtgcctactgttgagtgctcagtacttttctttcattcttatttgaactttacccaaaacctttacaatatatatcattgccccactttgtggatgaggaagctgaggcctagggtggcgggcccctccattggctgagacaggatttgtgtgtgtgtgtgcagtgtgtgtgtgtgtgcgcatgtgtatgggtatggtgtgaatacatcgcaagactgtcaagtctcccctgagaag

SEQ ID NO: 148881 - DNA, 367 bp, Homo sapiens
  misc_feature (340)..(340): n is a, c, g, or t
  misc_feature (358)..(358): n is a, c, g, or t
ctcgccattattacgagatccagtaaataccatttccaaagccagtttatgcagaactggtcatgtgggatctcactcgtccctttctgccagctctgtccaattcagccttcaaagcctgccgggtgcctttatctgatgtgttggtggtggttgtatggaagaatgtggaggtgctaaagaagtatttgtctgcattcaattatgcttcatagcaaccgttggcataatttatatttttgcctgcacattctgagagagccatttggcaaacaacaataataaatttacatttggatggtgtatttcactcagagaacctccactatatccttgattntgatctacgatatcctgnggatcctct

SEQ ID NO: 148882 - DNA, 493 bp, Homo sapiens
ctcgccattattacgagatccagtaaataccatttccaaagccagtttatgcagaactggtcatgtgggatctcactcgtccctttctgccagctctgtccaattcagccttcaaagcctgccgggtgcctttatctgatgtgttggtggtggttgtatggaagaatgtggaggtgctaaagaagtatttgtctgcattcaattatgcttcatagcaaccgttggcataatttatatttttgcctgcacattctgagagagccatttggcaaacaacaataataaatttacatttggatggtgtatttcactcagagaactttcatatgtattatctcatttggggctcacaacaattctttaaccagggtatgtattactaataataattaacaatagccagcatttacagtgtttatatgtcaactgctgttcattattgcctccttttgacagagaccaacatagagagtttttgacagagaaagtgact

SEQ ID NO: 148883 - DNA, 571 bp, Homo sapiens
tcccgattaaatttgttgccgcagtagggcctgttccccccaagtattgtacttagagctgcagtgcgtttctaatgtaacccccgttccagtgatatggacaggagacggaaatactgggtagaaaagggcagttccctggcaaagcctcaccctcaagcctggatacctgctgtcttaaacgaaaacgaaaacaggcatttctgtgttcatgctccaaaagttatcttttggcctgccacaccccctatcctgcacccatatgaatcccgaaccccagactccagaagcagaccagcaagcccgcagaccagcagaaggatggcagaacgatgtggcagagaaagggagaagaggaggaacatctgaatgccaaaatgagttcagctgggggcagtcagagaggagtccagccactgggcagccagaatccaggggaggatcacctttccacttcatccccttcctctgcctccccatccatcctgctgaaagccacctccaccactcaataaaaccagatgcggccgaaaattttttgcggcgcgccgaataacgcgcgggagccgag

SEQ ID NO: 148884 - DNA, 664 bp, Homo sapiens
cagggcaaagccaagaagtgattttcccccctccctgccacgggaactgtgacctaattctcattcctaatcacagaatcaaaggagaaatttatttcaatgagccaatctgaaagagctatttgccaaatggctttctttccaatacttaatgaaaagatgcattttgtactactttcaaaaagtgatatggacaggagacggaaatactgggtagaaaagggcagttccctggcaaagcctcaccctcaagcctggatacctgctgtcttaaacgaaaacgaaaacaggcatttctgtgttcatgctccaaaagttatcttttggcctgccacaccccctatcctgcacccatatgaatcccgaaccccagactccagaagcagaccagcaagcccgcagaccagcagaaggatggcagaacgatgtggcagagaaagggagaagaggaggaacatctgaatgccaaaatgagttcagctgggggcagtcagagaggagtccagccactgggcagccagaatccaggggaggatcacctttccacttcatccccttcctctgcctccccatccatcctgctgaaagccacctccaccactcaataaaaccagatgcggccgaaaattttttgcggcgcgccgaataacgcgcgggagccgag

SEQ ID NO: 148885 - DNA, 635 bp, Homo sapiens
actccagtttcttcagctttggccctcttgggccttcgaacacagactgaagactgcgctgtcggcttcacgactttggaggttttggaactccaactggcttccttgttcttcagcttgcagacggcctactgtgggacgtcaccttgagatcgttgatatggacaggagacggaaatactgggtagaaaagggcagttccctggcaaagcctcaccctcaagcctggatacctgctgtcttaaacgaaaacgaaaacaggcatttctgtgttcatgctccaaaagttatcttttggcctgccacaccccctatcctgcacccatatgaatcccgaaccccagactccagaagcagaccagcaagcccgcagaccagcagaaggatggcagaacgatgtggcagagaaagggagaagaggaggaacatctgaatgccaaaatgagttcagctgggggcagtcagagaggagtccagccactgggcagccagaatccaggggaggatcacctttccacttcatccccttcctctgcctccccatccatcctgctgaaagccacctccaccactcaataaaaccagatgcggccgaaaattttttgcggcgcgccgaataacgcgcgggagccgag

SEQ ID NO: 148886 - DNA, 925 bp, Homo sapiens
tgaataggaaagccctttctgtagtttctgctttctggtcttaatccaactactaacaacaacaatagcaaaaagaatctcttgggtagtattttttggctactgtggtgaaggaaaccagaagtgggaggttagtggtggcagtagggtttgtttagtcattgctgggtgtcttggtgcctggatgtatttttcactatgttgtatattaatcaatttacttattaaaatgtaaatctgctatagtacctctctcaaagtagcaattcatttccatttggtgaagcaaacttaaaagttgccacataaaaatatcttcagatctatgactattaactggagagacttgaaacttatttttgggactcatttgaactagccagtgacccctgcttgtctaacattttgactatataaaggagaaaatagtgtgagaaaaaggcaaaagcaatatagacattcttttgtgtttctttggtgacaaatacattcatatattaaatggtaggtgtaatggaaacgtgtgcgagtttctttcagtaaaacctttttgagtgatttcatttactgtggaggctaataagtgaagttttgggggtttcacctgttacacaattttcttttctaactttatgatagcttttgttattgcatgtgaattaaaagactatagagtgaacggtgtctcaaagaataaggataaaattaaaggacagaacaaagcagcaagacgcaaagacacgcgagcacaatgaaagaaaaaaactgggtgacgggacgcacccgctcgagaaaacgttctacacaacacgcgggtggggggggcggggaccaagcaggagacacacaccgggggacacagcgtgcgcccgagaggaaacgggtagcaacacgggcggagtgctaccacacaaaaacgccggag

SEQ ID NO: 148887 - DNA, 201 bp, Homo sapiens
cgagactctgtctccacccccccaaaaaaagttagcagatacttaaaaagccctcctgtcttcggtgctatgctagatctggaatgtacccaggtaaaagcttgtatgtgctttcaaggagttaatcatcgagtaaaacctcctcagaatataagtcagactgatgtggcattaaaatgcaatacttcaagtgctcctggt

SEQ ID NO: 148888 - DNA, 145 bp, Homo sapiens
ccagcccagcagaagccttggtgaacactgcttcatccctcacccactttacatgttcgcagcactttgtggcgtacatatctcatttacacacatgatctcgttcaatctctttaatgagttggatatcacaaaccccatctca

SEQ ID NO: 148889 - DNA, 334 bp, Homo sapiens
caaactgggctagcctaaggtcctagattctgtctactggttactaaatcctgaacatctcattagtgagtcacaatctaatccatttttttaaaaaatttagttttaaaagagctttaccaaaatgtatttgattcacatgtactcaggaaaaagaatgttgaaacctaggttgcatatttggtgaagaataatgtaagttaacgattcccaagttacaaataacaaaaacatcattaagaattgcaggaccaggcatagtggctcacgcctgtaatcccagcactttgggaggctgaggtgggcagatcacctgaggtcaggagttcaagac

SEQ ID NO: 148890 - DNA, 228 bp, Homo sapiens
agaggacccggatcgtgcggttctgtgctcggtggtctgtgctgggattacaggtgtgagccaccgcacccagcttagaataccaactctgatcttatgccagttccttctaaagcttctactcctagatgtgaaatttcataaatcttaagtttgacagttggaaatagaggtcatttgttgattaagagactgacctttgtctatgaatcaaaacattaatcacag

SEQ ID NO: 148891 - DNA, 660 bp, Homo sapiens
atttttggtagaagaatcagaaacattactaacctccctgttggatattaaaaactcaagaggaaggtttttactattttctgtcagtacaagttgaacttgattgtgtcactggaaaccctagaggtttgtgtatcagtagacaatgataatatgaagttccattgggtgatgatagtcctctggttatgcaggagaatgccttgcttcttaggggctgcacactgaagtctttaatggcaaagggtcattttgtctgcaactgactctcaaatggtttgtccagaaaatgtatagacatacacacatggaaagcaaatgtggcaaagtattagcaactgttgattccagatgaaagttatacaggtgttcattataccatctgaaaatgcttcctagccatcctaaggcttaaaggaaaaaaagaaaatgtttaaaatcaaaagtcgggggcaggaaaagaataacaattaaacttcaggctcatgcctgtaatcccagcactttgggaggccaaggagagagggttgcttgagctcaggagtttgagaccagcctgggcaacatggtgaaaccccatctctacaaaaaatacaaaaatgagccaggcatggtggcactcacctgtagttctagctactcaggaggctgaggtgggag

SEQ ID NO: 148892 - DNA, 172 bp, Homo sapiens
aagatttcagctcacaagtcagttttagccattggtctgtgccctgaggacaactgggaagtttccaacgggagaaggggaatctaaaagcccttacagaggtcaagcctgcagtgagctaagattacccccactgcactccagcctgggcaacagagagaaaccctatctc

SEQ ID NO: 148893 - DNA, 273 bp, Homo sapiens
gtatgatggacctgagcgccgtatgatggacctgaccgctgtatgatggacctgaccgccgtatgatggacctgaccgccgtatgatggacctgaccgccgtatgatggacctgaccgctgtatgatggacctgaccgccgtatgatggacctgaccgctgtatgatggagcccatgctgacctttaggtaagaggcagtggcggcggcggcggcggctcggcaggcgggttcaggcttcgggggccagagccgccatgatcctgctggaggt

SEQ ID NO: 148894 - DNA, 305 bp, Homo sapiens
ttcgtggaaagaactggcaccatcctgcaggtgcaactgcctgatgggttcttcctgcccattgtacatacaaaatcaattcatggagaccatggcattgcagtaaagagtttaattgacacaggccagccacaacatgtgggggacggagttattactcaaatctatctcactgaaggcttggaggtaagggttttttcaaagacagtttggtggggagggggccagggtttgggcagtgctgattgttggggatgaaatcacaggggtgtggaaaatggccctcctgcattgagtcagcttct

SEQ ID NO: 148895 - DNA, 297 bp, Homo sapiens
agtggcctctacaatcattttcaggtgtaaaattcctgcacactacatcctttcctaattaatgtcagttgtacattctgcattatattcccctagcacttctgggctgtggatgtatttattatcatatcgtttgagaaggagggcagtgattgacaacgattctctttacaaatcccaagtggtgtgtaatttggttttctaactgtgcatgtttgcacaatctgcttcctactccagctagattactatgagttgaaaatgctcatcagtgtggaattatatttctcaatatct

SEQ ID NO: 148896 - DNA, 258 bp, Homo sapiens
cctcccccaacccttccctctttagtcctcactgggctattgaccttgttccacacttcagtgaagtaaaaaccttcacatgatgactctagcattcccgatgaaaacttaacaaaaactcctctgcagctaatgctcccttctttcctcctggcacaatggagggcattttctctctcctagcaaagtccagtccctccccttctctgtatccaatgctcgttgaccttttaaaacacttcactctggttatcttct

SEQ ID NO: 148897 - DNA, 642 bp, Homo sapiens
aaggaaataacttgattattttatttgaatattagtcaaaagcagcaggtaacagacatatttccatttcatttactttataagattcattaattaagaagatatgattattttattgcttagtaaacagagcaaactttctggcatatatgtattttatatttctgaagcataactaattctctaatttggaagaatatgtgagtttgatacatctagcttatagtataattctaaatttctagccacaaattttccagtttttccgttcattcagtatgtcgtcactaatctttttttcatttcagatatttgggtatctaatgatatttaaaaagaaaaaaatataatatttggttagtacagtgtgtctagtttttttgaaattatatttagaccttgatagtcttaatttatttttctagataaatgcatgttactgcatttaatagtaagaaaacccattttcctgaacttactgtaaacaggtgaatatatggtgataaacagtgttcttgcatcatctatgacttttgtaaacacactttgtcttgtaatattctttaccttctttcagttaaagatgtgatctgtcagatgcttacatttgttaaacaacattgacaaaagccttagcctgtg

SEQ ID NO: 148898 - DNA, 136 bp, Homo sapiens
tacaccaaaatactgagttttcatcaagagaataaagccaatttactcctttataaagttttctacattttcttgaagttacattgatttggatcaattcttttccacatggattttataattcgtgggtcagttt

SEQ ID NO: 148899 - DNA, 357 bp, Homo sapiens
gtgcttgcaatgttaccacttcaaaaaaatttccaatagtaattaaatgatttgcatttgtttttaaaaactgtaaaatattccaaccttccagcgataaccagtgtatacattttggtcgatttccttccagtcttttttctacatatgtcggtgggaatgcagtaattggaaaagaatacaaatattcatcattttttatatcctgcgtttaaaaaagtattacttctggccagttgcagcagctcatgccagtaatcctagcactttgggaactgaggtgggaggatcacttgagtttgagatcagcctgggcagcacagtgagagcctgactctacataaaatttttaaatta

SEQ ID NO: 148900 - DNA, 420 bp, Homo sapiens
tctcaatgcaaagagcatttaccatctgagaagttctactcatttactattgttagcttagaatctcatctgttaaaatggtatagaaatttgttttcttcctggttatatgtacacctacataatagccttgattttgcctcttggctcacaagcctgcaatacttactatctctggctctttacagaaaatgtttgctgaactctacagaaaacaatcccccatgctttatagaaaaagacacccaggaatctcttttactaattttcttttgttggacgtttttctggccaccaataaggtaaattccctttcttggcttgtaatgattagtctctggttggttgtcatttgcaatggcacaatacatactgagacctcaaagcagaaaaatcatagaagaaaacctaggaaatatc

SEQ ID NO: 148901 - DNA, 258 bp, Homo sapiens
tctagctcctgcatcaatgtactcccttctggattccacacagaagttcacataagaaacacattctgaaaatatttcttcatcttcatctcttcacaatagctcagcttctaatccacttttatgtgtgacattttgtacctgagttcttcagtgaaattttacattgatctcaatattacaatttccctgaaggtttaccgctttcatcttcttgaaggaagaatatatggtcacaaaataaacttgttaataaag

SEQ ID NO: 148902 - DNA, 450 bp, Homo sapiens
  misc_feature (10)..(10): n is a, c, g, or t
catacctggnaccttctgaacagtctggctgtgtctcccaggctggagtgcaatggtgcgatctcggctcactgcaacctccgcctcccgggtatttcaggacagccaggagggggcgcacatccgccgagaaactgtgagcaagagcgtctgtgctgaaccatggcgccaccagagggcgcgcgatcccgccccaaccaacttcccgctgaagtgccagaagcagcgaggagcttcaacttcctcagggcagcacgggggtcgtgttaatttggtgttcttcattggtgagtaaaaagctcctgtccacggccctgagtgccaaggagtgagtctttagagtagtcagcagaggaagaaattcatctagaaaaataaagcccccaaatctcactgtttggactacaccctaatatcattgtcaacgtccaagacacagtggctgctaat

SEQ ID NO: 148903 - DNA, 395 bp, Homo sapiens
  misc_feature (10)..(10): n is a, c, g, or t
catacctggnaccttctgaacagtctggctgtgtctcccaggctggagtgcaatggtgcgatctcggctcactgcaacctccgcctcccgggtatttcaggacagccaggagggggcgcacatccgccgagaaactgtgagcaagagcgtctgtgctgaaccatggcgccaccagagggcgcgcgatcccgccccaaccaacttcccgctgaagtgccagaagcagcgaggagcttcaacttcctcagggcagcacgggggtcgtgttaatttggtgttcttcattggtgatgattattccccaccttctaagagacaaagaccaacgagccaccacagccaccagtcccagaacctgccaatgctggggaacggaaaatgagggagttcaactc

SEQ ID NO: 148904 - DNA, 1249 bp, Homo sapiens
gatcaggagtattggagctattaagttgaactttaaatgaaccatttatgttaaaattttaaggattataataaaaggaagagttacagtaaatgtaaatgacctgtatttaccatgtaagacaggttctcagattggattgaacataatctgggtgattatttttactaagaaatacaaataaaacacactcacaaaaggtcgaatataaaaggatgggaaaagtacttgccaggcaaatataaaccaaaagaaaaccaagatagcttatattagacatagtagtctttaatggataaagaagagtttatataatgagaaaagattcagtacccaggaagatatctaaacttgtgtgcacacaggctcaaaatatataaagcacaaatgaaagaattacggacagaaagaagcaaattcactattcgtgttccattttaacatgtgttttagtgactataaatcaggtaaactgagtttataaaaatattgaggatttgaaacaaaactactaatttaataacaagcataattaacagaaagaagcaaattcactatttgtgttccattttaacatgtattttagtgattataaatcaggtaaactgagtttataaaaatattgaggatttgaaacacaaaaccactaatagcaagcatgtaatctgacaaaacattaagtcataatggcagttaaaatatttagaaatgataattaagtgatacatattaaaacttgcaggatacacttttaagtgtaactccatggctaaatgtacatttcaaggagtaataaaaacatgagaataaacaaattatacaaggaagaaagtagtgaataaatgaaattagtgaaatagaaaacacagtgacattccatcaaaaccctaagttagtaatttgaaaaatgttttaaataagcaaatgcttggaaagctagatcacaaaaaaggaaatggtgtctatgtacagttttagaatgaaatgagaaacaatggacatgaaaaagatcaaaagacaattccatgaggaatattttatgctaacatatttgaaattagaataaattcctagaaaatataacctggcaaatttgtcttgagagaaaatcaagacaaatagcctataaccaatacatttagttggttttaaaaactctgcctataagacaaaactcttcttttcaaacaacaatagcaacgataatagcagcaaaaataattacagcagcagaactcaaaccaacaac

SEQ ID NO: 148905 - DNA, 538 bp, Homo sapiens
ctatccctttattatcttgttttgttttttcatcactacataaatcctttacatgggtatttggcttatcactctatcaaaatgtaaactcaatgacgagaggcactcgactttgcatgtcagaattcctgtcatgaaacccctggaaagatttatgtatcagcgtcttaataatggtactgcaactttttctaataagttaatttttcattgcaacatttttatataaagccatacagttttgagtgtaaaaacctcaattaatgactttcaagcaaggcaggctactggtactttacaaacaactgtaaatgaaaacattgttttaaatttgggtctgtcttctaagtggtttgtattataaactattggtgatcagaatcatcctcctaagttgtgcttctgcagtacaagcatttaacaccaaagcaaatgaacatcatccttggaacagaggaaatgaatgagaagagaaaaaaaatgaataaatgctgattcagattttttgcttgcttctgtctcctgctctgtttttcat

SEQ ID NO: 148906 - DNA, 1208 bp, Homo sapiens
ggaacattgtaaaaatactgcttctgttcaggcaaaaaggcaaacatgctttaaaaaaaatttgtatttatttatatattttgaaatttcagtagcttttggggtacaggtggtttttggttacatggatgaattgtatagtggtgaagtctgagcttttagtgcccctgtcacctgagaagtgtacattgtacccaatgtgtacacaatgtgttttttgtctcttgttccctctctgccttctgattccctgtagtccattatatcactctgtgtgcctttgtgtacctatagttttgtttccacttataaatgagaacacacagtatttggtttcccattcctgagttacttcacttagaataatggcctccagctccatccaagttgctgcaaaagacattatttcattctttttatcgctgagtagtattccatggtgtatatataccatgttttctttatccactcatcagtcagtggacagttagattggttccatatcttaagcatgctatttttaatcctcattatagtaggtgtgttatattagtggaataagacaagacatacaatataagaggattggaagaaactgaactgaaatatgattgtgcagaaaacacaaaatggtgtacagacaaatttatagaaaatataagaacattctagaaggttgtgagacataaggtacaaaaaccttctagcataatttcaaaaaattttcatttgtagctttaacaaagatgtaaggtacttagaaatttaaccttaatgtgtatcacctttatgttgaaaattgttataattgactgaaaagcataatagaagacttacatatgttgagagatttactgtttatggaaggggagacttagtatcataatgatgtcaatcttctgcatactgatcaataattcaatcaaaaatagaaaccgaggccaggctcactagctctctctcattatcccagcactttgggaagccgaggcaggggaatcacttgagctcaggagtttgagaccagcctgaacaacatggcaaaaccctgtctctagaaaaattagctgggcaagtgacgcatgtctgtagtcccagtgacttgggaggctgaggtgggaggatcgcttgcagggaggtcaaggctgcagtgagctgtgatcacaccacggcactccagcctgggtgaccaagtgagactctgtctc

SEQ ID NO: 148907 - DNA, 405 bp, Homo sapiens
ttctaggcctgagctcagggcacacccatgaacagggaggtgagaagtggagaagggaagaggttcagttttggatatgttaggattgaggtgcctggcagacatttttgggagatcctgggcaaatccttggatatccaagtctgacagtccaaggagagactagggcagaagacgcactttgagtggtcctcatgaaggcatttagagctgaggcactgggtgatatggatccctggtgaaggtgtagatggagaagtggagggtccagggactcgttcttgagtcaccccagacccttgatctggcaaaaatgagactgacccagcaaggagggaaagacaggacgactaggtggtagataaacctggaagtgaagtgaagaaaaaagtgtaagatgtgatc

SEQ ID NO: 148908 - DNA, 485 bp, Homo sapiens
taagtatttcagctctaagttaatctcttcaccacctggaaaatgggggccatgaagatctctccctcacaagttgtgaggatcaaatgagatgacgatgcaaatctggcacatagtatatgcccagtgaatatcagcagctaccgaatgataataattgtatttttattactttttgtattatcataagtgtcacaataagctatataaagcatgctaataagaacactgaggaaaagcaataaatcttcctggagtagctcattccgaacagacaaaagtttcaggggagagagggagataatgctgagtaatgggtcttcaatctctatgagaaaaaaaaataacctaagcattgttcaagagaagatgccatgttcatttaaatgactatttcatcttaagaaagcagtctgagctactaatcaaaccagaaccctagccatgctgatgatgatcattaatgtcatcatccataaattcat

SEQ ID NO: 148909 - DNA, 421 bp, Homo sapiens
aaaacaatttatggtggctaacccactctccaagagatgtttacaattccttttaggaagaacaccaacgcttctactacgatgggctggtcgctggactagttttaggatataaaaacaggaagagaagaactacataagaaagtaaaagaggttctggttcaaggagtggctaaggaccagcttgaatcctccacaaaagtgcacccaaaacagcactgagaaaccaaatcaccagctgggaagacagaggagagataaacctggcctgcagtggggctgcaagtagaattccactgtctcattagacatcgagaagtcaggaagcccagtgccaccaacttgggagagctgcaggcttcaaccacaggacagtagatcctgagggtgacaaggagaacagtccatgtgcaactgatca

SEQ ID NO: 148910 - DNA, 396 bp, Homo sapiens
agaactgtgagaagtgtatttctgtagtttatcactacttggtttatggtgttttgttacagcagctcaaatgaactgagactctgcccttgtgccctttcttaggttgtctctctgttaggaatgacatccttgcagctacaaatctacctaaatttcaaggtgtcttgaaatcttcagtgaagttatttatacagaaacttcttaggctagaaaatctgcacctatgttggggcaaacgttactttgtatctcttctagctatttacacagattgttaagagtttctcctaggctgtgaggcccttagagtagggtaagagtctgactcaaattccacacactccatagctcttggctacagactccttatagacgccattctatagttgtttg

SEQ ID NO: 148911 - DNA, 247 bp, Homo sapiens
ccatctgtgccacacacagacgtaggtacatggagacagatgcacacacaggtctgtgcacacacatacatacgcatgcacaggcacctgtgtacacacacgcagatacacccacagcataccatctgtgacacacacagacgtaggtacatggagacagatgcacacacatgtctgtgcacacacatacatacgcatgcacaggcacgtgtgtacacacatgcagatacacccacagcatgccatc

SEQ ID NO: 148912 - DNA, 438 bp, Homo sapiens
taagtgtgagattgtttatattttgtaaaatgtcttaagatacaatgaaatggagaatccctgagtgtttttttgatttcctaaactctgatccacaattatagatgtttctgaaggttcaaaaatattgaacgtgatttcagttgtttctagaatttaaaaaaattaataatttttaataatgacactttaaatgaggagaaggcttttaaaaccaaatataaaaatctggagagttcagattccctgtctctcctctttcaacctttaatgtataaaacaaatccttttgattcagccactgtgtattgataatggcttatttattacaatcagaggaattaaacaaagatatgtagatactttgtcatcttttcttattatagaaacagtttgattttaagaatttttattcagaacgcagattcgaaaagaaaa

SEQ ID NO: 148913 - DNA, 126 bp, Homo sapiens
cagaaagaaagaaaggagggagagaaggagggagggagggaaaaagtactttctttcagaaactaaactaaatttcattttttacagtttagattttttttccagatttggtcagaatgagatttc

SEQ ID NO: 148914 - DNA, 272 bp, Homo sapiens
gtgtgtagtacgtaccaagtgtaaggcatcatcctgtactttgacaattggaaaccttctctccccaacttctaccaattggaagttaatttcagcactgaaaccacctcccatatttaacaagagcatcacagcacaacaaatataaacagtgatgacagtgaacatttatccgttgcttccccaatatgatttctcccttctgtcttcctaataacccccatttccattcttaactagggcagaaccaagacacaccgacagttaagctg

SEQ ID NO: 148915 - DNA, 1394 bp, Homo sapiens
  misc_feature (1)..(1): n is a, c, g, or t
  misc_feature (15)..(15): n is a, c, g, or t
ntttgtttgtaactncggatccacagggttctgtactcatctgctcttcatcccactgctgtgtgctattgtctttgtgatcttcatgattggattttgcttcttcaaggaagatataaaagagcccaagtaattctggaaaccagcattttacccttgacctcctgcttttcatcctactggtcctcgccagaagtcgctggttgcctggtataagaaaacaatcataattatctcaatattacttggacctggcctccctgctaatcaggtttgtactgctgagatttcaaaggagaacagaaatctactaagaagaaataaattggttctcaggctataaatagttctaggaagctgcccagggacaaaaatttgcctgctggtgaaataaaagaccatgtaaactgtagatttatttggagagtatagttccatgaatttaactggtctagactctgggcctctggaaggcagagaccatgctctcagccttgcctttagtaccttgtctgtaacaggctatcagatatgttgattgtgtcaaagataagcaaattctgaaatgagtaatttttttcattctctatcctctctgaattcacttagtgcctttcagaatgtgtctgagtggaaagggatttgcacaggatatgtccaaacaggttattgtaactttggaggtaaactcttgtctatcattccatgcacttcattattatttatatccatttctttctttctttctttatttatttaagtaattggtcacgaaatagacttgcatgctgaatgctgaaatgtggtgtttgacacttgtaaattattccagattatatatgagactataatagataaaagtgatttagataataaagtgatctgtaattgaagtaaatgagagctgggtgctgtggctaatgccttgtactcccagcactttggaaggctgaggcagtaggatcgcttgggtccaggagtttgagactagcgtggcaacatagctagaccctgtctctacaaaaagtaaaaaattaaccaagtgtggtgatgcgcacctgtagtctcagctacacaggaggctgaggtgggaggatcacttgagctccagatgttgaggctgaagtgagccataatcatcctactgcactccagcctgggtgacagaggaagaccatgtctcaaaaaaaaaaaaaaaaaaaagagaagtaaatgaaaacttagagaaatagtagttgcaacttccaaaccaaagcttgtaattctggtcactatgacttggaaatattttccagaacaactgtgactcttgccgttgctctataaaatactggcaaggtccaaaagggaattttcccccactgtgtataatattattagacagatggtattgt

SEQ ID NO: 148916 - DNA, 1461 bp, Homo sapiens
gcttctctggctgaaggaggaggattaaaggtatcaagaggaagggttgagggccacctgccagcccctactcattggtccttagtggctcagggttctgtactcatctgctcttcatcccactgctgtgtgctattgtctttgtgatcttcatgattggattttgcttcttcaaggaagatataaaagagcccaagtaattctggaaaccagcattttacccttgacctcctgcttttcatcctactggtcctcgccagaagtcgctggttgcctggtataagaaaacaatcataattatctcaatattacttggacctggcctccctgctaatcaggtttgtactgctgagatttcaaaggagaacagaaatctactaagaagaaataaattggttctcaggctataaatagttctaggaagctgcccagggacaaaaatttgcctgctggtgaaataaaagaccatgtaaactgtagatttatttggagagtatagttccatgaatttaactggtctagactctgggcctctggaaggcagagaccatgctctcagccttgcctttagtaccttgtctgtaacaggctatcagatatgttgattgtgtcaaagataagcaaattctgaaatgagtaatttttttcattctctatcctctctgaattcacttagtgcctttcagaatgtgtctgagtggaaagggatttgcacaggatatgtccaaacaggttattgtaactttggaggtaaactcttgtctatcattccatgcacttcattattatttatatccatttctttctttctttctttatttatttaagtaattggtcacgaaatagacttgcatgctgaatgctgaaatgtggtgtttgacacttgtaaattattccagattatatatgagactataatagataaaagtgatttagataataaagtgatctgtaattgaagtaaatgagagctgggtgctgtggctaatgccttgtactcccagcactttggaaggctgaggcagtaggatcgcttgggtccaggagtttgagactagcgtggcaacatagctagaccctgtctctacaaaaagtaaaaaattaaccaagtgtggtgatgcgcacctgtagtctcagctacacaggaggctgaggtgggaggatcacttgagctccagatgttgaggctgaagtgagccataatcatcctactgcactccagcctgggtgacagaggaagaccatgtctcaaaaaaaaaaaaaaaaaaaagagaagtaaatgaaaacttagagaaatagtagttgcaacttccaaaccaaagcttgtaattctggtcactatgacttggaaatattttccagaacaactgtgactcttgccgttgctctataaaatactggcaaggtccaaaagggaattttcccccactgtgtataatattattagacagatggtattgt

SEQ ID NO: 148917 - DNA, 398 bp, Homo sapiens
caaaatcatttgattttctgcagaaaattccttgataaaaaaaagatcctggggtttatgtagggcattaccccatttagtgaaaaactcacccatttctttcctccataaatgtgtcatttttagatcaactaagtaccaaggaagctattctctgatataatgaagagaaaagaatcttgaacctggtaagagtggtctcaagccaaaacagataatttctacagaatacaataaatgctctttggctctgtgtagtgatattgcctcccagacattttaagacttaaaacctaaagaatgggtttattttaaattaataaatgtagatgcggccgaaaccgcgtggaggtccacctcaggcttttcccaccccaccaaaaaatactaaacagaaa

SEQ ID NO: 148918 - DNA, 542 bp, Homo sapiens
cttttaaggaactccggatccacagggttctgtactcatctgctcttcatcccactgctgtgtgctattgtctttgtgatcttcatgattggattttgcttcttcaaggaagatataaaagagcccaagtaattctggaaaccagcattttacccttgacctcctgcttttcatcctactggtcctcgccagaagtcgctggttgcctggtataagaaaacaatcataattatctcaatattacttggacctggcctccctgctaatcagatcaactaagtaccaaggaagctattctctgatataatgaagagaaaagaatcttgaacctggtaagagtggtctcaagccaaaacagataatttctacagaatacaataaatgctctttggctctgtgtagtgatattgcctcccagacattttaagacttaaaacctaaagaatgggtttattttaaattaataaatgtagatgcggccgaaaccgcgtggaggtccacctcaggcttttcccaccccaccaaaaaatactaaacagaaa

SEQ ID NO: 148919 - DNA, 228 bp, Homo sapiens
gtgtgggtgatgaacaaggagaagtgcttgagagcccgggaaaggcacatctgcctacaaggtgaatcgggctgaatcacaggggcactggagccacccccagatgaagacatctattttcaatgaatgtagtaaagcttttcctaacttcagaagccagcaggtggactaagggctgggagggcccgagggcctgcccagcacattgactctggagactacgcattg

SEQ ID NO: 148920 - DNA, 152 bp, Homo sapiens
cttcaacactaagggagaaatactttttcagacaactggaatctgggggaatttgttgccagtagatcttccttgaaagaaatgttaaaagaagttcttcagagaaaaggaaaatgatacaggtcagaaactcagatctaagaaaagaaagg

SEQ ID NO: 148921 - DNA, 356 bp, Homo sapiens
tttcagttaagtctcccctgatcattttaactagggtatacactcagtcatggctttaatatctgccatcaaccacattgctccatcatggcatctgctacactttggtgtcatcagtctttgattagacagttcaatgaaagcagaaaccacagtaatttttgtcaccactaaatgcctagtgcttggcatgatgctgggcaaaggataccctaatttgctgaataaagccttagtttagttgcttaatacagtgtgtctccctattaaacacagtacttaaaattcgtatttccaaataagcattaatacacaaatgcctttgctagatgatcaggaacaaactgctgatcttc

SEQ ID NO: 148922 - DNA, 295 bp, Homo sapiens
ggtaaatggatgggtggacggatgggtggatggtaggatgccggggatagcaagaagagggtgtatgggagacacatgtttaggaaataaaagttgggagctggtgacccctcctctgtgcagcacccaccacaactccaggcacctctgcccttggcctgctctggttttctccatctgacacacttgactccatctgatgctctgcagtgtccactgtttacaggtttctgtgctggagtggcagctctgggtggcagcagagattctgtccactcattcatttctgcatccc

SEQ ID NO: 148923 - DNA, 390 bp, Homo sapiens
aaagatattaagcgcaatggactgaaacacatcaaatgtgttcaaacacacaagctgatgacgacaatgctgatgatgacaacaataattataactaccttggtcacttttaggtgatgacagtaagtgactgatagacctagaccattctgcaactcctaatgaattaatgaaccaaggcaatgatcatcaatggctgataatgttatgggatccttggggtgttgcttcgccagccagaaacctctgtggccagtggcacctttacctgagttttgctcgggcccagcgggcccacttggcttggcaggctgcgctcggctgacactaccggcctggattccatgcctgccaagggcgagttgggagaggtgacgggtgtgtgagtga

SEQ ID NO: 148924 - DNA, 494 bp, Homo sapiens
gatccatagtgacatgaaatgaggtggaacgctggatcactcctccctgttgctccctttagtaggtcttccaagttcactgcattattaccagctaattaagaacagacctgtcactcgcaggagaaccatctgtttagtgagatgcaaaagtcatcctttcggttgcaatttaaaggtttcacctgttggagtcattccaggtggttctattattaatcacttgatcatgtcatgtttaggactgttcagaatccccacaaagagaaaaagatcatgttgtttaggggttctctgggattctaaagggagctagtctatgacagagggctaggatatttctcataatacactgctcaacactttggaccccacacttcccatcatggaagtatctattctcattgatgatagtggaaatcaccttttatttttaaagattagcttttattttattttagattcaggggatacacatgcaggtttgtaacatg

SEQ ID NO: 148925 - DNA, 228 bp, Homo sapiens
gcggccgcctactactactactgctcgaattcaagcttctaacgatgtacggggacatgtttcagtaacttatcttgcttatgagactttaaccattagtcaagggcacactttcaacatacacctctttatgtgcccttttctatgcttctacttctgaccaccccaagtgcctccctctttctgactgatctctcagtctcataagatgtgaaacgaaaaaaaaaa

SEQ ID NO: 148926 - DNA, 405 bp, Homo sapiens
ccaccccaataacatatcgtgctcactgctatctttgaggcaacccttgaattttactcagcctggagcgctcttcacatgtcttgtccagagccagttcggactcattcttcagccgtgcatcagtcagtgggggctagcttaaactgtggtgacaaacaacctccaaatttcagtggctcaaaaatcttcttcctcatttatttacatctcatgactggtcaggtgagaggtagctctgtgctgtgtcatcctaacacaggaatccagaaggaaggagggaccatcaataagatccccattgctatagaaaagagaaaaaagcatgcggaatagaacgctgtttcttggagatttctcctgaaaaagtcacgttatttcttctcacctccattggcaaaaaaa

SEQ ID NO: 148927 - DNA, 474 bp, Homo sapiens
ttcaataaacataatctgttttctttcaaaataacatggttatctaattcccttcattagcagctagcaaaagaggccctgggcttcccgtgagctaattcactgggtccctgaggtcgttgcgggctttccctctcactcttgcaacagacacaatctcacttctttaatgtaaagtatggtttttctgtcgaaatgtgcttcctgttttctttatcgtaacttacaggcatgattgcctgggtcttctctcattattcccagtccactgcctcttcatatttagtggtacttctgtcttactggtccctggaaatttatctcagatcatttccttttgggtctatctcttctttaagagaaataattttaaagtcaaagctccataatacagagatctgttctctttcccaccatctgttttctgaacctcccctcctggttcaagcctctgtaggataatttgaacacaaa

SEQ ID NO: 148928 - DNA, 267 bp, Homo sapiens
agcacagggagagagcagtgactttgccaaggaggcctcagcgtccttagctgcagacgggcgacagctgccccgtagccctgggcttcatcttcgtgtggcttgagagctcagatgtgacaaggcatggaaaagcactttgaaagccacaccgaggcattgcgctcctgttgccatctccagttattatctaatcacactgttattaccaggtcattagagagggagcacctgcttcacctgacactgagcacagatggccccagg

SEQ ID NO: 148929 - DNA, 601 bp, Homo sapiens
cattttacagatgctctaatggagtctcagataaagagagctgggaggaagtagagtttagtgtcaaagccaggtctgaccccgtgtctgtgtgggtccatcaatgtatatgcacctggtagatgcacatgaaactatttcagcctcctgcagaaacatcttaggtagaaataagtgagcttttcagtttagtgtttgccaaggttggcggacattcctttgtgattttgtcaaaaaagttaagggaaccgatgtgggaaattgaatgccagctattcgtaaagggtaagcattaggtgtataacttgaacaccatatattatttgtgcaaattgagtgttctggggcactgttcttgcatagtgagtgctctcaggcatggcacttggaaagtcagacatactcttccctcccaagggactcatagttaaatgggggtattacaattatgatacaccattgaacaaagcacattgcttagagaggtttatgtcttgtcctgtgtttggacggaggaagagacgccatcatgggggtggggagtttcaggaaggacttctttgtaggagacaggcatctggatggagaggtaggatggaga

SEQ ID NO: 148930 - DNA, 854 bp, Homo sapiens
aaatatgcatctccatttattttagaagcaaaaagaaccaaagcaattatggatacaaagcaattaatattctacctgtatgccatcctattcaaggattcaatattggccaacatcaaaaattgaaataaagattgcaaactgtaaggtaattttttaaatgttagaaaagaaacctatgaggcaggagaatagggtttagaggcagggaacctaaggccaattcatactgattttctagaactaaatcaaaaggaaaactcaactttccacacccaagtaacaaaaggatcacagactacttcctctgcaaaaccctccaccctcttcccagggcagaggcaaaatggaaagtacctctgattggtcccctcccacgaccaatcagactggtcacagtctttatttgcataggagtgtaactttgtaacttcacttcagcatctaattggtccccttcagcagccaatcagactgactgcaggccaaatcttcttctgtaactacactttcagcctctgattggtcactttctgcaaccaatcagaatggttgtgggcctctacttcatttacacagagtgtaaaccaagtaagcaacatgaaacctctagagtgtatttaaactccagaaaattctataactggagctcttgatccacttgctcaagcccgctcctactctgtggagtgtacttttgtttcaataaatctgtgtttttctttcattgctttctgcattttatccagttctttcttcaaaatgccaaggacctggacaccctccaccggtaacacctagactctgattctttcttcaataattagacttcatcaatgtttgatacatcgaaa

SEQ ID NO: 148931 - DNA, 382 bp, Homo sapiens
ctatcatcaaagtatgaaggtcagagctcttttgtcctttttaatagtttgttttcttaaaagtggttgagtgtgaattttctcttgcatgggaaaaggatcattgttttcactggcatcagtgaatgcgctcacacatgactgtttaaatatgtcttcattcgttagtcagtaggatcgcatcctgctggaagacagattgtgtaacctcagaggcttccagggaaactccagtcccagggagagagtgggacagtggcatgctctatagagaaagcaccccttgttctctctctctgcctccccaaccccgccccactgatctccctcctggtgcaggagggactgttggagcagaagaaaacatccagctcacctgtca

SEQ ID NO: 148932 - DNA, 439 bp, Homo sapiens
agcttttgtcaccatcacaaacttctgcagccttggccactgaggcaatcacaggcatcactgatgaggatgatagctgaagaaactgcaactgcataaagatcacatcactgaatctacccagaactacagccaatgcatgatacccacttgacaacctaggacctctctacaagaaaaagtctttctctatgaaagataattcataaaattttaaaaagtaactcttctactagatgcacagatattaatgtaggaacccaaaaaccataaaaagcaaggaaatatgacaccttcagaggattatgtctctaatcaaagaccctgaagtgaaagatatttataaaatgcctgaaaagaaattcaaaataatgctcttaaggaaactcagtgaaatacaagataatacaggtagacaattcaataaaatatggaagac

SEQ ID NO: 148933 - DNA, 433 bp, Homo sapiens
cacaaggtcacagtgaggaaaattcccagccagggcttatggagggttcagaccaggaagccaactcctgtgggaaaagaggaaggaacatagcacctgaactctgcccagagagtgcccgatggttttactgctaatcggtagtagaatgggtagctttgatgtcatcagcatttggcttgagaggtcaaaatgagagcactggagcaaccagcgtgctgagctagcaaggagaaggaggaggtttcctgacctgggggattgtgcatgaggcctcggtccatgggttgtcagggactgtcactggggcacaaggactgtttggccttgagcatcagttatgttatgtaaattacgcttaatgaaagtgcggccttggtccataaaaacttaacaatgcatttgtcttcatttgatcattccccagcagcca

SEQ ID NO: 148934 - DNA, 376 bp, Homo sapiens
tagggttaccaactcaacctgattttcttcaaattatactggttttatttttatttttggccaggaaagggaacttttgtatatactgcttttagaacagaaagttccatatccaggggaacccctcagtcctgggtaaatagggacagctagtcaccctgcttggtcatggcataccccgcttctgctcatgtttcattggctagaacttgtcaactggtcacacagactgcaagggatgctgggaaatgtcatctacttgtgtgcacaggaaacagtcccagattcacaaagagctccctgcatagacagttggtgaatgtttcttatagctataaacagtgaagctgagaagcctaaaaactggtttacaaaa

SEQ ID NO: 148935 - DNA, 351 bp, Homo sapiens
catgggagatgttggtgaccctgaggggtttgtggccctgtgggggcccaagacctgcaggcgagacagtagttggggaatgtagctctgtatcgctgtagaacttggccctgctcccccttatatggcctggcttgtgcaaatggttttgcctggtctgtggagtggggaagagtgccgggaacagtcccgagacacctgctggtgtctcctgtgtgccaggcaccctgccgaagctgtgtctgtgctcaccctgagccctccccgtagcccctgagccccatcgtggaaggagacaggcacagcgggggtggctcacactggcaggtttcaggttctcggagtctgatt

SEQ ID NO: 148936 - DNA, 391 bp, Homo sapiens
gtgatggaggggtgggagggccctacagatttttaaaaatgttaaattctggtttccttttaagtcaagtttaatgggaaaggacggcaaggctaaccagtgtctcgctgcacaactggggactggcaggtcctggcgtttcttcctggctttgccataaagtcagggcagcagttacttttggagggaggtaaaagcagctgtgatgtggtggggcacataaaagggtgggggatctcccaggtgactggcatgttctagtttggtttttttgtttgttttttgtttttgagatggagtctcgctctgtcacccaggctagagtgcagtggcacaatctcagctcactgcaacctccgcctccagggttcaagtgattctcctgcctcag

SEQ ID NO: 148937 - DNA, 594 bp, Homo sapiens
aggggactatgataaaattataagctgacttcttatcagaaataatagaggccaggaggcattagaatgacatattcaaagtgcttaaagaacaacaatgacaaaaagattaactgagatttctatacccagccaagctgtctctcaaaatgagtttccaataaacaaaagttgagatagtttgttgcaccagtgaaaacaagaccttcaggctgaaaagtaatcagtcataaaggaaagaacaaaaagggccagatattatacattattgccaatatataagtagatatttatagctatctcttaattttcaattttttaaaagatctatggctatgtaaagccacatttataacattatatggttaagtttataacacacattgatgtattaggttggtgcaaaagtaattgtgttttttgccattacttttatgcaaaagttttggcaattacttttaatggcaaaaactgcaattacctttgcaccaatctaacattatatatgaaaatgataacacaaaggacgagggcattaaatgaaactatattgttacaagcttcctatatatcaccaaaaatgtcaatatttaa

SEQ ID NO: 148938 - DNA, 356 bp, Homo sapiens
aaagaaagagaaagaaggaagggaaaggaaagaaaaggaaaggagaaaagaaaagaaaaaagatgagactgcgtaaagactcatgtgttctatactcatctgagatgaagctgccccaaagatcaaattcagaaataaaagacatgcaacgtgcttactacatttggggtgagaaaaatactaacatttgaataattttaactttatatttaaaaccttcctcttctcttcattcggggaaagggtttcccgttaaccccaatactttaaaagagggctatatcagtgtaaatgagattaatgagccgtgtggcaattccacgtatctatccccttccctccctgcttacctctgt

SEQ ID NO: 148939 - DNA, 481 bp, Homo sapiens
ggaggcactgaaccccagtggggagaccagaagtgccaaggcaagcactgtctagctgacattttagccctgggaaggctatgtggggtcctttgggtggaaggaagacagatttggcactccctctcactagtttctccagagggggttccatcagctcactgctgaccacctggcccgtccccaccccaccccaggtaaagcagataagtgaatagcacggccttgcttagcttccaggcacgtatttgcagggccagtccatctaagagcagaccattcaatacaatgctgccctggtgaccgcgtgcccaggtcttgtgagctgagttcctggctgattgctagttacctctggattaataagacacctcgttttgggtccaatctttgatgctgagaatcttcgtagggagcatgaagtctgtttttctcaagtggacatagtactcaaatatctcactacgatgactgtcaatct

SEQ ID NO: 148940 - DNA, 187 bp, Homo sapiens
gcattcatagggataaaagggctatgatataatagtaaagggaacagctgaccaggaacatatgacaaatctgtacttccagatatgtgtaccaggagaattgtatataatacagcatttatgatattagcacttgagtgttcactctgctatggtttccagtaacctattccactgggaatttggg

SEQ ID NO: 148941 - DNA, 793 bp, Homo sapiens
gtagcaggaagatttgcatcccagtgaaagcacaggccctgccggcgtgggagacagccctgtgctgaagcccgaagggcagtgaggagttccccggctttgggtgggctgtggggagtcagatcccacactagaactacaaagccacaggcagggagggctttggtgtctgccttggagttgagggagttgctgcagacctttccttgctagaggcaggctggggacaggacagggttgggggtagtgccaggtaagagggtccagccgtggccctgggctcccacgcctgcctaggcactgccccccaggctcagggtcagtgaagacgtctcaaactccccaagtcaaaagggagtgctcaggtgtctcctgccactgctgctgccaacccagcaccaccctggcatctggcgtcagggacacagctcctgacccagcagcccacggaaggagaggaagaatggggaagaagttgaagctccaggagatgactcagccccagacacctggccagagtggcactgcacgtggctgtgctgggctggccctgcctctgcaccagcaagttcctgatctcagggttccgccagtttgggcaacgtacaggaagcatggctggggaggcttcaggaaacttaccatcttggtggaagcggaagcgggcaggtcttacatggccggaggaaggggtggggcggtgccacgcacttccagacaaccagatcttgagaagtcttatcatgggaacagcaccaaagggggaagttgcccccaggatccaatcacttcc

SEQ ID NO: 148942 - DNA, 185 bp, Homo sapiens
tcaccttgaagtaaatttgcatttgtagttccttttaggtgccatgcttatagttttagaagctactactgtacaattaagtagcaagttataattatgcatcagttaacgacagggataccttctgagaagtgcattattaggcggttttgtcattgtatgaacatggtggagtgcatgtatac

SEQ ID NO: 148943 - DNA, 350 bp, Homo sapiens
gggcgcatcatctggtgtttggtacctggtaggtgctcattagatattgaatgaatgaataaataaaagccggatgccctggctcatgcctgtaatcccagcagtttgggaggctgaggtgggcagatcacttgaggtcaggagttagagatcagcctggccaacatggtgaaaccctgtctctaccaaaaatacaaaaattagccgggcatggtggcccatgcctatagtcccagctacttgggaagctgaggcaggagaattgcttgaactcaggaggcggaggttgcagtgagccaagatcatgctgctgcgctccagcctaagcaacagagcaagactctgtctca

SEQ ID NO: 148944 - DNA, 282 bp, Homo sapiens
taagaccagggcaaggtacccaggccactaggggcttccagtgggagtccactgaccccaggaatgccgcctgtctggaccaccttctccaccaagcaaatgggcctcatacaatcttcttgcccgaatcctgacctccaggacccaggacaatccttgaggccactgttccaccagctgggcacccaatactaccaactccaagactattgcacctgccccatttgtgcaggggaaaggggctgtctctttaacaagccccaagcccatctcctgggcctc

SEQ ID NO: 148945 - DNA, 581 bp, Homo sapiens
acacgcagtttgggagccacagtgctagctgttacacaggtgtagtatcataccagtcttgtgcatcccccaagatgcattgggcaatgcagtcctcatagtaggtggccaacaaatattttatgagcatcttaatccttatttcctgatgggccacaaacgccacaagttcaggagtgttctgagttccctggtccagcaataattcaaataaaatccattttaacatcttctggggatgctgtaaaggatatatctgtactgagtggaggttggcttagatgaccttttaattcccttccagggctaatgctctttaattcaatagcagcaacgcgcaacataaagaacaatatgaacacagttgtatggcagtggtgaggatgtaatgtctcaaacccccatgccaaaatattaaaaatttgaattctaacatgtagaatttggttggagtaaggaggtggagacataaaactgctgtttagttaatatgatattaatgtattaattgatgaaccttcttagttgccacaaaaattgatcatatcgagtaggacaccaagaaaaccacagtaaatgcc

SEQ ID NO: 148946 - DNA, 1036 bp, Homo sapiens
gcgcggccacaagagggggcgattcaccgccgccccccgtgggacctgggtcctctacgcgggaccgcaggggccccgagtcgcgggttgggcaaggtcgcccgctccgggtcgctcggaagggtcatttcacggactggtcgtctggggccagtgcgtcttgccccgcacggaagacccctcgcttcgaggacacgaaagcttttaaagtgaggattggctcgccgcgcctcccgcagaggggaacgccgcccggacccgcgctcctggggcgggggcctcgtatgctggcgttgccggagcgtctgcggcgctgaaggctgccgagacccagccacatcccccacaagccagcagcccggcagaaaattacataaaatgcagcgcttcgccgagggggtgcgagtcgggggagcagcgcgcagctgcggctgacggctcggccggatccatccaagcatggacaggaaaacgggactgtggggagagggtggtgcagacgggccgcagaccctccttaggaagagaagccggaaactagggagtcatgtgcagttagaatcctcttggaagactagtaggatgtgaggttggagaggtggacgacgaccagaaaattcccttgtcttgccaggcttttgacctaactatgagtttcctccgcgcatccagcctgccctgctctggcccctaaagtacagcagtaacactcagtggtgtccctgccttcctggaatgcgcgttaacaattctgattcttactcatggcaataacctacacaccacatagacgttaaatgtggttcgggtcagactctagggcaggactcactgcctgcaccttgtcttggctccactgcactccagcctgggcgacaaggcgagactccgtctccaaaaaaaaaaagctatttgtgaggtaacaatctaaatatgtttgagctagtgcaacagtaagttaactccttacatctgttaattcagcaagcactaacaagtgatggagattaaaaaaaaaaaaggaatgagccacagc

SEQ ID NO: 148947 - DNA, 1007 bp, Homo sapiens
gcgcggccacaagagggggcgattcaccgccgccccccgtgggacctgggtcctctacgcgggaccgcaggggccccgagtcgcgggttgggcaaggtcgcccgctccgggtcgctcggaagggtcatttcacggactggtcgtctggggccagtgcgtcttgccccgcacggaagacccctcgcttcgaggacacgaaagcttttaaagtgaggattggctcgccgcgcctcccgcagaggggaacgccgcccggacccgcgctcctggggcgggggcctcgtatgctggcgttgccggagcgtctgcggcgctgaaggctgccgagacccagccacatcccccacaagccagcagcccggcagaaaattacataaaatgcagcgcttcgccgagggggtgcgagtcgggggagcagcgcgcagctgcggctgacggctcggccggatccatccaagcatggacaggaaaacgggactgtggggagagggtggtgcagacgggccgcagaccctccttaggaagagaagccggaaactagggagtcatgtgcagttagaatcctcttggaagactagtaggatgtgaggttggagaggtggacgacgaccagaaaattcccttgtcttgccaggcttttgacctaactatgagtttcctccgcgcatccagcctgccctgctctggcccctaaagtacagcagtaacactcagtggtgtccctgccttcctggaatgcgcgttaacaattctgattcttactcatggcaataacctacacaccacatagacgttaaatgtggttcgggtcagactctagggcaggactcactgcctgcaccttgtcttggctccaccagcttgaccttgagcaagtcacaacctgtgggtctcagtgttccttactagtaaaccgtaggtaattcctcactagtaaacagataatatttgtgcctgtctcaaagttgtgaggatttaatgaatttgtgttcctggtatacagtaaa

SEQ ID NO: 148948 - DNA, 881 bp, Homo sapiens
tctgatggacagaggaggtgtgggcgctccgagaccatgcctctgcctaagaagggacccagatctgctctgggtttgccaaagccagggcccctctgctttgctccccctccgcattcccgggcagccaggatggacggctgggcttcagagcactcatgcagcagtggctcagggccacctgtccccagggaactggaagaagcgttcagggccctgaaccaaacggctgctgaaggggtccctgtggggagagcccccagccctgcacagaggcaaggacacaggttcggggcgggcactgcccgctatgtgttcccgaggcccctgggaggccctcaccctccctgcctccttccccttcccacagagtgaagtccgaggccatcatcgcccgccgtgaacccaaagaagaggcggaggatgtaagcagctatctctgtacagaatcggtacatccactcttcactcttcacatgcggggcgtccaccattcacttttcacaggcggggcggccaccgttcaccattcacacacagggtgaccaccattcaccattcacaggcagagcggccaccattcaccattcacaggcggggcggccaccattcaccattcacaggcggggcggccaccattcaccattcccaggcggggcggccactgttcccacacattcacacgccgggtgaccactgttcatacgcattcacacgtggggcagccatcattcccacacattcacacgctgggcggccaccattcaccattcaccattcacacacagtatatcctactattcacactcggggcatggggatgcggggtgcctcccggggactcaccggcgcttctgtctctgtacagaatcagtatatcc

SEQ ID NO: 148949 - DNA, 8281 bp, Homo sapiens
ggcggcggagccctgatggcgacagcagctgcgggaggcgacgggctgcggcctgcggaacctgaggcagctggggagggccgggcgcgccggccggatagcgagccgcgctggcggcggcggtggccgcgatgatggagatccagatggacgagggcggcggcgtggtggtgtaccaggacgactactgctccggctcggtgatgtcggagcgggtgtcgggcctggcgggctccatctaccgcgagttcgagcgcctcatccactgctacgacgaggaggtggtcaaggagctcatgccgctggtggtgaacgtgctggagaacctagactcggtgctcagcgagaaccaggagcacgaggtggagctggagctgctgcgcgaggacaacgagcagctgctcacccagtacgagcgtgagaaggcgctgcgcaggcaggcggaggagaaattcattgagtttgaagatgctctggaacaagagaagaaagagctgcaaatccaggtggagcactacgagttccagacgcgccagctggagctgaaggccaagaactatgccgatcagatttcccggttggaggagcgggagtcggagatgaagaaggagtacaatgccctgcaccagcggcacacagagatgatacagacctacgtggagcacattgagaggtccaagatgcagcaggtcggaggaaacagccagaccgagagcagcctgccggggcggaggaaggagcgccccacctccctgaacgtgttccccctggctgacggcacggtacgtgcacagatcgggggcaagctcgtgcctgcgggggaccactggcacctgagtgacctcggccagctgcagtccagctccagctaccaggttttgtagccgtgccgtggagtgagaggctcctccctgttgctggtgttccccgttcactggggcgggagcctcgtctgcaggcagcccttcacggctctctgggccactcgccctctcccttcgtgtgtggcaggatggagaaacccagccagggtgtcaggggctcaggctgcccagcaggccctgtgtggctgtggctgttccacgcggcctcgtgtcggcacctgctagtccaggctagacctccctgcccttggatagaccgctctgtagccaggggtgtacagtgcctgtcagggttgagcttagtgatcctctctcaaaccacacccccacataaagcctcatgctcacccgggctccagccagacacatcctgcccctgagagccacgcctctactctcggaggaacgtcagtgtctagagtgtggggtttgccctccgttggcagaaaggtgaggagaaagctcctcttctctgggcccctccctgcctgtccctggtaacgcctcctgggtcctgagtttgagaaagcagagcctcgccccagcaggtactcacagccagagtgcgggggccccagcaggttctcacagccagccggtgagtgcacctcagagcacaggggcccagagccaggccactccttcagggccccaggtcgcttgctgccagttttggcctgtgagctcactggcctcagtgccaggtaaggacagccaccttcctgggaagaagaggtgaccccgggtctggtggatttcccacaggggccgtcagaggatgtccacagaggcagagcccttggggcctgtgggctgggttgggctggtggatgtggggcctgggacttctccagaagcttacttcctgctgcatgctttgccgactgtccttccacctctaagtgtccatcgtgcctgtgggggctgctgcaggctcctgctccgtcagcccacctgctgctgcgctgctctgggagcgagctccctcatggcatctggaacgctctcctgtcctccctgtgctcagggctggagagagggtggcggggctgcgggctccccgggccttctgggcccagccctgccacctgggcccacctcctctcactgtctctggctcacgcttcccgggcctggagctgggacctgcccataggcatctgaagacacgtcagcctcagccggggggagcccttgcttgacgctctctggcctccgggctgcctctcgcgcccgctctgggcccgctcttcttctcatgatgtctttcctttcacctcctgcgttgtctgacatcgtcgctctcttcataaattgtagcgttttatgttttcgttcataggagtgttttatttgatttttctttattttaaattattacatttaagttctttttattttatgctctaggttttgaagtttttctaatttcttaatttttttgttgttttttgttttgttttgtttttgtttttatgtactgtattttcagtgttttaaccaaacagttgtggctactcatggtgaggaatgaccgctaagagtttgggttctttcagtgcatttggaggtcactgctacacgttgatgtttaggaggttgagaggtttgcctttaggtaagttgtggccagggggagtgtcccatgggtaagtggtggccctgtagggtgacggagagctaggggaggcgcaatcagactgcagaattccccgcagccaccatgagggtcaggagcaggccggggacccagcgtggaggaaggtggcccagaagcgtttgtctgatgtgcacagctacaccctgcctggccacatggggttccctgttttctctctgccgggtggtggcagagtcggtgagacaccaggtgcctgtgacacattgggtagacaggttctttgagaacgtcagcacagacttcttgcatgagcggtactcgcttcctccagcgtggggagtgacatgaagagcaagggttttcctttcaaactgggcatagctgcagagccacaggccgtctcagacatttctacaaagccactccgggaggcgggctgcgcccgtgtgagggctctccctcggcactgctcatcttttggggctggacatgcatggcctgggccgctgggacgcggtgggtgtggagcagcatccctggcttccacccacgaaagccaggagcacccccttcatttgtgaccacaaaaatgtctctggactttgcaagcatcccctcggggcagtcacccttcttgggtccccagtcagagccctctgccctacctgggctggacttgtttctgaacagccacaagctacagggggctgccgctgtgtccctggcgaggcactggcccattacaagcaatcgtctggggagggcaccagtggaaagccccgttccaagccatttcaggagggtggccctgcttccgaggagccggagtcagtggccggataagcagagccactcgggagtggtgaggcccggaagggttagcccggtgggcggcagaggagctctggcccgcagggtgtcgggcgaggcaaagtgcaaagcattggtgcgcggggcctcaggcagccacggcggagccgcaggccagggacctgcagtgactcgctctccctcctccctgtgtttggccttagtgtccacaggatgaaatgtccgagtcaggccagtcctcggcggccgccacacccagcaccacaggcaccaagtccaacacgcccacatcctccgtgccctcggccgccgtcacacccctcaacgagagcctgcagcccctgggggactatggcgtgggctccaagaacagcaagcgtgcccgggagaagcgcgacagccgcaacatggaagtacaggtcacccaggagatgcgcaacgtcagtataggcatgggcagcagtgacgagtggtctgatgttcaagacattattgactccacgccagagctggacatgtgtccagagacccgcctggaccgcacaggaagcagcccaacccagggcatcgtgaacaaagctttcggcatcaacaccgactccctgtaccatgagctgtcgacggcagggtctgaggtcatcggggatgtggacgaaggggccgacctcctaggggagttctcaggaatgggcaaagaagtggggaatctgctactggaaaactcacagcttctggaaaccaaaaacgccttgaatgtggtgaagaatgacctgattgccaaggtcgaccagctgtccggggagcaggaggtgctgaggggcgagttggaggctgctaagcaggccaaagtcaagctggaaaaccgtatcaaggagctggaagaggaactgaaaagagtgaagtccgaggccatcatcgcccgccgtgaacccaaagaagaggcggaggatgtaagcagctatctctgtacagaatcggacaaaatccccatggcccagcgccgccgcttcacgcgggtggagatggcccgtgtgctcatggagcggaaccagtacaaggagcggctgatggagctgcaggaggctgtgcggtggactgagatgatcagagcgtcccgagagcacccatccgtccaggagaagaagaagtcgaccatctggcagttcttcagccgcctcttcagctcttcctccagcccccctccggccaagcgcccctatccctcggtgaacatccactacaagtcacccaccactgccggcttcagccagcgccgcaaccatgccatgtgcccgatctcggcaggcagccggcccctggaattcttccctgacgacgactgcacgtcctccgcccgtcgagagcagaagcgcgagcagtaccgccaggtgcgtgagcacgtgcgtaacgacgacggccgtctgcaggcctgcggctggagcctgcccgccaagtacaagcagctgagtcccaacgggggccaggaggacacgcggatgaagaacgtgccggtgccggtgtactgccgccctctggtggagaaggaccccaccatgaagctgtggtgtgccgcgggcgtcaacctgagcgggtggaggcccaatgaggacgacgctgggaatggagtcaagccagcgccaggccgcgatcccctgacctgcgaccgcgaaggagacggcgagcccaagagcgcccacacgtctcccgagaagaagaaggccaaggagctccctgaaatggacgccacctccagccgggtgtggatcctgaccagcaccctgaccaccagcaaggtggtgatcatcgacgccaaccagccgggcacggtggtggaccagttcaccgtctgcaacgcgcacgtgctgtgcatctccagcatccccgcggccagcgacagcgactaccctcccggggagatgttcctggacagcgacgtgaacccagaggacccgggcgcagatggcgtgctggccggtatcaccctggtgggctgtgccacccgctgcaacgtgccgcggagcaactgctcctcccgaggggacaccccagtgctagacaaggggcagggggaggtggccaccatcgccaacgggaaggtcaacccgtcccagtccacagaggaggccacagaggccacggaggtgccagaccctgggcccagcgagccagagacagccacattgcggcccgggcctctcacagagcacgtcttcactgacccagccccgaccccgtcctctggcccccagcctggcagcgagaacgggccagagcctgacagcagcagcacacggccagagccagagcccagcggggaccccacgggagcaggcagcagtgctgcacccaccatgtggctgggagcccagaacggctggctctatgtgcactcggctgtggccaactggaagaagtgcctgcactccatcaagctgaaggattctgtgctgagcctggtgcatgtcaaaggccgtgtgctggtggctctggcggacgggaccctggccatcttccaccgtggtgaagatggccagtgggatctgagcaactatcacctaatggacctgggccacccgcaccactccatccgctgcatggctgttgtgtacgaccgcgtgtggtgtggctacaagaacaaggtgcacgtcatccagcccaagaccatgcagatagagaagtcatttgacgcccacccgcggcgggagagccaggtgcggcagctggcgtggatcggcgatggcgtatgggtgtccatccgcctggactccaccctgaggctctaccatgcacacacgcaccagcatctacaggacgtggacattgagccctacgtcagcaagatgctaggcactggcaagctgggtttctccttcgtacgcatcacggccctgcttgtcgcgggcagccggctctgggtgggcaccggcaacggagtggtcatctccatccccctgacagagactgtggtcctgcaccgaggccagctcctggggctccgagccaataagacatcccccacctctggggagggcgcccgtcccgggggcatcatccacgtgtatggcgatgacagcagtgacagggcggccagcagcttcatcccctactgctccatggcccaggcccagctatgcttccatgggcaccgcgatgccgtgaagttctttgtctcggtgccagggaacgtgctggccaccctgaatggcagtgtgctggacagcccagccgagggccctgggccagctgcccctgcctcggaggtcgagggccagaagctgcggaacgtgctggtgctgagcggcggggagggctacatcgacttccgcattggagacggagaggacgacgagacggaggagggcgcaggggacatgagccaggtgaagcccgtgctgtccaaggcagagcgcagtcacatcatcgtgtggcaggtgtcctacacccccgagtgaagctgctgccctgcctggcccgacctgtacataggacccccgaccacctgacccccgcccggcccgcggggtagccagccaggcgccgccgcccctcttctaacctctcaacctgcagctttcacctgagtctggcccctccagcgggcagggagtgcggggatgcggatcagctgggaggaggaggggaggggtgcttccacccgaggggaagatgctctcgggacagtttcccgggcagctcctggccagcttccagcccagagtcctcaagtccagggcaccttgggcccagcgcaggcagaatccgaggtggtcctggctctaccctgggcctcctactccccagcacccctggaggaggcaggggctccccgccgccgaggctgcctgccctgggcccacctctgcatgctgctcatggggccaccctgcctcctgggccctcactctgcctaggggagctgggccaggcactagcctttgcccagggaggtgggcctcaggctgcccaggtgcctgcaccccagccggccttctctggggcctccccgtcgtcaagcctctatcctgtctgtccccaccccagctgtcccctgcccagggaactggcataaaagcacgaggcccggctccctggggcagctgcttgagaacagagactgctaccccatcctgcccatgcaggcaggctcttgccagccccgttctgacccgtgtccccccaggctctgcctgggcagaagactcaccttggaggagtgggccctggagtcctgtccctcccagaagcccccagggtgggatttctcaggctgccagggcaggcccaggcctcaggaagaaggggaggcccctggcctctccgggatcagtcctaggacacaggctcagcctcaggttgatgggggatgatgtgctcccggggcctgcctcctgcacggggctccacggagcccagctcccagacacgctactaagtgcctagggttgcccgctgtggcctgctcccagggagcaacagagaggccaccaagcagaggcccgtggggctgaggatggagccgcccccagccgactccaagcccgcagagggcagacgccaccctggactgctctccctgcccagctgggcctctctggcctattcctaccttccaggcccactgcactcctgtctgggaggcccttatgagggcagcccagcccccgcacccacccccaaccagagaagcacagatcttggggagctgccccacaagccccgctggccaccgagggctgcagccgctgcgctgccggcttctccccaccaccctgccacctccactgtgatgtatgtccgctccctcgtctgttcccccaggatctcgaagtgactccgggctgagcagtggggcggctgggggaggggtgacgattctcctcaggctttggccctgcaagcaaacccacatatctgctctgtatgtaataaatgtcttaacgtcgta

SEQ ID NO: 148950 - DNA, 7244 bp, Homo sapiens
ggcggcggagccctgatggcgacagcagctgcgggaggcgacgggctgcggcctgcggaacctgaggcagctggggagggccgggcgcgccggccggatagcgagccgcgctggcggcggcggtggccgcgatgatggagatccagatggacgagggcggcggcgtggtggtgtaccaggacgactactgctccggctcggtgatgtcggagcgggtgtcgggcctggcgggctccatctaccgcgagttcgagcgcctcatccactgctacgacgaggaggtggtcaaggagctcatgccgctggtggtgaacgtgctggagaacctagactcggtgctcagcgagaaccaggagcacgaggtggagctggagctgctgcgcgaggacaacgagcagctgctcacccagtacgagcgtgagaaggcgctgcgcaggcaggcggaggagaaattcattgagtttgaagatgctctggaacaagagaagaaagagctgcaaatccaggtggagcactacgagttccagacgcgccagctggagctgaaggccaagaactatgccgatcagatttcccggttggaggagcgggagtcggagatgaagaaggagtacaatgccctgcaccagcggcacacagagatgatacagacctacgtggagcacattgagaggtccaagatgcagcaggtcggaggaaacagccagaccgagagcagcctgccggggcggaggaaggagcgccccacctccctgaacgtgttccccctggctgacggcacggtacgtgcacagatcgggggcaagctcgtgcctgcgggggaccactggcacctgagtgacctcggccagctgcagtccagctccagctaccaggttttgtagccgtgccgtggagtgagaggctcctccctgttgctggtgttccccgttcactggggcgggagcctcgtctgcaggcagcccttcacggctctctgggccactcgccctctcccttcgtgtgtggcaggatggagaaacccagccagggtgtcaggggctcaggctgcccagcaggccctgtgtggctgtggctgttccacgcggcctcgtgtcggcacctgctagtccaggctagacctccctgcccttggatagaccgctctgtagccaggggtgtacagtgcctgtcagggttgagcttagtgatcctctctcaaaccacacccccacataaagcctcatgctcacccgggctccagccagacacatcctgcccctgagagccacgcctctactctcggaggaacgtcagtgtctagagtgtggggtttgccctccgttggcagaaaggtgaggagaaagctcctcttctctgggcccctccctgcctgtccctggtaacgcctcctgggtcctgagtttgagaaagcagagcctcgccccagcaggtactcacagccagagtgcgggggccccagcaggttctcacagccagccggtgagtgcacctcagagcacaggggcccagagccaggccactccttcagggccccaggtcgcttgctgccagttttggcctgtgagctcactggcctcagtgccaggtaaggacagccaccttcctgggaagaagaggtgaccccgggtctggtggatttcccacaggggccgtcagaggatgtccacagaggcagagcccttggggcctgtgggctgggttgggctggtggatgtggggcctgggacttctccagaagcttacttcctgctgcatgctttgccgactgtccttccacctctaagtgtccatcgtgcctgtgggggctgctgcaggctcctgctccgtcagcccacctgctgctgcgctgctctgggagcgagctccctcatggcatctggaacgctctcctgtcctccctgtgctcagggctggagagagggtggcggggctgcgggctccccgggccttctgggcccagccctgccacctgggcccacctcctctcactgtctctggctcacgcttcccgggcctggagctgggacctgcccataggcatctgaagacacgtcagcctcagccggggggagcccttgcttgacgctctctggcctccgggctgcctctcgcgcccgctctgggcccgctcttcttctcatgatgtctttcctttcacctcctgcgttgtctgacatcgtcgctctcttcataaattgtagcgttttatgttttcgttcataggagtgttttatttgatttttctttattttaaattattacatttaagttctttttattttatgctctaggttttgaagtttttctaatttcttaatttttttgttgttttttgttttgttttgtttttgtttttatgtactgtattttcagtgttttaaccaaacagttgtggctactcatggtgaggaatgaccgctaagagtttgggttctttcagtgcatttggaggtcactgctacacgttgatgtttaggaggttgagaggtttgcctttagtgtccacaggatgaaatgtccgagtcaggccagtcctcggcggccgccacacccagcaccacaggcaccaagtccaacacgcccacatcctccgtgccctcggccgccgtcacacccctcaacgagagcctgcagcccctgggggactatggcgtgggctccaagaacagcaagcgtgcccgggagaagcgcgacagccgcaacatggaagtacaggtcacccaggagatgcgcaacgtcagtataggcatgggcagcagtgacgagtggtctgatgttcaagacattattgactccacgccagagctggacatgtgtccagagacccgcctggaccgcacaggaagcagcccaacccagggcatcgtgaacaaagctttcggcatcaacaccgactccctgtaccatgagctgtcgacggcagggtctgaggtcatcggggatgtggacgaaggggccgacctcctaggggagttctcaggaatgggcaaagaagtggggaatctgctactggaaaactcacagcttctggaaaccaaaaacgccttgaatgtggtgaagaatgacctgattgccaaggtcgaccagctgtccggggagcaggaggtgctgaggggcgagttggaggctgctaagcaggccaaagtcaagctggaaaaccgtatcaaggagctggaagaggaactgaaaagagtgaagtccgaggccatcatcgcccgccgtgaacccaaagaagaggcggaggatgtaagcagctatctctgtacagaatcggacaaaatccccatggcccagcgccgccgcttcacgcgggtggagatggcccgtgtgctcatggagcggaaccagtacaaggagcggctgatggagctgcaggaggctgtgcggtggactgagatgatcagagcgtcccgagagcacccatccgtccaggagaagaagaagtcgaccatctggcagttcttcagccgcctcttcagctcttcctccagcccccctccggccaagcgcccctatccctcggtgaacatccactacaagtcacccaccactgccggcttcagccagcgccgcaaccatgccatgtgcccgatctcggcaggcagccggcccctggaattcttccctgacgacgactgcacgtcctccgcccgtcgagagcagaagcgcgagcagtaccgccaggtgcgtgagcacgtgcgtaacgacgacggccgtctgcaggcctgcggctggagcctgcccgccaagtacaagcagctgagtcccaacgggggccaggaggacacgcggatgaagaacgtgccggtgccggtgtactgccgccctctggtggagaaggaccccaccatgaagctgtggtgtgccgcgggcgtcaacctgagcgggtggaggcccaatgaggacgacgctgggaatggagtcaagccagcgccaggccgcgatcccctgacctgcgaccgcgaaggagacggcgagcccaagagcgcccacacgtctcccgagaagaagaaggccaaggagctccctgaaatggacgccacctccagccgggtgtggatcctgaccagcaccctgaccaccagcaaggtggtgatcatcgacgccaaccagccgggcacggtggtggaccagttcaccgtctgcaacgcgcacgtgctgtgcatctccagcatccccgcggccagcgacagcgactaccctcccggggagatgttcctggacagcgacgtgaacccagaggacccgggcgcagatggcgtgctggccggtatcaccctggtgggctgtgccacccgctgcaacgtgccgcggagcaactgctcctcccgaggggacaccccagtgctagacaaggggcagggggaggtggccaccatcgccaacgggaaggtcaacccgtcccagtccacagaggaggccacagaggccacggaggtgccagaccctgggcccagcgagccagagacagccacattgcggcccgggcctctcacagagcacgtcttcactgacccagccccgaccccgtcctctggcccccagcctggcagcgagaacgggccagagcctgacagcagcagcacacggccagagccagagcccagcggggaccccacgggagcaggcagcagtgctgcacccaccatgtggctgggagcccagaacggctggctctatgtgcactcggctgtggccaactggaagaagtgcctgcactccatcaagctgaaggattctgtgctgagcctggtgcatgtcaaaggccgtgtgctggtggctctggcggacgggaccctggccatcttccaccgtggtgaagatggccagtgggatctgagcaactatcacctaatggacctgggccacccgcaccactccatccgctgcatggctgttgtgtacgaccgcgtgtggtgtggctacaagaacaaggtgcacgtcatccagcccaagaccatgcagatagagaagtcatttgacgcccacccgcggcgggagagccaggtgcggcagctggcgtggatcggcgatggcgtatgggtgtccatccgcctggactccaccctgaggctctaccatgcacacacgcaccagcatctacaggacgtggacattgagccctacgtcagcaagatgctaggcactggcaagctgggtttctccttcgtacgcatcacggccctgcttgtcgcgggcagccggctctgggtgggcaccggcaacggagtggtcatctccatccccctgacagagactgtggtcctgcaccgaggccagctcctggggctccgagccaataagacatcccccacctctggggagggcgcccgtcccgggggcatcatccacgtgtatggcgatgacagcagtgacagggcggccagcagcttcatcccctactgctccatggcccaggcccagctatgcttccatgggcaccgcgatgccgtgaagttctttgtctcggtgccagggaacgtgctggccaccctgaatggcagtgtgctggacagcccagccgagggccctgggccagctgcccctgcctcggaggtcgagggccagaagctgcggaacgtgctggtgctgagcggcggggagggctacatcgacttccgcattggagacggagaggacgacgagacggaggagggcgcaggggacatgagccaggtgaagcccgtgctgtccaaggcagagcgcagtcacatcatcgtgtggcaggtgtcctacacccccgagtgaagctgctgccctgcctggcccgacctgtacataggacccccgaccacctgacccccgcccggcccgcggggtagccagccaggcgccgccgcccctcttctaacctctcaacctgcagctttcacctgagtctggcccctccagcgggcagggagtgcggggatgcggatcagctgggaggaggaggggaggggtgcttccacccgaggggaagatgctctcgggacagtttcccgggcagctcctggccagcttccagcccagagtcctcaagtccagggcaccttgggcccagcgcaggcagaatccgaggtggtcctggctctaccctgggcctcctactccccagcacccctggaggaggcaggggctccccgccgccgaggctgcctgccctgggcccacctctgcatgctgctcatggggccaccctgcctcctgggccctcactctgcctaggggagctgggccaggcactagcctttgcccagggaggtgggcctcaggctgcccaggtgcctgcaccccagccggccttctctggggcctccccgtcgtcaagcctctatcctgtctgtccccaccccagctgtcccctgcccagggaactggcataaaagcacgaggcccggctccctggggcagctgcttgagaacagagactgctaccccatcctgcccatgcaggcaggctcttgccagccccgttctgacccgtgtccccccaggctctgcctgggcagaagactcaccttggaggagtgggccctggagtcctgtccctcccagaagcccccagggtgggatttctcaggctgccagggcaggcccaggcctcaggaagaaggggaggcccctggcctctccgggatcagtcctaggacacaggctcagcctcaggttgatgggggatgatgtgctcccggggcctgcctcctgcacggggctccacggagcccagctcccagacacgctactaagtgcctagggttgcccgctgtggcctgctcccagggagcaacagagaggccaccaagcagaggcccgtggggctgaggatggagccgcccccagccgactccaagcccgcagagggcagacgccaccctggactgctctccctgcccagctgggcctctctggcctattcctaccttccaggcccactgcactcctgtctgggaggcccttatgagggcagcccagcccccgcacccacccccaaccagagaagcacagatcttggggagctgccccacaagccccgctggccaccgagggctgcagccgctgcgctgccggcttctccccaccaccctgccacctccactgtgatgtatgtccgctccctcgtctgttcccccaggatctcgaagtgactccgggctgagcagtggggcggctgggggaggggtgacgattctcctcaggctttggccctgcaagcaaacccacatatctgctctgtatgtaataaatgtcttaacgtcgta

SEQ ID NO: 148951 - DNA, 5617 bp, Homo sapiens
ggcggcggagccctgatggcgacagcagctgcgggaggcgacgggctgcggcctgcggaacctgaggcagctggggagggccgggcgcgccggccggatagcgagccgcgctggcggcggcggtggccgcgatgatggagatccagatggacgagggcggcggcgtggtggtgtaccaggacgactactgctccggctcggtgatgtcggagcgggtgtcgggcctggcgggctccatctaccgcgagttcgagcgcctcatccactgctacgacgaggaggtggtcaaggagctcatgccgctggtggtgaacgtgctggagaacctagactcggtgctcagcgagaaccaggagcacgaggtggagctggagctgctgcgcgaggacaacgagcagctgctcacccagtacgagcgtgagaaggcgctgcgcaggcaggcggaggagaaattcattgagtttgaagatgctctggaacaagagaagaaagagctgcaaatccaggtggagcactacgagttccagacgcgccagctggagctgaaggccaagaactatgccgatcagatttcccggttggaggagcgggagtcggagatgaagaaggagtacaatgccctgcaccagcggcacacagagatgatacagacctacgtggagcacattgagaggtccaagatgcagcaggtcggaggaaacagccagaccgagagcagcctgccggggcggaggaaggagcgccccacctccctgaacgtgttccccctggctgacggcacggtacgtgcacagatcgggggcaagctcgtgcctgcgggggaccactggcacctgagtgacctcggccagctgcagtccagctccagctaccagtgtccacaggatgaaatgtccgagtcaggccagtcctcggcggccgccacacccagcaccacaggcaccaagtccaacacgcccacatcctccgtgccctcggccgccgtcacacccctcaacgagagcctgcagcccctgggggactatggcgtgggctccaagaacagcaagcgtgcccgggagaagcgcgacagccgcaacatggaagtacaggtcacccaggagatgcgcaacgtcagtataggcatgggcagcagtgacgagtggtctgatgttcaagacattattgactccacgccagagctggacatgtgtccagagacccgcctggaccgcacaggaagcagcccaacccagggcatcgtgaacaaagctttcggcatcaacaccgactccctgtaccatgagctgtcgacggcagggtctgaggtcatcggggatgtggacgaaggggccgacctcctaggggagttctcaggaatgggcaaagaagtggggaatctgctactggaaaactcacagcttctggaaaccaaaaacgccttgaatgtggtgaagaatgacctgattgccaaggtcgaccagctgtccggggagcaggaggtgctgaggggcgagttggaggctgctaagcaggccaaagtcaagctggaaaaccgtatcaaggagctggaagaggaactgaaaagagtgaagtccgaggccatcatcgcccgccgtgaacccaaagaagaggcggaggatgtaagcagctatctctgtacagaatcggacaaaatccccatggcccagcgccgccgcttcacgcgggtggagatggcccgtgtgctcatggagcggaaccagtacaaggagcggctgatggagctgcaggaggctgtgcggtggactgagatgatcagagcgtcccgagagcacccatccgtccaggagaagaagaagtcgaccatctggcagttcttcagccgcctcttcagctcttcctccagcccccctccggccaagcgcccctatccctcggtgaacatccactacaagtcacccaccactgccggcttcagccagcgccgcaaccatgccatgtgcccgatctcggcaggcagccggcccctggaattcttccctgacgacgactgcacgtcctccgcccgtcgagagcagaagcgcgagcagtaccgccaggtgcgtgagcacgtgcgtaacgacgacggccgtctgcaggcctgcggctggagcctgcccgccaagtacaagcagctgagtcccaacgggggccaggaggacacgcggatgaagaacgtgccggtgccggtgtactgccgccctctggtggagaaggaccccaccatgaagctgtggtgtgccgcgggcgtcaacctgagcgggtggaggcccaatgaggacgacgctgggaatggagtcaagccagcgccaggccgcgatcccctgacctgcgaccgcgaaggagacggcgagcccaagagcgcccacacgtctcccgagaagaagaaggccaaggagctccctgaaatggacgccacctccagccgggtgtggatcctgaccagcaccctgaccaccagcaaggtggtgatcatcgacgccaaccagccgggcacggtggtggaccagttcaccgtctgcaacgcgcacgtgctgtgcatctccagcatccccgcggccagcgacagcgactaccctcccggggagatgttcctggacagcgacgtgaacccagaggacccgggcgcagatggcgtgctggccggtatcaccctggtgggctgtgccacccgctgcaacgtgccgcggagcaactgctcctcccgaggggacaccccagtgctagacaaggggcagggggaggtggccaccatcgccaacgggaaggtcaacccgtcccagtccacagaggaggccacagaggccacggaggtgccagaccctgggcccagcgagccagagacagccacattgcggcccgggcctctcacagagcacgtcttcactgacccagccccgaccccgtcctctggcccccagcctggcagcgagaacgggccagagcctgacagcagcagcacacggccagagccagagcccagcggggaccccacgggagcaggcagcagtgctgcacccaccatgtggctgggagcccagaacggctggctctatgtgcactcggctgtggccaactggaagaagtgcctgcactccatcaagctgaaggattctgtgctgagcctggtgcatgtcaaaggccgtgtgctggtggctctggcggacgggaccctggccatcttccaccgtggtgaagatggccagtgggatctgagcaactatcacctaatggacctgggccacccgcaccactccatccgctgcatggctgttgtgtacgaccgcgtgtggtgtggctacaagaacaaggtgcacgtcatccagcccaagaccatgcagatagagaagtcatttgacgcccacccgcggcgggagagccaggtgcggcagctggcgtggatcggcgatggcgtatgggtgtccatccgcctggactccaccctgaggctctaccatgcacacacgcaccagcatctacaggacgtggacattgagccctacgtcagcaagatgctaggcactggcaagctgggtttctccttcgtacgcatcacggccctgcttgtcgcgggcagccggctctgggtgggcaccggcaacggagtggtcatctccatccccctgacagagactgtggtcctgcaccgaggccagctcctggggctccgagccaataagacatcccccacctctggggagggcgcccgtcccgggggcatcatccacgtgtatggcgatgacagcagtgacagggcggccagcagcttcatcccctactgctccatggcccaggcccagctatgcttccatgggcaccgcgatgccgtgaagttctttgtctcggtgccagggaacgtgctggccaccctgaatggcagtgtgctggacagcccagccgagggccctgggccagctgcccctgcctcggaggtcgagggccagaagctgcggaacgtgctggtgctgagcggcggggagggctacatcgacttccgcattggagacggagaggacgacgagacggaggagggcgcaggggacatgagccaggtgaagcccgtgctgtccaaggcagagcgcagtcacatcatcgtgtggcaggtgtcctacacccccgagtgaagctgctgccctgcctggcccgacctgtacataggacccccgaccacctgacccccgcccggcccgcggggtagccagccaggcgccgccgcccctcttctaacctctcaacctgcagctttcacctgagtctggcccctccagcgggcagggagtgcggggatgcggatcagctgggaggaggaggggaggggtgcttccacccgaggggaagatgctctcgggacagtttcccgggcagctcctggccagcttccagcccagagtcctcaagtccagggcaccttgggcccagcgcaggcagaatccgaggtggtcctggctctaccctgggcctcctactccccagcacccctggaggaggcaggggctccccgccgccgaggctgcctgccctgggcccacctctgcatgctgctcatggggccaccctgcctcctgggccctcactctgcctaggggagctgggccaggcactagcctttgcccagggaggtgggcctcaggctgcccaggtgcctgcaccccagccggccttctctggggcctccccgtcgtcaagcctctatcctgtctgtccccaccccagctgtcccctgcccagggaactggcataaaagcacgaggcccggctccctggggcagctgcttgagaacagagactgctaccccatcctgcccatgcaggcaggctcttgccagccccgttctgacccgtgtccccccaggctctgcctgggcagaagactcaccttggaggagtgggccctggagtcctgtccctcccagaagcccccagggtgggatttctcaggctgccagggcaggcccaggcctcaggaagaaggggaggcccctggcctctccgggatcagtcctaggacacaggctcagcctcaggttgatgggggatgatgtgctcccggggcctgcctcctgcacggggctccacggagcccagctcccagacacgctactaagtgcctagggttgcccgctgtggcctgctcccagggagcaacagagaggccaccaagcagaggcccgtggggctgaggatggagccgcccccagccgactccaagcccgcagagggcagacgccaccctggactgctctccctgcccagctgggcctctctggcctattcctaccttccaggcccactgcactcctgtctgggaggcccttatgagggcagcccagcccccgcacccacccccaaccagagaagcacagatcttggggagctgccccacaagccccgctggccaccgagggctgcagccgctgcgctgccggcttctccccaccaccctgccacctccactgtgatgtatgtccgctccctcgtctgttcccccaggatctcgaagtgactccgggctgagcagtggggcggctgggggaggggtgacgattctcctcaggctttggccctgcaagcaaacccacatatctgctctgtatgtaataaatgtcttaacgtcgta

SEQ ID NO: 148952 - DNA, 8184 bp, Homo sapiens
ggcggcggagccctgatggcgacagcagctgcgggaggcgacgggctgcggcctgcggaacctgaggcagctggggagggccgggcgcgccggccggatagcgagccgcgctggcggcggcggtggccgcgatgatggagatccagatggacgagggcggcggcgtggtggtgtaccaggacgactactgctccggctcggtgatgtcggagcgggtgtcgggcctggcgggctccatctaccgcgagttcgagcgcctcatccactgctacgacgaggaggtggtcaaggagctcatgccgctggtggtgaacgtgctggagaacctagactcggtgctcagcgagaaccaggagcacgaggtggagctggagctgctgcgcgaggacaacgagcagctgctcacccagtacgagcgtgagaaggcgctgcgcaggcaggcggaggagaaattcattgagtttgaagatgctctggaacaagagaagaaagagctgcaaatccaggtggagcactacgagttccagacgcgccagctggagctgaaggccaagaactatgccgatcagatttcccggttggaggagcgggagtcggagatgaagaaggagtacaatgccctgcaccagcggcacacagagatgatacagacctacgtggagcacattgagaggtccaagatgcagcaggtcggaggaaacagccagaccgagagcagcctgccggggcggaggaaggagcgccccacctccctgaacgtgttccccctggctgacggcacggtacgtgcacagatcgggggcaagctcgtgcctgcgggggaccactggcacctgagtgacctcggccagctgcagtccagctccagctaccaggttttgtagccgtgccgtggagtgagaggctcctccctgttgctggtgttccccgttcactggggcgggagcctcgtctgcaggcagcccttcacggctctctgggccactcgccctctcccttcgtgtgtggcaggatggagaaacccagccagggtgtcaggggctcaggctgcccagcaggccctgtgtggctgtggctgttccacgcggcctcgtgtcggcacctgctagtccaggctagacctccctgcccttggatagaccgctctgtagccaggggtgtacagtgcctgtcagggttgagcttagtgatcctctctcaaaccacacccccacataaagcctcatgctcacccgggctccagccagacacatcctgcccctgagagccacgcctctactctcggaggaacgtcagtgtctagagtgtggggtttgccctccgttggcagaaaggtgaggagaaagctcctcttctctgggcccctccctgcctgtccctggtaacgcctcctgggtcctgagtttgagaaagcagagcctcgccccagcaggtactcacagccagagtgcgggggccccagcaggttctcacagccagccggtgagtgcacctcagagcacaggggcccagagccaggccactccttcagggccccaggtcgcttgctgccagttttggcctgtgagctcactggcctcagtgccaggtaaggacagccaccttcctgggaagaagaggtgaccccgggtctggtggatttcccacaggggccgtcagaggatgtccacagaggcagagcccttggggcctgtgggctgggttgggctggtggatgtggggcctgggacttctccagaagcttacttcctgctgcatgctttgccgactgtccttccacctctaagtgtccatcgtgcctgtgggggctgctgcaggctcctgctccgtcagcccacctgctgctgcgctgctctgggagcgagctccctcatggcatctggaacgctctcctgtcctccctgtgctcagggctggagagagggtggcggggctgcgggctccccgggccttctgggcccagccctgccacctgggcccacctcctctcactgtctctggctcacgcttcccgggcctggagctgggacctgcccataggcatctgaagacacgtcagcctcagccggggggagcccttgcttgacgctctctggcctccgggctgcctctcgcgcccgctctgggcccgctcttcttctcatgatgtctttcctttcacctcctgcgttgtctgacatcgtcgctctcttcataaattgtagcgttttatgttttcgttcataggagtgttttatttgatttttctttattttaaattattacatttaagttctttttattttatgctctaggttttgaagtttttctaatttcttaatttttttgttgttttttgttttgttttgtttttgtttttatgtactgtattttcagtgttttaaccaaacagttgtggctactcatggtgaggaatgaccgctaagagtttgggttctttcagtgcatttggaggtcactgctacacgttgatgtttaggaggttgagaggtttgcctttaggtaagttgtggccagggggagtgtcccatgggtaagtggtggccctgtagggtgacggagagctaggggaggcgcaatcagactgcagaattccccgcagccaccatgagggtcaggagcaggccggggacccagcgtggaggaaggtggcccagaagcgtttgtctgatgtgcacagctacaccctgcctggccacatggggttccctgttttctctctgccgggtggtggcagagtcggtgagacaccaggtgcctgtgacacattgggtagacaggttctttgagaacgtcagcacagacttcttgcatgagcggtactcgcttcctccagcgtggggagtgacatgaagagcaagggttttcctttcaaactgggcatagctgcagagccacaggccgtctcagacatttctacaaagccactccgggaggcgggctgcgcccgtgtgagggctctccctcggcactgctcatcttttggggctggacatgcatggcctgggccgctgggacgcggtgggtgtggagcagcatccctggcttccacccacgaaagccaggagcacccccttcatttgtgaccacaaaaatgtctctggactttgcaagcatcccctcggggcagtcagcccaactgagaatagctactatagaggaaggtgtgtcattttgagattccttctagagaaacttaggagcctggtagatgaagcagaaatgtgtcctctgagtgagtggccgtgtccggtactgagaggccccgtgccctgagtctggcggtgaccagagaggctgggcagaggcagaggtcagcactggccatgacttctggaagtcccgtctgccctggtcacttaaaggccagtataagtcagctgtggagagggctggataccccctcgacagctcctccctgggtgagatccttagcattagagtcccccacggtgcgccctctgagagaccacgggaacccacccagcggctgcctgggacaggcacaggagccacctgggtgcctctgaggccttgcactttcccacacctcaaggagggccgggggccacgggcaagctctgccatagcgggtgatcaggtcagctaagacgagaacgtttggggctctttttctccagctggttcagtatctttgttaggaaagaccattggaaagaatgtttgtttcgcattccgcattagtcacatagaatgcgctcctccctagcgagcttcctgaggtagacggctggttgcggtttctcgtaatccgggctgcccccaccctccagaatgtcttggtggcgtccctttctgtgagcagggattgtggtttctttgcgcttgctcatgttcaggggtgagctctggtccagtcaagccacagggtcagcaccttctggtcactccctggccctgacctgagcccggggaggaacgtggggcaggcgcgggtgggcccagcctcgagctcttcagcacagtgatggtgacggggcagcggtggcggcacagccagcccttcttgggtccccagtcagagccctctgccctacctgggctggacttgtttctgaacagccacaagctacagggggctgccgctgtgtccctggcgaggcactggcccattacaagcaatcgtctggggagggcaccagtggaaagccccgttccaagccatttcaggagggtggccctgcttccgaggagccggagtcagtggccggataagcagagccactcgggagtggtgaggcccggaagggttagcccggtgggcggcagaggagctctggcccgcagggtgtcgggcgaggcaaagtgcaaagcattggtgcgcggggcctcaggcagccacggcggagccgcaggccagggacctgcagtgactcgctctccctcctccctgtgtttggccttagtgtccacaggatgaaatgtccgagtcaggccagtcctcggcggccgccacacccagcaccacaggcaccaagtccaacacgcccacatcctccgtgccctcggccgccgtcacacccctcaacgagagcctgcagcccctgggggactatggcgtgggctccaagaacagcaagcgtgcccgggagaagcgcgacagccgcaacatggaagtacaggtcacccaggagatgcgcaacgtcagtataggcatgggcagcagtgacgagtggtctgatgttcaagacattattgactccacgccagagctggacatgtgtccagagacccgcctggaccgcacaggaagcagcccaacccagggcatcgtgaacaaagctttcggcatcaacaccgactccctgtaccatgagctgtcgacggcagggtctgaggtcatcggggatgtggacgaaggggccgacctcctaggggagttctcaggaatgggcaaagaagtggggaatctgctactggaaaactcacagcttctggaaaccaaaaacgccttgaatgtggtgaagaatgacctgattgccaaggtcgaccagctgtccggggagcaggaggtgctgaggggcgagttggaggctgctaagcaggccaaagtcaagctggaaaaccgtatcaaggagctggaagaggaactgaaaagagtgaagtccgaggccatcatcgcccgccgtgaacccaaagaagaggcggaggatgtaagcagctatctctgtacagaatcggacaaaatccccatggcccagcgccgccgcttcacgcgggtggagatggcccgtgtgctcatggagcggaaccagtacaaggagcggctgatggagctgcaggaggctgtgcggtggactgagatgatcagagcgtcccgagagcacccatccgtccaggagaagaagaagtcgaccatctggcagttcttcagccgcctcttcagctcttcctccagcccccctccggccaagcgcccctatccctcggtgaacatccactacaagtcacccaccactgccggcttcagccagcgccgcaaccatgccatgtgcccgatctcggcaggcagccggcccctggaattcttccctgacgacgactgcacgtcctccgcccgtcgagagcagaagcgcgagcagtaccgccaggtgcgtgagcacgtgcgtaacgacgacggccgtctgcaggcctgcggctggagcctgcccgccaagtacaagcagctgagtcccaacgggggccaggaggacacgcggatgaagaacgtgccggtgccggtgtactgccgccctctggtggagaaggaccccaccatgaagctgtggtgtgccgcgggcgtcaacctgagcgggtggaggcccaatgaggacgacgctgggaatggagtcaagccagcgccaggccgcgatcccctgacctgcgaccgcgaaggagacggcgagcccaagagcgcccacacgtctcccgagaagaagaaggccaaggagctccctgaaatggacgccacctccagccgggtgtggatcctgaccagcaccctgaccaccagcaaggtggtgatcatcgacgccaaccagccgggcacggtggtggaccagttcaccgtctgcaacgcgcacgtgctgtgcatctccagcatccccgcggccagcgacagcgactaccctcccggggagatgttcctggacagcgacgtgaacccagaggacccgggcgcagatggcgtgctggccggtatcaccctggtgggctgtgccacccgctgcaacgtgccgcggagcaactgctcctcccgaggggacaccccagtgctagacaaggggcagggggaggtggccaccatcgccaacgggaaggtcaacccgtcccagtccacagaggaggccacagaggccacggaggtgccagaccctgggcccagcgagccagagacagccacattgcggcccgggcctctcacagagcacgtcttcactgacccagccccgaccccgtcctctggcccccagcctggcagcgagaacgggccagagcctgacagcagcagcacacggccagagccagagcccagcggggaccccacgggagcaggcagcagtgctgcacccaccatgtggctgggagcccagaacggctggctctatgtgcactcggctgtggccaactggaagaagtgcctgcactccatcaagctgaaggattctgtgctgagcctggtgcatgtcaaaggccgtgtgctggtggctctggcggacgggaccctggccatcttccaccgtggtgaagatggccagtgggatctgagcaactatcacctaatggacctgggccacccgcaccactccatccgctgcatggctgttgtgtacgaccgcgtgtggtgtggctacaagaacaaggtgcacgtcatccagcccaagaccatgcagatagagaagtcatttgacgcccacccgcggcgggagagccaggtgcggcagctggcgtggatcggcgatggcgtatgggtgtccatccgcctggactccaccctgaggctctaccatgcacacacgcaccagcatctacaggacgtggacattgagccctacgtcagcaagatgctaggcactggcaagctgggtttctccttcgtacgcatcacggccctgcttgtcgcgggcagccggctctgggtgggcaccggcaacggagtggtcatctccatccccctgacagagactgtggtcctgcaccgaggccagctcctggggctccgagccaataagacatcccccacctctggggagggcgcccgtcccgggggcatcatccacgtgtatggcgatgacagcagtgacagggcggccagcagcttcatcccctactgctccatggcccaggcccagctatgcttccatgggcaccgcgatgccgtgaagttctttgtctcggtgccagggaacgtgctggccaccctgaatggcagtgtgctggacagcccagccgagggcccctggagtcctgtccctcccagaagcccccagggtgggatttctcaggctgccagggcaggcccaggcctcaggaagaaggggaggcccctggcctctccgggatcagtcctaggacacaggctcagcctcaggttgatgggggatgatgtgctcccggggcctgcctcctgcacggggctccacggagcccagctcccagacacgctactaagtgcctagggttgcccgctgtggcctgctcccagggagcaacagagaggccaccaagcagaggcccgtggggctgaggatggagccgcccccagccgactccaagcccgcagagggcagacgccaccctggactgctctccctgcccagctgggcctctctggcctattcctaccttccaggcccactgcactcctgtctgggaggcccttatgagggcagcccagcccccgcacccacccccaaccagagaagcacagatcttggggagctgccccacaagccccgctggccaccgagggctgcagccgctgcgctgccggcttctccccaccaccctgccacctccactgtgatgtatgtccgctccctcgtctgttcccccaggatctcgaagtgactccgggctgagcagtggggcggctgggggaggggtgacgattctcctcaggctttggccctgcaagcaaacccacatatctgctctgtatgtaataaatgtcttaacgtcgta

SEQ ID NO: 148953 - DNA, 8334 bp, Homo sapiens
ggcggcggagccctgatggcgacagcagctgcgggaggcgacgggctgcggcctgcggaacctgaggcagctggggagggccgggcgcgccggccggatagcgagccgcgctggcggcggcggtggccgcgatgatggagatccagatggacgagggcggcggcgtggtggtgtaccaggacgactactgctccggctcggtgatgtcggagcgggtgtcgggcctggcgggctccatctaccgcgagttcgagcgcctcatccactgctacgacgaggaggtggtcaaggagctcatgccgctggtggtgaacgtgctggagaacctagactcggtgctcagcgagaaccaggagcacgaggtggagctggagctgctgcgcgaggacaacgagcagctgctcacccagtacgagcgtgagaaggcgctgcgcaggcaggcggaggagaaattcattgagtttgaagatgctctggaacaagagaagaaagagctgcaaatccaggtggagcactacgagttccagacgcgccagctggagctgaaggccaagaactatgccgatcagatttcccggttggaggagcgggagtcggagatgaagaaggagtacaatgccctgcaccagcggcacacagagatgatacagacctacgtggagcacattgagaggtccaagatgcagcaggtcggaggaaacagccagaccgagagcagcctgccggggcggaggaaggagcgccccacctccctgaacgtgttccccctggctgacggcacggtacgtgcacagatcgggggcaagctcgtgcctgcgggggaccactggcacctgagtgacctcggccagctgcagtccagctccagctaccaggttttgtagccgtgccgtggagtgagaggctcctccctgttgctggtgttccccgttcactggggcgggagcctcgtctgcaggcagcccttcacggctctctgggccactcgccctctcccttcgtgtgtggcaggatggagaaacccagccagggtgtcaggggctcaggctgcccagcaggccctgtgtggctgtggctgttccacgcggcctcgtgtcggcacctgctagtccaggctagacctccctgcccttggatagaccgctctgtagccaggggtgtacagtgcctgtcagggttgagcttagtgatcctctctcaaaccacacccccacataaagcctcatgctcacccgggctccagccagacacatcctgcccctgagagccacgcctctactctcggaggaacgtcagtgtctagagtgtggggtttgccctccgttggcagaaaggtgaggagaaagctcctcttctctgggcccctccctgcctgtccctggtaacgcctcctgggtcctgagtttgagaaagcagagcctcgccccagcaggtactcacagccagagtgcgggggccccagcaggttctcacagccagccggtgagtgcacctcagagcacaggggcccagagccaggccactccttcagggccccaggtcgcttgctgccagttttggcctgtgagctcactggcctcagtgccaggtaaggacagccaccttcctgggaagaagaggtgaccccgggtctggtggatttcccacaggggccgtcagaggatgtccacagaggcagagcccttggggcctgtgggctgggttgggctggtggatgtggggcctgggacttctccagaagcttacttcctgctgcatgctttgccgactgtccttccacctctaagtgtccatcgtgcctgtgggggctgctgcaggctcctgctccgtcagcccacctgctgctgcgctgctctgggagcgagctccctcatggcatctggaacgctctcctgtcctccctgtgctcagggctggagagagggtggcggggctgcgggctccccgggccttctgggcccagccctgccacctgggcccacctcctctcactgtctctggctcacgcttcccgggcctggagctgggacctgcccataggcatctgaagacacgtcagcctcagccggggggagcccttgcttgacgctctctggcctccgggctgcctctcgcgcccgctctgggcccgctcttcttctcatgatgtctttcctttcacctcctgcgttgtctgacatcgtcgctctcttcataaattgtagcgttttatgttttcgttcataggagtgttttatttgatttttctttattttaaattattacatttaagttctttttattttatgctctaggttttgaagtttttctaatttcttaatttttttgttgttttttgttttgttttgtttttgtttttatgtactgtattttcagtgttttaaccaaacagttgtggctactcatggtgaggaatgaccgctaagagtttgggttctttcagtgcatttggaggtcactgctacacgttgatgtttaggaggttgagaggtttgcctttaggtaagttgtggccagggggagtgtcccatgggtaagtggtggccctgtagggtgacggagagctaggggaggcgcaatcagactgcagaattccccgcagccaccatgagggtcaggagcaggccggggacccagcgtggaggaaggtggcccagaagcgtttgtctgatgtgcacagctacaccctgcctggccacatggggttccctgttttctctctgccgggtggtggcagagtcggtgagacaccaggtgcctgtgacacattgggtagacaggttctttgagaacgtcagcacagacttcttgcatgagcggtactcgcttcctccagcgtggggagtgacatgaagagcaagggttttcctttcaaactgggcatagctgcagagccacaggccgtctcagacatttctacaaagccactccgggaggcgggctgcgcccgtgtgagggctctccctcggcactgctcatcttttggggctggacatgcatggcctgggccgctgggacgcggtgggtgtggagcagcatccctggcttccacccacgaaagccaggagcacccccttcatttgtgaccacaaaaatgtctctggactttgcaagcatcccctcggggcagtcagcccaactgagaatagctactatagaggaaggtgtgtcattttgagattccttctagagaaacttaggagcctggtagatgaagcagaaatgtgtcctctgagtgagtggccgtgtccggtactgagaggccccgtgccctgagtctggcggtgaccagagaggctgggcagaggcagaggtcagcactggccatgacttctggaagtcccgtctgccctggtcacttaaaggccagtataagtcagctgtggagagggctggataccccctcgacagctcctccctgggtgagatccttagcattagagtcccccacggtgcgccctctgagagaccacgggaacccacccagcggctgcctgggacaggcacaggagccacctgggtgcctctgaggccttgcactttcccacacctcaaggagggccgggggccacgggcaagctctgccatagcgggtgatcaggtcagctaagacgagaacgtttggggctctttttctccagctggttcagtatctttgttaggaaagaccattggaaagaatgtttgtttcgcattccgcattagtcacatagaatgcgctcctccctagcgagcttcctgaggtagacggctggttgcggtttctcgtaatccgggctgcccccaccctccagaatgtcttggtggcgtccctttctgtgagcagggattgtggtttctttgcgcttgctcatgttcaggggtgagctctggtccagtcaagccacagggtcagcaccttctggtcactccctggccctgacctgagcccggggaggaacgtggggcaggcgcgggtgggcccagcctcgagctcttcagcacagtgatggtgacggggcagcggtggcggcacagccagcccttcttgggtccccagtcagagccctctgccctacctgggctggacttgtttctgaacagccacaagctacagggggctgccgctgtgtccctggcgaggcactggcccattacaagcaatcgtctggggagggcaccagtggaaagccccgttccaagccatttcaggagggtggccctgcttccgaggagccggagtcagtggccggataagcagagccactcgggagtggtgaggcccggaagggttagcccggtgggcggcagaggagctctggcccgcagggtgtcgggcgaggcaaagtgcaaagcattggtgcgcggggcctcaggcagccacggcggagccgcaggccagggacctgcagtgactcgctctccctcctccctgtgtttggccttagtgtccacaggatgaaatgtccgagtcaggccagtcctcggcggccgccacacccagcaccacaggcaccaagtccaacacgcccacatcctccgtgccctcggccgccgtcacacccctcaacgagagcctgcagcccctgggggactatggcgtgggctccaagaacagcaagcgtgcccgggagaagcgcgacagccgcaacatggaagtacaggtcacccaggagatgcgcaacgtcagtataggcatgggcagcagtgacgagtggtctgatgttcaagacattattgactccacgccagagctggacatgtgtccagagacccgcctggaccgcacaggaagcagcccaacccagggcatcgtgaacaaagctttcggcatcaacaccgactccctgtaccatgagctgtcgacggcagggtctgaggtcatcggggatgtggacgaaggggccgacctcctaggggagttctcaggaatgggcaaagaagtggggaatctgctactggaaaactcacagcttctggaaaccaaaaacgccttgaatgtggtgaagaatgacctgattgccaaggtcgaccagctgtccggggagcaggaggtgctgaggggcgagttggaggctgctaagcaggccaaagtcaagctggaaaaccgtatcaaggagctggaagaggaactgaaaagagtgaagtccgaggccatcatcgcccgccgtgaacccaaagaagaggcggaggatgtaagcagctatctctgtacagaatcggacaaaatccccatggcccagcgccgccgcttcacgcgggtggagatggcccgtgtgctcatggagcggaaccagtacaaggagcggctgatggagctgcaggaggctgtgcggtggactgagatgatcagagcgtcccgagagcacccatccgtccaggagaagaagaagtcgaccatctggcagttcttcagccgcctcttcagctcttcctccagcccccctccggccaagcgcccctatccctcggtgaacatccactacaagtcacccaccactgccggcttcagccagcgccgcaaccatgccatgtgcccgatctcggcaggcagccggcccctggaattcttccctgacgacgactgcacgtcctccgcccgtcgagagcagaagcgcgagcagtaccgccaggtgcgtgagcacgtgcgtaacgacgacggccgtctgcaggcctgcggctggagcctgcccgccaagtacaagcagctgagtcccaacgggggccaggaggacacgcggatgaagaacgtgccggtgccggtgtactgccgccctctggtggagaaggaccccaccatgaagctgtggtgtgccgcgggcgtcaacctgagcgggtggaggcccaatgaggacgacgctgggaatggagtcaagccagcgccaggccgcgatcccctgacctgcgaccgcgaaggagacggcgagcccaagagcgcccacacgtctcccgagaagaagaaggccaaggagctccctgaaatggacgccacctccagccgggtgtggatcctgaccagcaccctgaccaccagcaaggtggtgatcatcgacgccaaccagccgggcacggtggtggaccagttcaccgtctgcaacgcgcacgtgctgtgcatctccagcatccccgcggccagcgacagcgactaccctcccggggagatgttcctggacagcgacgtgaacccagaggacccgggcgcagatggcgtgctggccggtatcaccctggtgggctgtgccacccgctgcaacgtgccgcggagcaactgctcctcccgaggggacaccccagtgctagacaaggggcagggggaggtggccaccatcgccaacgggaaggtcaacccgtcccagtccacagaggaggccacagaggccacggaggtgccagaccctgggcccagcgagccagagacagccacattgcggcccgggcctctcacagagcacgtcttcactgacccagccccgaccccgtcctctggcccccagcctggcagcgagaacgggccagagcctgacagcagcagcacacggccagagccagagcccagcggggaccccacgggagcaggcagcagtgctgcacccaccatgtggctgggagcccagaacggctggctctatgtgcactcggctgtggccaactggaagaagtgcctgcactccatcaagctgaaggattctgtgctgagcctggtgcatgtcaaaggccgtgtgctggtggctctggcggacgggaccctggccatcttccaccgtggtgaagatggccagtgggatctgagcaactatcacctaatggacctgggccacccgcaccactccatccgctgcatggctgttgtgtacgaccgcgtgtggtgtggctacaagaacaaggtgcacgtcatccagcccaagaccatgcagatagagaagtcatttgacgcccacccgcggcgggagagccaggtgcggcagctggcgtggatcggcgatggcgtatgggtgtccatccgcctggactccaccctgaggctctaccatgcacacacgcaccagcatctacaggacgtggacattgagccctacgtcagcaagatgctaggcactggcaagctgggtttctccttcgtacgcatcacggccctgcttgtcgcgggcagccggctctgggtgggcaccggcaacggagtggtcatctccatccccctgacagagagtgagtggcctgcacccctgcaggggcagtggtgctgccagaggtgtacgtgggttcacggggtggctctgcagggccaccttggagggtgccttgctgcccctacgctgaccgctctcctcttctcccatgctcctcccatgtccccagctgtggtcctgcaccgaggccagctcctggggctccgagccaataagacatcccccacctctggggagggcgcccgtcccgggggcatcatccacgtgtatggcgatgacagcagtgacagggcggccagcagcttcatcccctactgctccatggcccaggcccagctatgcttccatgggcaccgcgatgccgtgaagttctttgtctcggtgccagggaacgtgctggccaccctgaatggcagtgtgctggacagcccagccgagggcccctggagtcctgtccctcccagaagcccccagggtgggatttctcaggctgccagggcaggcccaggcctcaggaagaaggggaggcccctggcctctccgggatcagtcctaggacacaggctcagcctcaggttgatgggggatgatgtgctcccggggcctgcctcctgcacggggctccacggagcccagctcccagacacgctactaagtgcctagggttgcccgctgtggcctgctcccagggagcaacagagaggccaccaagcagaggcccgtggggctgaggatggagccgcccccagccgactccaagcccgcagagggcagacgccaccctggactgctctccctgcccagctgggcctctctggcctattcctaccttccaggcccactgcactcctgtctgggaggcccttatgagggcagcccagcccccgcacccacccccaaccagagaagcacagatcttggggagctgccccacaagccccgctggccaccgagggctgcagccgctgcgctgccggcttctccccaccaccctgccacctccactgtgatgtatgtccgctccctcgtctgttcccccaggatctcgaagtgactccgggctgagcagtggggcggctgggggaggggtgacgattctcctcaggctttggccctgcaagcaaacccacatatctgctctgtatgtaataaatgtcttaacgtcgta

SEQ ID NO: 148954 - DNA, 7935 bp, Homo sapiens
ggcggcggagccctgatggcgacagcagctgcgggaggcgacgggctgcggcctgcggaacctgaggcagctggggagggccgggcgcgccggccggatagcgagccgcgctggcggcggcggtggccgcgatgatggagatccagatggacgagggcggcggcgtggtggtgtaccaggacgactactgctccggctcggtgatgtcggagcgggtgtcgggcctggcgggctccatctaccgcgagttcgagcgcctcatccactgctacgacgaggaggtggtcaaggagctcatgccgctggtggtgaacgtgctggagaacctagactcggtgctcagcgagaaccaggagcacgaggtggagctggagctgctgcgcgaggacaacgagcagctgctcacccagtacgagcgtgagaaggcgctgcgcaggcaggcggaggagaaattcattgagtttgaagatgctctggaacaagagaagaaagagctgcaaatccaggtggagcactacgagttccagacgcgccagctggagctgaaggccaagaactatgccgatcagatttcccggttggaggagcgggagtcggagatgaagaaggagtacaatgccctgcaccagcggcacacagagatgatacagacctacgtggagcacattgagaggtccaagatgcagcaggtcggaggaaacagccagaccgagagcagcctgccggggcggaggaaggagcgccccacctccctgaacgtgttccccctggctgacggcacggtacgtgcacagatcgggggcaagctcgtgcctgcgggggaccactggcacctgagtgacctcggccagctgcagtccagctccagctaccaggttttgtagccgtgccgtggagtgagaggctcctccctgttgctggtgttccccgttcactggggcgggagcctcgtctgcaggcagcccttcacggctctctgggccactcgccctctcccttcgtgtgtggcaggatggagaaacccagccagggtgtcaggggctcaggctgcccagcaggccctgtgtggctgtggctgttccacgcggcctcgtgtcggcacctgctagtccaggctagacctccctgcccttggatagaccgctctgtagccaggggtgtacagtgcctgtcagggttgagcttagtgatcctctctcaaaccacacccccacataaagcctcatgctcacccgggctccagccagacacatcctgcccctgagagccacgcctctactctcggaggaacgtcagtgtctagagtgtggggtttgccctccgttggcagaaaggtgaggagaaagctcctcttctctgggcccctccctgcctgtccctggtaacgcctcctgggtcctgagtttgagaaagcagagcctcgccccagcaggtactcacagccagagtgcgggggccccagcaggttctcacagccagccggtgagtgcacctcagagcacaggggcccagagccaggccactccttcagggccccaggtcgcttgctgccagttttggcctgtgagctcactggcctcagtgccaggtaaggacagccaccttcctgggaagaagaggtgaccccgggtctggtggatttcccacaggggccgtcagaggatgtccacagaggcagagcccttggggcctgtgggctgggttgggctggtggatgtggggcctgggacttctccagaagcttacttcctgctgcatgctttgccgactgtccttccacctctaagtgtccatcgtgcctgtgggggctgctgcaggctcctgctccgtcagcccacctgctgctgcgctgctctgggagcgagctccctcatggcatctggaacgctctcctgtcctccctgtgctcagggctggagagagggtggcggggctgcgggctccccgggccttctgggcccagccctgccacctgggcccacctcctctcactgtctctggctcacgcttcccgggcctggagctgggacctgcccataggcatctgaagacacgtcagcctcagccggggggagcccttgcttgacgctctctggcctccgggctgcctctcgcgcccgctctgggcccgctcttcttctcatgatgtctttcctttcacctcctgcgttgtctgacatcgtcgctctcttcataaattgtagcgttttatgttttcgttcataggagtgttttatttgatttttctttattttaaattattacatttaagttctttttattttatgctctaggttttgaagtttttctaatttcttaatttttttgttgttttttgttttgttttgtttttgtttttatgtactgtattttcagtgttttaaccaaacagttgtggctactcatggtgaggaatgaccgctaagagtttgggttctttcagtgcatttggaggtcactgctacacgttgatgtttaggaggttgagaggtttgcctttaggtaagttgtggccagggggagtgtcccatgggtaagtggtggccctgtagggtgacggagagctaggggaggcgcaatcagactgcagaattccccgcagccaccatgagggtcaggagcaggccggggacccagcgtggaggaaggtggcccagaagcgtttgtctgatgtgcacagctacaccctgcctggccacatggggttccctgttttctctctgccgggtggtggcagagtcggtgagacaccaggtgcctgtgacacattgggtagacaggttctttgagaacgtcagcacagacttcttgcatgagcggtactcgcttcctccagcgtggggagtgacatgaagagcaagggttttcctttcaaactgggcatagctgcagagccacaggccgtctcagacatttctacaaagccactccgggaggcgggctgcgcccgtgtgagggctctccctcggcactgctcatcttttggggctggacatgcatggcctgggccgctgggacgcggtgggtgtggagcagcatccctggcttccacccacgaaagccaggagcacccccttcatttgtgaccacaaaaatgtctctggactttgcaagcatcccctcggggcagtcagcccaactgagaatagctactatagaggaaggtgtgtcattttgagattccttctagagaaacttaggagcctggtagatgaagcagaaatgtgtcctctgagtgagtggccgtgtccggtactgagaggccccgtgccctgagtctggcggtgaccagagaggctgggcagaggcagaggtcagcactggccatgacttctggaagtcccgtctgccctggtcacttaaaggccagtataagtcagctgtggagagggctggataccccctcgacagctcctccctgggtgagatccttagcattagagtcccccacggtgcgccctctgagagaccacgggaacccacccagcggctgcctgggacaggcacaggagccacctgggtgcctctgaggccttgcactttcccacacctcaaggagggccgggggccacgggcaagctctgccatagcgggtgatcaggtcagctaagacgagaacgtttggggctctttttctccagctggttcagtatctttgttaggaaagaccattggaaagaatgtttgtttcgcattccgcattagtcacatagaatgcgctcctccctagcgagcttcctgaggtagacggctggttgcggtttctcgtaatccgggctgcccccaccctccagaatgtcttggtggcgtccctttctgtgagcagggattgtggtttctttgcgcttgctcatgttcaggggtgagctctggtccagtcaagccacagggtcagcaccttctggtcactccctggccctgacctgagcccggggaggaacgtggggcaggcgcgggtgggcccagcctcgagctcttcagcacagtgatggtgacggggcagcggtggcggcacagccagcccttcttgggtccccagtcagagccctctgccctacctgggctggacttgtttctgaacagccacaagctacagggggctgccgctgtgtccctggcgaggcactggcccattacaagcaatcgtctggggagggcaccagtggaaagccccgttccaagccatttcaggagggtggccctgcttccgaggagccggagtcagtggccggataagcagagccactcgggagtggtgaggcccggaagggttagcccggtgggcggcagaggagctctggcccgcagggtgtcgggcgaggcaaagtgcaaagcattggtgcgcggggcctcaggcagccacggcggagccgcaggccagggacctgcagtgactcgctctccctcctccctgtgtttggccttagtgtccacaggatgaaatgtccgagtcaggccagtcctcggcggccgccacacccagcaccacaggcaccaagtccaacacgcccacatcctccgtgccctcggccgccgtcacacccctcaacgagagcctgcagcccctgggggactatggcgtgggctccaagaacagcaagcgtgcccgggagaagcgcgacagccgcaacatggaagtacaggtcacccaggagatgcgcaacgtcagtataggcatgggcagcagtgacgagtggtctgatgttcaagacattattgactccacgccagagctggacatgtgtccagagacccgcctggaccgcacaggaagcagcccaacccagggcatcgtgaacaaagctttcggcatcaacaccgactccctgtaccatgagctgtcgacggcagggtctgaggtcatcggggatgtggacgaaggggccgacctcctaggggagttctcaggaatgggcaaagaagtggggaatctgctactggaaaactcacagcttctggaaaccaaaaacgccttgaatgtggtgaagaatgacctgattgccaaggtcgaccagctgtccggggagcaggaggtgctgaggggcgagttggaggctgctaagcaggccaaagtcaagctggaaaaccgtatcaaggagctggaagaggaactgaaaagagtgaagtccgaggccatcatcgcccgccgtgaacccaaagaagaggcggaggatgtaagcagctatctctgtacagaatcggacaaaatccccatggcccagcgccgccgcttcacgcgggtggagatggcccgtgtgctcatggagcggaaccagtacaaggagcggctgatggagctgcaggaggctgtgcggtggactgagatgatcagagcgtcccgagagcacccatccgtccaggagaagaagaagtcgaccatctggcagttcttcagccgcctcttcagctcttcctccagcccccctccggccaagcgcccctatccctcggtgaacatccactacaagtcacccaccactgccggcttcagccagcgccgcaaccatgccatgtgcccgatctcggcaggcagccggcccctggaattcttccctgacgacgactgcacgtcctccgcccgtcgagagcagaagcgcgagcagtaccgccaggtgcgtgagcacgtgcgtaacgacgacggccgtctgcaggcctgcggctggagcctgcccgccaagtacaagcagctgagtcccaacgggggccaggaggacacgcggatgaagaacgtgccggtgccggtgtactgccgccctctggtggagaaggaccccaccatgaagctgtggtgtgccgcgggcgtcaacctgagcgggtggaggcccaatgaggacgacgctgggaatggagtcaagccagcgccaggccgcgatcccctgacctgcgaccgcgaaggagacggcgagcccaagagcgcccacacgtctcccgagaagaagaaggccaaggagctccctgaaatggacgccacctccagccgggtgtggatcctgaccagcaccctgaccaccagcaaggtggtgatcatcgacgccaaccagccgggcacggtggtggaccagttcaccgtctgcaacgcgcacgtgctgtgcatctccagcatccccgcggccagcgacagcgactaccctcccggggagatgttcctggacagcgacgtgaacccagaggacccgggcgcagatggcgtgctggccggtatcaccctggtgggctgtgccacccgctgcaacgtgccgcggagcaactgctcctcccgaggggacaccccagtgctagacaaggggcagggggaggtggccaccatcgccaacgggaaggtcaacccgtcccagtccacagaggaggccacagaggccacggaggtgccagaccctgggcccagcgagccagagacagccacattgcggcccgggcctctcacagagcacgtcttcactgacccagccccgaccccgtcctctggcccccagcctggcagcgagaacgggccagagcctgacagcagcagcacacggccagagccagagcccagcggggaccccacgggagcaggcagcagtgctgcacccaccatgtggctgggagcccagaacggctggctctatgtgcactcggctgtggccaactggaagaagtgcctgcactccatcaagctgaaggattctgtgctgagcctggtgcatgtcaaaggccgtgtgctggtggctctggcggacgggaccctggccatcttccaccgtggtgaagatggccagtgggatctgagcaactatcacctaatggacctgggccacccgcaccactccatccgctgcatggctgttgtgtacgaccgcgtgtggtgtggctacaagaacaaggtgcacgtcatccagcccaagaccatgcagatagagaagtcatttgacgcccacccgcggcgggagagccaggtgcggcagctggcgtggatcggcgatggcgtatgggtgtccatccgcctggactccaccctgaggctctaccatgcacacacgcaccagcatctacaggacgtggacattgagccctacgtcagcaagatgctaggcactggcaagctgggtttctccttcgtacgcatcacggccctgcttgtcgcgggcagccggctctgggtgggcaccggcaacggagtggtcatctccatccccctgacagagactgtggtcctgcaccgaggccagctcctggggctccgagccaataagacatcccccacctctggggagggcgcccgtcccgggggcatcatccacgtgtatggcgatgacagcagtgacagggcggccagcagcttcatcccctactgctccatggcccaggcccagctatgcttccatgggcaccgcgatgccgtgaagttctttgtctcggtgccagggaacgtgctggccaccctgaatggcagtgtgctggacagcccagccgagggccctgggccagctgcccctgcctcggaggtcgagggccagaagctgcggaacgtgctggtgctgagcggcggggagggctacatcgacttccgcattggagacggagaggacgacgagacggaggagggcgcaggggacatgagccaggtgaagcccgtgctgtccaaggcagagcgcagtcacatcatcgtgtggcaggtgtcctacacccccgagtgaagctgctgccctgcctggcccgacctgtacataggacccccgaccacctgacccccgcccggcccgcggggtagccagccaggcgccgccgcccctcttctaacctctcaacctgctcccagggagcaacagagaggccaccaagcagaggcccgtggggctgaggatggaggggaggggtgacgattctcctcaggctttggccctgcaagcaaacccacatatctgctctgtatgtaataaatgtcttaacgtcgta

SEQ ID NO: 148955 - DNA, 3826 bp, Homo sapiens
ccacgcgtccgcggacgcgtgggaagaagtcgaccatctggcagttcttcagccgcctcttcagctcttcctccagcccccctccggccaagcgcccctatccctcggtgaacatccactacaagtcacccaccactgccggcttcagccagcgccgcaaccatgccatgtgcccgatctcggcaggcagccggcccctggaattcttccctgacgacgactgcacgtcctccgcccgtcgagagcagaagcgcgagcagtaccgccaggtgcgtgagcacgtgcgtaacgacgacggccgtctgcaggcctgcggctggagcctgcccgccaagtacaagcagctgagtcccaacgggggccaggaggacacgcggatgaagaacgtgccggtgccggtgtactgccgccctctggtggagaaggaccccaccatgaagctgtggtgtgccgcgggcgtcaacctgagcgggtggaggcccaatgaggacgacgctgggaatggagtcaagccagcgccaggccgcgatcccctgacctgcgaccgcgaaggagacggcgagcccaagagcgcccacacgtctcccgagaagaagaaggccaaggagctccctgaaatggacgccacctccagccgggtgtggatcctgaccagcaccctgaccaccagcaaggtggtgatcatcgacgccaaccagccgggcacggtggtggaccagttcaccgtctgcaacgcgcacgtgctgtgcatctccagcatccccgcggccagcgacagcgactaccctcccggggagatgttcctggacagcgacgtgaacccagaggacccgggcgcagatggcgtgctggccggtatcaccctggtgggctgtgccacccgctgcaacgtgccgcggagcaactgctcctcccgaggggacaccccagtgctagacaaggggcagggggaggtggccaccatcgccaacgggaaggtcaacccgtcccagtccacagaggaggccacagaggccacggaggtgccagaccctgggcccagcgagccagagacagccacattgcggcccgggcctctcacagagcacgtcttcactgacccagccccgaccccgtcctctggcccccagcctggcagcgagaacgggccagagcctgacagcagcagcacacggccagagccagagcccagcggggaccccacgggagcaggcagcagtgctgcacccaccatgtggctgggagcccagaacggctggctctatgtgcactcggctgtggccaactggaagaagtgcctgcactccatcaagctgaaggattctgtgctgagcctggtgcatgtcaaaggccgtgtgctggtggctctggcggacgggaccctggccatcttccaccgtggtgaagatggccagtgggatctgagcaactatcacctaatggacctgggccacccgcaccactccatccgctgcatggctgttgtgtacgaccgcgtgtggtgtggctacaagaacaaggtgcacgtcatccagcccaagaccatgcagatagagaagtcatttgacgcccacccgcggcgggagagccaggtgcggcagctggcgtggatcggcgatggcgtatgggtgtccatccgcctggactccaccctgaggctctaccatgcacacacgcaccagcatctacaggacgtggacattgagccctacgtcagcaagatgctaggcactggcaagctgggtttctccttcgtacgcatcacggccctgcttgtcgcgggcagccggctctgggtgggcaccggcaacggagtggtcatctccatccccctgacagagactgtggtcctgcaccgaggccagctcctggggctccgagccaataagacatcccccacctctggggagggcgcccgtcccgggggcatcatccacgtgtatggcgatgacagcagtgacagggcggccagcagcttcatcccctactgctccatggcccaggcccagctatgcttccatgggcaccgcgatgccgtgaagttctttgtctcggtgccagggaacgtgctggccaccctgaatggcagtgtgctggacagcccagccgagggccctgggccagctgcccctgcctcggaggtcgagggccagaagctgcggaacgtgctggtgctgagcggcggggagggctacatcgacttccgcattggagacggagaggacgacgagacggaggagggcgcaggggacatgagccaggtgaagcccgtgctgtccaaggcagagcgcagtcacatcatcgtgtggcaggtgtcctacacccccgagtgaagctgctgccctgcctggcccgacctgtacataggacccccgaccacctgacccccgcccggcccgcggggtagccagccaggcgccgccgcccctcttctaacctctcaacctgcagctttcacctgagtctggcccctccagcgggcagggagtgcggggatgcggatcagctgggaggaggaggggaggggtgcttccacccgaggggaagatgctctcgggacagtttcccgggcagctcctggccagcttccagcccagagtcctcaagtccagggcaccttgggcccagcgcaggcagaatccgaggtggtcctggctctaccctgggcctcctactccccagcacccctggaggaggcaggggctccccgccgccgaggctgcctgccctgggcccacctctgcatgctgctcatggggccaccctgcctcctgggccctcactctgcctaggggagctgggccaggcactagcctttgcccagggaggtgggcctcaggctgcccaggtgcctgcaccccagccggccttctctggggcctccccgtcgtcaagcctctatcctgtctgtccccaccccagctgtcccctgcccagggaactggcataaaagcacgaggcccggctccctggggcagctgcttgagaacagagactgctaccccatcctgcccatgcaggcaggctcttgccagccccgttctgacccgtgtccccccaggctctgcctgggcagaagactcaccttggaggagtgggccctggagtcctgtccctcccagaagcccccagggtgggatttctcaggctgccagggcaggcccaggcctcaggaagaaggggaggcccctggcctctccgggatcagtcctaggacacaggctcagcctcaggttgatgggggatgatgtgctcccggggcctgcctcctgcacggggctccacggagcccagctcccagacacgctactaagtgcctagggttgcccgctgtggcctgctcccagggagcaacagagaggccaccaagcagaggcccgtggggctgaggatggagccgcccccagccgactccaagcccgcagagggcagacgccaccctggactgctctccctgcccagctgggcctctctggcctattcctaccttccaggcccactgcactcctgtctgggaggcccttatgagggcagcccagcccccgcacccacccccaaccagagaagcacagatcttggggagctgccccacaagccccgctggccaccgagggctgcagccgctgcgctgccggcttctccccaccaccctgccacctccactgtgatgtatgtccgctccctcgtctgttcccccaggatctcgaagtgactccgggctgagcagtggggcggctgggggaggggtgacgattctcctcaggctttggccctgcaagcaaacccacatatctgctctgtatgtaataaatgtcttaacgtcgta

SEQ ID NO: 148956 - DNA, 3348 bp, Homo sapiens
cagctcggtcccggtccaggttgtgctggtcaagccagcgccaggccgcgatcccctgacctgcgaccgcgaaggagacggcgagcccaagagcgcccacacgtctcccgagaagaagaaggccaaggagctccctgaaatggacgccacctccagccgggtgtggatcctgaccagcaccctgaccaccagcaaggtggtgatcatcgacgccaaccagccgggcacggtggtggaccagttcaccgtctgcaacgcgcacgtgctgtgcatctccagcatccccgcggccagcgacagcgactaccctcccggggagatgttcctggacagcgacgtgaacccagaggacccgggcgcagatggcgtgctggccggtatcaccctggtgggctgtgccacccgctgcaacgtgccgcggagcaactgctcctcccgaggggacaccccagtgctagacaaggggcagggggaggtggccaccatcgccaacgggaaggtcaacccgtcccagtccacagaggaggccacagaggccacggaggtgccagaccctgggcccagcgagccagagacagccacattgcggcccgggcctctcacagagcacgtcttcactgacccagccccgaccccgtcctctggcccccagcctggcagcgagaacgggccagagcctgacagcagcagcacacggccagagccagagcccagcggggaccccacgggagcaggcagcagtgctgcacccaccatgtggctgggagcccagaacggctggctctatgtgcactcggctgtggccaactggaagaagtgcctgcactccatcaagctgaaggattctgtgctgagcctggtgcatgtcaaaggccgtgtgctggtggctctggcggacgggaccctggccatcttccaccgtggtgaagatggccagtgggatctgagcaactatcacctaatggacctgggccacccgcaccactccatccgctgcatggctgttgtgtacgaccgcgtgtggtgtggctacaagaacaaggtgcacgtcatccagcccaagaccatgcagatagagaagtcatttgacgcccacccgcggcgggagagccaggtgcggcagctggcgtggatcggcgatggcgtatgggtgtccatccgcctggactccaccctgaggctctaccatgcacacacgcaccagcatctacaggacgtggacattgagccctacgtcagcaagatgctaggcactggcaagctgggtttctccttcgtacgcatcacggccctgcttgtcgcgggcagccggctctgggtgggcaccggcaacggagtggtcatctccatccccctgacagagactgtggtcctgcaccgaggccagctcctggggctccgagccaataagacatcccccacctctggggagggcgcccgtcccgggggcatcatccacgtgtatggcgatgacagcagtgacagggcggccagcagcttcatcccctactgctccatggcccaggcccagctatgcttccatgggcaccgcgatgccgtgaagttctttgtctcggtgccagggaacgtgctggccaccctgaatggcagtgtgctggacagcccagccgagggccctgggccagctgcccctgcctcggaggtcgagggccagaagctgcggaacgtgctggtgctgagcggcggggagggctacatcgacttccgcattggagacggagaggacgacgagacggaggagggcgcaggggacatgagccaggtgaagcccgtgctgtccaaggcagagcgcagtcacatcatcgtgtggcaggtgtcctacacccccgagtgaagctgctgccctgcctggcccgacctgtacataggacccccgaccacctgacccccgcccggcccgcggggtagccagccaggcgccgccgcccctcttctaacctctcaacctgcagctttcacctgagtctggcccctccagcgggcagggagtgcggggatgcggatcagctgggaggaggaggggaggggtgcttccacccgaggggaagatgctctcgggacagtttcccgggcagctcctggccagcttccagcccagagtcctcaagtccagggcaccttgggcccagcgcaggcagaatccgaggtggtcctggctctaccctgggcctcctactccccagcacccctggaggaggcaggggctccccgccgccgaggctgcctgccctgggcccacctctgcatgctgctcatggggccaccctgcctcctgggccctcactctgcctaggggagctgggccaggcactagcctttgcccagggaggtgggcctcaggctgcccaggtgcctgcaccccagccggccttctctggggcctccccgtcgtcaagcctctatcctgtctgtccccaccccagctgtcccctgcccagggaactggcataaaagcacgaggcccggctccctggggcagctgcttgagaacagagactgctaccccatcctgcccatgcaggcaggctcttgccagccccgttctgacccgtgtccccccaggctctgcctgggcagaagactcaccttggaggagtgggccctggagtcctgtccctcccagaagcccccagggtgggatttctcaggctgccagggcaggcccaggcctcaggaagaaggggaggcccctggcctctccgggatcagtcctaggacacaggctcagcctcaggttgatgggggatgatgtgctcccggggcctgcctcctgcacggggctccacggagcccagctcccagacacgctactaagtgcctagggttgcccgctgtggcctgctcccagggagcaacagagaggccaccaagcagaggcccgtggggctgaggatggagccgcccccagccgactccaagcccgcagagggcagacgccaccctggactgctctccctgcccagctgggcctctctggcctattcctaccttccaggcccactgcactcctgtctgggaggcccttatgagggcagcccagcccccgcacccacccccaaccagagaagcacagatcttggggagctgccccacaagccccgctggccaccgagggctgcagccgctgcgctgccggcttctccccaccaccctgccacctccactgtgatgtatgtccgctccctcgtctgttcccccaggatctcgaagtgactccgggctgagcagtggggcggctgggggaggggtgacgattctcctcaggctttggccctgcaagcaaacccacatatctgctctgtatgtaataaatgtcttaacgtcgta

SEQ ID NO: 148957 - DNA, 2606 bp, Homo sapiens
tcgagctggtaccgacgctctctctgtggggtccctaggctctatgtgcactcggctgtggccaactggaagaagtgcctgcactccatcaagctgaaggattctgtgctgagcctggtgcatgtcaaaggccgtgtgctggtggctctggcggacgggaccctggccatcttccaccgtggtgaagatggccagtgggatctgagcaactatcacctaatggacctgggccacccgcaccactccatccgctgcatggctgttgtgtacgaccgcgtgtggtgtggctacaagaacaaggtgcacgtcatccagcccaagaccatgcagatagagaagtcatttgacgcccacccgcggcgggagagccaggtgcggcagctggcgtggatcggcgatggcgtatgggtgtccatccgcctggactccaccctgaggctctaccatgcacacacgcaccagcatctacaggacgtggacattgagccctacgtcagcaagatgctaggcactggcaagctgggtttctccttcgtacgcatcacggccctgcttgtcgcgggcagccggctctgggtgggcaccggcaacggagtggtcatctccatccccctgacagagactgtggtcctgcaccgaggccagctcctggggctccgagccaataagacatcccccacctctggggagggcgcccgtcccgggggcatcatccacgtgtatggcgatgacagcagtgacagggcggccagcagcttcatcccctactgctccatggcccaggcccagctatgcttccatgggcaccgcgatgccgtgaagttctttgtctcggtgccagggaacgtgctggccaccctgaatggcagtgtgctggacagcccagccgagggccctgggccagctgcccctgcctcggaggtcgagggccagaagctgcggaacgtgctggtgctgagcggcggggagggctacatcgacttccgcattggagacggagaggacgacgagacggaggagggcgcaggggacatgagccaggtgaagcccgtgctgtccaaggcagagcgcagtcacatcatcgtgtggcaggtgtcctacacccccgagtgaagctgctgccctgcctggcccgacctgtacataggacccccgaccacctgacccccgcccggcccgcggggtagccagccaggcgccgccgcccctcttctaacctctcaacctgcagctttcacctgagtctggcccctccagcgggcagggagtgcggggatgcggatcagctgggaggaggaggggaggggtgcttccacccgaggggaagatgctctcgggacagtttcccgggcagctcctggccagcttccagcccagagtcctcaagtccagggcaccttgggcccagcgcaggcagaatccgaggtggtcctggctctaccctgggcctcctactccccagcacccctggaggaggcaggggctccccgccgccgaggctgcctgccctgggcccacctctgcatgctgctcatggggccaccctgcctcctgggccctcactctgcctaggggagctgggccaggcactagcctttgcccagggaggtgggcctcaggctgcccaggtgcctgcaccccagccggccttctctggggcctccccgtcgtcaagcctctatcctgtctgtccccaccccagctgtcccctgcccagggaactggcataaaagcacgaggcccggctccctggggcagctgcttgagaacagagactgctaccccatcctgcccatgcaggcaggctcttgccagccccgttctgacccgtgtccccccaggctctgcctgggcagaagactcaccttggaggagtgggccctggagtcctgtccctcccagaagcccccagggtgggatttctcaggctgccagggcaggcccaggcctcaggaagaaggggaggcccctggcctctccgggatcagtcctaggacacaggctcagcctcaggttgatgggggatgatgtgctcccggggcctgcctcctgcacggggctccacggagcccagctcccagacacgctactaagtgcctagggttgcccgctgtggcctgctcccagggagcaacagagaggccaccaagcagaggcccgtggggctgaggatggagccgcccccagccgactccaagcccgcagagggcagacgccaccctggactgctctccctgcccagctgggcctctctggcctattcctaccttccaggcccactgcactcctgtctgggaggcccttatgagggcagcccagcccccgcacccacccccaaccagagaagcacagatcttggggagctgccccacaagccccgctggccaccgagggctgcagccgctgcgctgccggcttctccccaccaccctgccacctccactgtgatgtatgtccgctccctcgtctgttcccccaggatctcgaagtgactccgggctgagcagtggggcggctgggggaggggtgacgattctcctcaggctttggccctgcaagcaaacccacatatctgctctgtatgtaataaatgtcttaacgtcgta

SEQ ID NO: 148958 - DNA, 2588 bp, Homo sapiens
  misc_feature (46)..(46): n is a, c, g, or t
tgaggtgactccaggattaagtttacagcgtcaggcagtcagcgtnagggcgacgtgccccacgtagggccccggggaggggaagaggctcctgctggccagcagctctcccgcatcttccatacggaagtccacgaggccctacgtggggcccatctcccctgtaccacctatgactcaggcttgaacaggcgcaaagcaggcgctggctgggaggtctgaggggactgcaggtggccctggagctgtggcaggtttggggctccccacttcctctcctctccccagccctgttgatgggcagccatgactccacagaagtcatttgacgcccacccgcggcgggagagccaggtgcggcagctggcgtggatcggcgatggcgtatgggtgtccatccgcctggactccaccctgaggctctaccatgcacacacgcaccagcatctacaggacgtggacattgagccctacgtcagcaagatgctaggcactggcaagctgggtttctccttcgtacgcatcacggccctgcttgtcgcgggcagccggctctgggtgggcaccggcaacggagtggtcatctccatccccctgacagagactgtggtcctgcaccgaggccagctcctggggctccgagccaataagacatcccccacctctggggagggcgcccgtcccgggggcatcatccacgtgtatggcgatgacagcagtgacagggcggccagcagcttcatcccctactgctccatggcccaggcccagctatgcttccatgggcaccgcgatgccgtgaagttctttgtctcggtgccagggaacgtgctggccaccctgaatggcagtgtgctggacagcccagccgagggccctgggccagctgcccctgcctcggaggtcgagggccagaagctgcggaacgtgctggtgctgagcggcggggagggctacatcgacttccgcattggagacggagaggacgacgagacggaggagggcgcaggggacatgagccaggtgaagcccgtgctgtccaaggcagagcgcagtcacatcatcgtgtggcaggtgtcctacacccccgagtgaagctgctgccctgcctggcccgacctgtacataggacccccgaccacctgacccccgcccggcccgcggggtagccagccaggcgccgccgcccctcttctaacctctcaacctgcagctttcacctgagtctggcccctccagcgggcagggagtgcggggatgcggatcagctgggaggaggaggggaggggtgcttccacccgaggggaagatgctctcgggacagtttcccgggcagctcctggccagcttccagcccagagtcctcaagtccagggcaccttgggcccagcgcaggcagaatccgaggtggtcctggctctaccctgggcctcctactccccagcacccctggaggaggcaggggctccccgccgccgaggctgcctgccctgggcccacctctgcatgctgctcatggggccaccctgcctcctgggccctcactctgcctaggggagctgggccaggcactagcctttgcccagggaggtgggcctcaggctgcccaggtgcctgcaccccagccggccttctctggggcctccccgtcgtcaagcctctatcctgtctgtccccaccccagctgtcccctgcccagggaactggcataaaagcacgaggcccggctccctggggcagctgcttgagaacagagactgctaccccatcctgcccatgcaggcaggctcttgccagccccgttctgacccgtgtccccccaggctctgcctgggcagaagactcaccttggaggagtgggccctggagtcctgtccctcccagaagcccccagggtgggatttctcaggctgccagggcaggcccaggcctcaggaagaaggggaggcccctggcctctccgggatcagtcctaggacacaggctcagcctcaggttgatgggggatgatgtgctcccggggcctgcctcctgcacggggctccacggagcccagctcccagacacgctactaagtgcctagggttgcccgctgtggcctgctcccagggagcaacagagaggccaccaagcagaggcccgtggggctgaggatggagccgcccccagccgactccaagcccgcagagggcagacgccaccctggactgctctccctgcccagctgggcctctctggcctattcctaccttccaggcccactgcactcctgtctgggaggcccttatgagggcagcccagcccccgcacccacccccaaccagagaagcacagatcttggggagctgccccacaagccccgctggccaccgagggctgcagccgctgcgctgccggcttctccccaccaccctgccacctccactgtgatgtatgtccgctccctcgtctgttcccccaggatctcgaagtgactccgggctgagcagtggggcggctgggggaggggtgacgattctcctcaggctttggccctgcaagcaaacccacatatctgctctgtatgtaataaatgtcttaacgtcgta

SEQ ID NO: 148959 - DNA, 2011 bp, Homo sapiens
tcacaggagcctctcccatcctccacctgtatgcgggctcagcgcctctgggttctctccctgcagccaataagacatcccccacctctggggagggcgcccgtcccgggggcatcatccacgtgtatggcgatgacagcagtgacagggcggccagcagcttcatcccctactgctccatggcccaggcccagctatgcttccatgggcaccgcgatgccgtgaagttctttgtctcggtgccagggaacgtgctggccaccctgaatggcagtgtgctggacagcccagccgagggccctgggccagctgcccctgcctcggaggtcgagggccagaagctgcggaacgtgctggtgctgagcggcggggagggctacatcgacttccgcattggagacggagaggacgacgagacggaggagggcgcaggggacatgagccaggtgaagcccgtgctgtccaaggcagagcgcagtcacatcatcgtgtggcaggtgtcctacacccccgagtgaagctgctgccctgcctggcccgacctgtacataggacccccgaccacctgacccccgcccggcccgcggggtagccagccaggcgccgccgcccctcttctaacctctcaacctgcagctttcacctgagtctggcccctccagcgggcagggagtgcggggatgcggatcagctgggaggaggaggggaggggtgcttccacccgaggggaagatgctctcgggacagtttcccgggcagctcctggccagcttccagcccagagtcctcaagtccagggcaccttgggcccagcgcaggcagaatccgaggtggtcctggctctaccctgggcctcctactccccagcacccctggaggaggcaggggctccccgccgccgaggctgcctgccctgggcccacctctgcatgctgctcatggggccaccctgcctcctgggccctcactctgcctaggggagctgggccaggcactagcctttgcccagggaggtgggcctcaggctgcccaggtgcctgcaccccagccggccttctctggggcctccccgtcgtcaagcctctatcctgtctgtccccaccccagctgtcccctgcccagggaactggcataaaagcacgaggcccggctccctggggcagctgcttgagaacagagactgctaccccatcctgcccatgcaggcaggctcttgccagccccgttctgacccgtgtccccccaggctctgcctgggcagaagactcaccttggaggagtgggccctggagtcctgtccctcccagaagcccccagggtgggatttctcaggctgccagggcaggcccaggcctcaggaagaaggggaggcccctggcctctccgggatcagtcctaggacacaggctcagcctcaggttgatgggggatgatgtgctcccggggcctgcctcctgcacggggctccacggagcccagctcccagacacgctactaagtgcctagggttgcccgctgtggcctgctcccagggagcaacagagaggccaccaagcagaggcccgtggggctgaggatggagccgcccccagccgactccaagcccgcagagggcagacgccaccctggactgctctccctgcccagctgggcctctctggcctattcctaccttccaggcccactgcactcctgtctgggaggcccttatgagggcagcccagcccccgcacccacccccaaccagagaagcacagatcttggggagctgccccacaagccccgctggccaccgagggctgcagccgctgcgctgccggcttctccccaccaccctgccacctccactgtgatgtatgtccgctccctcgtctgttcccccaggatctcgaagtgactccgggctgagcagtggggcggctgggggaggggtgacgattctcctcaggctttggccctgcaagcaaacccacatatctgctctgtatgtaataaatgtcttaacgtcgta

SEQ ID NO: 148960 - DNA, 2180 bp, Homo sapiens
ctgctccgcccctctctgggatgggtggctaccttattcaaggtcaaggttacaagctataaagagtccatggtacatttaaaaatgtacactttttaaataactgaggtaaacctcctccaagcttggaatataatccaggagcaacattgtgtagacgaaagagcactggtctagaaggcaagaaatttgggctctactcttggttctaccaatgggacagccaggaaaacctgggcttctgctccgcccctctctggggagggcgcccgtcccgggggcatcatccacgtgtatggcgatgacagcagtgacagggcggccagcagcttcatcccctactgctccatggcccaggcccagctatgcttccatgggcaccgcgatgccgtgaagttctttgtctcggtgccagggaacgtgctggccaccctgaatggcagtgtgctggacagcccagccgagggccctgggccagctgcccctgcctcggaggtcgagggccagaagctgcggaacgtgctggtgctgagcggcggggagggctacatcgacttccgcattggagacggagaggacgacgagacggaggagggcgcaggggacatgagccaggtgaagcccgtgctgtccaaggcagagcgcagtcacatcatcgtgtggcaggtgtcctacacccccgagtgaagctgctgccctgcctggcccgacctgtacataggacccccgaccacctgacccccgcccggcccgcggggtagccagccaggcgccgccgcccctcttctaacctctcaacctgcagctttcacctgagtctggcccctccagcgggcagggagtgcggggatgcggatcagctgggaggaggaggggaggggtgcttccacccgaggggaagatgctctcgggacagtttcccgggcagctcctggccagcttccagcccagagtcctcaagtccagggcaccttgggcccagcgcaggcagaatccgaggtggtcctggctctaccctgggcctcctactccccagcacccctggaggaggcaggggctccccgccgccgaggctgcctgccctgggcccacctctgcatgctgctcatggggccaccctgcctcctgggccctcactctgcctaggggagctgggccaggcactagcctttgcccagggaggtgggcctcaggctgcccaggtgcctgcaccccagccggccttctctggggcctccccgtcgtcaagcctctatcctgtctgtccccaccccagctgtcccctgcccagggaactggcataaaagcacgaggcccggctccctggggcagctgcttgagaacagagactgctaccccatcctgcccatgcaggcaggctcttgccagccccgttctgacccgtgtccccccaggctctgcctgggcagaagactcaccttggaggagtgggccctggagtcctgtccctcccagaagcccccagggtgggatttctcaggctgccagggcaggcccaggcctcaggaagaaggggaggcccctggcctctccgggatcagtcctaggacacaggctcagcctcaggttgatgggggatgatgtgctcccggggcctgcctcctgcacggggctccacggagcccagctcccagacacgctactaagtgcctagggttgcccgctgtggcctgctcccagggagcaacagagaggccaccaagcagaggcccgtggggctgaggatggagccgcccccagccgactccaagcccgcagagggcagacgccaccctggactgctctccctgcccagctgggcctctctggcctattcctaccttccaggcccactgcactcctgtctgggaggcccttatgagggcagcccagcccccgcacccacccccaaccagagaagcacagatcttggggagctgccccacaagccccgctggccaccgagggctgcagccgctgcgctgccggcttctccccaccaccctgccacctccactgtgatgtatgtccgctccctcgtctgttcccccaggatctcgaagtgactccgggctgagcagtggggcggctgggggaggggtgacgattctcctcaggctttggccctgcaagcaaacccacatatctgctctgtatgtaataaatgtcttaacgtcgta

SEQ ID NO: 148961 - DNA, 4939 bp, Homo sapiens
ggcggcggagccctgatggcgacagcagctgcgggaggcgacgggctgcggcctgcggaacctgaggcagctggggagggccgggcgcgccggccggatagcgagccgcgctggcggcggcggtggccgcgatgatggagatccagatggacgagggcggcggcgtggtggtgtaccaggacgactactgctccggctcggtgatgtcggagcgggtgtcgggcctggcgggctccatctaccgcgagttcgagcgcctcatccactgctacgacgaggaggtggtcaaggagctcatgccgctggtggtgaacgtgctggagaacctagactcggtgctcagcgagaaccaggagcacgaggtggagctggagctgctgcgcgaggacaacgagcagctgctcacccagtacgagcgtgagaaggcgctgcgcaggcaggcggaggagaaattcattgagtttgaagatgctctggaacaagagaagaaagagctgcaaatccaggtggagcactacgagttccagacgcgccagctggagctgaaggccaagaactatgccgatcagatttcccggttggaggagcgggagtcggagatgaagaaggagtacaatgccctgcaccagcggcacacagagatgatacagacctacgtggagcacattgagaggtccaagatgcagcaggtcggaggaaacagccagaccgagagcagcctgccggggcggaggaaggagcgccccacctccctgaacgtgttccccctggctgacggcacggtacgtgcacagatcgggggcaagctcgtgcctgcgggggaccactggcacctgagtgacctcggccagctgcagtccagctccagctaccaggttttgtagccgtgccgtggagtgagaggctcctccctgttgctggtgttccccgttcactggggcgggagcctcgtctgcaggcagcccttcacggctctctgggccactcgccctctcccttcgtgtgtggcaggatggagaaacccagccagggtgtcaggggctcaggctgcccagcaggccctgtgtggctgtggctgttccacgcggcctcgtgtcggcacctgctagtccaggctagacctccctgcccttggatagaccgctctgtagccaggggtgtacagtgcctgtcagggttgagcttagtgatcctctctcaaaccacacccccacataaagcctcatgctcacccgggctccagccagacacatcctgcccctgagagccacgcctctactctcggaggaacgtcagtgtctagagtgtggggtttgccctccgttggcagaaaggtgaggagaaagctcctcttctctgggcccctccctgcctgtccctggtaacgcctcctgggtcctgagtttgagaaagcagagcctcgccccagcaggtactcacagccagagtgcgggggccccagcaggttctcacagccagccggtgagtgcacctcagagcacaggggcccagagccaggccactccttcagggccccaggtcgcttgctgccagttttggcctgtgagctcactggcctcagtgccaggtaaggacagccaccttcctgggaagaagaggtgaccccgggtctggtggatttcccacaggggccgtcagaggatgtccacagaggcagagcccttggggcctgtgggctgggttgggctggtggatgtggggcctgggacttctccagaagcttacttcctgctgcatgctttgccgactgtccttccacctctaagtgtccatcgtgcctgtgggggctgctgcaggctcctgctccgtcagcccacctgctgctgcgctgctctgggagcgagctccctcatggcatctggaacgctctcctgtcctccctgtgctcagggctggagagagggtggcggggctgcgggctccccgggccttctgggcccagccctgccacctgggcccacctcctctcactgtctctggctcacgcttcccgggcctggagctgggacctgcccataggcatctgaagacacgtcagcctcagccggggggagcccttgcttgacgctctctggcctccgggctgcctctcgcgcccgctctgggcccgctcttcttctcatgatgtctttcctttcacctcctgcgttgtctgacatcgtcgctctcttcataaattgtagcgttttatgttttcgttcataggagtgttttatttgatttttctttattttaaattattacatttaagttctttttattttatgctctaggttttgaagtttttctaatttcttaatttttttgttgttttttgttttgttttgtttttgtttttatgtactgtattttcagtgttttaaccaaacagttgtggctactcatggtgaggaatgaccgctaagagtttgggttctttcagtgcatttggaggtcactgctacacgttgatgtttaggaggttgagaggtttgcctttaggtaagttgtggccagggggagtgtcccatgggtaagtggtggccctgtagggtgacggagagctaggggaggcgcaatcagactgcagaattccccgcagccaccatgagggtcaggagcaggccggggacccagcgtggaggaaggtggcccagaagcgtttgtctgatgtgcacagctacaccctgcctggccacatggggttccctgttttctctctgccgggtggtggcagagtcggtgagacaccaggtgcctgtgacacattgggtagacaggttctttgagaacgtcagcacagacttcttgcatgagcggtactcgcttcctccagcgtggggagtgacatgaagagcaagggttttcctttcaaactgggcatagctgcagagccacaggccgtctcagacatttctacaaagccactccgggaggcgggctgcgcccgtgtgagggctctccctcggcactgctcatcttttggggctggacatgcatggcctgggccgctgggacgcggtgggtgtggagcagcatccctggcttccacccacgaaagccaggagcacccccttcatttgtgaccacaaaaatgtctctggactttgcaagcatcccctcggggcagtcagcccaactgagaatagctactatagaggaaggtgtgtcattttgagattccttctagagaaacttaggagcctggtagatgaagcagaaatgtgtcctctgagtgagtggccgtgtccggtactgagaggccccgtgccctgagtctggcggtgaccagagaggctgggcagaggcagaggtcagcactggccatgacttctggaagtcccgtctgccctggtcacttaaaggccagtataagtcagctgtggagagggctggataccccctcgacagctcctccctgggtgagatccttagcattagagtcccccacggtgcgccctctgagagaccacgggaacccacccagcggctgcctgggacaggcacaggagccacctgggtgcctctgaggccttgcactttcccacacctcaaggagggccgggggccacgggcaagctctgccatagcgggtgatcaggtcagctaagacgagaacgtttggggctctttttctccagctggttcagtatctttgttaggaaagaccattggaaagaatgtttgtttcgcattccgcattagtcacatagaatgcgctcctccctagcgagcttcctgaggtagacggctggttgcggtttctcgtaatccgggctgcccccaccctccagaatgtcttggtggcgtccctttctgtgagcagggattgtggtttctttgcgcttgctcatgttcaggggtgagctctggtccagtcaagccacagggtcagcaccttctggtcactccctggccctgacctgagcccggggaggaacgtggggcaggcgcgggtgggcccagcctcgagctcttcagcacagtgatggtgacggggcagcggtggcggcacagccagcccttcttgggtccccagtcagagccctctgccctacctgggctggacttgtttctgaacagccacaagctacagggggctgccgctgtgtccctggcgaggcactggcccattacaagcaatcgtctggggagggcaccagtggaaagccccgttccaagccatttcaggagggtggccctgcttccgaggagccggagtcagtggccggataagcagagccactcgggagtggtgaggcccggaagggttagcccggtgggcggcagaggagctctggcccgcagggtgtcgggcgaggcaaagtgcaaagcattggtgcgcggggcctcaggcagccacggcggagccgcaggccagggacctgcagtgactcgctctccctcctccctgtgtttggccttagtgtccacaggatgaaatgtccgagtcaggccagtcctcggcggccgccacacccagcaccacaggcaccaagtccaacacgcccacatcctccgtgccctcggccgccgtcacacccctcaacgagagcctgcagcccctgggggactatggcgtgggctccaagaacagcaagcgtgcccgggagaagcgcgacagccgcaacatggaagtacaggtcacccaggagatgcgcaacgtcagtataggcatgggcagcagtgacgagtggtctgatgttcaagacattattgactccacgccagagctggacatgtgtccagagacccgcctggaccgcacaggaagcagcccaacccagggcatcgtgaacaaagctttcggcatcaacaccgactccctgtaccatgagctgtcgacggcagggggaggggtgacgattctcctcaggctttggccctgcaagcaaacccacatatctgctctgtatgtaataaatgtcttaacgtcgta

SEQ ID NO: 148962 - DNA, 187 bp, Homo sapiens
cagtgtgggcattgaatggccacggtgggaggtgttggaagagtctgcagacgcagccactccgggctgcccactgactctgctctctctcccgacctgtggatcccaacagcccaacccagggcatcgtgaacaaagctttcggcatcaacaccgactccctgtaccatgagctgtcgacggcagg

SEQ ID NO: 148963 - DNA, 9169 bp, Homo sapiens
ggcggcggagccctgatggcgacagcagctgcgggaggcgacgggctgcggcctgcggaacctgaggcagctggggagggccgggcgcgccggccggatagcgagccgcgctggcggcggcggtggccgcgatgatggagatccagatggacgagggcggcggcgtggtggtgtaccaggacgactactgctccggctcggtgatgtcggagcgggtgtcgggcctggcgggctccatctaccgcgagttcgagcgcctcatccactgctacgacgaggaggtggtcaaggagctcatgccgctggtggtgaacgtgctggagaacctagactcggtgctcagcgagaaccaggagcacgaggtggagctggagctgctgcgcgaggacaacgagcagctgctcacccagtacgagcgtgagaaggcgctgcgcaggcaggcggaggagaaattcattgagtttgaagatgctctggaacaagagaagaaagagctgcaaatccaggtggagcactacgagttccagacgcgccagctggagctgaaggccaagaactatgccgatcagatttcccggttggaggagcgggagtcggagatgaagaaggagtacaatgccctgcaccagcggcacacagagatgatacagacctacgtggagcacattgagaggtccaagatgcagcaggtcggaggaaacagccagaccgagagcagcctgccggggcggaggaaggagcgccccacctccctgaacgtgttccccctggctgacggcacggtacgtgcacagatcgggggcaagctcgtgcctgcgggggaccactggcacctgagtgacctcggccagctgcagtccagctccagctaccaggttttgtagccgtgccgtggagtgagaggctcctccctgttgctggtgttccccgttcactggggcgggagcctcgtctgcaggcagcccttcacggctctctgggccactcgccctctcccttcgtgtgtggcaggatggagaaacccagccagggtgtcaggggctcaggctgcccagcaggccctgtgtggctgtggctgttccacgcggcctcgtgtcggcacctgctagtccaggctagacctccctgcccttggatagaccgctctgtagccaggggtgtacagtgcctgtcagggttgagcttagtgatcctctctcaaaccacacccccacataaagcctcatgctcacccgggctccagccagacacatcctgcccctgagagccacgcctctactctcggaggaacgtcagtgtctagagtgtggggtttgccctccgttggcagaaaggtgaggagaaagctcctcttctctgggcccctccctgcctgtccctggtaacgcctcctgggtcctgagtttgagaaagcagagcctcgccccagcaggtactcacagccagagtgcgggggccccagcaggttctcacagccagccggtgagtgcacctcagagcacaggggcccagagccaggccactccttcagggccccaggtcgcttgctgccagttttggcctgtgagctcactggcctcagtgccaggtaaggacagccaccttcctgggaagaagaggtgaccccgggtctggtggatttcccacaggggccgtcagaggatgtccacagaggcagagcccttggggcctgtgggctgggttgggctggtggatgtggggcctgggacttctccagaagcttacttcctgctgcatgctttgccgactgtccttccacctctaagtgtccatcgtgcctgtgggggctgctgcaggctcctgctccgtcagcccacctgctgctgcgctgctctgggagcgagctccctcatggcatctggaacgctctcctgtcctccctgtgctcagggctggagagagggtggcggggctgcgggctccccgggccttctgggcccagccctgccacctgggcccacctcctctcactgtctctggctcacgcttcccgggcctggagctgggacctgcccataggcatctgaagacacgtcagcctcagccggggggagcccttgcttgacgctctctggcctccgggctgcctctcgcgcccgctctgggcccgctcttcttctcatgatgtctttcctttcacctcctgcgttgtctgacatcgtcgctctcttcataaattgtagcgttttatgttttcgttcataggagtgttttatttgatttttctttattttaaattattacatttaagttctttttattttatgctctaggttttgaagtttttctaatttcttaatttttttgttgttttttgttttgttttgtttttgtttttatgtactgtattttcagtgttttaaccaaacagttgtggctactcatggtgaggaatgaccgctaagagtttgggttctttcagtgcatttggaggtcactgctacacgttgatgtttaggaggttgagaggtttgcctttaggtaagttgtggccagggggagtgtcccatgggtaagtggtggccctgtagggtgacggagagctaggggaggcgcaatcagactgcagaattccccgcagccaccatgagggtcaggagcaggccggggacccagcgtggaggaaggtggcccagaagcgtttgtctgatgtgcacagctacaccctgcctggccacatggggttccctgttttctctctgccgggtggtggcagagtcggtgagacaccaggtgcctgtgacacattgggtagacaggttctttgagaacgtcagcacagacttcttgcatgagcggtactcgcttcctccagcgtggggagtgacatgaagagcaagggttttcctttcaaactgggcatagctgcagagccacaggccgtctcagacatttctacaaagccactccgggaggcgggctgcgcccgtgtgagggctctccctcggcactgctcatcttttggggctggacatgcatggcctgggccgctgggacgcggtgggtgtggagcagcatccctggcttccacccacgaaagccaggagcacccccttcatttgtgaccacaaaaatgtctctggactttgcaagcatcccctcggggcagtcagcccaactgagaatagctactatagaggaaggtgtgtcattttgagattccttctagagaaacttaggagcctggtagatgaagcagaaatgtgtcctctgagtgagtggccgtgtccggtactgagaggccccgtgccctgagtctggcggtgaccagagaggctgggcagaggcagaggtcagcactggccatgacttctggaagtcccgtctgccctggtcacttaaaggccagtataagtcagctgtggagagggctggataccccctcgacagctcctccctgggtgagatccttagcattagagtcccccacggtgcgccctctgagagaccacgggaacccacccagcggctgcctgggacaggcacaggagccacctgggtgcctctgaggccttgcactttcccacacctcaaggagggccgggggccacgggcaagctctgccatagcgggtgatcaggtcagctaagacgagaacgtttggggctctttttctccagctggttcagtatctttgttaggaaagaccattggaaagaatgtttgtttcgcattccgcattagtcacatagaatgcgctcctccctagcgagcttcctgaggtagacggctggttgcggtttctcgtaatccgggctgcccccaccctccagaatgtcttggtggcgtccctttctgtgagcagggattgtggtttctttgcgcttgctcatgttcaggggtgagctctggtccagtcaagccacagggtcagcaccttctggtcactccctggccctgacctgagcccggggaggaacgtggggcaggcgcgggtgggcccagcctcgagctcttcagcacagtgatggtgacggggcagcggtggcggcacagccagcccttcttgggtccccagtcagagccctctgccctacctgggctggacttgtttctgaacagccacaagctacagggggctgccgctgtgtccctggcgaggcactggcccattacaagcaatcgtctggggagggcaccagtggaaagccccgttccaagccatttcaggagggtggccctgcttccgaggagccggagtcagtggccggataagcagagccactcgggagtggtgaggcccggaagggttagcccggtgggcggcagaggagctctggcccgcagggtgtcgggcgaggcaaagtgcaaagcattggtgcgcggggcctcaggcagccacggcggagccgcaggccagggacctgcagtgactcgctctccctcctccctgtgtttggccttagtgtccacaggatgaaatgtccgagtcaggccagtcctcggcggccgccacacccagcaccacaggcaccaagtccaacacgcccacatcctccgtgccctcggccgccgtcacacccctcaacgagagcctgcagcccctgggggactatggcgtgggctccaagaacagcaagcgtgcccgggagaagcgcgacagccgcaacatggaagtacaggtcacccaggagatgcgcaacgtcagtataggcatgggcagcagtgacgagtggtctgatgttcaagacattattgactccacgccagagctggacatgtgtccagagacccgcctggaccgcacaggaagcagcccaacccagggcatcgtgaacaaagctttcggcatcaacaccgactccctgtaccatgagctgtcgacggcagggtctgaggtcatcggggatgtggacgaaggggccgacctcctaggggagttctcaggaatgggcaaagaagtggggaatctgctactggaaaactcacagcttctggaaaccaaaaacgccttgaatgtggtgaagaatgacctgattgccaaggtcgaccagctgtccggggagcaggaggtgctgaggggcgagttggaggctgctaagcaggccaaagtcaagctggaaaaccgtatcaaggagctggaagaggaactgaaaagagtgaagtccgaggccatcatcgcccgccgtgaacccaaagaagaggcggaggatgtaagcagctatctctgtacagaatcggacaaaatccccatggcccagcgccgccgcttcacgcgggtggagatggcccgtgtgctcatggagcggaaccagtacaaggagcggctgatggagctgcaggaggctgtgcggtggactgagatgatcagagcgtcccgagagcacccatccgtccaggagaagaagaagtcgaccatctggcagttcttcagccgcctcttcagctcttcctccagcccccctccggccaagcgcccctatccctcggtgaacatccactacaagtcacccaccactgccggcttcagccagcgccgcaaccatgccatgtgcccgatctcggcaggcagccggcccctggaattcttccctgacgacgactgcacgtcctccgcccgtcgagagcagaagcgcgagcagtaccgccaggtgcgtgagcacgtgcgtaacgacgacggccgtctgcaggcctgcggctggagcctgcccgccaagtacaagcagctgagtcccaacgggggccaggaggacacgcggatgaagaacgtgccggtgccggtgtactgccgccctctggtggagaaggaccccaccatgaagctgtggtgtgccgcgggcgtcaacctgagcgggtggaggcccaatgaggacgacgctgggaatggagtcaagccagcgccaggccgcgatcccctgacctgcgaccgcgaaggagacggcgagcccaagagcgcccacacgtctcccgagaagaagaaggccaaggagctccctgaaatggacgccacctccagccgggtgtggatcctgaccagcaccctgaccaccagcaaggtggtgatcatcgacgccaaccagccgggcacggtggtggaccagttcaccgtctgcaacgcgcacgtgctgtgcatctccagcatccccgcggccagcgacagcgactaccctcccggggagatgttcctggacagcgacgtgaacccagaggacccgggcgcagatggcgtgctggccggtatcaccctggtgggctgtgccacccgctgcaacgtgccgcggagcaactgctcctcccgaggggacaccccagtgctagacaaggggcagggggaggtggccaccatcgccaacgggaaggtcaacccgtcccagtccacagaggaggccacagaggccacggaggtgccagaccctgggcccagcgagccagagacagccacattgcggcccgggcctctcacagagcacgtcttcactgacccagccccgaccccgtcctctggcccccagcctggcagcgagaacgggccagagcctgacagcagcagcacacggccagagccagagcccagcggggaccccacgggagcaggcagcagtgctgcacccaccatgtggctgggagcccagaacggctggctctatgtgcactcggctgtggccaactggaagaagtgcctgcactccatcaagctgaaggattctgtgctgagcctggtgcatgtcaaaggccgtgtgctggtggctctggcggacgggaccctggccatcttccaccgtggtgaagatggccagtgggatctgagcaactatcacctaatggacctgggccacccgcaccactccatccgctgcatggctgttgtgtacgaccgcgtgtggtgtggctacaagaacaaggtgcacgtcatccagcccaagaccatgcagatagagaagtcatttgacgcccacccgcggcgggagagccaggtgcggcagctggcgtggatcggcgatggcgtatgggtgtccatccgcctggactccaccctgaggctctaccatgcacacacgcaccagcatctacaggacgtggacattgagccctacgtcagcaagatgctaggcactggcaagctgggtttctccttcgtacgcatcacggccctgcttgtcgcgggcagccggctctgggtgggcaccggcaacggagtggtcatctccatccccctgacagagactgtggtcctgcaccgaggccagctcctggggctccgagccaataagacatcccccacctctggggagggcgcccgtcccgggggcatcatccacgtgtatggcgatgacagcagtgacagggcggccagcagcttcatcccctactgctccatggcccaggcccagctatgcttccatgggcaccgcgatgccgtgaagttctttgtctcggtgccagggaacgtgctggccaccctgaatggcagtgtgctggacagcccagccgagggccctgggccagctgcccctgcctcggaggtcgagggccagaagctgcggaacgtgctggtgctgagcggcggggagggctacatcgacttccgcattggagacggagaggacgacgagacggaggagggcgcaggggacatgagccaggtgaagcccgtgctgtccaaggcagagcgcagtcacatcatcgtgtggcaggtgtcctacacccccgagtgaagctgctgccctgcctggcccgacctgtacataggacccccgaccacctgacccccgcccggcccgcggggtagccagccaggcgccgccgcccctcttctaacctctcaacctgcagctttcacctgagtctggcccctccagcgggcagggagtgcggggatgcggatcagctgggaggaggaggggaggggtgcttccacccgaggggaagatgctctcgggacagtttcccgggcagctcctggccagcttccagcccagagtcctcaagtccagggcaccttgggcccagcgcaggcagaatccgaggtggtcctggctctaccctgggcctcctactccccagcacccctggaggaggcaggggctccccgccgccgaggctgcctgccctgggcccacctctgcatgctgctcatggggccaccctgcctcctgggccctcactctgcctaggggagctgggccaggcactagcctttgcccagggaggtgggcctcaggctgcccaggtgcctgcaccccagccggccttctctggggcctccccgtcgtcaagcctctatcctgtctgtccccaccccagctgtcccctgcccagggaactggcataaaagcacgaggcccggctccctggggcagctgcttgagaacagagactgctaccccatcctgcccatgcaggcaggctcttgccagccccgttctgacccgtgtccccccaggctctgcctgggcagaagactcaccttggaggagtgggccctggagtcctgtccctcccagaagcccccagggtgggatttctcaggctgccagggcaggcccaggcctcaggaagaaggggaggcccctggcctctccgggatcagtcctaggacacaggctcagcctcaggttgatgggggatgatgtgctcccggggcctgcctcctgcacggggctccacggagcccagctcccagacacgctactaagtgcctagggttgcccgctgtggcctgctcccagggagcaacagagaggccaccaagcagaggcccgtggggctgaggatggagccgcccccagccgactccaagcccgcagagggcagacgccaccctggactgctctccctgcccagctgggcctctctggcctattcctaccttccaggcccactgcactcctgtctgggaggcccttatgagggcagcccagcccccgcacccacccccaaccagagaagcacagatcttggggagctgccccacaagccccgctggccaccgagggctgcagccgctgcgctgccggcttctccccaccaccctgccacctccactgtgatgtatgtccgctccctcgtctgttcccccaggatctcgaagtgactccgggctgagcagtggggcggctgggggaggggtgacgattctcctcaggctttggccctgcaagcaaacccacatatctgctctgtatgtaataaatgtcttaacgtcgta

SEQ ID NO: 148964 - DNA, 6456 bp, Homo sapiens
ggcggcggagccctgatggcgacagcagctgcgggaggcgacgggctgcggcctgcggaacctgaggcagctggggagggccgggcgcgccggccggatagcgagccgcgctggcggcggcggtggccgcgatgatggagatccagatggacgagggcggcggcgtggtggtgtaccaggacgactactgctccggctcggtgatgtcggagcgggtgtcgggcctggcgggctccatctaccgcgagttcgagcgcctcatccactgctacgacgaggaggtggtcaaggagctcatgccgctggtggtgaacgtgctggagaacctagactcggtgctcagcgagaaccaggagcacgaggtggagctggagctgctgcgcgaggacaacgagcagctgctcacccagtacgagcgtgagaaggcgctgcgcaggcaggcggaggagaaattcattgagtttgaagatgctctggaacaagagaagaaagagctgcaaatccaggtggagcactacgagttccagacgcgccagctggagctgaaggccaagaactatgccgatcagatttcccggttggaggagcgggagtcggagatgaagaaggagtacaatgccctgcaccagcggcacacagagatgatacagacctacgtggagcacattgagaggtccaagatgcagcaggtcggaggaaacagccagaccgagagcagcctgccggggcggaggaaggagcgccccacctccctgaacgtgttccccctggctgacggcacggtacgtgcacagatcgggggcaagctcgtgcctgcgggggaccactggcacctgagtgacctcggccagctgcagtccagctccagctaccaggttttgtagccgtgccgtggagtgagaggctcctccctgttgctggtgttccccgttcactggggcgggagcctcgtctgcaggcagcccttcacggctctctgggccactcgccctctcccttcgtgtgtggcaggatggagaaacccagccagggtgtcaggggctcaggctgcccagcaggccctgtgtggctgtggctgttccacgcggcctcgtgtcggcacctgctagtccaggctagacctccctgcccttggatagaccgctctgtagccaggggtgtacagtgcctgtcagggttgagcttagtgatcctctctcaaaccacacccccacataaagcctcatgctcacccgggctccagccagacacatcctgcccctgagagccacgcctctactctcggaggaacgtcagtgtctagagtgtggggtttgccctccgttggcagaaaggtgaggagaaagctcctcttctctgggcccctccctgcctgtccctggtaacgcctcctgggtcctgagtttgagaaagcagagcctcgccccagcaggtactcacagccagagtgcgggggccccagcaggttctcacagccagccggtgagtgcacctcagagcacaggggcccagagccaggccactccttcagggccccaggtcgcttgctgccagttttggcctgtgagctcactggcctcagtgccagtgttttaaccaaacagttgtggctactcatggtgaggaatgaccgctaagagtttgggttctttcagtgcatttggaggtcactgctacacgttgatgtttaggaggttgagaggtttgcctttagtgtccacaggatgaaatgtccgagtcaggccagtcctcggcggccgccacacccagcaccacaggcaccaagtccaacacgcccacatcctccgtgccctcggccgccgtcacacccctcaacgagagcctgcagcccctgggggactatggcgtgggctccaagaacagcaagcgtgcccgggagaagcgcgacagccgcaacatggaagtacaggtcacccaggagatgcgcaacgtcagtataggcatgggcagcagtgacgagtggtctgatgttcaagacattattgactccacgccagagctggacatgtgtccagagacccgcctggaccgcacaggaagcagcccaacccagggcatcgtgaacaaagctttcggcatcaacaccgactccctgtaccatgagctgtcgacggcagggtctgaggtcatcggggatgtggacgaaggggccgacctcctaggggagttctcaggaatgggcaaagaagtggggaatctgctactggaaaactcacagcttctggaaaccaaaaacgccttgaatgtggtgaagaatgacctgattgccaaggtcgaccagctgtccggggagcaggaggtgctgaggggcgagttggaggctgctaagcaggccaaagtcaagctggaaaaccgtatcaaggagctggaagaggaactgaaaagagtgaagtccgaggccatcatcgcccgccgtgaacccaaagaagaggcggaggatgtaagcagctatctctgtacagaatcggacaaaatccccatggcccagcgccgccgcttcacgcgggtggagatggcccgtgtgctcatggagcggaaccagtacaaggagcggctgatggagctgcaggaggctgtgcggtggactgagatgatcagagcgtcccgagagcacccatccgtccaggagaagaagaagtcgaccatctggcagttcttcagccgcctcttcagctcttcctccagcccccctccggccaagcgcccctatccctcggtgaacatccactacaagtcacccaccactgccggcttcagccagcgccgcaaccatgccatgtgcccgatctcggcaggcagccggcccctggaattcttccctgacgacgactgcacgtcctccgcccgtcgagagcagaagcgcgagcagtaccgccaggtgcgtgagcacgtgcgtaacgacgacggccgtctgcaggcctgcggctggagcctgcccgccaagtacaagcagctgagtcccaacgggggccaggaggacacgcggatgaagaacgtgccggtgccggtgtactgccgccctctggtggagaaggaccccaccatgaagctgtggtgtgccgcgggcgtcaacctgagcgggtggaggcccaatgaggacgacgctgggaatggagtcaagccagcgccaggccgcgatcccctgacctgcgaccgcgaaggagacggcgagcccaagagcgcccacacgtctcccgagaagaagaaggccaaggagctccctgaaatggacgccacctccagccgggtgtggatcctgaccagcaccctgaccaccagcaaggtggtgatcatcgacgccaaccagccgggcacggtggtggaccagttcaccgtctgcaacgcgcacgtgctgtgcatctccagcatccccgcggccagcgacagcgactaccctcccggggagatgttcctggacagcgacgtgaacccagaggacccgggcgcagatggcgtgctggccggtatcaccctggtgggctgtgccacccgctgcaacgtgccgcggagcaactgctcctcccgaggggacaccccagtgctagacaaggggcagggggaggtggccaccatcgccaacgggaaggtcaacccgtcccagtccacagaggaggccacagaggccacggaggtgccagaccctgggcccagcgagccagagacagccacattgcggcccgggcctctcacagagcacgtcttcactgacccagccccgaccccgtcctctggcccccagcctggcagcgagaacgggccagagcctgacagcagcagcacacggccagagccagagcccagcggggaccccacgggagcaggcagcagtgctgcacccaccatgtggctgggagcccagaacggctggctctatgtgcactcggctgtggccaactggaagaagtgcctgcactccatcaagctgaaggattctgtgctgagcctggtgcatgtcaaaggccgtgtgctggtggctctggcggacgggaccctggccatcttccaccgtggtgaagatggccagtgggatctgagcaactatcacctaatggacctgggccacccgcaccactccatccgctgcatggctgttgtgtacgaccgcgtgtggtgtggctacaagaacaaggtgcacgtcatccagcccaagaccatgcagatagagaagtcatttgacgcccacccgcggcgggagagccaggtgcggcagctggcgtggatcggcgatggcgtatgggtgtccatccgcctggactccaccctgaggctctaccatgcacacacgcaccagcatctacaggacgtggacattgagccctacgtcagcaagatgctaggcactggcaagctgggtttctccttcgtacgcatcacggccctgcttgtcgcgggcagccggctctgggtgggcaccggcaacggagtggtcatctccatccccctgacagagactgtggtcctgcaccgaggccagctcctggggctccgagccaataagacatcccccacctctggggagggcgcccgtcccgggggcatcatccacgtgtatggcgatgacagcagtgacagggcggccagcagcttcatcccctactgctccatggcccaggcccagctatgcttccatgggcaccgcgatgccgtgaagttctttgtctcggtgccagggaacgtgctggccaccctgaatggcagtgtgctggacagcccagccgagggccctgggccagctgcccctgcctcggaggtcgagggccagaagctgcggaacgtgctggtgctgagcggcggggagggctacatcgacttccgcattggagacggagaggacgacgagacggaggagggcgcaggggacatgagccaggtgaagcccgtgctgtccaaggcagagcgcagtcacatcatcgtgtggcaggtgtcctacacccccgagtgaagctgctgccctgcctggcccgacctgtacataggacccccgaccacctgacccccgcccggcccgcggggtagccagccaggcgccgccgcccctcttctaacctctcaacctgcagctttcacctgagtctggcccctccagcgggcagggagtgcggggatgcggatcagctgggaggaggaggggaggggtgcttccacccgaggggaagatgctctcgggacagtttcccgggcagctcctggccagcttccagcccagagtcctcaagtccagggcaccttgggcccagcgcaggcagaatccgaggtggtcctggctctaccctgggcctcctactccccagcacccctggaggaggcaggggctccccgccgccgaggctgcctgccctgggcccacctctgcatgctgctcatggggccaccctgcctcctgggccctcactctgcctaggggagctgggccaggcactagcctttgcccagggaggtgggcctcaggctgcccaggtgcctgcaccccagccggccttctctggggcctccccgtcgtcaagcctctatcctgtctgtccccaccccagctgtcccctgcccagggaactggcataaaagcacgaggcccggctccctggggcagctgcttgagaacagagactgctaccccatcctgcccatgcaggcaggctcttgccagccccgttctgacccgtgtccccccaggctctgcctgggcagaagactcaccttggaggagtgggccctggagtcctgtccctcccagaagcccccagggtgggatttctcaggctgccagggcaggcccaggcctcaggaagaaggggaggcccctggcctctccgggatcagtcctaggacacaggctcagcctcaggttgatgggggatgatgtgctcccggggcctgcctcctgcacggggctccacggagcccagctcccagacacgctactaagtgcctagggttgcccgctgtggcctgctcccagggagcaacagagaggccaccaagcagaggcccgtggggctgaggatggagccgcccccagccgactccaagcccgcagagggcagacgccaccctggactgctctccctgcccagctgggcctctctggcctattcctaccttccaggcccactgcactcctgtctgggaggcccttatgagggcagcccagcccccgcacccacccccaaccagagaagcacagatcttggggagctgccccacaagccccgctggccaccgagggctgcagccgctgcgctgccggcttctccccaccaccctgccacctccactgtgatgtatgtccgctccctcgtctgttcccccaggatctcgaagtgactccgggctgagcagtggggcggctgggggaggggtgacgattctcctcaggctttggccctgcaagcaaacccacatatctgctctgtatgtaataaatgtcttaacgtcgta

SEQ ID NO: 148965 - DNA, 9438 bp, Homo sapiens
ggcggcggagccctgatggcgacagcagctgcgggaggcgacgggctgcggcctgcggaacctgaggcagctggggagggccgggcgcgccggccggatagcgagccgcgctggcggcggcggtggccgcgatgatggagatccagatggacgagggcggcggcgtggtggtgtaccaggacgactactgctccggctcggtgatgtcggagcgggtgtcgggcctggcgggctccatctaccgcgagttcgagcgcctcatccactgctacgacgaggaggtggtcaaggagctcatgccgctggtggtgaacgtgctggagaacctagactcggtgctcagcgagaaccaggagcacgaggtggagctggagctgctgcgcgaggacaacgagcagctgctcacccagtacgagcgtgagaaggcgctgcgcaggcaggcggaggagaaattcattgagtttgaagatgctctggaacaagagaagaaagagctgcaaatccaggtggagcactacgagttccagacgcgccagctggagctgaaggccaagaactatgccgatcagatttcccggttggaggagcgggagtcggagatgaagaaggagtacaatgccctgcaccagcggcacacagagatgatacagacctacgtggagcacattgagaggtccaagatgcagcaggtcggaggaaacagccagaccgagagcagcctgccggggcggaggaaggagcgccccacctccctgaacgtgttccccctggctgacggcacggtacgtgcacagatcgggggcaagctcgtgcctgcgggggaccactggcacctgagtgacctcggccagctgcagtccagctccagctaccaggttttgtagccgtgccgtggagtgagaggctcctccctgttgctggtgttccccgttcactggggcgggagcctcgtctgcaggcagcccttcacggctctctgggccactcgccctctcccttcgtgtgtggcaggatggagaaacccagccagggtgtcaggggctcaggctgcccagcaggccctgtgtggctgtggctgttccacgcggcctcgtgtcggcacctgctagtccaggctagacctccctgcccttggatagaccgctctgtagccaggggtgtacagtgcctgtcagggttgagcttagtgatcctctctcaaaccacacccccacataaagcctcatgctcacccgggctccagccagacacatcctgcccctgagagccacgcctctactctcggaggaacgtcagtgtctagagtgtggggtttgccctccgttggcagaaaggtgaggagaaagctcctcttctctgggcccctccctgcctgtccctggtaacgcctcctgggtcctgagtttgagaaagcagagcctcgccccagcaggtactcacagccagagtgcgggggccccagcaggttctcacagccagccggtgagtgcacctcagagcacaggggcccagagccaggccactccttcagggccccaggtcgcttgctgccagttttggcctgtgagctcactggcctcagtgccaggtaaggacagccaccttcctgggaagaagaggtgaccccgggtctggtggatttcccacaggggccgtcagaggatgtccacagaggcagagcccttggggcctgtgggctgggttgggctggtggatgtggggcctgggacttctccagaagcttacttcctgctgcatgctttgccgactgtccttccacctctaagtgtccatcgtgcctgtgggggctgctgcaggctcctgctccgtcagcccacctgctgctgcgctgctctgggagcgagctccctcatggcatctggaacgctctcctgtcctccctgtgctcagggctggagagagggtggcggggctgcgggctccccgggccttctgggcccagccctgccacctgggcccacctcctctcactgtctctggctcacgcttcccgggcctggagctgggacctgcccataggcatctgaagacacgtcagcctcagccggggggagcccttgcttgacgctctctggcctccgggctgcctctcgcgcccgctctgggcccgctcttcttctcatgatgtctttcctttcacctcctgcgttgtctgacatcgtcgctctcttcataaattgtagcgttttatgttttcgttcataggagtgttttatttgatttttctttattttaaattattacatttaagttctttttattttatgctctaggttttgaagtttttctaatttcttaatttttttgttgttttttgttttgttttgtttttgtttttatgtactgtattttcagtgttttaaccaaacagttgtggctactcatggtgaggaatgaccgctaagagtttgggttctttcagtgcatttggaggtcactgctacacgttgatgtttaggaggttgagaggtttgcctttaggtaagttgtggccagggggagtgtcccatgggtaagtggtggccctgtagggtgacggagagctaggggaggcgcaatcagactgcagaattccccgcagccaccatgagggtcaggagcaggccggggacccagcgtggaggaaggtggcccagaagcgtttgtctgatgtgcacagctacaccctgcctggccacatggggttccctgttttctctctgccgggtggtggcagagtcggtgagacaccaggtgcctgtgacacattgggtagacaggttctttgagaacgtcagcacagacttcttgcatgagcggtactcgcttcctccagcgtggggagtgacatgaagagcaagggttttcctttcaaactgggcatagctgcagagccacaggccgtctcagacatttctacaaagccactccgggaggcgggctgcgcccgtgtgagggctctccctcggcactgctcatcttttggggctggacatgcatggcctgggccgctgggacgcggtgggtgtggagcagcatccctggcttccacccacgaaagccaggagcacccccttcatttgtgaccacaaaaatgtctctggactttgcaagcatcccctcggggcagtcagcccaactgagaatagctactatagaggaaggtgtgtcattttgagattccttctagagaaacttaggagcctggtagatgaagcagaaatgtgtcctctgagtgagtggccgtgtccggtactgagaggccccgtgccctgagtctggcggtgaccagagaggctgggcagaggcagaggtcagcactggccatgacttctggaagtcccgtctgccctggtcacttaaaggccagtataagtcagctgtggagagggctggataccccctcgacagctcctccctgggtgagatccttagcattagagtcccccacggtgcgccctctgagagaccacgggaacccacccagcggctgcctgggacaggcacaggagccacctgggtgcctctgaggccttgcactttcccacacctcaaggagggccgggggccacgggcaagctctgccatagcgggtgatcaggtcagctaagacgagaacgtttggggctctttttctccagctggttcagtatctttgttaggaaagaccattggaaagaatgtttgtttcgcattccgcattagtcacatagaatgcgctcctccctagcgagcttcctgaggtagacggctggttgcggtttctcgtaatccgggctgcccccaccctccagaatgtcttggtggcgtccctttctgtgagcagggattgtggtttctttgcgcttgctcatgttcaggggtgagctctggtccagtcaagccacagggtcagcaccttctggtcactccctggccctgacctgagcccggggaggaacgtggggcaggcgcgggtgggcccagcctcgagctcttcagcacagtgatggtgacggggcagcggtggcggcacagccagcccttcttgggtccccagtcagagccctctgccctacctgggctggacttgtttctgaacagccacaagctacagggggctgccgctgtgtccctggcgaggcactggcccattacaagcaatcgtctggggagggcaccagtggaaagccccgttccaagccatttcaggagggtggccctgcttccgaggagccggagtcagtggccggataagcagagccactcgggagtggtgaggcccggaagggttagcccggtgggcggcagaggagctctggcccgcagggtgtcgggcgaggcaaagtgcaaagcattggtgcgcggggcctcaggcagccacggcggagccgcaggccagggacctgcagtgactcgctctccctcctccctgtgtttggccttagtgtccacaggatgaaatgtccgagtcaggccagtcctcggcggccgccacacccagcaccacaggcaccaagtccaacacgcccacatcctccgtgccctcggccgccgtcacacccctcaacgagagcctgcagcccctgggggactatggcgtgggctccaagaacagcaagcgtgcccgggagaagcgcgacagccgcaacatggaagtacaggtcacccaggagatgcgcaacgtcagtataggcatgggcagcagtgacgagtggtctgatgttcaagacattattgactccacgccagagctggacatgtgtccagagacccgcctggaccgcacaggaagcagcccaacccagggcatcgtgaacaaagctttcggcatcaacaccgactccctgtaccatgagctgtcgacggcagggtctgaggtcatcggggatgtggacgaaggggccgacctcctaggggagttctcaggaatgggcaaagaagtggggaatctgctactggaaaactcacagcttctggaaaccaaaaacgccttgaatgtggtgaagaatgacctgattgccaaggtcgaccagctgtccggggagcaggaggtgctgaggggcgagttggaggctgctaagcaggccaaagtcaagctggaaaaccgtatcaaggagctggaagaggaactgaaaagagtgaagtccgaggccatcatcgcccgccgtgaacccaaagaagaggcggaggatgtaagcagctatctctgtacagaatcggacaaaatccccatggcccagcgccgccgcttcacgcgggtggagatggcccgtgtgctcatggagcggaaccagtacaaggagcggctgatggagctgcaggaggctgtgcggtggactgagatgatcagagcgtcccgagagcacccatccgtccaggagaagaagaagtcgaccatctggcagttcttcagccgcctcttcagctcttcctccagcccccctccggccaagcgcccctatccctcggtgaacatccactacaagtcacccaccactgccggcttcagccagcgccgcaaccatgccatgtgcccgatctcggcaggcagccggcccctggaattcttccctgacgacgactgcacgtcctccgcccgtcgagagcagaagcgcgagcagtaccgccaggtgcgtgagcacgtgcgtaacgacgacggccgtctgcaggcctgcggctggagcctgcccgccaagtacaagcagctgagtcccaacgggggccaggaggacacgcggatgaagaacgtgccggtgccggtgtactgccgccctctggtggagaaggaccccaccatgaagctgtggtgtgccgcgggcgtcaacctgagcgggtggaggcccaatgaggacgacgctgggaatggagtcaagccagcgccaggccgcgatcccctgacctgcgaccgcgaaggagacggcgagcccaagagcgcccacacgtctcccgagaagaagaaggccaaggagctccctgaaatggacgccacctccagccgggtgtggatcctgaccagcaccctgaccaccagcaaggtggtgatcatcgacgccaaccagccgggcacggtggtggaccagttcaccgtctgcaacgcgcacgtgctgtgcatctccagcatccccgcggccagcgacagcgactaccctcccggggagatgttcctggacagcgacgtgaacccagaggacccgggcgcagatggcgtgctggccggtatcaccctggtgggctgtgccacccgctgcaacgtgccgcggagcaactgctcctcccgaggggacaccccagtgctagacaaggggcagggggaggtggccaccatcgccaacgggaaggtcaacccgtcccagtccacagaggaggccacagaggccacggaggtgccagaccctgggcccagcgagccagagacagccacattgcggcccgggcctctcacagagcacgtcttcactgacccagccccgaccccgtcctctggcccccagcctggcagcgagaacgggccagagcctgacagcagcagcacacggccagagccagagcccagcggggaccccacgggagcaggcagcagtgctgcacccaccatgtggctgggagcccagaacggctggctctatgtgcactcggctgtggccaactggaagaagtgcctgcactccatcaagctgaaggattctgtgctgagcctggtgcatgtcaaaggccgtgtgctggtggctctggcggacgggaccctggccatcttccaccgtggtgaagatggccagtgggatctgagcaactatcacctaatggacctgggccacccgcaccactccatccgctgcatggctgttgtgtacgaccgcgtgtggtgtggctacaagaacaaggtgcacgtcatccagcccaagaccatgcagatagaggcgacgtgccccacgtagggccccggggaggggaagaggctcctgctggccagcagctctcccgcatcttccatacggaagtccacgaggccctacgtggggcccatctcccctgtaccacctatgactcaggcttgaacaggcgcaaagcaggcgctggctgggaggtctgaggggactgcaggtggccctggagctgtggcaggtttggggctccccacttcctctcctctccccagccctgttgatgggcagccatgactccacagaagtcatttgacgcccacccgcggcgggagagccaggtgcggcagctggcgtggatcggcgatggcgtatgggtgtccatccgcctggactccaccctgaggctctaccatgcacacacgcaccagcatctacaggacgtggacattgagccctacgtcagcaagatgctaggcactggcaagctgggtttctccttcgtacgcatcacggccctgcttgtcgcgggcagccggctctgggtgggcaccggcaacggagtggtcatctccatccccctgacagagactgtggtcctgcaccgaggccagctcctggggctccgagccaataagacatcccccacctctggggagggcgcccgtcccgggggcatcatccacgtgtatggcgatgacagcagtgacagggcggccagcagcttcatcccctactgctccatggcccaggcccagctatgcttccatgggcaccgcgatgccgtgaagttctttgtctcggtgccagggaacgtgctggccaccctgaatggcagtgtgctggacagcccagccgagggccctgggccagctgcccctgcctcggaggtcgagggccagaagctgcggaacgtgctggtgctgagcggcggggagggctacatcgacttccgcattggagacggagaggacgacgagacggaggagggcgcaggggacatgagccaggtgaagcccgtgctgtccaaggcagagcgcagtcacatcatcgtgtggcaggtgtcctacacccccgagtgaagctgctgccctgcctggcccgacctgtacataggacccccgaccacctgacccccgcccggcccgcggggtagccagccaggcgccgccgcccctcttctaacctctcaacctgcagctttcacctgagtctggcccctccagcgggcagggagtgcggggatgcggatcagctgggaggaggaggggaggggtgcttccacccgaggggaagatgctctcgggacagtttcccgggcagctcctggccagcttccagcccagagtcctcaagtccagggcaccttgggcccagcgcaggcagaatccgaggtggtcctggctctaccctgggcctcctactccccagcacccctggaggaggcaggggctccccgccgccgaggctgcctgccctgggcccacctctgcatgctgctcatggggccaccctgcctcctgggccctcactctgcctaggggagctgggccaggcactagcctttgcccagggaggtgggcctcaggctgcccaggtgcctgcaccccagccggccttctctggggcctccccgtcgtcaagcctctatcctgtctgtccccaccccagctgtcccctgcccagggaactggcataaaagcacgaggcccggctccctggggcagctgcttgagaacagagactgctaccccatcctgcccatgcaggcaggctcttgccagccccgttctgacccgtgtccccccaggctctgcctgggcagaagactcaccttggaggagtgggccctggagtcctgtccctcccagaagcccccagggtgggatttctcaggctgccagggcaggcccaggcctcaggaagaaggggaggcccctggcctctccgggatcagtcctaggacacaggctcagcctcaggttgatgggggatgatgtgctcccggggcctgcctcctgcacggggctccacggagcccagctcccagacacgctactaagtgcctagggttgcccgctgtggcctgctcccagggagcaacagagaggccaccaagcagaggcccgtggggctgaggatggagccgcccccagccgactccaagcccgcagagggcagacgccaccctggactgctctccctgcccagctgggcctctctggcctattcctaccttccaggcccactgcactcctgtctgggaggcccttatgagggcagcccagcccccgcacccacccccaaccagagaagcacagatcttggggagctgccccacaagccccgctggccaccgagggctgcagccgctgcgctgccggcttctccccaccaccctgccacctccactgtgatgtatgtccgctccctcgtctgttcccccaggatctcgaagtgactccgggctgagcagtggggcggctgggggaggggtgacgattctcctcaggctttggccctgcaagcaaacccacatatctgctctgtatgtaataaatgtcttaacgtcgta

SEQ ID NO: 148966 - DNA, 9191 bp, Homo sapiens
ggcggcggagccctgatggcgacagcagctgcgggaggcgacgggctgcggcctgcggaacctgaggcagctggggagggccgggcgcgccggccggatagcgagccgcgctggcggcggcggtggccgcgatgatggagatccagatggacgagggcggcggcgtggtggtgtaccaggacgactactgctccggctcggtgatgtcggagcgggtgtcgggcctggcgggctccatctaccgcgagttcgagcgcctcatccactgctacgacgaggaggtggtcaaggagctcatgccgctggtggtgaacgtgctggagaacctagactcggtgctcagcgagaaccaggagcacgaggtggagctggagctgctgcgcgaggacaacgagcagctgctcacccagtacgagcgtgagaaggcgctgcgcaggcaggcggaggagaaattcattgagtttgaagatgctctggaacaagagaagaaagagctgcaaatccaggtggagcactacgagttccagacgcgccagctggagctgaaggccaagaactatgccgatcagatttcccggttggaggagcgggagtcggagatgaagaaggagtacaatgccctgcaccagcggcacacagagatgatacagacctacgtggagcacattgagaggtccaagatgcagcaggtcggaggaaacagccagaccgagagcagcctgccggggcggaggaaggagcgccccacctccctgaacgtgttccccctggctgacggcacggtacgtgcacagatcgggggcaagctcgtgcctgcgggggaccactggcacctgagtgacctcggccagctgcagtccagctccagctaccaggttttgtagccgtgccgtggagtgagaggctcctccctgttgctggtgttccccgttcactggggcgggagcctcgtctgcaggcagcccttcacggctctctgggccactcgccctctcccttcgtgtgtggcaggatggagaaacccagccagggtgtcaggggctcaggctgcccagcaggccctgtgtggctgtggctgttccacgcggcctcgtgtcggcacctgctagtccaggctagacctccctgcccttggatagaccgctctgtagccaggggtgtacagtgcctgtcagggttgagcttagtgatcctctctcaaaccacacccccacataaagcctcatgctcacccgggctccagccagacacatcctgcccctgagagccacgcctctactctcggaggaacgtcagtgtctagagtgtggggtttgccctccgttggcagaaaggtgaggagaaagctcctcttctctgggcccctccctgcctgtccctggtaacgcctcctgggtcctgagtttgagaaagcagagcctcgccccagcaggtactcacagccagagtgcgggggccccagcaggttctcacagccagccggtgagtgcacctcagagcacaggggcccagagccaggccactccttcagggccccaggtcgcttgctgccagttttggcctgtgagctcactggcctcagtgccaggtaaggacagccaccttcctgggaagaagaggtgaccccgggtctggtggatttcccacaggggccgtcagaggatgtccacagaggcagagcccttggggcctgtgggctgggttgggctggtggatgtggggcctgggacttctccagaagcttacttcctgctgcatgctttgccgactgtccttccacctctaagtgtccatcgtgcctgtgggggctgctgcaggctcctgctccgtcagcccacctgctgctgcgctgctctgggagcgagctccctcatggcatctggaacgctctcctgtcctccctgtgctcagggctggagagagggtggcggggctgcgggctccccgggccttctgggcccagccctgccacctgggcccacctcctctcactgtctctggctcacgcttcccgggcctggagctgggacctgcccataggcatctgaagacacgtcagcctcagccggggggagcccttgcttgacgctctctggcctccgggctgcctctcgcgcccgctctgggcccgctcttcttctcatgatgtctttcctttcacctcctgcgttgtctgacatcgtcgctctcttcataaattgtagcgttttatgttttcgttcataggagtgttttatttgatttttctttattttaaattattacatttaagttctttttattttatgctctaggttttgaagtttttctaatttcttaatttttttgttgttttttgttttgttttgtttttgtttttatgtactgtattttcagtgttttaaccaaacagttgtggctactcatggtgaggaatgaccgctaagagtttgggttctttcagtgcatttggaggtcactgctacacgttgatgtttaggaggttgagaggtttgcctttaggtaagttgtggccagggggagtgtcccatgggtaagtggtggccctgtagggtgacggagagctaggggaggcgcaatcagactgcagaattccccgcagccaccatgagggtcaggagcaggccggggacccagcgtggaggaaggtggcccagaagcgtttgtctgatgtgcacagctacaccctgcctggccacatggggttccctgttttctctctgccgggtggtggcagagtcggtgagacaccaggtgcctgtgacacattgggtagacaggttctttgagaacgtcagcacagacttcttgcatgagcggtactcgcttcctccagcgtggggagtgacatgaagagcaagggttttcctttcaaactgggcatagctgcagagccacaggccgtctcagacatttctacaaagccactccgggaggcgggctgcgcccgtgtgagggctctccctcggcactgctcatcttttggggctggacatgcatggcctgggccgctgggacgcggtgggtgtggagcagcatccctggcttccacccacgaaagccaggagcacccccttcatttgtgaccacaaaaatgtctctggactttgcaagcatcccctcggggcagtcagcccaactgagaatagctactatagaggaaggtgtgtcattttgagattccttctagagaaacttaggagcctggtagatgaagcagaaatgtgtcctctgagtgagtggccgtgtccggtactgagaggccccgtgccctgagtctggcggtgaccagagaggctgggcagaggcagaggtcagcactggccatgacttctggaagtcccgtctgccctggtcacttaaaggccagtataagtcagctgtggagagggctggataccccctcgacagctcctccctgggtgagatccttagcattagagtcccccacggtgcgccctctgagagaccacgggaacccacccagcggctgcctgggacaggcacaggagccacctgggtgcctctgaggccttgcactttcccacacctcaaggagggccgggggccacgggcaagctctgccatagcgggtgatcaggtcagctaagacgagaacgtttggggctctttttctccagctggttcagtatctttgttaggaaagaccattggaaagaatgtttgtttcgcattccgcattagtcacatagaatgcgctcctccctagcgagcttcctgaggtagacggctggttgcggtttctcgtaatccgggctgcccccaccctccagaatgtcttggtggcgtccctttctgtgagcagggattgtggtttctttgcgcttgctcatgttcaggggtgagctctggtccagtcaagccacagggtcagcaccttctggtcactccctggccctgacctgagcccggggaggaacgtggggcaggcgcgggtgggcccagcctcgagctcttcagcacagtgatggtgacggggcagcggtggcggcacagccagcccttcttgggtccccagtcagagccctctgccctacctgggctggacttgtttctgaacagccacaagctacagggggctgccgctgtgtccctggcgaggcactggcccattacaagcaatcgtctggggagggcaccagtggaaagccccgttccaagccatttcaggagggtggccctgcttccgaggagccggagtcagtggccggataagcagagccactcgggagtggtgaggcccggaagggttagcccggtgggcggcagaggagctctggcccgcagggtgtcgggcgaggcaaagtgcaaagcattggtgcgcggggcctcaggcagccacggcggagccgcaggccagggacctgcagtgactcgctctccctcctccctgtgtttggccttagtgtccacaggatgaaatgtccgagtcaggccagtcctcggcggccgccacacccagcaccacaggcaccaagtccaacacgcccacatcctccgtgccctcggccgccgtcacacccctcaacgagagcctgcagcccctgggggactatggcgtgggctccaagaacagcaagcgtgcccgggagaagcgcgacagccgcaacatggaagtacaggtcacccaggagatgcgcaacgtcagtataggcatgggcagcagtgacgagtggtctgatgttcaagacattattgactccacgccagagctggacatgtgtccagagacccgcctggaccgcacaggaagcagcccaacccagggcatcgtgaacaaagctttcggcatcaacaccgactccctgtaccatgagctgtcgacggcagggtctgaggtcatcggggatgtggacgaaggggccgacctcctaggggagtgaaacctccgcaccttctgtgttctcaggaatgggcaaagaagtggggaatctgctactggaaaactcacagcttctggaaaccaaaaacgccttgaatgtggtgaagaatgacctgattgccaaggtcgaccagctgtccggggagcaggaggtgctgaggggcgagttggaggctgctaagcaggccaaagtcaagctggaaaaccgtatcaaggagctggaagaggaactgaaaagagtgaagtccgaggccatcatcgcccgccgtgaacccaaagaagaggcggaggatgtaagcagctatctctgtacagaatcggacaaaatccccatggcccagcgccgccgcttcacgcgggtggagatggcccgtgtgctcatggagcggaaccagtacaaggagcggctgatggagctgcaggaggctgtgcggtggactgagatgatcagagcgtcccgagagcacccatccgtccaggagaagaagaagtcgaccatctggcagttcttcagccgcctcttcagctcttcctccagcccccctccggccaagcgcccctatccctcggtgaacatccactacaagtcacccaccactgccggcttcagccagcgccgcaaccatgccatgtgcccgatctcggcaggcagccggcccctggaattcttccctgacgacgactgcacgtcctccgcccgtcgagagcagaagcgcgagcagtaccgccaggtgcgtgagcacgtgcgtaacgacgacggccgtctgcaggcctgcggctggagcctgcccgccaagtacaagcagctgagtcccaacgggggccaggaggacacgcggatgaagaacgtgccggtgccggtgtactgccgccctctggtggagaaggaccccaccatgaagctgtggtgtgccgcgggcgtcaacctgagcgggtggaggcccaatgaggacgacgctgggaatggagtcaagccagcgccaggccgcgatcccctgacctgcgaccgcgaaggagacggcgagcccaagagcgcccacacgtctcccgagaagaagaaggccaaggagctccctgaaatggacgccacctccagccgggtgtggatcctgaccagcaccctgaccaccagcaaggtggtgatcatcgacgccaaccagccgggcacggtggtggaccagttcaccgtctgcaacgcgcacgtgctgtgcatctccagcatccccgcggccagcgacagcgactaccctcccggggagatgttcctggacagcgacgtgaacccagaggacccgggcgcagatggcgtgctggccggtatcaccctggtgggctgtgccacccgctgcaacgtgccgcggagcaactgctcctcccgaggggacaccccagtgctagacaaggggcagggggaggtggccaccatcgccaacgggaaggtcaacccgtcccagtccacagaggaggccacagaggccacggaggtgccagaccctgggcccagcgagccagagacagccacattgcggcccgggcctctcacagagcacgtcttcactgacccagccccgaccccgtcctctggcccccagcctggcagcgagaacgggccagagcctgacagcagcagcacacggccagagccagagcccagcggggaccccacgggagcaggcagcagtgctgcacccaccatgtggctgggagcccagaacggctggctctatgtgcactcggctgtggccaactggaagaagtgcctgcactccatcaagctgaaggattctgtgctgagcctggtgcatgtcaaaggccgtgtgctggtggctctggcggacgggaccctggccatcttccaccgtggtgaagatggccagtgggatctgagcaactatcacctaatggacctgggccacccgcaccactccatccgctgcatggctgttgtgtacgaccgcgtgtggtgtggctacaagaacaaggtgcacgtcatccagcccaagaccatgcagatagagaagtcatttgacgcccacccgcggcgggagagccaggtgcggcagctggcgtggatcggcgatggcgtatgggtgtccatccgcctggactccaccctgaggctctaccatgcacacacgcaccagcatctacaggacgtggacattgagccctacgtcagcaagatgctaggcactggcaagctgggtttctccttcgtacgcatcacggccctgcttgtcgcgggcagccggctctgggtgggcaccggcaacggagtggtcatctccatccccctgacagagactgtggtcctgcaccgaggccagctcctggggctccgagccaataagacatcccccacctctggggagggcgcccgtcccgggggcatcatccacgtgtatggcgatgacagcagtgacagggcggccagcagcttcatcccctactgctccatggcccaggcccagctatgcttccatgggcaccgcgatgccgtgaagttctttgtctcggtgccagggaacgtgctggccaccctgaatggcagtgtgctggacagcccagccgagggccctgggccagctgcccctgcctcggaggtcgagggccagaagctgcggaacgtgctggtgctgagcggcggggagggctacatcgacttccgcattggagacggagaggacgacgagacggaggagggcgcaggggacatgagccaggtgaagcccgtgctgtccaaggcagagcgcagtcacatcatcgtgtggcaggtgtcctacacccccgagtgaagctgctgccctgcctggcccgacctgtacataggacccccgaccacctgacccccgcccggcccgcggggtagccagccaggcgccgccgcccctcttctaacctctcaacctgcagctttcacctgagtctggcccctccagcgggcagggagtgcggggatgcggatcagctgggaggaggaggggaggggtgcttccacccgaggggaagatgctctcgggacagtttcccgggcagctcctggccagcttccagcccagagtcctcaagtccagggcaccttgggcccagcgcaggcagaatccgaggtggtcctggctctaccctgggcctcctactccccagcacccctggaggaggcaggggctccccgccgccgaggctgcctgccctgggcccacctctgcatgctgctcatggggccaccctgcctcctgggccctcactctgcctaggggagctgggccaggcactagcctttgcccagggaggtgggcctcaggctgcccaggtgcctgcaccccagccggccttctctggggcctccccgtcgtcaagcctctatcctgtctgtccccaccccagctgtcccctgcccagggaactggcataaaagcacgaggcccggctccctggggcagctgcttgagaacagagactgctaccccatcctgcccatgcaggcaggctcttgccagccccgttctgacccgtgtccccccaggctctgcctgggcagaagactcaccttggaggagtgggccctggagtcctgtccctcccagaagcccccagggtgggatttctcaggctgccagggcaggcccaggcctcaggaagaaggggaggcccctggcctctccgggatcagtcctaggacacaggctcagcctcaggttgatgggggatgatgtgctcccggggcctgcctcctgcacggggctccacggagcccagctcccagacacgctactaagtgcctagggttgcccgctgtggcctgctcccagggagcaacagagaggccaccaagcagaggcccgtggggctgaggatggagccgcccccagccgactccaagcccgcagagggcagacgccaccctggactgctctccctgcccagctgggcctctctggcctattcctaccttccaggcccactgcactcctgtctgggaggcccttatgagggcagcccagcccccgcacccacccccaaccagagaagcacagatcttggggagctgccccacaagccccgctggccaccgagggctgcagccgctgcgctgccggcttctccccaccaccctgccacctccactgtgatgtatgtccgctccctcgtctgttcccccaggatctcgaagtgactccgggctgagcagtggggcggctgggggaggggtgacgattctcctcaggctttggccctgcaagcaaacccacatatctgctctgtatgtaataaatgtcttaacgtcgta

SEQ ID NO: 148967 - DNA, 5639 bp, Homo sapiens
ggcggcggagccctgatggcgacagcagctgcgggaggcgacgggctgcggcctgcggaacctgaggcagctggggagggccgggcgcgccggccggatagcgagccgcgctggcggcggcggtggccgcgatgatggagatccagatggacgagggcggcggcgtggtggtgtaccaggacgactactgctccggctcggtgatgtcggagcgggtgtcgggcctggcgggctccatctaccgcgagttcgagcgcctcatccactgctacgacgaggaggtggtcaaggagctcatgccgctggtggtgaacgtgctggagaacctagactcggtgctcagcgagaaccaggagcacgaggtggagctggagctgctgcgcgaggacaacgagcagctgctcacccagtacgagcgtgagaaggcgctgcgcaggcaggcggaggagaaattcattgagtttgaagatgctctggaacaagagaagaaagagctgcaaatccaggtggagcactacgagttccagacgcgccagctggagctgaaggccaagaactatgccgatcagatttcccggttggaggagcgggagtcggagatgaagaaggagtacaatgccctgcaccagcggcacacagagatgatacagacctacgtggagcacattgagaggtccaagatgcagcaggtcggaggaaacagccagaccgagagcagcctgccggggcggaggaaggagcgccccacctccctgaacgtgttccccctggctgacggcacggtacgtgcacagatcgggggcaagctcgtgcctgcgggggaccactggcacctgagtgacctcggccagctgcagtccagctccagctaccagtgtccacaggatgaaatgtccgagtcaggccagtcctcggcggccgccacacccagcaccacaggcaccaagtccaacacgcccacatcctccgtgccctcggccgccgtcacacccctcaacgagagcctgcagcccctgggggactatggcgtgggctccaagaacagcaagcgtgcccgggagaagcgcgacagccgcaacatggaagtacaggtcacccaggagatgcgcaacgtcagtataggcatgggcagcagtgacgagtggtctgatgttcaagacattattgactccacgccagagctggacatgtgtccagagacccgcctggaccgcacaggaagcagcccaacccagggcatcgtgaacaaagctttcggcatcaacaccgactccctgtaccatgagctgtcgacggcagggtctgaggtcatcggggatgtggacgaaggggccgacctcctaggggagtgaaacctccgcaccttctgtgttctcaggaatgggcaaagaagtggggaatctgctactggaaaactcacagcttctggaaaccaaaaacgccttgaatgtggtgaagaatgacctgattgccaaggtcgaccagctgtccggggagcaggaggtgctgaggggcgagttggaggctgctaagcaggccaaagtcaagctggaaaaccgtatcaaggagctggaagaggaactgaaaagagtgaagtccgaggccatcatcgcccgccgtgaacccaaagaagaggcggaggatgtaagcagctatctctgtacagaatcggacaaaatccccatggcccagcgccgccgcttcacgcgggtggagatggcccgtgtgctcatggagcggaaccagtacaaggagcggctgatggagctgcaggaggctgtgcggtggactgagatgatcagagcgtcccgagagcacccatccgtccaggagaagaagaagtcgaccatctggcagttcttcagccgcctcttcagctcttcctccagcccccctccggccaagcgcccctatccctcggtgaacatccactacaagtcacccaccactgccggcttcagccagcgccgcaaccatgccatgtgcccgatctcggcaggcagccggcccctggaattcttccctgacgacgactgcacgtcctccgcccgtcgagagcagaagcgcgagcagtaccgccaggtgcgtgagcacgtgcgtaacgacgacggccgtctgcaggcctgcggctggagcctgcccgccaagtacaagcagctgagtcccaacgggggccaggaggacacgcggatgaagaacgtgccggtgccggtgtactgccgccctctggtggagaaggaccccaccatgaagctgtggtgtgccgcgggcgtcaacctgagcgggtggaggcccaatgaggacgacgctgggaatggagtcaagccagcgccaggccgcgatcccctgacctgcgaccgcgaaggagacggcgagcccaagagcgcccacacgtctcccgagaagaagaaggccaaggagctccctgaaatggacgccacctccagccgggtgtggatcctgaccagcaccctgaccaccagcaaggtggtgatcatcgacgccaaccagccgggcacggtggtggaccagttcaccgtctgcaacgcgcacgtgctgtgcatctccagcatccccgcggccagcgacagcgactaccctcccggggagatgttcctggacagcgacgtgaacccagaggacccgggcgcagatggcgtgctggccggtatcaccctggtgggctgtgccacccgctgcaacgtgccgcggagcaactgctcctcccgaggggacaccccagtgctagacaaggggcagggggaggtggccaccatcgccaacgggaaggtcaacccgtcccagtccacagaggaggccacagaggccacggaggtgccagaccctgggcccagcgagccagagacagccacattgcggcccgggcctctcacagagcacgtcttcactgacccagccccgaccccgtcctctggcccccagcctggcagcgagaacgggccagagcctgacagcagcagcacacggccagagccagagcccagcggggaccccacgggagcaggcagcagtgctgcacccaccatgtggctgggagcccagaacggctggctctatgtgcactcggctgtggccaactggaagaagtgcctgcactccatcaagctgaaggattctgtgctgagcctggtgcatgtcaaaggccgtgtgctggtggctctggcggacgggaccctggccatcttccaccgtggtgaagatggccagtgggatctgagcaactatcacctaatggacctgggccacccgcaccactccatccgctgcatggctgttgtgtacgaccgcgtgtggtgtggctacaagaacaaggtgcacgtcatccagcccaagaccatgcagatagagaagtcatttgacgcccacccgcggcgggagagccaggtgcggcagctggcgtggatcggcgatggcgtatgggtgtccatccgcctggactccaccctgaggctctaccatgcacacacgcaccagcatctacaggacgtggacattgagccctacgtcagcaagatgctaggcactggcaagctgggtttctccttcgtacgcatcacggccctgcttgtcgcgggcagccggctctgggtgggcaccggcaacggagtggtcatctccatccccctgacagagactgtggtcctgcaccgaggccagctcctggggctccgagccaataagacatcccccacctctggggagggcgcccgtcccgggggcatcatccacgtgtatggcgatgacagcagtgacagggcggccagcagcttcatcccctactgctccatggcccaggcccagctatgcttccatgggcaccgcgatgccgtgaagttctttgtctcggtgccagggaacgtgctggccaccctgaatggcagtgtgctggacagcccagccgagggccctgggccagctgcccctgcctcggaggtcgagggccagaagctgcggaacgtgctggtgctgagcggcggggagggctacatcgacttccgcattggagacggagaggacgacgagacggaggagggcgcaggggacatgagccaggtgaagcccgtgctgtccaaggcagagcgcagtcacatcatcgtgtggcaggtgtcctacacccccgagtgaagctgctgccctgcctggcccgacctgtacataggacccccgaccacctgacccccgcccggcccgcggggtagccagccaggcgccgccgcccctcttctaacctctcaacctgcagctttcacctgagtctggcccctccagcgggcagggagtgcggggatgcggatcagctgggaggaggaggggaggggtgcttccacccgaggggaagatgctctcgggacagtttcccgggcagctcctggccagcttccagcccagagtcctcaagtccagggcaccttgggcccagcgcaggcagaatccgaggtggtcctggctctaccctgggcctcctactccccagcacccctggaggaggcaggggctccccgccgccgaggctgcctgccctgggcccacctctgcatgctgctcatggggccaccctgcctcctgggccctcactctgcctaggggagctgggccaggcactagcctttgcccagggaggtgggcctcaggctgcccaggtgcctgcaccccagccggccttctctggggcctccccgtcgtcaagcctctatcctgtctgtccccaccccagctgtcccctgcccagggaactggcataaaagcacgaggcccggctccctggggcagctgcttgagaacagagactgctaccccatcctgcccatgcaggcaggctcttgccagccccgttctgacccgtgtccccccaggctctgcctgggcagaagactcaccttggaggagtgggccctggagtcctgtccctcccagaagcccccagggtgggatttctcaggctgccagggcaggcccaggcctcaggaagaaggggaggcccctggcctctccgggatcagtcctaggacacaggctcagcctcaggttgatgggggatgatgtgctcccggggcctgcctcctgcacggggctccacggagcccagctcccagacacgctactaagtgcctagggttgcccgctgtggcctgctcccagggagcaacagagaggccaccaagcagaggcccgtggggctgaggatggagccgcccccagccgactccaagcccgcagagggcagacgccaccctggactgctctccctgcccagctgggcctctctggcctattcctaccttccaggcccactgcactcctgtctgggaggcccttatgagggcagcccagcccccgcacccacccccaaccagagaagcacagatcttggggagctgccccacaagccccgctggccaccgagggctgcagccgctgcgctgccggcttctccccaccaccctgccacctccactgtgatgtatgtccgctccctcgtctgttcccccaggatctcgaagtgactccgggctgagcagtggggcggctgggggaggggtgacgattctcctcaggctttggccctgcaagcaaacccacatatctgctctgtatgtaataaatgtcttaacgtcgta

SEQ ID NO: 148968 - DNA, 9250 bp, Homo sapiens
ggcggcggagccctgatggcgacagcagctgcgggaggcgacgggctgcggcctgcggaacctgaggcagctggggagggccgggcgcgccggccggatagcgagccgcgctggcggcggcggtggccgcgatgatggagatccagatggacgagggcggcggcgtggtggtgtaccaggacgactactgctccggctcggtgatgtcggagcgggtgtcgggcctggcgggctccatctaccgcgagttcgagcgcctcatccactgctacgacgaggaggtggtcaaggagctcatgccgctggtggtgaacgtgctggagaacctagactcggtgctcagcgagaaccaggagcacgaggtggagctggagctgctgcgcgaggacaacgagcagctgctcacccagtacgagcgtgagaaggcgctgcgcaggcaggcggaggagaaattcattgagtttgaagatgctctggaacaagagaagaaagagctgcaaatccaggtggagcactacgagttccagacgcgccagctggagctgaaggccaagaactatgccgatcagatttcccggttggaggagcgggagtcggagatgaagaaggagtacaatgccctgcaccagcggcacacagagatgatacagacctacgtggagcacattgagaggtccaagatgcagcaggtcggaggaaacagccagaccgagagcagcctgccggggcggaggaaggagcgccccacctccctgaacgtgttccccctggctgacggcacggtacgtgcacagatcgggggcaagctcgtgcctgcgggggaccactggcacctgagtgacctcggccagctgcagtccagctccagctaccaggttttgtagccgtgccgtggagtgagaggctcctccctgttgctggtgttccccgttcactggggcgggagcctcgtctgcaggcagcccttcacggctctctgggccactcgccctctcccttcgtgtgtggcaggatggagaaacccagccagggtgtcaggggctcaggctgcccagcaggccctgtgtggctgtggctgttccacgcggcctcgtgtcggcacctgctagtccaggctagacctccctgcccttggatagaccgctctgtagccaggggtgtacagtgcctgtcagggttgagcttagtgatcctctctcaaaccacacccccacataaagcctcatgctcacccgggctccagccagacacatcctgcccctgagagccacgcctctactctcggaggaacgtcagtgtctagagtgtggggtttgccctccgttggcagaaaggtgaggagaaagctcctcttctctgggcccctccctgcctgtccctggtaacgcctcctgggtcctgagtttgagaaagcagagcctcgccccagcaggtactcacagccagagtgcgggggccccagcaggttctcacagccagccggtgagtgcacctcagagcacaggggcccagagccaggccactccttcagggccccaggtcgcttgctgccagttttggcctgtgagctcactggcctcagtgccaggtaaggacagccaccttcctgggaagaagaggtgaccccgggtctggtggatttcccacaggggccgtcagaggatgtccacagaggcagagcccttggggcctgtgggctgggttgggctggtggatgtggggcctgggacttctccagaagcttacttcctgctgcatgctttgccgactgtccttccacctctaagtgtccatcgtgcctgtgggggctgctgcaggctcctgctccgtcagcccacctgctgctgcgctgctctgggagcgagctccctcatggcatctggaacgctctcctgtcctccctgtgctcagggctggagagagggtggcggggctgcgggctccccgggccttctgggcccagccctgccacctgggcccacctcctctcactgtctctggctcacgcttcccgggcctggagctgggacctgcccataggcatctgaagacacgtcagcctcagccggggggagcccttgcttgacgctctctggcctccgggctgcctctcgcgcccgctctgggcccgctcttcttctcatgatgtctttcctttcacctcctgcgttgtctgacatcgtcgctctcttcataaattgtagcgttttatgttttcgttcataggagtgttttatttgatttttctttattttaaattattacatttaagttctttttattttatgctctaggttttgaagtttttctaatttcttaatttttttgttgttttttgttttgttttgtttttgtttttatgtactgtattttcagtgttttaaccaaacagttgtggctactcatggtgaggaatgaccgctaagagtttgggttctttcagtgcatttggaggtcactgctacacgttgatgtttaggaggttgagaggtttgcctttaggtaagttgtggccagggggagtgtcccatgggtaagtggtggccctgtagggtgacggagagctaggggaggcgcaatcagactgcagaattccccgcagccaccatgagggtcaggagcaggccggggacccagcgtggaggaaggtggcccagaagcgtttgtctgatgtgcacagctacaccctgcctggccacatggggttccctgttttctctctgccgggtggtggcagagtcggtgagacaccaggtgcctgtgacacattgggtagacaggttctttgagaacgtcagcacagacttcttgcatgagcggtactcgcttcctccagcgtggggagtgacatgaagagcaagggttttcctttcaaactgggcatagctgcagagccacaggccgtctcagacatttctacaaagccactccgggaggcgggctgcgcccgtgtgagggctctccctcggcactgctcatcttttggggctggacatgcatggcctgggccgctgggacgcggtgggtgtggagcagcatccctggcttccacccacgaaagccaggagcacccccttcatttgtgaccacaaaaatgtctctggactttgcaagcatcccctcggggcagtcagcccaactgagaatagctactatagaggaaggtgtgtcattttgagattccttctagagaaacttaggagcctggtagatgaagcagaaatgtgtcctctgagtgagtggccgtgtccggtactgagaggccccgtgccctgagtctggcggtgaccagagaggctgggcagaggcagaggtcagcactggccatgacttctggaagtcccgtctgccctggtcacttaaaggccagtataagtcagctgtggagagggctggataccccctcgacagctcctccctgggtgagatccttagcattagagtcccccacggtgcgccctctgagagaccacgggaacccacccagcggctgcctgggacaggcacaggagccacctgggtgcctctgaggccttgcactttcccacacctcaaggagggccgggggccacgggcaagctctgccatagcgggtgatcaggtcagctaagacgagaacgtttggggctctttttctccagctggttcagtatctttgttaggaaagaccattggaaagaatgtttgtttcgcattccgcattagtcacatagaatgcgctcctccctagcgagcttcctgaggtagacggctggttgcggtttctcgtaatccgggctgcccccaccctccagaatgtcttggtggcgtccctttctgtgagcagggattgtggtttctttgcgcttgctcatgttcaggggtgagctctggtccagtcaagccacagggtcagcaccttctggtcactccctggccctgacctgagcccggggaggaacgtggggcaggcgcgggtgggcccagcctcgagctcttcagcacagtgatggtgacggggcagcggtggcggcacagccagcccttcttgggtccccagtcagagccctctgccctacctgggctggacttgtttctgaacagccacaagctacagggggctgccgctgtgtccctggcgaggcactggcccattacaagcaatcgtctggggagggcaccagtggaaagccccgttccaagccatttcaggagggtggccctgcttccgaggagccggagtcagtggccggataagcagagccactcgggagtggtgaggcccggaagggttagcccggtgggcggcagaggagctctggcccgcagggtgtcgggcgaggcaaagtgcaaagcattggtgcgcggggcctcaggcagccacggcggagccgcaggccagggacctgcagtgactcgctctccctcctccctgtgtttggccttagtgtccacaggatgaaatgtccgagtcaggccagtcctcggcggccgccacacccagcaccacaggcaccaagtccaacacgcccacatcctccgtgccctcggccgccgtcacacccctcaacgagagcctgcagcccctgggggactatggcgtgggctccaagaacagcaagcgtgcccgggagaagcgcgacagccgcaacatggaagtacaggtcacccaggagatgcgcaacgtcagtataggcatgggcagcagtgacgagtggtctgatgttcaagacattattgactccacgccagagctggacatgtgtccagagacccgcctggaccgcacaggaagcagcccaacccagggcatcgtgaacaaagctttcggcatcaacaccgactccctgtaccatgagctgtcgacggcagggtctgaggtcatcggggatgtggacgaaggggccgacctcctaggggagttctcaggaatgggcaaagaagtggggaatctgctactggaaaactcacagcttctggaaaccaaaaacgccttgaatgtggtgaagaatgacctgattgccaaggtcgaccagctgtccggggagcaggaggtgctgaggggcgagttggaggctgctaagcaggccaaagtcaagctggaaaaccgtatcaaggagctggaagaggaactgaaaagagtgaagtccgaggccatcatcgcccgccgtgaacccaaagaagaggcggaggatgtaagcagctatctctgtacagaatcggacaaaatccccatggcccagcgccgccgcttcacgcgggtggagatggcccgtgtgctcatggagcggaaccagtacaaggagcggctgatggagctgcaggaggctgtgcggtggactgagatgatcagagcgtcccgagagcacccatccgtccaggagaagaagaagtcgaccatctggcagttcttcagccgcctcttcagctcttcctccagcccccctccggccaagcgcccctatccctcggtgaacatccactacaagtcacccaccactgccggcttcagccagcgccgcaaccatgccatgtgcccgatctcggcaggcagccggcccctggaattcttccctgacgacgactgcacgtcctccgcccgtcgagagcagaagcgcgagcagtaccgccaggtgcgtgagcacgtgcgtaacgacgacggccgtctgcaggcctgcggctggagcctgcccgccaagtacaagcagctgagtcccaacgggggccaggaggacacgcggatgaagaacgtgccggtgccggtgtactgccgccctctggtggagaaggaccccaccatgaagctgtggtgtgccgcgggcgtcaacctgagcgggtggaggcccaatgaggacgacgctgggaatggagtcaagccagcgccaggccgcgatcccctgacctgcgaccgcgaaggagacggcgagcccaagagcgcccacacgtctcccgagaagaagaaggccaaggagctccctgaaatggacgccacctccagccgggtgtggatcctgaccagcaccctgaccaccagcaaggtggtgatcatcgacgccaaccagccgggcacggtggtggaccagttcaccgtctgcaacgcgcacgtgctgtgcatctccagcatccccgcggccagcgacagcgactaccctcccggggagatgttcctggacagcgacgtgaacccagaggacccgggcgcagatggcgtgctggccggtatcaccctggtgggctgtgccacccgctgcaacgtgccgcggagcaactgctcctcccgaggggacaccccagtgctagacaaggggcagggggaggtggccaccatcgccaacgggaaggtcaacccgtcccagtccacagaggaggccacagaggccacggaggtgccagaccctgggcccagcgagccagagacagccacattgcggcccgggcctctcacagagcacgtcttcactgacccagccccgaccccgtcctctggcccccagcctggcagcgagaacgggccagagcctgacagcagcagcacacggccagagccagagcccagcggggaccccacgggagcaggcagcagtgctgcacccaccatgtggctgggagcccagaacggctggctctatgtgcactcggctgtggccaactggaagaagtgcctgcactccatcaagctgaaggattctgtgctgagcctggtgcatgtcaaaggccgtgtgctggtggctctggcggacgggaccctggccatcttccaccgtggtgaagatggccagtgggatctgagcaactatcacctaatggacctgggccacccgcaccactccatccgctgcatggctgttgtgtacgaccgcgtgtggtgtggctacaagaacaaggtgcacgtcatccagcccaagaccatgcagatagagaagtcatttgacgcccacccgcggcgggagagccaggtgcggcagctggcgtggatcggcgatggcgtatgggtgtccatccgcctggactccaccctgaggctctaccatgcacacacgcaccagcatctacaggacgtggacattgagccctacgtcagcaagatgctaggcactggcaagctgggtttctccttcgtacgcatcacggccctgcttgtcgcgggcagccggctctgggtgggcaccggcaacggagtggtcatctccatccccctgacagagactgtggtcctgcaccgaggccagctcctggggctccgagccaataagacatcccccacctctggggagggcgcccgtcccgggggcatcatccacgtgtatggcgatgacagcagtgacagggcggccagcagcttcatcccctactgctccatggcccaggcccagctatgcttccatgggcaccgcgatgccgtgaagttctttgtctcggtgccagggaacgtgctggccaccctgaatggcagtgtgctggacagcccagccgagggccctgggccagctgcccctgcctcggaggtcgagggccagaagctgcggaacgtgctggtgctgagcggcggggagggctacatcgacttccgcattggagacggagaggacgacgagacggaggagggcgcaggggacatgagccaggtgaagcccgtgctgtccaaggcagagcgcagtcacatcatcgtgtggcaggtgtcctacacccccgagtgaagctgctgccctgcctggcccgacctgtacataggacccccgaccacctgacccccgcccggcccgcggggtagccagccaggcgccgccgcccctcttctaacctctcaacctgcagctttcacctgagtctggcccctccagcgggcagggagtgcggggatgcggatcagctgggaggaggaggggaggggtgcttccacccgaggggaagatgctctcgggacagtttcccgggcagctcctggccagcttccagcccagagtcctcaagtccagggcaccttgggcccagcgcaggcagaatccgaggtggtcctggctctaccctgggcctcctactccccagcacccctggaggaggcaggggctccccgccgccgaggctgcctgccctgggcccacctctgcatgctgctcatggggccaccctgcctcctgggccctcactctgcctaggggagctgggccaggcactagcctttgcccagggaggtgggcctcaggctgcccaggtgcctgcaccccagccggccttctctggggcctccccgtcgtcaagcctctatcctgtctgtccccaccccagctgtcccctgcccagggaactggcataaaagcacgaggcccggctccctggggcagctgcttgagaacagagactgctaccccatcctgcccatgcaggcaggctcttgccagccccgttctgacccgtgtccccccaggctctgcctgggcagaagactcaccttggaggagtgggccctggagtcctgtccctcccagaagcccccagggtgggatttctcaggctgccagggcaggcccaggcctcaggaagaaggggaggcccctggcctctccgggatcagtcctaggacacaggctcagcctcaggttgatgggggatgatgtgctcccggggcctgcctcctgcacggggctccacggagcccagctcccagacacgctactaagtgcctagggttgcccgctgtggcctgctcccagggagcaacagagaggccaccaagcagaggcccgtggggctgaggatggagccgcccccagccgactccaagcccgcagagggcagacgccaccctggactgctctccctgcccagctgggcctctctggcctattcctaccttccaggcccactgcactcctgtctgggaggcccttatgagggcagcccagcccccgcacccacccccaaccagagaagcacagatcttggggagctgccccacaagccccgctggccaccgagggctgcagccgctgcgctgccggcttctccccaccaccctgccacctccactgtgatgtatgtccgctccctcgtctgttcccccaggatctcgaagtgactccgggctgagcagtggggcggctgggggaggggtgacgattctcctcaggctttggccctgcaagcaaacccacatatctgctctgtatgtaataaatgtcttaacgtcgtagaagttggagcagacttgtgctaactccaggtagttagtatcataattgaattgaattgtaggacacccagttggtgtttc

SEQ ID NO: 148969 - DNA, 4282 bp, Homo sapiens
  misc_feature (1)..(1): n is a, c, g, or t
nttttcccgggatgggccgacctcctaggggagttctcaggttctcaggaatgggcaaagaagtggggaatctgctactggaaaactcacagcttctggaaaccaaaaacgccttgaatgtggtgaagaatgacctgattgccaaggtcgaccagctgtccggggagcaggaggtgctgaggggcgagttggaggctgctaagcaggccaaagtcaagctggaaaaccgtatcaaggagctggaagaggaactgaaaagagtgaagtccgaggccatcatcgcccgccgtgaacccaaagaagaggcggaggatgacaaaatccccatggcccagcgccgccgcttcacgcgggtggagatggcccgtgtgctcatggagcggaaccagtacaaggagcggctgatggagctgcaggaggctgtgcggtggactgagatgatcagagcgtcccgagagcacccatccgtccaggagaagaagaagtcgaccatctggcagttcttcagccgcctcttcagctcttcctccagcccccctccggccaagcgcccctatccctcggtgaacatccactacaagtcacccaccactgccggcttcagccagcgccgcaaccatgccatgtgcccgatctcggcaggcagccggcccctggaattcttccctgacgacgactgcacgtcctccgcccgtcgagagcagaagcgcgagcagtaccgccaggtgcgtgagcacgtgcgtaacgacgacggccgtctgcaggcctgcggctggagcctgcccgccaagtacaagcagctgagtcccaacgggggccaggaggacacgcggatgaagaacgtgccggtgccggtgtactgccgccctctggtggagaaggaccccaccatgaagctgtggtgtgccgcgggcgtcaacctgagcgggtggaggcccaatgaggacgacgctgggaatggagtcaagccagcgccaggccgcgatcccctgacctgcgaccgcgaaggagacggcgagcccaagagcgcccacacgtctcccgagaagaagaaggccaaggagctccctgaaatggacgccacctccagccgggtgtggatcctgaccagcaccctgaccaccagcaaggtggtgatcatcgacgccaaccagccgggcacggtggtggaccagttcaccgtctgcaacgcgcacgtgctgtgcatctccagcatccccgcggccagcgacagcgactaccctcccggggagatgttcctggacagcgacgtgaacccagaggacccgggcgcagatggcgtgctggccggtatcaccctggtgggctgtgccacccgctgcaacgtgccgcggagcaactgctcctcccgaggggacaccccagtgctagacaaggggcagggggaggtggccaccatcgccaacgggaaggtcaacccgtcccagtccacagaggaggccacagaggccacggaggtgccagaccctgggcccagcgagccagagacagccacattgcggcccgggcctctcacagagcacgtcttcactgacccagccccgaccccgtcctctggcccccagcctggcagcgagaacgggccagagcctgacagcagcagcacacggccagagccagagcccagcggggaccccacgggagcaggcagcagtgctgcacccaccatgtggctgggagcccagaacggctggctctatgtgcactcggctgtggccaactggaagaagtgcctgcactccatcaagctgaaggattctgtgctgagcctggtgcatgtcaaaggccgtgtgctggtggctctggcggacgggaccctggccatcttccaccgtggtgaagatggccagtgggatctgagcaactatcacctaatggacctgggccacccgcaccactccatccgctgcatggctgttgtgtacgaccgcgtgtggtgtggctacaagaacaaggtgcacgtcatccagcccaagaccatgcagatagagaagtcatttgacgcccacccgcggcgggagagccaggtgcggcagctggcgtggatcggcgatggcgtatgggtgtccatccgcctggactccaccctgaggctctaccatgcacacacgcaccagcatctacaggacgtggacattgagccctacgtcagcaagatgctaggcactggcaagctgggtttctccttcgtacgcatcacggccctgcttgtcgcgggcagccggctctgggtgggcaccggcaacggagtggtcatctccatccccctgacagagactgtggtcctgcaccgaggccagctcctggggctccgagccaataagacatcccccacctctggggagggcgcccgtcccgggggcatcatccacgtgtatggcgatgacagcagtgacagggcggccagcagcttcatcccctactgctccatggcccaggcccagctatgcttccatgggcaccgcgatgccgtgaagttctttgtctcggtgccagggaacgtgctggccaccctgaatggcagtgtgctggacagcccagccgagggccctgggccagctgcccctgcctcggaggtcgagggccagaagctgcggaacgtgctggtgctgagcggcggggagggctacatcgacttccgcattggagacggagaggacgacgagacggaggagggcgcaggggacatgagccaggtgaagcccgtgctgtccaaggcagagcgcagtcacatcatcgtgtggcaggtgtcctacacccccgagtgaagctgctgccctgcctggcccgacctgtacataggacccccgaccacctgacccccgcccggcccgcggggtagccagccaggcgccgccgcccctcttctaacctctcaacctgcagctttcacctgagtctggcccctccagcgggcagggagtgcggggatgcggatcagctgggaggaggaggggaggggtgcttccacccgaggggaagatgctctcgggacagtttcccgggcagctcctggccagcttccagcccagagtcctcaagtccagggcaccttgggcccagcgcaggcagaatccgaggtggtcctggctctaccctgggcctcctactccccagcacccctggaggaggcaggggctccccgccgccgaggctgcctgccctgggcccacctctgcatgctgctcatggggccaccctgcctcctgggccctcactctgcctaggggagctgggccaggcactagcctttgcccagggaggtgggcctcaggctgcccaggtgcctgcaccccagccggccttctctggggcctccccgtcgtcaagcctctatcctgtctgtccccaccccagctgtcccctgcccagggaactggcataaaagcacgaggcccggctccctggggcagctgcttgagaacagagactgctaccccatcctgcccatgcaggcaggctcttgccagccccgttctgacccgtgtccccccaggctctgcctgggcagaagactcaccttggaggagtgggccctggagtcctgtccctcccagaagcccccagggtgggatttctcaggctgccagggcaggcccaggcctcaggaagaaggggaggcccctggcctctccgggatcagtcctaggacacaggctcagcctcaggttgatgggggatgatgtgctcccggggcctgcctcctgcacggggctccacggagcccagctcccagacacgctactaagtgcctagggttgcccgctgtggcctgctcccagggagcaacagagaggccaccaagcagaggcccgtggggctgaggatggagccgcccccagccgactccaagcccgcagagggcagacgccaccctggactgctctccctgcccagctgggcctctctggcctattcctaccttccaggcccactgcactcctgtctgggaggcccttatgagggcagcccagcccccgcacccacccccaaccagagaagcacagatcttggggagctgccccacaagccccgctggccaccgagggctgcagccgctgcgctgccggcttctccccaccaccctgccacctccactgtgatgtatgtccgctccctcgtctgttcccccaggatctcgaagtgactccgggctgagcagtggggcggctgggggaggggtgacgattctcctcaggctttggccctgcaagcaaacccacatatctgctctgtatgtaataaatgtcttaacgtcgta

SEQ ID NO: 148970 - DNA, 5694 bp, Homo sapiens
ggcggcggagccctgatggcgacagcagctgcgggaggcgacgggctgcggcctgcggaacctgaggcagctggggagggccgggcgcgccggccggatagcgagccgcgctggcggcggcggtggccgcgatgatggagatccagatggacgagggcggcggcgtggtggtgtaccaggacgactactgctccggctcggtgatgtcggagcgggtgtcgggcctggcgggctccatctaccgcgagttcgagcgcctcatccactgctacgacgaggaggtggtcaaggagctcatgccgctggtggtgaacgtgctggagaacctagactcggtgctcagcgagaaccaggagcacgaggtggagctggagctgctgcgcgaggacaacgagcagctgctcacccagtacgagcgtgagaaggcgctgcgcaggcaggcggaggagaaattcattgagtttgaagatgctctggaacaagagaagaaagagctgcaaatccaggtggagcactacgagttccagacgcgccagctggagctgaaggccaagaactatgccgatcagatttcccggttggaggagcgggagtcggagatgaagaaggagtacaatgccctgcaccagcggcacacagagatgatacagacctacgtggagcacattgagaggtccaagatgcagcaggtcggaggaaacagccagaccgagagcagcctgccggggcggaggaaggagcgccccacctccctgaacgtgttccccctggctgacggcacggtacgtgcacagatcgggggcaagctcgtgcctgcgggggaccactggcacctgagtgacctcggccagctgcagtccagctccagctaccaggttttgtagccgtgccgtggagtgagaggctcctccctgttgctggtgttccccgttcactggggcgggagcctcgtctgcaggcagcccttcacggctctctgggccactcgccctctcccttcgtgtgtggcaggatggagaaacccagccagggtgtcaggggctcaggctgcccagcaggccctgtgtggctgtggctgttccacgcggcctcgtgtcggcacctgctagtccaggctagacctccctgcccttggatagaccgctctgtagccaggggtgtacagtgcctgtcagggttgagcttagtgatcctctctcaaaccacacccccacataaagcctcatgctcacccgggctccagccagacacatcctgcccctgagagccacgcctctactctcggaggaacgtcagtgtctagagtgtggggtttgccctccgttggcagaaaggtgaggagaaagctcctcttctctgggcccctccctgcctgtccctggtaacgcctcctgggtcctgagtttgagaaagcagagcctcgccccagcaggtactcacagccagagtgcgggggccccagcaggttctcacagccagccggtgagtgcacctcagagcacaggggcccagagccaggccactccttcagggccccaggtcgcttgctgccagttttggcctgtgagctcactggcctcagtgccaggtaaggacagccaccttcctgggaagaagaggtgaccccgggtctggtggatttcccacaggggccgtcagaggatgtccacagaggcagagcccttggggcctgtgggctgggttgggctggtggatgtggggcctgggacttctccagaagcttacttcctgctgcatgctttgccgactgtccttccacctctaagtgtccatcgtgcctgtgggggctgctgcaggctcctgctccgtcagcccacctgctgctgcgctgctctgggagcgagctccctcatggcatctggaacgctctcctgtcctccctgtgctcagggctggagagagggtggcggggctgcgggctccccgggccttctgggcccagccctgccacctgggcccacctcctctcactgtctctggctcacgcttcccgggcctggagctgggacctgcccataggcatctgaagacacgtcagcctcagccggggggagcccttgcttgacgctctctggcctccgggctgcctctcgcgcccgctctgggcccgctcttcttctcatgatgtctttcctttcacctcctgcgttgtctgacatcgtcgctctcttcataaattgtagcgttttatgttttcgttcataggagtgttttatttgatttttctttattttaaattattacatttaagttctttttattttatgctctaggttttgaagtttttctaatttcttaatttttttgttgttttttgttttgttttgtttttgtttttatgtactgtattttcagtgttttaaccaaacagttgtggctactcatggtgaggaatgaccgctaagagtttgggttctttcagtgcatttggaggtcactgctacacgttgatgtttaggaggttgagaggtttgcctttaggtaagttgtggccagggggagtgtcccatgggtaagtggtggccctgtagggtgacggagagctaggggaggcgcaatcagactgcagaattccccgcagccaccatgagggtcaggagcaggccggggacccagcgtggaggaaggtggcccagaagcgtttgtctgatgtgcacagctacaccctgcctggccacatggggttccctgttttctctctgccgggtggtggcagagtcggtgagacaccaggtgcctgtgacacattgggtagacaggttctttgagaacgtcagcacagacttcttgcatgagcggtactcgcttcctccagcgtggggagtgacatgaagagcaagggttttcctttcaaactgggcatagctgcagagccacaggccgtctcagacatttctacaaagccactccgggaggcgggctgcgcccgtgtgagggctctccctcggcactgctcatcttttggggctggacatgcatggcctgggccgctgggacgcggtgggtgtggagcagcatccctggcttccacccacgaaagccaggagcacccccttcatttgtgaccacaaaaatgtctctggactttgcaagcatcccctcggggcagtcagcccaactgagaatagctactatagaggaaggtgtgtcattttgagattccttctagagaaacttaggagcctggtagatgaagcagaaatgtgtcctctgagtgagtggccgtgtccggtactgagaggccccgtgccctgagtctggcggtgaccagagaggctgggcagaggcagaggtcagcactggccatgacttctggaagtcccgtctgccctggtcacttaaaggccagtataagtcagctgtggagagggctggataccccctcgacagctcctccctgggtgagatccttagcattagagtcccccacggtgcgccctctgagagaccacgggaacccacccagcggctgcctgggacaggcacaggagccacctgggtgcctctgaggccttgcactttcccacacctcaaggagggccgggggccacgggcaagctctgccatagcgggtgatcaggtcagctaagacgagaacgtttggggctctttttctccagctggttcagtatctttgttaggaaagaccattggaaagaatgtttgtttcgcattccgcattagtcacatagaatgcgctcctccctagcgagcttcctgaggtagacggctggttgcggtttctcgtaatccgggctgcccccaccctccagaatgtcttggtggcgtccctttctgtgagcagggattgtggtttctttgcgcttgctcatgttcaggggtgagctctggtccagtcaagccacagggtcagcaccttctggtcactccctggccctgacctgagcccggggaggaacgtggggcaggcgcgggtgggcccagcctcgagctcttcagcacagtgatggtgacggggcagcggtggcggcacagccagcccttcttgggtccccagtcagagccctctgccctacctgggctggacttgtttctgaacagccacaagctacagggggctgccgctgtgtccctggcgaggcactggcccattacaagcaatcgtctggggagggcaccagtggaaagccccgttccaagccatttcaggagggtggccctgcttccgaggagccggagtcagtggccggataagcagagccactcgggagtggtgaggcccggaagggttagcccggtgggcggcagaggagctctggcccgcagggtgtcgggcgaggcaaagtgcaaagcattggtgcgcggggcctcaggcagccacggcggagccgcaggccagggacctgcagtgactcgctctccctcctccctgtgtttggccttagtgtccacaggatgaaatgtccgagtcaggccagtcctcggcggccgccacacccagcaccacaggcaccaagtccaacacgcccacatcctccgtgccctcggccgccgtcacacccctcaacgagagcctgcagcccctgggggactatggcgtgggctccaagaacagcaagcgtgcccgggagaagcgcgacagccgcaacatggaagtacaggtcacccaggagatgcgcaacgtcagtataggcatgggcagcagtgacgagtggtctgatgttcaagacattattgactccacgccagagctggacatgtgtccagagacccgcctggaccgcacaggaagcagcccaacccagggcatcgtgaacaaagctttcggcatcaacaccgactccctgtaccatgagctgtcgacggcagggtctgaggtcatcggggatgtggacgaaggggccgacctcctaggggagttctcaggaatgggcaaagaagtggggaatctgctactggaaaactcacagcttctggaaaccaaaaacgccttgaatgtggtgaagaatgacctgattgccaaggtcgaccagctgtccggggagcaggaggtgctgaggggcgagttggaggctgctaagcaggccaaagtcaagctggaaaaccgtatcaaggagctggaagaggaactgaaaagagtgaagtccgaggccatcatcgcccgccgtgaacccaaagaagaggcggaggatgtaagcagctatctctgtacagaatcggacaaaatccccatggcccagcgccgccgcttcacgcgggtggagatggcccgtgtgctcatggagcggaaccagtacaaggagcggctgatggagctgcaggaggctgtgcggtggactgagatgatcagagcgtcccgagagcacccatccgtccaggagaagaagaagtcgaccatctggcagttcttcagccgcctcttcagctcttcctccagcccccctccggccaagcgcccctatccctcggtgaacatccactacaagtcacccaccgagggctgcagccgctgcgctgccggcttctccccaccaccctgccacctccactgtgatgtatgtccgctccctcgtctgttcccccaggatctcgaagtgactccgggctgagcagtggggcggctgggggaggggtgacgattctcctcaggctttggccctgcaagcaaacccacatatctgctctgtatgtaataaatgtcttaacgtcgta

SEQ ID NO: 148971 - DNA, 5630 bp, Homo sapiens
ggcggcggagccctgatggcgacagcagctgcgggaggcgacgggctgcggcctgcggaacctgaggcagctggggagggccgggcgcgccggccggatagcgagccgcgctggcggcggcggtggccgcgatgatggagatccagatggacgagggcggcggcgtggtggtgtaccaggacgactactgctccggctcggtgatgtcggagcgggtgtcgggcctggcgggctccatctaccgcgagttcgagcgcctcatccactgctacgacgaggaggtggtcaaggagctcatgccgctggtggtgaacgtgctggagaacctagactcggtgctcagcgagaaccaggagcacgaggtggagctggagctgctgcgcgaggacaacgagcagctgctcacccagtacgagcgtgagaaggcgctgcgcaggcaggcggaggagaaattcattgagtttgaagatgctctggaacaagagaagaaagagctgcaaatccaggtggagcactacgagttccagacgcgccagctggagctgaaggccaagaactatgccgatcagatttcccggttggaggagcgggagtcggagatgaagaaggagtacaatgccctgcaccagcggcacacagagatgatacagacctacgtggagcacattgagaggtccaagatgcagcaggtcggaggaaacagccagaccgagagcagcctgccggggcggaggaaggagcgccccacctccctgaacgtgttccccctggctgacggcacggtacgtgcacagatcgggggcaagctcgtgcctgcgggggaccactggcacctgagtgacctcggccagctgcagtccagctccagctaccaggttttgtagccgtgccgtggagtgagaggctcctccctgttgctggtgttccccgttcactggggcgggagcctcgtctgcaggcagcccttcacggctctctgggccactcgccctctcccttcgtgtgtggcaggatggagaaacccagccagggtgtcaggggctcaggctgcccagcaggccctgtgtggctgtggctgttccacgcggcctcgtgtcggcacctgctagtccaggctagacctccctgcccttggatagaccgctctgtagccaggggtgtacagtgcctgtcagggttgagcttagtgatcctctctcaaaccacacccccacataaagcctcatgctcacccgggctccagccagacacatcctgcccctgagagccacgcctctactctcggaggaacgtcagtgtctagagtgtggggtttgccctccgttggcagaaaggtgaggagaaagctcctcttctctgggcccctccctgcctgtccctggtaacgcctcctgggtcctgagtttgagaaagcagagcctcgccccagcaggtactcacagccagagtgcgggggccccagcaggttctcacagccagccggtgagtgcacctcagagcacaggggcccagagccaggccactccttcagggccccaggtcgcttgctgccagttttggcctgtgagctcactggcctcagtgccaggtaaggacagccaccttcctgggaagaagaggtgaccccgggtctggtggatttcccacaggggccgtcagaggatgtccacagaggcagagcccttggggcctgtgggctgggttgggctggtggatgtggggcctgggacttctccagaagcttacttcctgctgcatgctttgccgactgtccttccacctctaagtgtccatcgtgcctgtgggggctgctgcaggctcctgctccgtcagcccacctgctgctgcgctgctctgggagcgagctccctcatggcatctggaacgctctcctgtcctccctgtgctcagggctggagagagggtggcggggctgcgggctccccgggccttctgggcccagccctgccacctgggcccacctcctctcactgtctctggctcacgcttcccgggcctggagctgggacctgcccataggcatctgaagacacgtcagcctcagccggggggagcccttgcttgacgctctctggcctccgggctgcctctcgcgcccgctctgggcccgctcttcttctcatgatgtctttcctttcacctcctgcgttgtctgacatcgtcgctctcttcataaattgtagcgttttatgttttcgttcataggagtgttttatttgatttttctttattttaaattattacatttaagttctttttattttatgctctaggttttgaagtttttctaatttcttaatttttttgttgttttttgttttgttttgtttttgtttttatgtactgtattttcagtgttttaaccaaacagttgtggctactcatggtgaggaatgaccgctaagagtttgggttctttcagtgcatttggaggtcactgctacacgttgatgtttaggaggttgagaggtttgcctttaggtaagttgtggccagggggagtgtcccatgggtaagtggtggccctgtagggtgacggagagctaggggaggcgcaatcagactgcagaattccccgcagccaccatgagggtcaggagcaggccggggacccagcgtggaggaaggtggcccagaagcgtttgtctgatgtgcacagctacaccctgcctggccacatggggttccctgttttctctctgccgggtggtggcagagtcggtgagacaccaggtgcctgtgacacattgggtagacaggttctttgagaacgtcagcacagacttcttgcatgagcggtactcgcttcctccagcgtggggagtgacatgaagagcaagggttttcctttcaaactgggcatagctgcagagccacaggccgtctcagacatttctacaaagccactccgggaggcgggctgcgcccgtgtgagggctctccctcggcactgctcatcttttggggctggacatgcatggcctgggccgctgggacgcggtgggtgtggagcagcatccctggcttccacccacgaaagccaggagcacccccttcatttgtgaccacaaaaatgtctctggactttgcaagcatcccctcggggcagtcagcccaactgagaatagctactatagaggaaggtgtgtcattttgagattccttctagagaaacttaggagcctggtagatgaagcagaaatgtgtcctctgagtgagtggccgtgtccggtactgagaggccccgtgccctgagtctggcggtgaccagagaggctgggcagaggcagaggtcagcactggccatgacttctggaagtcccgtctgccctggtcacttaaaggccagtataagtcagctgtggagagggctggataccccctcgacagctcctccctgggtgagatccttagcattagagtcccccacggtgcgccctctgagagaccacgggaacccacccagcggctgcctgggacaggcacaggagccacctgggtgcctctgaggccttgcactttcccacacctcaaggagggccgggggccacgggcaagctctgccatagcgggtgatcaggtcagctaagacgagaacgtttggggctctttttctccagctggttcagtatctttgttaggaaagaccattggaaagaatgtttgtttcgcattccgcattagtcacatagaatgcgctcctccctagcgagcttcctgaggtagacggctggttgcggtttctcgtaatccgggctgcccccaccctccagaatgtcttggtggcgtccctttctgtgagcagggattgtggtttctttgcgcttgctcatgttcaggggtgagctctggtccagtcaagccacagggtcagcaccttctggtcactccctggccctgacctgagcccggggaggaacgtggggcaggcgcgggtgggcccagcctcgagctcttcagcacagtgatggtgacggggcagcggtggcggcacagccagcccttcttgggtccccagtcagagccctctgccctacctgggctggacttgtttctgaacagccacaagctacagggggctgccgctgtgtccctggcgaggcactggcccattacaagcaatcgtctggggagggcaccagtggaaagccccgttccaagccatttcaggagggtggccctgcttccgaggagccggagtcagtggccggataagcagagccactcgggagtggtgaggcccggaagggttagcccggtgggcggcagaggagctctggcccgcagggtgtcgggcgaggcaaagtgcaaagcattggtgcgcggggcctcaggcagccacggcggagccgcaggccagggacctgcagtgactcgctctccctcctccctgtgtttggccttagtgtccacaggatgaaatgtccgagtcaggccagtcctcggcggccgccacacccagcaccacaggcaccaagtccaacacgcccacatcctccgtgccctcggccgccgtcacacccctcaacgagagcctgcagcccctgggggactatggcgtgggctccaagaacagcaagcgtgcccgggagaagcgcgacagccgcaacatggaagtacaggtcacccaggagatgcgcaacgtcagtataggcatgggcagcagtgacgagtggtctgatgttcaagacattattgactccacgccagagctggacatgtgtccagagacccgcctggaccgcacaggaagcagcccaacccagggcatcgtgaacaaagctttcggcatcaacaccgactccctgtaccatgagctgtcgacggcagggtctgaggtcatcggggatgtggacgaaggggccgacctcctaggggagttctcaggaatgggcaaagaagtggggaatctgctactggaaaactcacagcttctggaaaccaaaaacgccttgaatgtggtgaagaatgacctgattgccaaggtcgaccagctgtccggggagcaggaggtgctgaggggcgagttggaggctgctaagcaggccaaagtcaagctggaaaaccgtatcaaggagctggaagaggaactgaaaagagtgaagtccgaggccatcatcgcccgccgtgaacccaaagaagaggcggaggatgtaagcagctatctctgtacagaatcggtacatccactcttcactcttcacatgcggggcgtccaccattcacttttcacaggcggggcggccaccgttcaccattcacacacagggtgaccaccattcaccattcacaggcagagcggccaccattcaccattcacaggcggggcggccaccattcaccattcacaggcggggcggccaccattcaccattcccaggcggggcggccactgttcccacacattcacacgccgggtgaccactgttcatacgcattcacacgtggggcagccatcattcccacacattcacacgctgggcggccaccattcaccattcaccattcacacacagtatatcctactattcacactcggggcatggggatgcggggtgcctcccggggactcaccggcgcttctgtctctgtacagaatcagtatatcc

SEQ ID NO: 148972 - DNA, 2574 bp, Homo sapiens
gcagaggggccagaaccaccagaggagagccagggctaggagcaggaacaggatcagcagggcgatggccaggatggaaccgtcagaacagtgtgtggtggtgatgatgacagaactggagataaaagagaggccatcgttcatgctgacctggagtgcagctttcatgccaacttcttttaagataggcgctggctgggaggtctgaggggactgcaggtggccctggagctgtggcaggtttggggctccccacttcctctcctctccccagccctgttgatgggcagccatgactccacagaagtcatttgacgcccacccgcggcgggagagccaggtgcggcagctggcgtggatcggcgatggcgtatgggtgtccatccgcctggactccaccctgaggctctaccatgcacacacgcaccagcatctacaggacgtggacattgagccctacgtcagcaagatgctaggcactggcaagctgggtttctccttcgtacgcatcacggccctgcttgtcgcgggcagccggctctgggtgggcaccggcaacggagtggtcatctccatccccctgacagagactgtggtcctgcaccgaggccagctcctggggctccgagccaataagacatcccccacctctggggagggcgcccgtcccgggggcatcatccacgtgtatggcgatgacagcagtgacagggcggccagcagcttcatcccctactgctccatggcccaggcccagctatgcttccatgggcaccgcgatgccgtgaagttctttgtctcggtgccagggaacgtgctggccaccctgaatggcagtgtgctggacagcccagccgagggccctgggccagctgcccctgcctcggaggtcgagggccagaagctgcggaacgtgctggtgctgagcggcggggagggctacatcgacttccgcattggagacggagaggacgacgagacggaggagggcgcaggggacatgagccaggtgaagcccgtgctgtccaaggcagagcgcagtcacatcatcgtgtggcaggtgtcctacacccccgagtgaagctgctgccctgcctggcccgacctgtacataggacccccgaccacctgacccccgcccggcccgcggggtagccagccaggcgccgccgcccctcttctaacctctcaacctgcagctttcacctgagtctggcccctccagcgggcagggagtgcggggatgcggatcagctgggaggaggaggggaggggtgcttccacccgaggggaagatgctctcgggacagtttcccgggcagctcctggccagcttccagcccagagtcctcaagtccagggcaccttgggcccagcgcaggcagaatccgaggtggtcctggctctaccctgggcctcctactccccagcacccctggaggaggcaggggctccccgccgccgaggctgcctgccctgggcccacctctgcatgctgctcatggggccaccctgcctcctgggccctcactctgcctaggggagctgggccaggcactagcctttgcccagggaggtgggcctcaggctgcccaggtgcctgcaccccagccggccttctctggggcctccccgtcgtcaagcctctatcctgtctgtccccaccccagctgtcccctgcccagggaactggcataaaagcacgaggcccggctccctggggcagctgcttgagaacagagactgctaccccatcctgcccatgcaggcaggctcttgccagccccgttctgacccgtgtccccccaggctctgcctgggcagaagactcaccttggaggagtgggccctggagtcctgtccctcccagaagcccccagggtgggatttctcaggctgccagggcaggcccaggcctcaggaagaaggggaggcccctggcctctccgggatcagtcctaggacacaggctcagcctcaggttgatgggggatgatgtgctcccggggcctgcctcctgcacggggctccacggagcccagctcccagacacgctactaagtgcctagggttgcccgctgtggcctgctcccagggagcaacagagaggccaccaagcagaggcccgtggggctgaggatggagccgcccccagccgactccaagcccgcagagggcagacgccaccctggactgctctccctgcccagctgggcctctctggcctattcctaccttccaggcccactgcactcctgtctgggaggcccttatgagggcagcccagcccccgcacccacccccaaccagagaagcacagatcttggggagctgccccacaagccccgctggccaccgagggctgcagccgctgcgctgccggcttctccccaccaccctgccacctccactgtgatgtatgtccgctccctcgtctgttcccccaggatctcgaagtgactccgggctgagcagtggggcggctgggggaggggtgacgattctcctcaggctttggccctgcaagcaaacccacatatctgctctgtatgtaataaatgtcttaacgtcgta

SEQ ID NO: 148973 - DNA, 1939 bp, Homo sapiens
ccccgtactagtacgacagtccccgactagcccgacagccccgactagccctgacagccccgactagccctgacagggcggccagcagcttcatcccctactgctccatggcccaggcccagctatgcttccatgggcaccgcgatgccgtgaagttctttgtctcggtgccagggaacgtgctggccaccctgaatggcagtgtgctggacagcccagccgagggccctgggccagctgcccctgcctcggaggtcgagggccagaagctgcggaacgtgctggtgctgagcggcggggagggctacatcgacttccgcattggagacggagaggacgacgagacggaggagggcgcaggggacatgagccaggtgaagcccgtgctgtccaaggcagagcgcagtcacatcatcgtgtggcaggtgtcctacacccccgagtgaagctgctgccctgcctggcccgacctgtacataggacccccgaccacctgacccccgcccggcccgcggggtagccagccaggcgccgccgcccctcttctaacctctcaacctgcagctttcacctgagtctggcccctccagcgggcagggagtgcggggatgcggatcagctgggaggaggaggggaggggtgcttccacccgaggggaagatgctctcgggacagtttcccgggcagctcctggccagcttccagcccagagtcctcaagtccagggcaccttgggcccagcgcaggcagaatccgaggtggtcctggctctaccctgggcctcctactccccagcacccctggaggaggcaggggctccccgccgccgaggctgcctgccctgggcccacctctgcatgctgctcatggggccaccctgcctcctgggccctcactctgcctaggggagctgggccaggcactagcctttgcccagggaggtgggcctcaggctgcccaggtgcctgcaccccagccggccttctctggggcctccccgtcgtcaagcctctatcctgtctgtccccaccccagctgtcccctgcccagggaactggcataaaagcacgaggcccggctccctggggcagctgcttgagaacagagactgctaccccatcctgcccatgcaggcaggctcttgccagccccgttctgacccgtgtccccccaggctctgcctgggcagaagactcaccttggaggagtgggccctggagtcctgtccctcccagaagcccccagggtgggatttctcaggctgccagggcaggcccaggcctcaggaagaaggggaggcccctggcctctccgggatcagtcctaggacacaggctcagcctcaggttgatgggggatgatgtgctcccggggcctgcctcctgcacggggctccacggagcccagctcccagacacgctactaagtgcctagggttgcccgctgtggcctgctcccagggagcaacagagaggccaccaagcagaggcccgtggggctgaggatggagccgcccccagccgactccaagcccgcagagggcagacgccaccctggactgctctccctgcccagctgggcctctctggcctattcctaccttccaggcccactgcactcctgtctgggaggcccttatgagggcagcccagcccccgcacccacccccaaccagagaagcacagatcttggggagctgccccacaagccccgctggccaccgagggctgcagccgctgcgctgccggcttctccccaccaccctgccacctccactgtgatgtatgtccgctccctcgtctgttcccccaggatctcgaagtgactccgggctgagcagtggggcggctgggggaggggtgacgattctcctcaggctttggccctgcaagcaaacccacatatctgctctgtatgtaataaatgtcttaacgtcgta

SEQ ID NO: 148974 - DNA, 4978 bp, Homo sapiens
ggcggcggagccctgatggcgacagcagctgcgggaggcgacgggctgcggcctgcggaacctgaggcagctggggagggccgggcgcgccggccggatagcgagccgcgctggcggcggcggtggccgcgatgatggagatccagatggacgagggcggcggcgtggtggtgtaccaggacgactactgctccggctcggtgatgtcggagcgggtgtcgggcctggcgggctccatctaccgcgagttcgagcgcctcatccactgctacgacgaggaggtggtcaaggagctcatgccgctggtggtgaacgtgctggagaacctagactcggtgctcagcgagaaccaggagcacgaggtggagctggagctgctgcgcgaggacaacgagcagctgctcacccagtacgagcgtgagaaggcgctgcgcaggcaggcggaggagaaattcattgagtttgaagatgctctggaacaagagaagaaagagctgcaaatccaggtggagcactacgagttccagacgcgccagctggagctgaaggccaagaactatgccgatcagatttcccggttggaggagcgggagtcggagatgaagaaggagtacaatgccctgcaccagcggcacacagagatgatacagacctacgtggagcacattgagaggtccaagatgcagcaggtcggaggaaacagccagaccgagagcagcctgccggggcggaggaaggagcgccccacctccctgaacgtgttccccctggctgacggcacggtacgtgcacagatcgggggcaagctcgtgcctgcgggggaccactggcacctgagtgacctcggccagctgcagtccagctccagctaccaggttttgtagccgtgccgtggagtgagaggctcctccctgttgctggtgttccccgttcactggggcgggagcctcgtctgcaggcagcccttcacggctctctgggccactcgccctctcccttcgtgtgtggcaggatggagaaacccagccagggtgtcaggggctcaggctgcccagcaggccctgtgtggctgtggctgttccacgcggcctcgtgtcggcacctgctagtccaggctagacctccctgcccttggatagaccgctctgtagccaggggtgtacagtgcctgtcagggttgagcttagtgatcctctctcaaaccacacccccacataaagcctcatgctcacccgggctccagccagacacatcctgcccctgagagccacgcctctactctcggaggaacgtcagtgtctagagtgtggggtttgccctccgttggcagaaaggtgaggagaaagctcctcttctctgggcccctccctgcctgtccctggtaacgcctcctgggtcctgagtttgagaaagcagagcctcgccccagcaggtactcacagccagagtgcgggggccccagcaggttctcacagccagccggtgagtgcacctcagagcacaggggcccagagccaggccactccttcagggccccaggtcgcttgctgccagttttggcctgtgagctcactggcctcagtgccaggtaaggacagccaccttcctgggaagaagaggtgaccccgggtctggtggatttcccacaggggccgtcagaggatgtccacagaggcagagcccttggggcctgtgggctgggttgggctggtggatgtggggcctgggacttctccagaagcttacttcctgctgcatgctttgccgactgtccttccacctctaagtgtccatcgtgcctgtgggggctgctgcaggctcctgctccgtcagcccacctgctgctgcgctgctctgggagcgagctccctcatggcatctggaacgctctcctgtcctccctgtgctcagggctggagagagggtggcggggctgcgggctccccgggccttctgggcccagccctgccacctgggcccacctcctctcactgtctctggctcacgcttcccgggcctggagctgggacctgcccataggcatctgaagacacgtcagcctcagccggggggagcccttgcttgacgctctctggcctccgggctgcctctcgcgcccgctctgggcccgctcttcttctcatgatgtctttcctttcacctcctgcgttgtctgacatcgtcgctctcttcataaattgtagcgttttatgttttcgttcataggagtgttttatttgatttttctttattttaaattattacatttaagttctttttattttatgctctaggttttgaagtttttctaatttcttaatttttttgttgttttttgttttgttttgtttttgtttttatgtactgtattttcagtgttttaaccaaacagttgtggctactcatggtgaggaatgaccgctaagagtttgggttctttcagtgcatttggaggtcactgctacacgttgatgtttaggaggttgagaggtttgcctttaggtaagttgtggccagggggagtgtcccatgggtaagtggtggccctgtagggtgacggagagctaggggaggcgcaatcagactgcagaattccccgcagccaccatgagggtcaggagcaggccggggacccagcgtggaggaaggtggcccagaagcgtttgtctgatgtgcacagctacaccctgcctggccacatggggttccctgttttctctctgccgggtggtggcagagtcggtgagacaccaggtgcctgtgacacattgggtagacaggttctttgagaacgtcagcacagacttcttgcatgagcggtactcgcttcctccagcgtggggagtgacatgaagagcaagggttttcctttcaaactgggcatagctgcagagccacaggccgtctcagacatttctacaaagccactccgggaggcgggctgcgcccgtgtgagggctctccctcggcactgctcatcttttggggctggacatgcatggcctgggccgctgggacgcggtgggtgtggagcagcatccctggcttccacccacgaaagccaggagcacccccttcatttgtgaccacaaaaatgtctctggactttgcaagcatcccctcggggcagtcagcccaactgagaatagctactatagaggaaggtgtgtcattttgagattccttctagagaaacttaggagcctggtagatgaagcagaaatgtgtcctctgagtgagtggccgtgtccggtactgagaggccccgtgccctgagtctggcggtgaccagagaggctgggcagaggcagaggtcagcactggccatgacttctggaagtcccgtctgccctggtcacttaaaggccagtataagtcagctgtggagagggctggataccccctcgacagctcctccctgggtgagatccttagcattagagtcccccacggtgcgccctctgagagaccacgggaacccacccagcggctgcctgggacaggcacaggagccacctgggtgcctctgaggccttgcactttcccacacctcaaggagggccgggggccacgggcaagctctgccatagcgggtgatcaggtcagctaagacgagaacgtttggggctctttttctccagctggttcagtatctttgttaggaaagaccattggaaagaatgtttgtttcgcattccgcattagtcacatagaatgcgctcctccctagcgagcttcctgaggtagacggctggttgcggtttctcgtaatccgggctgcccccaccctccagaatgtcttggtggcgtccctttctgtgagcagggattgtggtttctttgcgcttgctcatgttcaggggtgagctctggtccagtcaagccacagggtcagcaccttctggtcactccctggccctgacctgagcccggggaggaacgtggggcaggcgcgggtgggcccagcctcgagctcttcagcacagtgatggtgacggggcagcggtggcggcacagccagcccttcttgggtccccagtcagagccctctgccctacctgggctggacttgtttctgaacagccacaagctacagggggctgccgctgtgtccctggcgaggcactggcccattacaagcaatcgtctggggagggcaccagtggaaagccccgttccaagccatttcaggagggtggccctgcttccgaggagccggagtcagtggccggataagcagagccactcgggagtggtgaggcccggaagggttagcccggtgggcggcagaggagctctggcccgcagggtgtcgggcgaggcaaagtgcaaagcattggtgcgcggggcctcaggcagccacggcggagccgcaggccagggacctgcagtgactcgctctccctcctccctgtgtttggccttagtgtccacaggatgaaatgtccgagtcaggccagtcctcggcggccgccacacccagcaccacaggcaccaagtccaacacgcccacatcctccgtgccctcggccgccgtcacacccctcaacgagagcctgcagcccctgggggactatggcgtgggctccaagaacagcaagcgtgcccgggagaagcgcgacagccgcaacatggaagtacaggtcacccaggagatgcgcaacgtcagtataggcatgggcagcagtgacgagtggtctgatgttcaagacattattgactccacgccagagctggacatgtgtccagagacccgcctggaccgcacaggaagcagcccaacccagggcatcgtgaacaaagctttcggcatcaacaccgactccctgtaccatgagctgtcgacggcagggtctgaggtcatcggggatgtggacgaaggggccgacctcctaggggaaagcgcaagccttcccccgcaccgctgtgcctgcacaatgctggggctttctgctgttggttttgtttgtaatgaaag

SEQ ID NO: 148975 - DNA, 687 bp, Homo sapiens
tgtcatgtgacatcttagaggatcccgctgctcatgggcgaaagtgagaccttgccacatcgggatcagtcctaggacacaggctcagcctcaggttgatgggggatgatgtgctcccggggcctgcctcctgcacggggctccacggagcccagctcccagacacgctactaagtgcctagggttgcccgctgtggcctgctcccagggagcaacagagaggccaccaagcagaggcccgtggggctgaggatggagccgcccccagccgactccaagcccgcagagggcagacgccaccctggactgctctccctgcccagctgggcctctctggcctattcctaccttccaggcccactgcactcctgtctgggaggcccttatgagggcagcccagcccccgcacccacccccaaccagagaagcacagatcttggggagctgccccacaagccccgctggccaccgagggctgcagccgctgcgctgccggcttctccccaccaccctgccacctccactgtgatgtatgtccgctccctcgtctgttcccccaggatctcgaagtgactccgggctgagcagtggggcggctgggggaggggtgacgattctcctcaggctttggccctgcaagcaaacccacatatctgctctgtatgtaataaatgtcttaacgtcgta

SEQ ID NO: 148976 - DNA, 322 bp, Homo sapiens
tgcctttcctagtactaacatgctgagaaagcttaagtagttatcagatggttacttgataaatgtgcaagtcaaatacagctttatacacggaagaatcacatctgttctttgttctactggtgcccagcacatagtagataactcagtaaatattgttgaatgaatgggtgaatccaggcccttgtgggtcctccttactgcagcatatatctctaggaactataaagtcatctcctcaaattcagcatctctctggagaatgctagactctaactctttaaaattatctttttcaggggtggcactgtgctgtggtggg

SEQ ID NO: 148977 - DNA, 718 bp, Homo sapiens
tttacatcttgttaagttcccctgcccaccctcttccccccgcttctggctttgcctttgtttgaatatctaattctctgcttaacaggatcaagaagaggactgtaagagcaggaaaatttcacattttcagaaaacactctctatttatgcatgactgctgatggcatattgaatagaacagagtaccacccacccaatatctgttgttactttcaaaagacaaaaaccttacatataaccacacacagagcatgcagtcctgaagtttcaaaatcactcgattccctctccctgctccaattactggcataatatttataaacagtatacaaaatatgttttgatgacacttgtttttaagagttggaaaacattttcccactttaggaaagctccatgatatatagcttaactctagaattagtgtcattaagtgttaatattctaacaaaacatgtaagtttaccttcctctattggcattacataaaatttaaatgtaaagagtacaaactgcctgaaaaaaatgatatctagtagaaaagacattaaatgaggctgattctgatctgaacattctttgattacgagtacaaaaagtatcaaatattctaagaaatactaaatgacatagagactatatcttgtactcaagtatcacagagtaagaggacgaaaaactaaaactgaggactatactgcttacaaggataagg

SEQ ID NO: 148978 - DNA, 832 bp, Homo sapiens
tcaaatcaagtgcattttattttctgtgtgtaggtccgctaaggagtttcatgttagggcccatgaatgtatacattggcagtatgtgcacaaacacactgtggttcttgatttctggaagaattcaagtacagagttccaaaatctcctttatcactcgacatacagaaccctcttgtcttgagtttgggagttaattttgctctttgtccatattgtccacaatcttttgtgtagccttttgtaaatgtaagcaaatactgattatttactttgtgctaggcttataatcctttgcatccaagaataggattgctgacatagtctgcttataaatctctttttctgtgtggtactgtgtctgaaatgaccatatatgaactgaagcccaggtcattctacttatccgaattttccagcctatcattaaaaaggatatgctcttctctgccattctcctgaagagttcaggaatcaaaaagacactaaattggaattaacaatcaaatatttggaaatttttaaattagaaagttaactgtatcattttaaactcaaaatttaaaaaataatttgatttgatccctacgtcattggatccctggagatattcatgttcagatattcttgttcagatattcttaatgtgttgttttcctgccttttgtccccatcggttttaatttttattgtttggtttcttctgataaatggactctttgaattgagctgtatagaacacaattttatgtctatgctttacaactgttctacaagtcttcattatgtgacgttttctccatctgttactattaatgaacaaaatatctat

SEQ ID NO: 148979 - DNA, 472 bp, Homo sapiens
tgaaagcataaagaagcaatgtaatcacaagcaggttacgtattttctagtacaaaaaataatttcttacctttaataagaatagatatcacaagtaattcctaggtattaaaacatataatgttggtctaacacctagatacttcctaagagtagtgttcacaataaaactctctgcttttcaatccccacccccttcaaattggggcagttgagatatcacttcagtagcatttgggaattcagtagcaagagggaatatttgcggactcagatgatcacagctggaagaaggactctggaaggcatccagtgtagtttctattccgaccaccctggacacagcacccagcctttgatcacatctcctgctggcagctctctacttcccacacagtctgctggatggctctaagggatagggttcttccttttctttgagatggagtcttgctctgttgcccaggctgta

SEQ ID NO: 148980 - DNA, 436 bp, Homo sapiens
tgataagaatttttttggcatggaaatgatgtattttattgcctttaacttctaatacccccttaattacaaacataatggatgttttactggggatattgtatatgcagcagttgtttaaacctgaaatagaaatgctaagagggaaaagtattcaagtccagtgtagcccaatgctgaaagataaaattgcagcttttgacattttaccaaattattgattgtgttctctggctggctttaaaaaacttaatgcagtgagtaggttaaaaaaaaaaaaaaaaaagaagaagaagaagaaaatggctgggaaagcataaaggcaaaacagttttaaaaaagtatgagaaagcttaaggcctaactcaaatgataagcagtagattttatggcaatggtgccagacagccggggtttgtatcttgactcttcctac

SEQ ID NO: 148981 - DNA, 264 bp, Homo sapiens
ctaaaattgaatgtggtgatggttgcaaaattctgaatatactaaagaccactgtacttcaagggataaattgtatggtgtgttttatattttaataattcagttatttaaataaaataattaaacccaacaagattgaaaagagagactaagactgattcctaataaactgaatgttatactaagtaagcgatagcatgctactgaaactttctgtgccacatatttttcatttgttaagtgcaccctaatgagatagggtgg

SEQ ID NO: 148982 - DNA, 495 bp, Homo sapiens
tacaaagctgagtgattcatcgttcctgacctccaggagcacaatctaatgaagaatatggaaaaggaaaaagaggaatttcctaagggctccaataaaggcacaagcagattgggggagcagagagcttggcttgaggatgattatgtaagggctggagctaaggcagagtttctcaaacttggcactactggccttttagcttggaccattcattgttgccctgtgtatcggaggatgttcagcagcatcctcggcctcaacccattagatatgtgcactccccctaaaaactgtcgccagacattggaaacgttccctgggggcaagattgctgcctttagagaagcactgagctaaggcctttgggacatgtttgtttatttactccataacattcttgaggaacttactgcaaacaagtggtgagaataacaagagggaaggacaaagtcctcacacgaaggacctcaaagtctggcgggaactagagtg

SEQ ID NO: 148983 - DNA, 430 bp, Homo sapiens
agaagagtgcctgaaagataacaggggctcaataaatacctgctgaatgatcaactagtgaatattctgggccctttaagggattctccaactctcttttcttacccaagctgcatcttgctttaggccagtggttctcaacctggggctaatttttgcccccagtcaggggatatctgtattttttgttgtcacagttagagaagttcctactggcatttagagggtagatgccagggacgctgctaaacatcttacagtgcacaggacagccctgttccacagagatttatctggccccaaaggttaatagggccaaagttatgaaactctgatttatgccctttgtttctattgggctgtacctgggagtcagatcctctgcatatttggaatgaagttcagtcctaaaggaagcaccccagaaaag

SEQ ID NO: 148984 - DNA, 345 bp, Homo sapiens
ctcgatctcctgacctcatgatctgcctgcctcagcctcccaaagtgctgggattacaggcatgatgagctaccgcacccggtcccccataagtactttaaataccagctgattttaacaatgagccctagagaaactgatgaaatgcatgtatacggtgtgtacataatttgagagggttcacaaatctccatcccattcatggaccccagcttaaaaaccagcaatatagtatttaaaatccaactgcattttttttttattttattttactactgttttttttctcttttgagtgggggtctcactctatcacccaggctggagtacaatgtcacaatctca

SEQ ID NO: 148985 - DNA, 345 bp, Homo sapiens
gtcattttcgcaaattactggaagatggcagttccagctgaaaagcgcagtcttaagagctctactgaaagcctttacagaacctgtcttaattacagaacccacttaatttttgccgagtgtttctcaaactttagtgtacatcagaatcatctagaaggcttgttgaaactcacatggctgggtccaggcctataaattcttattcagcaggtctagggtgggggcctaagaactgcatttctagtaagttcccaaatgatacttatgctgctggtccaggaattacactttgaaaaccactattctagcccaaactaaaaaacaaaacacaataccgtctgt

SEQ ID NO: 148986 - DNA, 178 bp, Homo sapiens
agaatacctatcagttactgaacatggaaccagctgcctcagacttgcagcttcattgatcaccagaaccaatttggttgagccctggaaaatgtaatggtccactgcactcccttactgttctgtgggggacttgttcaaagttgtgggcctagtataaaaggatcttcttttctgg

SEQ ID NO: 148987 - DNA, 551 bp, Homo sapiens
gttacccggcaagtttacagagagggaaggagagcagaatatttctgcccagaagttgcatcaagatgaccaagttgccatgaataaatcatcacagaattttgaactggaaaacagaaacaaaagcattgaaagctaaaatgctcgcgtaatcctttcttgattctgtgtatcacccttggagaagtctgcattgtctcttgctgtaggatgactgcatgggacacacttagtgactcttctgaagaagctttctggtctgctttccttttcccatggtttttaaagagaatctagctttcttgcccctgccttctgctaaaataaatgttaaaaaaaaactggaaaaattagtgacctacagttttccagggataagactcacctatggagaagcattattccgacgacgttttttgctgaacttgaagcattatttccagagaaaggacagactaactctccaaatcgttatccagcttgacagaaatcaatgaaatccactagtggaaattcacatttcacccaacaacgtgaaaaggcaaataaat

SEQ ID NO: 148988 - DNA, 211 bp, Homo sapiens
gtgtatctgcgatccttttgctactccacaaacagacaccttccacgttactatacagctcccgccgcagctctctggaaatgggcttcaaatgcatgaagttgcagaagccgcctcgtgtgcattctcccatctcatactgacggcagcaggctcccctgaagtccgtcacaggtgacagctcggcgtggatcggctgtccgttaaacca

SEQ ID NO: 148989 - DNA, 367 bp, Homo sapiens
tcaatgcttcaacctcctgttagtaagtggcagggccaggaggggagcctggggtgcctggtcccagcccccatgttcttcacagctacgtcacactggcttccatggcacatggcaagcactaatgcacaataaggatgataataagggggagggagcagcagagcacagagagctgcacaagtttagtgattaacttggattttgtcctaaatgagaagggaagcgagcaggaagtgatagggttagagctctatttctaagacatcggatcacaggaagaccagttgctggggcagggatgctggtactggaccagggttgttatgatgcaggtggcaaagaaagttgggttcagggtctgatc

SEQ ID NO: 148990 - DNA, 166 bp, Homo sapiens
cagtcatgaccccccttcactgtgatgaaagaggctccgagcaatgaagtcactgtccaagttcacagaggcagttggtgatagaggaagacttgagttctgagcgagtgtcattcggattgagccgttactaggtgccagttgtatacatgaagcaggaattact

SEQ ID NO: 148991 - DNA, 414 bp, Homo sapiens
ctgttctttcttttattcattaattaacaccaaagcattgatggagcaatagtgtatcagggactgggctaggtatggaaaaaagtgggtgaataaggcaggaaggatccatttctcaaagggcttaggattcgctggaagcattaagtttcaggacaaatgccatactctccacaaaataacccgttcctgataccctcagcaggaagtgaggactttctcttctcaacagccatagtacagtgaggaaacgtcgattacaggatttaccataatctgatttaattacagttattgaggcatatgtcttatctctcatgctataagctccatttttgatagggactctaagaagctccctatttagtcctcacagcatgtagtgcaggatttctcatttaataagacctcaat

SEQ ID NO: 148992 - DNA, 367 bp, Homo sapiens
aggtgctgtcatctatatgatctcagtattttaaaaatcagcttccagcccatatggtggctcatgcttgtaataccagcagttgaagaggctgaaatgagaggattctttgcacccaggagttcaagagcaacctgggcaacgcagcaagacccagtctctatcaaaagttaaaaaaaaaaggtcggcatggtgatgtgcacctgttgtcctagctatttgggaggccaaggtggaaggattgcttgagcttgggaggttgaggctgcagtgagcagtgattgcaccactgcactccagcctgggcaacaaagcaagaccctatctcaaaaaatatatataataaaaataaaaatcagctctcatt

SEQ ID NO: 148993 - DNA, 126 bp, Homo sapiens
tcccaaaatacactcattggaagaacactctgtttttgaaatgttaatagttgtcatggggaaaacagaagagaaggaagaacacttctggtctatatcaggattatgctgaagtaaaagtaggag

SEQ ID NO: 148994 - DNA, 291 bp, Homo sapiens
gtgtgagggtggggttgagggaggctattccattatctcttcttaatattctaggcttttttcaacgattacacttgcatgcatttcatttaatgcaaaataaataatacctctccttcctcatggactttttttttccatcttagaaagctcttgtttctggttgccatagtaatggtgccactctgatatttgtttaagtggaacactttcatctgactgacttaaagacagatactagaagggccagaaataataattgacaacattgcctgctagctggaataaaag

SEQ ID NO: 148995 - DNA, 128 bp, Homo sapiens
tcttatcacttccccctcctaaatatacctcgatgctccagttctctccatcccctagttcatcatccaggccaccagcctctcacattctgccagtcttgctccctccaaggttctcaccactctgt

SEQ ID NO: 148996 - DNA, 381 bp, Homo sapiens
ctctggatgcaagtgtcacatctctcctgtaaactcacttctctcctgttcctcttacctttctggtcactccctttctgtggacgatttccttcaggagatcctctttctctgcttctgacaccactctcctgttggagttccccagagtttttgtctcaatatacatacactcctaaagccagctccttctcccctcctatggctgtggtttgataagctgatgactctctcaccctctcacctatcactctcctaagtttcatgttcattacaaccaactacctcctggacatctctacctagcatccctcagaagcctcgaccgcaatgtaacctaaattaaactcagtatcttctcgtggaccatcactgccacca

SEQ ID NO: 148997 - DNA, 714 bp, Homo sapiens
gctcctacccgacggggtggcgggcgcctgtaatcccagctattcaggaggctgaggcaggagaatcgcgttgaacccaggaggtgaaggttatagttagccaagatggcaccactgcactccagcctgagcaacaagagcaaaactccatctcaaacaaacaaatacttgataggtgctattggcctcaacctgcccacagggaaggagcatacatacccaggcttggcccctaaatataacaggtggtgatggggctgcccaggacccccacttccctcctccacatctcagggtcattgactctgcttggcctagataacagaagcagccaaaagctggcgagtgagaagcctagaggaatgccagagaaagcaagcctgccttgcctccaccatgaattaactcccacatgaacccacccctgaagccagactggtcactttacccagcactgtgtgtatgtgagtgtgggctgcctcacttttcctggcactgttcctcagccatatgtattatctcatttaatccttatgttaatgtcagagattatgtgacttccctgagatctcacaaccagcaaatgaaagatccagaccatgagccattccttttccttttagattctgtcatcctcccacctctcccatccagttcctttcacttctggaaacatccctgagtacccccaactcagtggtttcccctgtggtc

SEQ ID NO: 148998 - DNA, 794 bp, Homo sapiens
ggatcaatttaaaagaaaatgataacatagcaaactcctcttatatgcacataaggcattactaagtatctattttatggtgcttgacatgttacaattgcctttttttcttcttttttttttgagacggagtcttactgtattgcaccactgtactccaacctggatgacagagtgagactccagctcaaagaaaaaaaaagacattaagtctcatacagttatgaaatttcacaattccagaaagctttagtaatcaaaatatagatttaagacacttattcagtcatttcacttaattcatccatctattcatttattcattcattccatctttattgaatacctactatgtgcagtgcagttactccaatcttatccaacattggactactaattagtaagatttttgtaattctgtttttaaattattcctttacatgggacaaaattcaaaaggtatatatatacaatgaaaaggaaatcttgcacccagttccccaccactgcgcccagctcagtccacctctctttactgctaattttgtgtattggaacctgtactctatccattttgtttttaaattttctagacccggaaagcatggactggtaccaggtcacaaagatactatttgtgttgtcacaacttattctcttcctctaagatgttgggacagaatatgtgggatttctactcatcttcatctttctacctggaatatgatcttcacgaaacagacttttcttctgagatgaagaaactttgtcaaaagcagtctaattcagtccgg

SEQ ID NO: 148999 - DNA, 172 bp, Homo sapiens
cacacacacacacacacacacacacacacacacacattacagataagtatatatatggaaaaatatgtatacgcaaggaaaatactgctgttctaaatgtagtataatgattttaatatactacccaagaaatcttatgagactttaaaatcattttaagatttaataatag

SEQ ID NO: 149000 - DNA, 718 bp, Homo sapiens
gcactcagtggaaatgcaaaccccagcttcctggagcctggcactagctgtcactgctgtcccaacactggcatttgacgctactgagacgaggttgtcatcaaaatataaacgacatcattttatgtgcctattttgaaatacgagtctccccaaatgtaccagtcactgaaaacttcccgagctaaagctggcaggccacgtgaactgaaggctgaggccacatgaactgaaggctgcgcggccctgcgggagtggaggtgcggtccaagcccgcaggcagacacaccacgcctcgtcagggtctgtctcagggtggcattacacagggtattcggaaacgcctaagtcgcctgggagaaaacctgccgtgcattcctgggcctcttcacagacagaaggataattacacaggaagatggcaaacactagggttttgacatttgacaagacagactcttgggtccccaaggaatgagcgcacccgccccccaggctcacaggcagggcaggtattcacaacagccccacactgccaacatctgggcacccaccgacaacagcatggataaatgcctcgtgacggctcgtacgaaggagcagtactcagaagtacaggggagatgctcacagacagaagtgctaagtgaaaggagacagccacagcccagcacaggacaggcgagggtaacctgtggggaccaacgctggaatagaa

SEQ ID NO: 149001 - DNA, 614 bp, Homo sapiens
gcttacctattctttttatggctgcatagttctaaaggagataggaaaaaccaaagcataggaaaaatactttggtttttcctactctgacactctggagtacttcacgtttgggcaccaatacgtgtgtggggatttttcaccaccaataactaattctccagtggacaccagctgggtgtcctctaattcagttcagttctgacactttccacctggacacagcgtcagatcccacaggctaagggcttagttccacaagactgccccccttcagatgccagttgtaagccccaggttgtgatgtgtgattctgaccagctgggtataaagaggttgccatgacttcctctttgggtttgattaatttgcttgggacgtctttggggcggctcacagatctcagggaaacacctccacttactggtttattacaaaggaaacatgaagaggcagatggaagaagtgcatagggcaagacatggggagggggagaggggttcagagcttccctgccctccctaggtgcacctctatccaggtcccatacctctgtgtgttcagctatccagaagctctccaaagctagtccttttgggttcttttgcaggttt

SEQ ID NO: 149002 - DNA, 369 bp, Homo sapiens
catctgcctcttcatgtttcctttgtaataaaccagtaagtggaggtgtttccctgagatctgtgagccgccccaaagacgtcccaagcaaattaatcaaacccaaagaggaagtcatggcaacctctttatacccagctggtcagaatcacagatctcagggaaacacctccacttactggtttattacaaaggaaacatgaagaggcagatggaagaagtgcatagggcaagacatggggagggggagaggggttcagagcttccctgccctccctaggtgcacctctatccaggtcccatacctctgtgtgttcagctatccagaagctctccaaagctagtccttttgggttcttttgcaggttt

SEQ ID NO: 149003 - DNA, 525 bp, Homo sapiens
gaagtgtacagggttggggtgggtgggaaggtgaggaggaaaggccactgtttcaggtggggttggagggagatggaaaatggaccacagaggttcagagaacaggccctttgtggaaagggggagaccaaataatgctgcgttgtgaaaggtgaaacaggctgcaaacagaaggagcccacaggaagccctgctctgagcagctgaacattctggggtcctcagactccgataaaaaagcacatttagcctacagctttatgcccttcctcctacccttgtggactctgccacagacatgccctccagattgattctatccacttgtctctagtctactgctactattttagtctaaggccttctccccgctttcctgggttatggtcacagactcctatctgagttcccagcaccaggtgcccagttgttttcatctcttaacacattccacatattatagcaagagagatctttctcaaatgcaaatcagaccttgttgcatcccaatctcaacccctttag

SEQ ID NO: 149004 - DNA, 104 bp, Homo sapiens
gggtgtggaattgaagttgacttatcttggttttagttctaagaccctaaggtaggaagatctgaattatactggagagaagggcagcatggaaattttatgga

SEQ ID NO: 149005 - DNA, 196 bp, Homo sapiens
aagtgattgtatatgtattcacacgtacatttgaaaagaaactacacttgtactctttaatgattatcctaaaagaatgcttagtaccctctcttaggcatttgttaaagtaaattttgttcagattccttggaacccaaggaaaagaaggctatagttggtcaaatgatctgaatccaaagctctcatttttttg

SEQ ID NO: 149006 - DNA, 397 bp, Homo sapiens
ccaccttggcctctcaagtagctggaaccacagacacacaccacaaaaaccagctaattttttgaattttttttggagagatggagtctccccgtgtttcccaggctgatgggaaactcctgggctcaagcgaccttccttccttgacctcccaaagttctgagattacagatgtgaactgctgtgccagcctttatcctttctttttgagatggagttttgctcttgttgcccaggctggaatgcagtggtgccatcttggctcactgcaacctccacctcctgggttcaagtgattctcctgccttagcctctcgagtaactgggattataggcacgtgccaccacacccggctaatttttgtatttttagtagagacagggttttgccatgttg

SEQ ID NO: 149007 - DNA, 533 bp, Homo sapiens
ctgggatggttattatattagtccattttcacaccactataaagaaatgcctgagactgagacatatataaaggaaagaggtttaattgacttatagttctgcatggctcgggaggcctcaggaacttatagtcatggcagaagacgaaggggaagcaggcaccgtcttcacaggcagcaggaaggagagagaagtgtgagcgcaggaaaaagtgccacttttaaaaccatcagattttgtgagaattcactcactatcatgagaacagcatgggggacaccacccccatgatccaatcacctcccaacaggtgcctcccttgactcctggggattacaatttggattacaattcaagagagatttgggtggggacagagagctaaaccttatctgtagttctgcatcaactcaggctccttctgtctttctgccctgccagccttaacacatggattccagtctcaaggtagcctcatggtcccaatatggctgctacagcttcagtcatcacatgtgcattttaagcagaa

SEQ ID NO: 149008 - DNA, 313 bp, Homo sapiens
caaggtcacacagtgaggaagcagggaagctgggattggatgccaagtccttgggcttagctgagccgtatgctctctgagacattcttggtccctgtcctttagggagagatgacttcataagcagctgatgagatgcagagtgatggggctttgatggcggatgcacagagactcaaacaaggccccagggaaggggtgagcgtggtggctcccatgctttgggaggccaaggcagtaggattgcttcaatccagaagttctagaccagcctgggcaatatagcaagaccccatctctaccagaaaaaaaa

SEQ ID NO: 149009 - DNA, 574 bp, Homo sapiens
gatgccctgcaccgcgtcaggactctgcagagtccctaccagcaagaaagccctcaccagatgcacctgcctgtcttgaccttctagcctccaaagctgtggtaaataaatttctttatgaattacccagtctcaggtatttagttatagcaacagaaaacagcatgtgacaatgagttttgccaatcttcaggaaacagttactcttttgcaaattgttacaatgaatagagacatgaagggtaacaagtttatcaggattgtatgaatacattatcaaaactacataacgacagtaaagaaaaaactatgagacattctcagatatcaatgaaatggcaatgaaaaatcagtttatgatacaataaaacatatgtctatatatcttatgatgtttactcttatgtggtttgacattttaaagttttaatgtagtattctactttagtaggttaaaatctcaagaaaaaggctttcttaaaattaaacattcactcatgaatttctttaaaatgttgggcaaacaagcaatagaagggaactttcttaacctaataaaggacatttactaaaa

SEQ ID NO: 149010 - DNA, 502 bp, Homo sapiens
agttcgacggagactctcatagctatacaccatcactcagacagccaactcagagctcaagggatacccaccattccctcctcctccatcttaccaaaactcactcctcatttggtgagtgtcttgacaatccttccttctactgtcatcagtctggtcaacatcactgattacttcctgcttgtgaaatccaggaagcttatgtaactagatatctccatggcctttgtgaccactgacctttccttgaatatctcctgacatcctgtcttccctggattctgtaactccccaatctctctgtatttatttcacatctggcattctcctcgaatgaaagtacactccaacctcttctgaatgttcattgttttctccatctacacgttctcagaggcccttttcttcaaacccatgtgatttcacatggtctctaaaaactggtgactctcaaatctagatcctctccccaacctctgtatataatctagactcatacatc

SEQ ID NO: 149011 - DNA, 318 bp, Homo sapiens
ttattacaatcccgctgactagtcctgaaatcatacccactcagcttgaccccaagagccaagtatcatacaatagggaaatgttggcagagaaccatacagaatgagactctactgctgacctgtggtgcctaaaacattcacaaacgacagtagcaacccctttgtacattaatcaccactggaaaaaagcagtatctagagagttaagtttaaactatggttaggctagacactatacatttttacctttaaggaaacacactcactcaggcagttttaaaagtccagaggcttgcctgttgccccaccatcacc

SEQ ID NO: 149012 - DNA, 232 bp, Homo sapiens
tgcaatccagattcacacgcatcacaaacacttcaaacaaatttcagggaacagtatttccctctcttatctgtgatgtactctagtatttacttttcggtttaaatttttaatgctgtttcggacccacaaaagagatttatgacctactactaataggtcacaggacacattttgaagagcactcttctacagtaaaatataaaggttcctagtgacctataaagttata

SEQ ID NO: 149013 - DNA, 254 bp, Homo sapiens
tggaacttaaaatacaaattaaaattaaaagaaaaatccccattaaagtattcccgagaactattcatatttgaatgagttgtcttaggaaaataattttctatatacatacccaaaacaaaacaatattcataaaagactgacgatatacgtgatctacaattttacgagtaaaatttgtgaaaatcactatactacttacaacctaaaaaaagtcatgaaaatcatcctaagttcagagccagggggtaccg

SEQ ID NO: 149014 - DNA, 390 bp, Homo sapiens
aagctttgtcaagctaatactttaaggatcaacatcaaaattggaactttctctttctatagccacatccaattgaaagtatcttagacctcccagtggcttccctttcggggaggcctggctgtcagagcactggaaccatgcatccattttaaataacaggaaggtccccaacccatacacaacattagaaacggcattatttgctggcccctttgtgcgtggggctgtgaatcggtgctgctgcatcacatggtcaaaccaggcctcccccacacattcctgctttatggggtcatttcagcgcgctccaatcagccgcctcgtccacctgaccatctcttgattactgatctatctgctcttattttccctgggggaagggaggag

SEQ ID NO: 149015 - DNA, 345 bp, Homo sapiens
taattgttcaccaaacaccgcaatctacaaatattctgaacaaacaagcaggtggtaattaacagaggtagacactaatggctgagagccacttttagtcagcaaatttttctatgggccaacatataaaaatagtggtatttcacatgtaaacttgaattcatagattctcttaagaaaaagccacaccaaaaaaaaatggcacatttggccaatatttccccatgggaatcagcaaacaatgaagcctgggtggcagctgcctgcttcagatccaggggcacgggctcaccccaacagcactgccccactgtgtcagattgcggtgtttgaggatcctctaga

SEQ ID NO: 149016 - DNA, 317 bp, Homo sapiens
aaaacaaaatgtcagacaacaggcctctggtttggaaaaccacagctgtacctggatagtaccagtgctcagaggcaagatcaggggaaggggaaagggaggcatgggcccacactaacctctcaagacgcatgtccctcctacagggtcgccctcactcctctagcccaccccatgttctggatgcctggtagtgccatgaaagtcctggtttaacagcttttttcttggagtaacagctgcactgttttcctacagctgagaaaacactttttctcacagttaactttagccttcatcatccctcaaacttcagg

SEQ ID NO: 149017 - DNA, 379 bp, Homo sapiens
atgctgtttcacacttatctttggacttagggtattgggatgtgtcaaacagttgctcccttagtgtggaaacagacaagtaaacacagttgctacacaagttgcaggcatcatatgataaaggcaagcttagtgtgttgtggagggcatgatgggtgtgtctgttaagtgtccctgtttagagtctgtttacatacagagttgaatgtccttggcttctcatttcaatttaatatatattatattgccttggctgttaggcctttcttgcacttgtttgcctcccagccataagccagtttgaaggccatgatccatcaggtctagtgggttaatccatgtctgaccagtaagacctacctatcttgacagtcaccat

SEQ ID NO: 149018 - DNA, 339 bp, Homo sapiens
aaaaatataatacttgaaataataagctcaatgaaagagtcagatagtagaagagcttcaaatgaaccagaagaaaggaaaagaaattatccaggacatagcacagaaagacagaaaatatgaaagagacgttaaaaaagacatgaaataggccaggcacagtggcttaacctgtaatgccagccaaacttgggaggccaaagcgggcagactgcttgagctcaggagttcaagaccagcctgagcaagataatgaaactctgtctctacaaaaaaaacaccaaaattagccaggtgtggtggcgtgcacctgtagtcccagagacttggggtgctaag

SEQ ID NO: 149019 - DNA, 522 bp, Homo sapiens
aactcactgcaacctccacctcccgggttcaagtgattctcctgcctcagcttaccgagtagctgggattacaggcacctgccagcatgcccagctaattttgtatttttagtgaagacagggtttcactatgttggtcaggctggtctcgaactcctgacctcaggtgatccacccaccttggcctcccaaagtgctgggattacaggcgtgagcaagctttcctggccaaacacatgaatttaatgacacagtgaaaatgtttggaaactgtaaaatactgtacagttgtaccagctgactatgaacaggaaacagacacaaagctggactagaaagtgtatgttcattccttcactcagtaacgtttattgatgcttactatttgccaaacattgttttagaatctggacataagtggatgagaaagacatgggctttgtcttgtaaggaacttaagcgtgtacaacattaatttcagtgtgtgtgagagtagctgaagtatttaccaagtgtacagaa

SEQ ID NO: 149020 - DNA, 589 bp, Homo sapiens
aattcactttttaaaaattagatcagatgacaaggttatctatattgtctacataattttataattcatatatagcacatattttagacacagtaaacaacaacaagatggaaaataagagtggaaaagaaagtaacttgaagttacactttgtaagactgaatgcaaactaaatatttttctattatgtttatagacaacaggaaaccactgaaagctttgataagaatggaggacgatattaagaaattaatgttcttgaagaatgaatgtgatctcaaaaagcagaaacaaccccaaagtccatcaactgatgaataaaatgtggtaccctccatacaactgaatactattcagtcctaaaaagaatgaagttctcatgcatgctacaacacagaagaacactgaaaacatcgtgttacgtgaaagaagccaaacacaaaaggccatgtactgtatgactccatttataagaaatgtctaaaataggcaaatccatagagataggaagtagattagtggttgccaggagactgcgcaaagaggaaatgggaagtgactccttaatgagcatcagggttcttttgag

SEQ ID NO: 149021 - DNA, 504 bp, Homo sapiens
tccattttgtctcaactttaacttttaacagttctttataggcttttgaaacctactttggagaaggaaaaaaagtaggaataactgttcttcaaaaattttacaaaaacagtttgactcagcttcagttgttaaatttggggtatttttctatgttgaaacagtatttgaaaattctaacttatactggacagataaaatgataaaaaagacattctactcttcagaggattatcaaatgctgttgattatgctagtttctcttgaaataaactaattatgggtattttagatagtgatatatagtctgtagacttaatacataggccatatgctagtggcacataaccaacagagaaagaattccttgcattaatagaagcacaaaaaatatattacaacttccaaaataacttttttttttttttttgggaaaaagccgggccctgtggcccgggggggggtgcaagggcaaaatcagggctaagtcaggcctcgacctcg

SEQ ID NO: 149022 - DNA, 177 bp, Homo sapiens
tgacctcctggccatgaccagtcaggaggtctgaggctggccattcccagagggcacaaaaaccaggccagctcccccagccacctgcctcggttctgacctctggcccatgagtatgcagacaactccacgtttgtatttccagcccaggtttctcccctgagccccagattcaca

SEQ ID NO: 149023 - DNA, 553 bp, Homo sapiens
atgcacaggtttatttttgtgctctctgttctgttccattggtcaatgtgtcttgtttttatgccaataccatactgttttattactgtggctatgtacttttgtaatacagtttaaaatcagggtatgatgcctccagctttgttctttttgctcaagattacttttggtatttgggggctttttgtggttccatatgaattttagggtttttttctgtttctgtgaaaaatagaattggaatttatataggaattaaactgaatctgtggatcactttgggtagtatggacattttaacaatattaattttttaatccatgaacgtgagatctctctccattaatttgagtcttcaatttctttcaacaacatcttatagtttttgatgtacagatcttttacctcctcacattaacagaatgaaagataaaaatcatatggttctctcaacatgtgcagaaaaattcaatattctttcataattaaaaactcttaatagattatttgaccaaattcaacattctttcatgataacaactcataacaaatt

SEQ ID NO: 149024 - DNA, 365 bp, Homo sapiens
tctccgagatgcatacccaatacattcataccaggaggtctttccagaatgttcacagtaccacgttagagcaataccatgaacgtcacaagggcttgaagtttataaatagcgtagtttcatttttacgaaaaagcaagctgcgtgtttctaagtatggttgcatgtgatgaaactaaaaagataggagaatggtctccatgaacctcagaatagttacttctaggtgagaacacaattggataaaatagggaaggagcagataaatagattcagggttttggtactgttttgaagtcggatggtaggttcacaaatatttattttattatgctgttatactttataatgtatgcatctcggca

SEQ ID NO: 149025 - DNA, 208 bp, Homo sapiens
cctcacactaaagcctgaccaagtccaagctccagtttaagttccctctttcagaatgttcttctgctactccttgtgtgtctaaatactaaccactcttcacctctggctaaaatatctacccctccaagtagcctttctggatagcccttttcattcaacatcctttgatctcccctctgtatcaggcaatgttgctcagggttat

SEQ ID NO: 149026 - DNA, 372 bp, Homo sapiens
cttacttaaaaaatacatagggtaatagtgaccacatatattcctttatatgaaatatttaataaactaccaggaatgaggcgcaattttattgctaatttatagtggttttggtgtgtggggatgatcttggcaagaaaatcttgttatgctgcaaaagccaccaaattcaatgtctaatccttatcgtactaccatctagggcagtctccagagagcacaaaaccatcatagaagcattgtgggtgctatacatttgtaaatccttttcctacctatcaggctactaatagctgtggatgatgaaaatgtttgtatttgtaacaagtattaaatcttgttcccatttatgatgctggcatataaaaagat

SEQ ID NO: 149027 - DNA, 212 bp, Homo sapiens
ggacacaatgcagtccatagcagggagtaatcagcatatagatattatttaaagtcataggagttaaggaaaatgtatatataggaaagaggaggtagcctaatatggagcttaggcaccttgagcaagaggtcaagcagaggaggtggtgtctgtgagggagactggaaagaagcagaattgggggaagggggagaaaagagagaatgtgg

SEQ ID NO: 149028 - DNA, 339 bp, Homo sapiens
ttttctagaactctacaaagcaaattgctgcaagaaaggcagaggaaacataatatatacatatccaaaataaaatttgcggtgaaataaatgaaagcacattacagataaacttacctgatttaaaaaactaacctataaaaactcctgttgaagaacttgattgtctttagccaaattgacacattttgaagataaagcttccttctctgccgtaagatcatcaaactgcatgaataaaataatacagcttgataatgaagtaggctgagaataatctaatacaaaaccaatagcaaattttgaaatgcatttacttgcaataaaatgttatctgta

SEQ ID NO: 149029 - DNA, 374 bp, Homo sapiens
tttcagcaccatctgtaccaaaggaatggacctttgtagaagaaactgccaaagaataatctagaaaccactcatttcgagtcagtagaaaaaggtgcttagcaacaataaaacccatatatgtatctgtaactacaacacaataaaaatacaaaatgcaaataccctgggcccagaggtgtatgggccacagtagaaatagtaagacagtggaaactttaagtttagaaaacaaattattttggaccagtgtagagcagaaacatttaattagggcagtgaaccagtgtaacataattttaatgctaatgattaccaccaggcttcaaaaacaaaaaattaggctgggtgtggtggctcacacctgtaatccc

SEQ ID NO: 149030 - DNA, 364 bp, Homo sapiens
  misc_feature (352)..(352): n is a, c, g, or t
gagatcctgccccctcctttttacaaacttggaaatgcatgcagggcctgattcacatccaagctgggaaggcattacaggaccagggcaaagtgggattcttggttttatttattcattcattccaaacctgttgcagccaggcacggtgtccaagataatgttgcataagccatactacccagctccaaattccatctctacaacccactcaatacgggagagagtttaaagatctcactgatatcttgtcctgatcttcctcctctataacataagggtaataatgctgccttttccataatgattagtagaagcaatatctatacttaaaacagcgtcgtgcacatantaagaattactt

SEQ ID NO: 149031 - DNA, 488 bp, Homo sapiens
agactgtggggacgaggaagggagagagtctagagagacttgagatacaatcaacaatatttagtgagtggttgggtgtggaggtgaggaggagaaaagggtctaggatgattttcaagaatctggtttggatcaatagtcttcattcagagggaggagcagggatgttggtaaagagggtttttcctccatcctgaagaagtaggagagagataatgagtccaagttcatatctaatgactcagttggcattgaagctgtacagatgtttctagctttctgatgctcattggcctatacctagagtggagagaaggaaaattaaaggggaaaacaccagctgatttagctctgtatgtacactgtggaaagagacagaatcccatagcaacaatgcagttcttaggttgtttctggtcttaggtattgatgtcatccttgatcaccggggtcccacagtcttagcctgatccacagtcttccctgat

SEQ ID NO: 149032 - DNA, 172 bp, Homo sapiens
accacacacttgtcgatgcactcagccacagagaagtcactggtgttctaacaacctgcacattactgatccgtccccacgcatcagaaaacaacaaagctcagaacatggattactctgaatcaatactgttcaggatattatttggtcatgccaaagttgaccctgatta

SEQ ID NO: 149033 - DNA, 441 bp, Homo sapiens
tgaacccgggaggtggagctggcagtgagccgagatcgcaccactgcactctagcctgggtgacagagtgagacgccgtctcaaataaaaaagaaaaagaaaaaaaaaagccaatggcaggctctgaaaggcagcactgtggtctgagccgccgggcccctcatgatggcacactgtgtgcagactaaggccaaggcagggagtgacacactgatcccggggtgcatctctctgccaggcagctagtcatttgttccctgctgggaagtggcagtaggggctggggcactggccctcacagagttgctgagagtatggagggagataattacaggcatctgccacctgtttaatcttcacagcccagatgtagggctgtcttctgagtcttaagggttaaggggcttgcagctggttgtggatctgaggtgcccctcctga

SEQ ID NO: 149034 - DNA, 359 bp, Homo sapiens
tcaaccccttttaaataaaaaaattttcacagccactttgatattgacttaaactacatatgtattgttacttaagtatgtacaaacctaagaccagtaataaactccttattcttggagctttacacaactaaaagtagatctataaattaaatacaaacaagactatagaaatggtaaaattccagtttacaaccaaaagcaatggatgatgatgttgctttgctgaaactatattgcatcagtgtgaattttatagtgaccattaatgaagcatgtttttttgcatcgtagccatgggataactttttctacaactctttttatcagttgcctttcataaggaacaaatgtgtcat

SEQ ID NO: 149035 - DNA, 155 bp, Homo sapiens
gagaatacaaagttattctggataggagggataatgactaagcttgaagtatgttggactaaataactaatcaacttcagcactgtgctgactcaacagataaaaatcttgtcctgagattgttacatcctcaaatttctttttttttttttttc

SEQ ID NO: 149036 - DNA, 429 bp, Homo sapiens
aagccacaggttttggcctttattaatatatctattccagatctttgattcttttaaacatctgccctcccagtttcaaaagttgctttaaaaatcctactttgcttttctcttttctgccattttttccattcctgatggtatcaccccttcttatccacttgttcacttattattttctcagtcttcattcatgtgtgcatgtgtcttgccttctgtgcctacgtatgtgtctctacacttgcagaaggaagatcagagtataatatatgaagtaatgtaagggtgctatggtaccaagtaagaatatcataatgtcaaagtcactcattcaatcaccacaccaccaaacaatgagtttatttagctcattacattagtttcctagggactgccataaaaaataccacaaacttggtggcttaaaac

SEQ ID NO: 149037 - DNA, 417 bp, Homo sapiens
ctgcggcagctgttgctattgctgtgacttctgttagacattcctaatgttgccacaatgagctcatttgggaggcagggagagaaatgtgttcaaaaacttattttgaggttttgtcatacttctatctctctgggaatagactcccatccatgcctctgaggctttaacatatacattttctcacaccttctcaggacgatagccaaagtaagaaacagcccatcgtgcatatttgttaggcgtgtgtgtatatgtacagagttggtatcttggcttgattgcgaatgtagctgatttattcagacaagtgatggtgtgaccctccaaactggtggagcggctctgctaaaggctctctgcttcagggctgaggcggatcctgggacagagcctgaccctccttcccagtgttcc

SEQ ID NO: 149038 - DNA, 805 bp, Homo sapiens
ctagatggagtttcactcttgttgcccaggctgtggtgcaatggcacgatcctggctcactgcaatttccgcttcccgggttcaagggatcctgagatggggtttcttcgtgttaatcaggctggtctcaaactctcgacctcagttgatacgtctgcctcaggctcccaaagtgctgggattacaggcgtaagccactgcacccggcctaactgactgcttcttttgttctgtagtctttctccaaaactgtttttctctgtactcactttcaccttctctcacacatatatgtccctcatgtccctttatgtctccagggtcttctatttccacgtaatcttaattgttcatcatatcctggactcatgagtaattaatctgttattctccctgaaagtgcagccttgttgaatagaatgtgttctttaaagagcagctttgtttctcgagtgaggtattaacttccagatttaagtgaaaatgagttccaagttttatgtttcattgtgtgtctaagactgacaccgtttattactgtggcacttacagcttgctttcaatgcctccaaattctctattctgaagggctgggtacccatatctcatgtctgaacatattcctcagaatcatgcagtaccagctatgttccttctttatattatggctcctgaggtgcctgttaagcagccaggtgaaattgccttttaatcagtataggaacagtctctttcctgctgatgctaatgctttttgtaaaaaggtcatgctgtattgaagttcttctttcacggcaaaaccact

SEQ ID NO: 149039 - DNA, 778 bp, Homo sapiens
ccccagaactgcttaatctttcaggttaattgtttggcgtggaaatactgggaagtttccagattgtctatgccacctttcctcttggctgcactcccggcccgctacctggcttctgtcccagcctcccagtgtgtgccctttctgatcagcctggggaagagctggttggactccttggttttagattcccacaaaaagacttcagtcctcaggaaagtgcagcagtgcctggacgactccattgctgatgagtacactgtggacatcatggggaacctgctgtgtcacttgccggcagccatcatcgacagggggatctcccccagggcttgggcgactgctctacacggcctcagagactgcccagacctcaaccctgagcaaaaggctgcagtgaggctcaagctcctgggacagtatggactccctcagcactggacagccgagaccacgaaggacttgggaccctttctagtacttttctcaggagatgaattaagctctatagccacaaagtttcctgagatccttctgcaagcagcttccaagatggccaggaccctgcccactaaagaattcctctgggctgtctttcagtctgttcggaacagcagtgataagatccccagctatgaccctatgcctggttgccatggagtcgtggccccctcttctgatgacatcttcaagttggccgaagccaacgcctgctgggccctggaggacctgcggtgcatggaggaagacacattcatcaggaccgtggaactgctgg

SEQ ID NO: 149040 - DNA, 388 bp, Homo sapiens
catgtggcgtaatggcaaaacgccttagtcctgttcaagtgggtatgtcgtaccccacttaaaacccaaaccagaaaccagaaacgttcactaagggacacacattctatttttacttagcaaggcttatttttccaagtttatccatagtaaaaataccttcttaatgaacgtgttcgaagttttctaaatgcctacctctcagaggcatgctcagttgcttgactttacccgtaacactgagcagcatgaggcaatgggccagggtcaggcctaagcagcagcattttccctccctccttctctggctactcctctgctcactgttcctcggttattctcacccagaaggctccacatgcagcaatgatcttttatctgtttttca

SEQ ID NO: 149041 - DNA, 355 bp, Homo sapiens
ctccacccgacggggtggggtttcaccatgttggccaggatggtcttgatctcctgatctcatgatctgcccaccttggcctcccaaagtgctgggattacaggtgtgagccactgcgcccgaccccaggggacaggtttagtcagattccagggtggtcctcatggaggggacgcacaggcaggagggcagggagagaaagcacagaaagcagacctgctaggagaggaccaggatagggaggggcagggacaaggacatgggacttctgggagcaggtggccgggggtcaacgtccaggaggatttcctgaaccagttagaggactatgacccccctttcacctatctatgca

SEQ ID NO: 149042 - DNA, 460 bp, Homo sapiens
tccgcctcccaggttcacgccattctcctgcctcagcttcctgagtagctgggattacaggcgcccaccaccacgcccggctaattttttgtatttttagtagagatggggtttcaccgtattagccgggatggtctcgatctcctgaccttgtgatccgcccaccctggcctcccaaagtgctgggattacaggtgtgagccaccatgcccggccctttcagtatctttctacgtgtaaacacacatacacacattattttgtataaatataagatcacaaatttgtaatatcatttcatatttagtgttcatgaagaaagactgacaagtaaacccagatagtagcttaatgctagctgattatatttatggtttgattattttttaaaatttctgaataaatatatttgtattgttttaggtatgcttacacttatccaacgaaatagccttcactg

SEQ ID NO: 149043 - DNA, 778 bp, Homo sapiens
aaaatatcttggcgctcatggttgaataagcaaggttcttacaaatctgtgtctgcaaatgagacaaagggcgacaggagcaccagatgctaccacacacaccggggctgttgcaactcacaaaaaaatcaaacaggccacgtttgggatgttactatcaaagagtggaattgttcagaagtcacggaaacaatacttatgttatacttttcaagaaggcagactggagccaccttgagaatgacatcaacatttggcgaaagggaaaccttaatgacgatgacttaaaaccgcatgatttcttcaggaccccttcgtttctggacagaggcccccagctcagtgctcaaacatgaggggcaacagcagcagccacaggttctgggacagctgcccccagcccattccctgcaccgtaaccaggtgaggcacaacactgctggctccatcttgcccacgggggaaggagctgacttccctctgcagcagcacacaggggtgccactgttcccctttctgagccctgcagagagcaagcaagcctggccccctgcagaagcacggtgagggatttttccatgatgagatgcagggtgcaggccagcacactcaagggagtcactcactggccagtttcctgagctgcaaagggcaagcacggagttttgctaagtgagcatgtgctgtttttagacacccatgttcaccggggaacttgtaatatttccaggcctcggctgcatggaggagcccaggcttgaatgcagagagaatggtc

SEQ ID NO: 149044 - DNA, 306 bp, Homo sapiens
cacttcatagctttttgcatgtccctacctgcacatttgaacatctgaagacccctaaaagaacagtgtactgagcatgccttatatgaaaaaccttttagggactacgaagtccccctgtttcctagaagaaggcaagtgcctcttttcccttgatggtgacctgaacagcactccatttgattgggatgtgatgaatcaggaagacttgtgggtaggcataagattgttctcttggattcccacaggggatcccctccatactctccgttatcttaaaatttgggttatctatattattgatca

SEQ ID NO: 149045 - DNA, 214 bp, Homo sapiens
caaaatattgggattacaggcgtgagccactgctcccggccttgcctgtcagttttctaggagctgagacagagaccaggcccaccaggtctctgcctgtggggcccttacctttccagtcagggagggaagaggaactaggaggaagaaaataaatccagccagactcagtggcttatgcttgtaatcccagcacttcgggaggctgagacat

SEQ ID NO: 149046 - DNA, 323 bp, Homo sapiens
cacaaacgtttgtctgagaataagaacattcaccccattcacttaatttctcatcatcagtcatgtcattatattttcaaggacctcacagtgctggaaagtggtgtagttataaataagcataaaaacagatgggtgatcccagtcctctaaatataatcggggatgccaaatcttttcaaagagaattcatatatacaacttaaaggccaaggagcccaattcaatcaaaatttgagccaggatatgctaagttcaatcagcttgaatatgggcaaagtgtaagacctagccagcacttcagatatatacagagaaccaca

SEQ ID NO: 149047 - DNA, 485 bp, Homo sapiens
  misc_feature (1)..(1): n is a, c, g, or t
  misc_feature (8)..(8): n is a, c, g, or t
  misc_feature (10)..(10): n is a, c, g, or t
ntccggcngnagagctccaccgctgaggccaacgaggccagtcctttattttgggttaaatgaagttgtcaggtggtggttgttagggggaggatgctcattgaaaatgctgtgtaaatggcatgctttttacaagcagcaatggttcttttgtccaacctgccaccactggcaggggaccgccctgtatgtaagtccttttaataaatcctatgtctctttggctggctccatgtctcttcttcagcctctcgaacatagtgtcatccctactgaagtcaatagggattcagcacaacagcaaatcagactgatgttcgaagattggagtttgtggtaccaatgggctttcagtgccttttcaatccagttgctggattccactggcacgaggaattcatctgtggttgaagggaggggtggttttggagggagtatgcaaagatgagaaatggtttcccctcctgcagacctgagagatggat

SEQ ID NO: 149048 - DNA, 172 bp, Homo sapiens
cgcatacaagcacgcataagcacgcaagcagacacactgatagtatcctagaaaacatgaatttgattgcaaggttattctcagtgtacctgggaaacatttttgccatctgcaagtcgggcaaggtattacaagagttggctgattttctgtggtttaacctgtcattgtt

SEQ ID NO: 149049 - DNA, 351 bp, Homo sapiens
aacagcctcggggagagcaggcaggctggccctgggaccctgggggggatcatggaagagcaaggtccaggcttccttgccggctctgccgcttctcggcttgtggctgtgttcagatgacttaggtgctcagcctcagtttcctcttgtgttcaataggcacagccacaaccaccttgcaggcctgtcttgaagcttcgaggagtctgaagtttgcatgtggcccagcagttggcacttagtcacaatagctgttgattggtttcagtgctgaatttctaattagggaaatcgtttcccctgggtttgctaggcttggtggcaaagtcagagccaagggttttacagacg

SEQ ID NO: 149050 - DNA, 462 bp, Homo sapiens
aagttgttctgggttggagtttttaaggggatcatggagagcaaggcaaggtggggggggggtgaaatcatcgggatgtggaaactgtattcttgggtgggtcagctcctaagggatccctcagaccagctgagtcagccattccctcagaatgcaggacctgaaggaatatctcataggaaaaacttaacgtttcatgatgttcaaggtgttatcaatagagcagttaaggggaactgtgatctagggtctatgtgattccaagacagtaggcagcaaacaactctgaggaaggggttggagcccaggctggcctcatgattagcgccgagtgtgctgcaagctgggtttattttcctttctcccctctctttcttccctgacgaattttatttaaaaaaagtttatagggatggtttcaacaccatgctgtgggcaagagaagagagataccttgttctc

SEQ ID NO: 149051 - DNA, 312 bp, Homo sapiens
agtaataactaattagaaaatgtaacagaaggctgggtgcagtggctcacggctgtaatcccagcactttgggaggccgaggtaggtagattgcttgagcccaggagttcaagaccagcctaagcaacatggcaaaaccccatctctataaaaaataaaaaaaaaataaaaaaaaaaatcagccgggcatggtggaccatgcctgtaatcccagctactcaggaagctgaggtgggacaaccacttgagcctgggcttatagaggctgcagcaagctaagaagccaagatcttgccattgtactccagcctg

SEQ ID NO: 149052 - DNA, 496 bp, Homo sapiens
tacaaatttagtcccgactgaaacgtgccaaatatgaccattcacgaaaagaaagagtaattaacacttttaaaagaactacgaaggattttacatagtgtaattcaacaatttcgtgtcacatctgctgcagagatcacaaacactgtcactatgccatctccttcctcgaacctccacaccgcctcctgcagctttattcttggcttttcaaaggtttaatccactcggggctgctaaaggaggaatcaaggaagcataatttgtgaactcaagctgagaaaagggcaggaatatggggttgagtcacgtcgttccgccattttctaagcggaggaggaagacatgttggaacaaaaacacaacaaaagagcagccatttcccaagccagctccaatagcaactcgaactgacactgccgggtcgcttcggcaccttcaaatccacttcactggacaaacctaagtacatcagaagtgccgccgtaaaaaaggc

SEQ ID NO: 149053 - DNA, 321 bp, Homo sapiens
aaacaaacaaacaaaaaaaacccaccttgaaagtgaggactttgctgtccacacagtgcccactccccctccccaggctgcccctatccacctctaaaaagaaattttctagctgtagccctccctaaggaccccatcagatcttatgggaataggataacttctcacttttcttcctattatgcttatttgcaatgttgcccaaaaatgattgtgtaagtattagtgacatagttgtgacaagaagccaagccaggaatgagggccatacccctagggactgtcttcctgggtccaaaggaaagaccaagtttgctgaaa

SEQ ID NO: 149054 - DNA, 425 bp, Homo sapiens
ctccaaactagatcctttccttactccatcaaaacacacttttccccttgtaaagagttctttcttgatctttttgccacttattaaacggtacaatgttttactttgcccagctgtgaccatttcctccttacccaatggtaccacagcttcccagatctgtggagtttaaaagtgaatgcaatcactttgaaactgtcttcttgaagttcattcataaggactcatatctaaccaaacataaaagctcacctctaccttcattttatttaacatttgacagtgttctttcccttctttttaatttcttcttgcctctgcttccaatagattgtttaaatttcctcttagtcccattttaatgactctactctcccttttactccttactgttatgctcttaaatctcatttcctcagaaaaaa

SEQ ID NO: 149055 - DNA, 561 bp, Homo sapiens
tctagaggctttattgttttatctttcatgtttacatctatgatctacctaacactgatttctcgatatgatttgtgataaaagtttcatttttttcccttatggagagttcagttctcccagtaccttttctgaaaaggccatcttttctctttgtcatgtgtcataaattaagtgactactgatgtgcagtttgtttgaagactgttccctccaatcagcctatttgtctatctttttggcaacactgcattgtcttaatcactgcagcttttataaagtctggatatttggtaggatatgtccttcagctttgtttttcttcaagaatgctttgattaaggcccggcgtggtggcttacgcctgtaatcccagcactttgggaggccgaggcgggtggatcatgaggtcaggagatcaagaccatcctgcccaacatggtgaaaccccatctctactaaaaatacaaaaattagctgggcgtggtggtgtgcgcctatagtcccaggtactcgggaggctgaggccgaagaatcgcttgaacctgggaggcagaggtt

SEQ ID NO: 149056 - DNA, 325 bp, Homo sapiens
gcagtcatcataagcccccattttagtccttttgggctgctgtaacagaacaccatagaccagaaaggcaaaacagcaggaatgtgtttctcacacttttggagctggaaagtttgagctggagatgggggagacagttgcctcctccccagctctctagtgagggccgcctctcagctccttctcactgtggcctcctccccagctctctagtgagggccgcctctcagctccttctcactgtggcctcctccccagctctctagtgagggccccctctcagctccttctcactgtggcctcctccccagctctctagtgaggg

SEQ ID NO: 149057 - DNA, 167 bp, Homo sapiens
aaatctatgtggataagcaaaaattacccaaaatctttattaaaaaataaagttggaggaaacacactacatgattttaagtcttactgtataaagctacagtaatcagatcagtgagctatctgcaaaaggacagaaatataaacacatgaaacagaaaaacagtc

SEQ ID NO: 149058 - DNA, 199 bp, Homo sapiens
ggcaggagcacattgcctcattaagtggtgtcaagttgagtttagctggcccatctgccacagaaggaagtcttgcattgggtagaatgtagggcaggtagggcaggatgtagtctttctggggatgttatgctatttctatacctggtagaccccatctaatttttattctgccttatgatcagatagtgtatctcgg

SEQ ID NO: 149059 - DNA, 396 bp, Homo sapiens
ctgcggcaaacaatacactgaccaaaaagctcaaaagaaaaggctgagtagttagatgtccataaggagttcattttttaaaaaattatttttatttttatttttttcagtcagtgtctccctctgtcatccagactggagtgcagtggtgcagtcttggctcactgcaatctctgcctcccaggtctcagtgtttctcctgcctcagcttcctgaatagctgggactacatgtgcacaccaccatgcctggctaattttttgtattttcagtagagatggggtttcaccatgttggacaggctggtctcaaactcctaatctcaagtgatccacctgcctctgccttccaaagtgctgggatcacaggggtgagccactgcacctggctagatgt

SEQ ID NO: 149060 - DNA, 824 bp, Homo sapiens
tcagaatgaaggctagggctccagcctggaccctgaagtaagctagaggttagaagctaaagaagaaagaaggagattgagtccttgatgaacgtgaagccaccgtactaatctggactgcctacctctgcactactctatgagagagaaagtatgtgcattatttaaaccagttgttttgattttctattaacaaagtcagaaacatctctgtaaaaagccagactgaatattttaagctctatgggtcatatggtctccagtgcaaacactcaactgtgctactgtagtgtgaaagcagccacagacaatgtataaaccaaggagcgtggtcactttccaatgaaagtttattcacaaatttgtgaataactttgttattacacctttgtggaaaggtagcagacagatctggcctgtggctgtagcttgccaatgtttgttctataatacgctgccaaacctaaccctaacctatatggataatattcttcaatccctctagttctaacccctgcccttcacctgctgtcttagatgctctcccaaaaggctaaaagtttggctttcagaacaccatgtagtttttcagacacttcacaacttcaaattctaaaactcaattaaaacttcttctttggaccccatgagagtcgtagagatgggaactagatgacatttgaatcaagcatttttcttggaggccaagggctgacatcagcagcaccagggaacccacatgatagccccccaggagtctagagagtgctggcttgaataagtggtcatcctttcaattaacattcgttgggccttatttatta

SEQ ID NO: 149061 - DNA, 490 bp, Homo sapiens
gcttgggaactacactgggacacagcagagcctcttggcagaaatcaggcagcccatggagcttcagctgcatgactctttgaattcacaaaaggatacctttaacagtacttctcaaaaaatgtatataaggcatgtctcaagtccctatatgtttctagggataaaaaaattcatttcaaactgatggcaacctccccattctattccccagctttctatccttcttcctgcttaatttttcttcttagcacttgcctctgtctgacatattgtatgtcttacttatttattcatttgacattttaattagacactagcagtattgttttctttgaatacatttaaaggtcctagatttatttctttttgatgctcatcttctaactcattccctcctatcaatctcagactgctgtaaataaatgattttttgccttttttttttttttttactattagttatcatatttatttttcttaaacaagc

SEQ ID NO: 149062 - DNA, 498 bp, Homo sapiens
agctcggattccaggaccagtcttaagaataaattgactgggcacagtggctcacgcctgtaatcttaacactttgggaacccaagacgggaagatcacttgaggtcagtttgagaccagcctggccaacatggtgaaaccctgtctctactaaaaaacaaaaacgttaggctgggtgtggtggctcacacctataatcccagcgctttgggaggccgaggtgggtggatcacttgaagtcaggagttcgaggccaacctggccaacatggcaaaaccttgtctctactaaaaatacaaaaattgcgcctgccaccatacccagctaatttttaaatttttttagagacggggctttgccacattgcccaggctggtctcgaactcttgggctcaaagaattcacctgcctcagtctctgaaagggttagggttacaattgtgagccactgcgtctggccggcaatatcttctataaatatcaaggccttcaatggaa

SEQ ID NO: 149063 - DNA, 191 bp, Homo sapiens
cttggcagatagaagttcagacttcacattgaaaggatccagggaggttatggaacatgtagaaggatgcagaggaagcttctcttagatgggaagtcatgcagtggccccagaggggctcctcagatgaaatgggcctcagctgggagtgctgggagaggggccagctccaggggaggactcgaaaatgt

SEQ ID NO: 149064 - DNA, 557 bp, Homo sapiens
cccattagctgttcttgagtatccctgtcatccaggactgcaacacagagtattaaaagtacgagccatgatccgagtagaccatctgtttatgagactagttaatttcacatcactttcttgagcgtaaaaacaacccccgggaatgacagaatatgcctctctcataatcataatcgtttttcattgcttgttaaaacgattctttaacttttaaagggactctattgatattaattaatcagctctcgtgctataaacatttcaagcactaaagtgcaagttattcttctctgccaggcatttctctacatcttttcttttacatatatcttgctagaagaggctagcacagcattagcagaagagcatagaaaggtctcttattcctaccattgtttaccagtagggttgcctgatggaagggcttataatcatggttgcaattttgtcatggcctcacgaaatggcatcattttcaaggatgtacatcaatgatagtgtgcatcttataaagataattattactaagaacatcactttaacctggatcatct

SEQ ID NO: 149065 - DNA, 203 bp, Homo sapiens
aaacttttctccccactatgacttactgactcccttattcatttaagaagcacctgtagtgcatctagtggatgccaagactgcagttgggagcagctgtaggaggaaatgtgttcctgtactcaggagcttagagtctggtagaatctagtcagcttcgggcattggcaaactcctgcctgggcctgcaagccaagagtaaa

SEQ ID NO: 149066 - DNA, 209 bp, Homo sapiens
ctaaaaccaactgttatgatgacacacaaaagtgcatattatatagttctagacaatagctagacctgggccgtaaatttgattctgagcttccagggacaaagccatagggaaatctgaacaatgatgaaatttactttccctttgataaaaataaaagagctcattttttttttttttttgagacagagtcttgctctgtcgcccag

SEQ ID NO: 149067 - DNA, 411 bp, Homo sapiens
tatagggcacagcacgagaagaacttccaaaagaaattttaagaaaaaaaacagcttttctcatattaagaacaaaaagcatgatactttaagtcagcaaatgatgctcatacttcggtttattttatgacaagttagggtcaaaagagaaaaggtgggaaatgaaaagtggaggagaaaaacaagaaacagtgaaataaaggaaaaaggcagcacttaaagtagagaagttcaaaggaggcaaaagagagcagaaacgttccatggtgaaagctgagctgtgttcttcacatttagcattctgttgagcagtggatagccaagaaattttcatgtattcaaagctctctgaaatttaaattagcagtcttgaaccagtcctgcttttattttttcgttggtttttttctg

SEQ ID NO: 149068 - DNA, 195 bp, Homo sapiens
tagagcccgcacctgctgccaattcccttggcctggggctaaagccaggacagagcatgatgggcagccgggatacccggatgggcacagggccattttctagcagtgggcacacagctgagaaggcctcctttggggccacgggaggaccaccagctcacctgctgacccccagcccactgagtggcccaggag

SEQ ID NO: 149069 - DNA, 434 bp, Homo sapiens
tgtttttgtatgtctgagaacatagaccacccagtattcagggtgaatgcctgtttttgctggagggtagaggaggttgggttgggagaaactagaggtcagtcacacaggtgctgcatgcttctatgactggccccagtaaaaactctggacaccaaggctctggcatgcttccctggtggggaagcatgtatcatcacacattgttgctgggagaattaagcacatccctgtgcaactccactgggaggggatccctagaatcctgtgcctgatttctcctggacttggctccatatgccttctccttttgctaatttttatttgtatcctttcactgtaataaaccataagtgtgagtatgaaagcattttttgtttgtttttgagatggagtctagctctgtcgcccaggctggagagtgcagtggtgcg

SEQ ID NO: 149070 - DNA, 285 bp, Homo sapiens
ctgttgctgaaatagaaacctacttatctctaggagggccacaggtattaagtcatcctttagtctcgtcttttctaggctagacgccaatgcctattttccatccttttaatatcagcctgactataacaactcttcaaacgggaaaccaaaatgggacataataaaagctgaccaaggcctggctgaagtcccagtgcttcctgccacgttcctgttaacacatcctaacatcattttcacattgataatagcatctcttagagagatcattcattcagtttt

SEQ ID NO: 149071 - DNA, 427 bp, Homo sapiens
tctcaaaaaataataataataaattaaataaagtacagagagaaaaaaattcatcaactagaattataaactacataacattatccctgcaaagaaataaagtagaagtaaaagactctctgacaaaccaaaattaagagaattagttgccagtagacatgccttgaaagaagcattaaaagaagttctctggagggaaggaaaagaatataggtcagaatttggatcaacacaaacaaaggagaagcatcaaagaaggagtaagtgaaggtaaataaaaacttttatttttcttattcttaaatgacctaagatgtagtttgttcaaaataataatagcaacaatatattcaattatgtatgcttatgtctgcttataccttagcaaaatgaatgacagcaatgatacaaggaacgagaggcaagg

SEQ ID NO: 149072 - DNA, 568 bp, Homo sapiens
ctcggcctcccaaagtgctgggattacaagcgtgagccactgtgcccagcctcacaaaaagttttttaaaagggaagataaaaccataaatgtaatgaaagaaaaagcaaataaatatttctcagcttggaataagaaagacattcctcggcacagtatgaaactgagaagccttgaagaaagaatgagataactgaatacacagaaaaataagaggtgtgtatggcaagagactatcataaagttaaagacaaaaatacaattccatgacaactgttggaaaaaccattcaaaatgtgtgctgtggcaatggcaggttagtaaactcatctttggactgaaagttaaatacagatgctcctcaagttatgatggggttacatcccaataaacccatcataagttgaaaaatagttaagtcaaagcaatgaatacacctaacctactaaaaacatcataggttagcctagcctaccttaaacgtgcccaggacactcacattagcctacacttgggcagaatcatccaacacaaagcctatgtcataataaagcactgagtgtctcat

SEQ ID NO: 149073 - DNA, 253 bp, Homo sapiens
gctcctggtcagcagcaaaggtttaatggatcgagattacggggaccaaagacgccgtgtaattaagccagttatttctctggctgggaacatctactcctcacagccgcaattgacttcgtcacttgtggttaccccgttcgcgttacctcgggcctaaacagcccatacgtcatctttttgagggagtctctcccttggaggcaaagttttaggagaaagatccctctgggagttgtagagtcggcgtggc

SEQ ID NO: 149074 - DNA, 252 bp, Homo sapiens
aagaggatcccgacgccatactcggatgatccccattataatattgaaatctctacagtggaggtgaggaacactgccacttctgttcctttaaatgtctgctacatctcagatgatcgttgggagtgattcatcttcatataattttagggctagaaggaacctcaatacgtcctagtctgtgcttaaattcccccattgcttcccttcttccacctgatgctccagcctctactcaaacacttgtagtcc

SEQ ID NO: 149075 - DNA, 375 bp, Homo sapiens
tatggtggcgcatgactgtagtctcagctacttggtaggctgaggtaaaaggatcacctgagcccgggaagtagaggcacagtgagccatcattgtgtgccactggactctagcatagggaaggggactgagaccgtctcaaaaaaattaaatagaaagtcttctttttttaaaattctgcaattcatgagaaactgcactcacacatagtgtgtgacattagatatctgataacacgttccttaatacaaaaacctcagaagttaccatgattatccaaaactactggtaccctgcccaggaccttttaggcaaagtccttgctatctcctaagctttgaaacctaggaaaggtaaatatacccaatataacga

SEQ ID NO: 149076 - DNA, 328 bp, Homo sapiens
tgcactgaagaacgcccctctttaactgtatcccttgcacttctgaggaccacccctgttcactccctgaagtcagaaataaaacacagaaattaaacagcaatagaagccaccactgacttgttaagatcccataatggccatgattgctaccttagagttagagtctttaccaaggatagaccaggatacaaataatataggaaatcagctaatttttttcatcattttcttttgggcgtagagaccagatgtgatatgaaaacagaaatacatatcaaggaaagctgacagtttgcggtttcaccacctatctgtgccccatggc

SEQ ID NO: 149077 - DNA, 677 bp, Homo sapiens
gatgtagcaatgactaaaatacaaagttcctgtccccatggaacttagactcttaacgggggaaggcaatcagatatataacctggagtgaggataagtaatctgtgaagaaaaacagggaagacagagtggtagatagtgctacttgacatgaccaggttggtcctccttgataaggttccattttattagagactttaatggagcaaggaagagaactatgtgaatatctaggggaagcacataccagacatgaggaataaactacaaaggccctttggtagagcatccttagtctgtttccaaaaaagcatagtatagaggcctatatggctggaacaaagtggaccaaggtggggagagtagtggattaggtcaaagacagctggagcaagattgtgtagattagccaaacaactctgaagacaaggaaattttagatttctttgggccaggaggaggtaatcttcagcgccagacagatgcagtgcttgcggccagctttcaaaaaggttgaaactgggaggggcatgtctgatcactagtactacttggacaggccaatgtgaagaagcttgtggatatggtaaatgaatactcatttatgctcacctaatgtaccttcgtatgctgcagaggctggaaaactaaaaacttcatgtcttagatttccttga

SEQ ID NO: 149078 - DNA, 757 bp, Homo sapiens
aagaattggagctattcctattaatacagtaagttgataatgttaggatgaaaaccatctttgaatgttagttgatttaagaaggaaaatatagtcataaaggtttctaatcatttataacttgaaaaaaagtacaaataatatgatgagaacttgaatccacagtaatatggggctttggaattttgtccttgacacttgtaaatttaggtggagaaatgagggttatgataacccccaggtcccaaggtcctgagtgcctaatatcagaatatttcaaaggtttaataattatcatgaaggttgagactgagatacaagggttgtgataatttcaaggtacagtcagttctgttttaatgcttgtcttgaaagcgtgagtttattccaacataaagaataatctgtacataacaggaactttgtgtttgcttaggtataatttcacctgagagaaatgctagatgaggagaaaactgttgagcagagcagcataggagagagcatacatgtgtgcaattctcaaatatctaccagcgatcttggctcatgtttgagttataaaccacactcaaccacatctgctgttataactttccacccaattttaaaaacccctcttccatcacttgataataattcacaagctaaaccctgccaatacccacttccacaagcaaactgcaggtctttttaaagacaacgtaccatgtttattgtactgtttatgtatattttaaccacctaaaatgtataa

SEQ ID NO: 149079 - DNA, 384 bp, Homo sapiens
aatttttgtcattttagtagagacagggtttcaccatgttggccaggctggtctcaaactcttgacctcaggtgatccacccgcctcggcctcccaaaatgctgggattaaaagtgtgagccaccgctcccagccgttattttcttttagcaaatgaatattgtcatccttaagggcctattggctacagccacttctgataccaaatggtgaaggttcagtacaagaaatagaagccagcagaaaaggaatttgatacaggcaaataggtagtaaaaatcattcggtacactgaaaaatgacctctatttgggcctccaggaaaatctctctgaacacccagaagtaactccataaaggagcgaccactcctgtaacagtcag

SEQ ID NO: 149080 - DNA, 499 bp, Homo sapiens
aaagaaatacgaaccacaataagagaaagccaacagaaccagcagataatttgcatcctgtgaacttggagatggcagtcttaatagacttggccgtaagtatgttaaaaatattcctagagagaaatactaagacaagaataaacagtatgaaaaagaaccaaataaaactctagagatcaaaaaaatacagtgattgaaagtaaggtcagagaatggattaagaaatagaccagatacagatgagaagagactcactattaacttttggagacgttaattgtagagtgcagaaagataaagaaatgtaacatcagaaagacaagttagagaaaatgatttaaagtgcatctccttagttaagattagtacaaaataggaacaggctttgattttagagattacctgacttgcttggtatgtggcaaagtaatgcgaaaatgctttgaaaaaaaaaaatccccagaataaaccgcacttgtgaactactgaacgtatc

SEQ ID NO: 149081 - DNA, 126 bp, Homo sapiens
gatgctatgttcttcctattgcattgcatcagaggacaggtaatttctggttttctcttttttgtgatatgattgattcaggtgttatatcaacctaatggacccattaaacagttccctatcact

SEQ ID NO: 149082 - DNA, 397 bp, Homo sapiens
gttctaggagtttggggaaaaccttttaggagttcactgagggatgggaaattcaggaaaggcttctcagaatcagttttatataagaagaggaaaaagaagatgtacacagggtgcttttgagaacaggagtagataagtttggctgaagtgaaagtttagtacaggcatgcctctgagatattgaaaggttcaattccacattactgcaacaaaccaagtcacatgatgtttttggtttcccagtacacaaaaaaattatgtttacactatactataggctattaagtgtgcaacagaatgtcttaaaaagcaatgtacatatcttaattaaaaacactttattgctaaaacaggctaatgatcacctaagcctacagcaggttgtaatctttgt

SEQ ID NO: 149083 - DNA, 659 bp, Homo sapiens
gttttgttttgttttttccctatctacttttagggcctagcactgagcaggcctagaaaatttgatttattatttgatggataactggagatcacctataagagcaaagcagaatatagtggaatgaggattaatgcttcatcgccccaaattttctagctagttttgttcccatcctcctccttcttccttagcaatagctcttagcagtagggctaacttctactgtaaggaaggaatatggttcatgaaaaggaaagtactttgacccacagtctctctccctgtcaggaagaaccatctgcttttttttcttccacccacccacacaatgtgctttggagccaggcttcttaaaacccccaactcagcattcttggttccttaacttagtttttcacatccctgaattctcagaaggtcttgaaaagatctagcccagtccaaggtcattttgataacaaattctgttcattctgtagatattggcgaccccttgtgcatctagctctgtgtgcccttatctcttgctctccaaggactcaccatctggaagggattgaaacatgtaaaccaggggctacaaattgatggcctaggggttttggcctagttcctttttgtatgttttgaaaaaacctaaattacaaagtatttga

SEQ ID NO: 149084 - DNA, 634 bp, Homo sapiens
caggagtcttcaagtgttcaaagcacaccttttaaatctaaacaggcaaagaaacaagttgcctccttcagtagtgaccattcactgcaacagctgtcagccacttccaaaactgcagcttttgccagtgacttgccagccatcacacatgaaaatgtcaagttctccaccacaatacaaagtaatacctcatactccaaaagccagagatccagaaactccgtgcaaaatagagcagagccacagacctgagagaagcctactcatgactcttagattccatgagaaagactgaagaccccaaaaaagggtgggcatggcccctttttccgtgtactcaaggggtctcaggagtgccagaagtctcctatgtgttcaagatggcaaaagggagaaggagcagaagtggaaggaaatggaagagttaagtattagaggggccagtttgggagattttaagctttctaaaaggccaatgaagttttacatttttctcaaccaaaataatgccaacaaggtaggaagcaaacagtggcctccaacatttttttaaaaggggtttcagtcgactgaaaaatattatcaggaataagatcgaaaagagaaaaagcagaagggccttttttagttctca

SEQ ID NO: 149085 - DNA, 805 bp, Homo sapiens
agataatttgactttctctctttctattgaatactgtttatttcttcctctggcctgattttcctggacaagttttccgaatgggagttgtaatgcgagtggtgagagagagcatacttttcttgtgccggttttcagggggaatgtttccagcttttgcacattcagtatgatattggctgtgggtttgttgtatatggctcttcttattttgaggtatgtttcttcagttcctagtttattgagaattttaaacgtgaaggaatgttgaattttattgggtgctttttctgcatctattgaggtaatcatgtggtttttttatttagttttctttatgtgatgagtcacatttgttgatttgcatatgttgaatcaaccttgcatcctggggacaaagccaattccattgtggtggatgcactttttaatgtgctgctgggtttggtttgccagtattttattgaggatgtttgcacagtgttcatcaaagacattggcatgatgtgttgttgttgtgttgtgttgttgtatctatgttaggttttggtatcaggatgatgctggcctgatagaatgagttagacagaacttctttgtcttcaattttttttggatagttttaggagaaaatgtactatctcctctttacctcaagtcaaattcagcttgcttggtaggctagttcttactgcctcaatttcagaacacattattgatctattcagggttcagtcttgtggagagtcttattttgcaaggaaattgtccatttcttctagattttctggtttatgagcataga

SEQ ID NO: 149086 - DNA, 515 bp, Homo sapiens
gtccccgtgctttgtcatggttgttctctgggggtggggagaggcaggcacttggctccctgaggtctgagctctgccaggagggagaccagccacacccctttctaaaaacagggcttccccataaaaccgtcctgcagtctgggatttatgggatggcatgttggatttgcggctcaggaatctacaagtagcaaccataaatctcacacccttgctcttgcttgtagggtgaggggaggggagctcattaaaagcctccgggaaggaggccccccatttctgcaagacaaaagagattcagccctgagtcacacctgctctccctaaggttcagtgaggagcaaggagccaccagcctgtgcctggggtggggaggacagtggggctgggagctggaggaagggtgaggccagaggcagctgactggagcaggaatgttgggcccagcagtgcaggcgatggggaccagctgttctccaaccgcaggacaagagcctgaaaggaagttgctg

SEQ ID NO: 149087 - DNA, 454 bp, Homo sapiens
gtccccgtgctttgtcatggttgttctctgggggtggggagaggcaggcacttggctccctgaggtctgagctctgccaggagggagaccagccacacccctttctaaaaacagggcttccccataaaaccgtcctgcagtctgggatttatgggatggcatgttggatttgcggctcaggaatctacaagtagcaaccataaatctcacacccttgctcttgcttgtagggtgaggggaggggagctcattaaaagcctccgggaaggaggccccccatttctgcaagatgatagaaatcctatgaggaactacagtggtggggagaggtgattctacatggtggtgacggggtcttcttcacagacacatctcttttggggcatcatcttgggacagggtctgtgtcagagacacatggggggggatcatccccctggggatcgcgggccgg

SEQ ID NO: 149088 - DNA, 316 bp, Homo sapiens
ccagacctacaggaggtataataagagagtgttcatggctgattttcttatgttcttttgggttcctcagggaacaggaacctggagagtagggctctgaggatgcgactttttccctcagggatcggtactgagatatggaagccgagctgtgggtgggggtgagccctgggtggcggagctgctggcgcttctttgttgcttggcctttctcgataacttttcatattcgcctttcttttctgtttctgttgacttctccctacccagacctccctcctcttttctacccaaatatctgtcccctcctctcatt

SEQ ID NO: 149089 - DNA, 346 bp, Homo sapiens
ttccaggtgacaggaaggaaataaggaagccaagcagtgtagtggtgagaagaagcacaggttcacccatgtgtgtggaccgctgcttcttcatacccaggaacccagccagtcctggagatgcacagatgagcaaaccatggccagacactcactcccatgttgcttagcgtctaacgaggaaagcagatatttaaacaaaattgcccacaggatataaaagtagtgccgtggtcagagccgcagtaaggaggtgaggcttctagatgcttataacatggtcagcttgggtcaggcagggacacagatatatgaacttttttatttttttttaaatttttttgag

SEQ ID NO: 149090 - DNA, 408 bp, Homo sapiens
attaggagggcaaacacagctgttcaggcagactacaactgttcaagatagaatttgggctgaattccatgctaagacatgcctagtctcaggataagggcaaatgtttaagaatttaattgtttctcatcagaaagaagttacctctttggagaactgtttcgtcctcctgtattaacacgaaacaacattctctacctcaaaaatactttatataagactttggtgttttcaaagtctctcaagtatcacttctcactgatctgcaatgcccttggcttgataagcaagctgataggtaactttttgttgccaggtgcccatacagaataccgtcatgcgttatttaatgacattctgagaaatgtgttaaacatcagagtgtttacacaaacctacatggtatgg

SEQ ID NO: 149091 - DNA, 414 bp, Homo sapiens
agcgattctcctgcctcagcttctcaagtagctgggattacaggcatgcaccaccatgcccagctaatttcgtatttttagtagagatgggtttctccatgttggtcaggctgctctggaactcccgaccccagctgatctgcctgcctcggcctcccaaagtcctgggattacaggcgtgagccaccgtgccctgcctctagtttatttatttttattccatgtgctcagtcttgcgagcacgtggtctgttttcttgggcctggccccctcagtgcactgtcttaataccctagcccccagtccctctgatcatatccccagacacccctactgaatcccaggtctctaccaagggaaaggcagggaggaggcattgaccaaggagaagagggggaagggacagggaaggtc

SEQ ID NO: 149092 - DNA, 349 bp, Homo sapiens
tttggctccttcctgaaactgtgaactccacaactgaagagtcagggctagcttcatgagcatgctactgtacagttaaacacggttccacattcagaagggccccatgcttggcttaatgctctgctattttcatcttgaaatccttaatacttttcacaatttcattttgcaaaccacatagtcagtcctgggttggggccatgtccatttctgttggatctccagcacatggtgtgtgctcaaggagcattgtgtaaaggaatgtttcagtgacaaaagatgatctcttttcatgagggcatgaagcataaaatctctaatacctaatatcgagtcaggatgtttc

SEQ ID NO: 149093 - DNA, 216 bp, Homo sapiens
caaaagtattacaaaccgaaaccatttgagtcttagcattatatatcattgttcaagatactggcacatactacatgttgccatgaatatcagctgcccctgtctccaacacacacatgcgtgcacacgcacacacacacacaccttgtaaaatactatcagatttagaataaacactgtaagatatttttaatctccctattctataattttaag

SEQ ID NO: 149094 - DNA, 137 bp, Homo sapiens
ggcagcctctaggagtggagtcattgtgcaggaggagactgtttcacccagcctgcagcccaggttggcaggtcagaagctgtacagacagtgggttggtgcagtcacctacacctggtaaatctcccagctctttt

SEQ ID NO: 149095 - DNA, 254 bp, Homo sapiens
gatggctggaactgtggcagccatttggggaccatgagggaataagatgccaagaaaagtgtaggaagatgggaagaacctgggtggatctatgcatccaggacttggaaaacttcctgtaaagggccatatggtaaatatttcaggtgttgcaagtcatatgcagtctctgtcataccttctttgtgttttgagtggtttttggtttattttacgatttttttttttttatggagtctcgcactgttgcccag

SEQ ID NO: 149096 - DNA, 287 bp, Homo sapiens
catgtggggtggggtgggagtaccattcaatctaatcattactgtttttaattttaaaatatagcttgttccaacaactatcttcaaaattacaactggtggtttataatatttcaggaaatgcatggtacagaacaaaccttggtagtaaaataaatgtggaaacagctgccatcgggtcactttaaagttttctcatttgcttattcattcacatatatttacaaagcacctgctgtgtcgcaggcactctgcttaggtgctggaggcagagtagtgcacagtac

SEQ ID NO: 149097 - DNA, 277 bp, Homo sapiens
atgctctcttggcttattctttccatatatactgtggttatgttctccagcagcacactaaggctatctgtgttatttttttttctagagagtttcttgaggaaagattaaaaagaaaatgatttaatgatatatcctttttcttcccactaaaatcatgttagctaaaaatcctgactttgtttttggtagaccaagctatctctatatattattagaacaattcagtctctaaccatgacttattttaaattaaaaaaatggataacctttgcaa

SEQ ID NO: 149098 - DNA, 247 bp, Homo sapiens
aaacacttagtatgtgcatagattttttttttcaagccagttggaataagtttacagtccacaggacactggctctgcattctctcaagtctttcccagtcttaatactatcatcttatgttcatttgaaagattttcagaaccagggtgaaaaggaaatcagtaagaaaggagtgaaaaaagaaaacgatggattcaagagaaaattcgaaggtaagaactcagcaagaaggtggctatagggagg

SEQ ID NO: 149099 - DNA, 349 bp, Homo sapiens
agccactcacacatcagctcctgcctacacgtgagccatactgacatctttcagctcacctcccaccttcagctgctgtgtctaggccttcgcagcgctgtgccttgtgcctgacacagtattcactatcttccccagcatctcaattccctctccattcttgctttagctggaaggtcccttctgacagcctgccgctaaaaagatgggtgttttaacttcctatggctgctgtaacaaatcactgcagccataggaaactaatgtgtggcttaaaacaacacaaatttggctgggcacagtggctcacgcctgtaatcccagcactttgggaggctgaggcaggcag

SEQ ID NO: 149100 - DNA, 333 bp, Homo sapiens
ccgggaagattattcccaagtaagtggcgatcctcgctgaggattcgatactggtgcccatggggttccgatgacaacctcgtgagacctgggtgcctactagcatactgtcgataaatatgaatgttttctagaaattggaaatttccagttaatgtgcacagtagaatgtgttagactatgtatggagctgaggacacaaattgacttgtgacatcctgggatattcacatgataatgaaaccagagtcttcaaagtggatgatgatttattgtgaacaaaacacagttaatcaaattcaattttaggttagggtgtgttaggctggcaga

SEQ ID NO: 149101 - DNA, 368 bp, Homo sapiens
gtcatccgggccatggtctgcagtccaggttctgccccctctcctgggcatgtggccccaggctggccctgaccagcttcctgtgagccccccatgtccatgcaggggacccttctgcaggcaggggctccagctgaacagaaggcagaatccccgtgagctggccaagaaagcatccactcaggagctcttcgtcatagcctccataaattctccagggaaacaagtcttcgccagctttggagagtcaggaggggaggaaaagagcgagcagggaagctccctctctaatagaaatgtgctcgtctgtgccttccgctgtccagttcacacactcccagacgtctctctggatcctcccagtcccc

SEQ ID NO: 149102 - DNA, 433 bp, Homo sapiens
ccctgagcccatttcctcacctgtcaaccaacaataacaatagtctttgtcacagaaagggcttaacaacaaagaggtgtcaatgaacatcagccacgactagagagtgggccatgggtcagggggacattcacccctcactcccaccccagggtactgtcaatcacttacagacatttttcttatttcctgtacttttttctcatacttttcctattcgataaacaggaagtatggaatcagtaagatgagtttcattcttttcagtagaccctttagtgccttaaaaaagtctgtagttaaagagcatcttcaagagaggtcctagaccatatggacacaaccaacatttgcagtcactattttggggggtctgaagggggcagaccagggcagctaatggcaagccccgtagaaggtgcagaaattttcc

SEQ ID NO: 149103 - DNA, 752 bp, Homo sapiens
aatatggtattatattgtacgtgctatttgtaacctgctttttttcagttaatgatttccatctttcatgtcaataaaatgttatcctttgtctatattcaaattgccccaattatagtgagatatatttgtagtatttttgtttttataaggggcatgtatgtgtgtttagtaggtgtgttcttaaatcacaatttttatgatggtaattatttataattagctctgagtataacacctaagataaacaaccagatagagtccaaagtggtgactttctaaaaattgtggggctttttacatttagtaatatctatttttagtatgttaagaacttatcagcttagtaatctgacctattactatttatcttcaaatcttaatttcatgtgttattttcttcaaaatatttcttatagcataataagcattctcaattttgagaatgggtctatttgtttcgtgtacctggtacatttcatttcttgcacacacagagagagcactgcttcattcctgaactcattactgaactacatgggttagcataagattgataaacatcagcagcaatagagaatgttttaaaatttctgtactattactggtatgtgtaattgggttgttggtgtgcacttacaaggtacagatatgaaactaatccagggaattgttatttatttctgaaagaagtgggaaatctcatagggatttcttcatttcaaagaagagcttttagagtcttaaaaaaa

SEQ ID NO: 149104 - DNA, 453 bp, Homo sapiens
agtgcagggctcctggccccctggatttgctcctagaatgtaatgtaaaatgtaagtagccacatttattagtctgtttctcaggaaaggtcagagaagtagtggaccccagggaagggacaggcttcggagaggaaattgggaggacaaatggaaagtcccttcacccacccacctctccagacacatcagtgggcagtgagacctctttgcctatacatccctgagtctctgcacctagcaccagctctgtgcctgtgaccaagccatagctccatccttgttcgctgagctgaactgagcctatcactgccttatagagtgtctgttttttataaatgactttatacgaaataccttctttgtatgtggatgctttgggcagtgtgtccagacatttcagaagaaaaaaaaatctaaaatgtcatctatttccctctttaccccgcagca

SEQ ID NO: 149105 - DNA, 488 bp, Homo sapiens
gtagtcagagggtggaggggaggcagagatggttaatgggtacaaaaatatagttagaataagatctagtatttgatagcataacaatgtagttacagtcaataataacttactatacattttaaaataacaaagagtataattggattgtctgtaacataaggaagggatacaggcttgaggtgatggacaccctatttactctaatatgattattagacattgtatgcctgtatcaaaaatatctcatgtaccccataagtatatatactacgtacccacaaaaattaaaaattaaaagtaaaaataaattttaaaaaattcattcataactaaacaaagataatatgagagtaactatcaagtatccaataagtgaacaaaatacactcttagttaaaactactacaaataatacaaccttccacagcggtcttgttctggcaggcaagctataaagactagagaagaacagagggaaaaaaaaa

SEQ ID NO: 149106 - DNA, 957 bp, Homo sapiens
gcatgcctctgtgtgtgtgtgtgtgtatgaatgtgtgtgtgtgtgtgtgtgtgtgtctccctcatgcacatgtgtttcctaacatgtgtgtttcccaacactgcaacaggcagtcatagtctgcagcctcctggcctgacaccacgccaacccaacagctgaagaccaaggccttcaatcagtaggatgtgaattttgacctggagaccatgcggacataggcccaaggtggctcgcctaccagtcaactcccctggtgtgagtacacactcctcctcacgggacatctgatgtcctgagcagacactgtctctagccgccctctcaggtgaggcgtacctggtggaaaaccaatcacaacctgtgctggagggcgcctttgcaatggccagcacatcagcctgaaacttggcgtcaaggccagaggtggtcttcccaatctagccaaaggacctcaagacacagccttcctcccctccactcagtccatgtgcctgcactatgccctctcgacacacaaacggaatggctgcttttccaatgggacgtcccccctaccgatgtcccaaggaccaggcggatgggatacactgcctttcattttccttgcattggacacacccacagggctatcctgtactgacctctgaggcaacatcccattatgcagccaacttgactgcactactacccgccgcaatgcctcaaagtcaacactacctgaacaccaccactgggtctacatgcatgcagctagtgagtgagctgcgagctcagaaccacccatcctttccaacattcctaagccatctgcatgcccttcaacatggcatggctgtcctggctgcgctgagacttcaaaccggttaagggagccaaaacagttcatcacccctagggtgtagtggactccaacacttaaatattgccaacatgcagaggtgtgaggcatcccaa

SEQ ID NO: 149107 - DNA, 773 bp, Homo sapiens
ctacaatggtcatagctgactcttgaggataaaactcctcccacctgaactgccatcagttcaactcccctggtgtgagtacacactcctcctcacgggacatctgatgtcctgagcagacactgtctctagccgccctctcaggtgaggcgtacctggtggaaaaccaatcacaacctgtgctggagggcgcctttgcaatggccagcacatcagcctgaaacttggcgtcaaggccagaggtggtcttcccaatctagccaaaggacctcaagacacagccttcctcccctccactcagtccatgtgcctgcactatgccctctcgacacacaaacggaatggctgcttttccaatgggacgtcccccctaccgatgtcccaaggaccaggcggatgggatacactgcctttcattttccttgcattggacacacccacagggctatcctgtactgacctctgaggcaacatcccattatgcagccaacttgactgcactactacccgccgcaatgcctcaaagtcaacactacctgaacaccaccactgggtctacatgcatgcagctagtgagtgagctgcgagctcagaaccacccatcctttccaacattcctaagccatctgcatgcccttcaacatggcatggctgtcctggctgcgctgagacttcaaaccggttaagggagccaaaacagttcatcacccctagggtgtagtggactccaacacttaaatattgccaacatgcagaggtgtgaggcatcccaa

SEQ ID NO: 149108 - DNA, 317 bp, Homo sapiens
tacagactgaagacactggggaaggagcatccgtgtgtgtgtgacagctgtgaaataatctgttctggaacaagaagctccaaaatatcacagcctgggatgactttgtgtgctttccatagagcatttggctacatatcaaagccgttattagtgggctgttccctggctcagggcaggtgtctgcctcagccatgtacataatggacataaggagctcaactcttctgtctcctgctgcctgatcccagatgaggaaaaggattatgaggaggtgccacatgatggtgaaatttgctttcttctcattgtaagtt

SEQ ID NO: 149109 - DNA, 335 bp, Homo sapiens
tactttttaacattttgaaaaaaggtctcttctttcttaccacatggcattgcttcttggaatttttctctccattgagtcagattgctgggttttcaattcttgtaaagataaaagttacctttcctcagttacagtgagctcatgaccagggggctcctgagagggcttttggtgaatttaccacaatccagagtgtgatcctgagatttgactccaagaccaccaagaatggattcatttgtcagagctgactcatgagtctggagcttcaagctagaatgccaatttattaacattctgttaatgaattaacagtgctgttatttctcagg

SEQ ID NO: 149110 - DNA, 388 bp, Homo sapiens
cgccattgcactccagcctgggcggcagagcgagactccgtctcggaaaggtttcaaaaaaaaaggaaaggtttctctgggcacggtgcaaggccgacaggagaagggcccctgtgcctgcgcagggcagaccagttaacacactgcaactgcccaggcaggaagcgagaggggcctgaactcaagggtgagcgcaggaggtggaaagtacatgcaccggggtgctactgagccagcaggatccacggggcggactggtggacgcgggcagccgggtccaggttgagcatgaccccgggctttcaactcgtgcgggcccgccccgagcgctctccggcttcttcccagccctctccttgccgcccctccccgatcttcccacccaacg

SEQ ID NO: 149111 - DNA, 496 bp, Homo sapiens
tttattcatttaactatagaaaaaagaaaagaattctaggtttcaacatgacccttttccaattctataaaccaggtcaccctaccaatgtctggcatttctggaatatttataaataaccatagtataaaaactctacctcccacatcctctgaaaacatagctggctacaaattccccaggaatattatgtgggacatgtggtttccatgcctttaaaaggggtatttgtaggctatcctgaggaatatttcagccaggtctttctcctgtctttttcagcctagcaaactttgccccttagtcctgctctgggaggccttaaaaaagtgatacatttgaaacaaatagatcccttatagaatcctcagtaggtggcaatggcagaaataaagatccaaaaattcaattcaattctgagcaggaatctggatgtagctggtattaacaagagtggtttttggaattcataaaaatatacgctggaatggaattg

SEQ ID NO: 149112 - DNA, 490 bp, Homo sapiens
acattaaaaaggcaactgaaaaatttcttgcaacaagtaacaaatgacgataatatccctaaacctatgggacacaacaaaagcagtactaagagggaatttatagttataagtgcctacatcaagagaggaaaaatcttaaattaacaatctaatgatgtatcttaaagaactagaaaagcaagagcaaaccaaatccaaaattagtaggagaaataaagatcagagaaaaaataaaactgaaatgaaaaaaatacaaaagatcaatgaaacaaaaagttgtttttttgaaaagttaaaacaaaatggacaaacctttaggtagacttagaaaatgagagagaagatccaaataaaatcagaaatgaaaaaggagacactacaactgatagtgcagaaattcaaaggatcagtaacagttactacgagcaactattaatatatgcctataaattggaaaatttagaatgagcaaatttctagatacata

SEQ ID NO: 149113 - DNA, 191 bp, Homo sapiens
tcttctataactttgcttacatttaatttaaattttacttacagtgttaccactttttttttttcctgcacatttacctttgctgaccaactcattttttttgctcatacttttgttgtaagctgtcaccaacttccatcactgggaaataaggagggacacaactacatgccttggtatttaagggtaaa

SEQ ID NO: 149114 - DNA, 363 bp, Homo sapiens
acaagatccttgtccacaaggagatggtaatccaatcctgaatccaacactggaatgattgaaaagagaactcttaaaagaactcaatccacaagagtcaagaagagggaaaggaagaaaaggagagaagaaaaaaacagattaatcccagtgagtggcaagggaaggactagggctggtaatttcaaggttcaatttcaacagacaaggtgaaaagaaaaagaattgcagacaaaggaagaaacatgaacgcagacctaaagagacatacttggcacatatgctggaaataacatatgcttgcaggcaactggcaccgcacctggctttggaaaggcacctgataagtaactgctatcgctg

SEQ ID NO: 149115 - DNA, 537 bp, Homo sapiens
aggatggtctcgatctcctgacctcgtgatccacctgcctcggcctcccaaagtgctgggattacaggcatgagccaccgcgcccggcccccacccacagatttgatgagagatccttgttcatctgcttcaccagcgtggtgtgagctatttgtttcacgctagacattggtggtcgaaatcatttaatctcatagtaaagggtgtaaatttactttgtactcacgtggaaaggtacacttcacagtttagtttgggggaaacgtgaagttaaatgttttaatactaactaggcttgttcactgaactgtgtaatgtgggtaaaatactttgtaaaggaccttatactcgactgtatgcctcccagtgtatttcccctaaagcagtgctcttattggtctaaatctgttcagacttgctttcattacttggtttgttaaaatttattatttaactcagtctctgaactgggtgtgagatcccttggtttccaaaacccttgccacctttaaagaatagaaatcggcccccaccaca

SEQ ID NO: 149116 - DNA, 457 bp, Homo sapiens
ggtcttttgtggttccatacgaactttagcattatttattctattatttgaaaaaagtcattggtattgtgataaggattgcattgagtttgtagatcactttgggtagaatggacattttaacaatattaattccttcaattcatgaacatgatacgtctttccatttctttgtgtcttcttaaatttcttttagtattgttttatacttttaaatatacaaatattttatctctttagctaaatttatttccaagtttttttaaatagttgttgtaagtgacattttttgcttgatttctttttcagatagtttgttgttagcatatagaaacacacctgatatttgcatgtttattttgtatcctgcaactttactgaatttgtttattctaacagtttttggtggaatttttagagttctgtctatataagatcatatatatttttcaaacaa

SEQ ID NO: 149117 - DNA, 404 bp, Homo sapiens
acaattaaaaaaggggcaagctacgtgatccctgaaatataaataaggaattatttgattccaccccgacccctagctattccttgtgttcacacacttctgggcctcccgggtagcctaagcccagaagcgggaaagcaagaaagccacgcaagcttgcaatccctggccaggttggaagcaggaaacatgagagctcacagaagctgcctggagattcgtctggggctgcagccctgttcccagttttggaggcctgttcaaattgaacttccaagccccgggccaaactctcccggtggtgtgctcctgccgacacgcgctctgtgtgtctggcaagctgtgtggtcagaagaatgtgcttcccacgcactgggctccaactatgcattagggctcagctt

SEQ ID NO: 149118 - DNA, 254 bp, Homo sapiens
ctggtcatttaacatttttagtagaataggtaacaaagatgaggggcagagaatggaggcagttggtaaaaaagggtggtgttaggatgaggtaaaagggttatgagaacttttggtcaggtacaaagatggaggaagagaaaaacatatcctcaaaaaaaaaaaaataacctcccacttgtcaccattaggtactgtttcatcaagactgaatcatgagtccagcccgagtccagcccacaatccatcttagt

SEQ ID NO: 149119 - DNA, 440 bp, Homo sapiens
taagtgaagaaaaagactcagatttaagtgatgcaacctgtccaggaaacctaaaaacactacataagggtttgggaaataagcatctttgataattttttaaagtagcttccttttataattttcctttgagaaattcataggaaaaagaggtattcagacagcagaattggacatcctaggtccccagccaaaaggctattaagccctcaaaaacttctcattaaggctctaagtagtgagattcagatggcatgacaaaaagtgaggggtatggggtaaggaatgaagaagaacatagtagagaaaattctgttggagagtggtctcaaatgtcatataaactaaacaaaattttttaaatccttagatcttatgtaatcaaattatacccaagatctcacaataaattgcagagaaggtgctagaatccaaatgtg

SEQ ID NO: 149120 - DNA, 303 bp, Homo sapiens
gaattgttttgccttttgtgataagaaaagttctgtgattcttgggtttaagtggaggactacaggacattgaacttggcgactttattttttggaccagatttgggatactgaaccctttactgccctaataaactcttaactctagaaaagagtaataagtcatgtcttacaagtatacctgtaggccattttagctacagttttaagaaatgttctcatattaatttatatgagacactggtatagtccgtagtcttcccattaagcaccattacctggatatgccaccttaatggaatt

SEQ ID NO: 149121 - DNA, 407 bp, Homo sapiens
tttttgcaataaaatttgtttagcctaagtgcaagccagatactcagaatgaggcagtttgactgataaagatactgaattttaaaaggacagctggaaaggctgggcgatcaatatgaccttgactactcacaagccaaataacttatggaaataatgtaaagaccctgtgaactttcttgcctgacagaagggttttaaataatattttaagaaaatcaaaagcaaacatcccctggaccttctttacagattagatctgaaatgaaagaccctgagttacacaattaactattgattttgctgatccatatttaattctcatagcaatcgcattgtgtttacacagccatgcagggcagacatacttctcttggagcaaagcacctttcacttctacattaatt

SEQ ID NO: 149122 - DNA, 185 bp, Homo sapiens
acatcattactattatggtggcattattaacagagttcttcctgtattagaagatcatgcatttccccaccttagggacttaactcatcaatttggtgaaagttctaaatcgtgacctgactagcctagactgaagcagcagagttactaatctctcctcataataagtgcagaatctcgaacca

SEQ ID NO: 149123 - DNA, 571 bp, Homo sapiens
tttgttctcatagcaatctaatgaggtagaattcattagacccattttacagggggagaaacatgaaggtcagaggagtaatgtgtcaaaggctgcaattccagaaagaggcaaatctgggattcaagtcctggtcccatttgatgttaatgtccaggcactcaaacatgaccctggcctgcctcaccagcgtgtatgaggaaggttcatgctttatcaggccatgaaagagattgagaaacacatatcagaaaggcaggaggagacacggaagagaggagtatggaggcaacaaaggagagatcttaagtaggaggaagtgcttttctgtattccaagctgcgaagatagaaggacaagaccaatgcaaaaactgattaatctttttcaagacaggcatttcagaagcataatggggggtgaaatgcgtgttcctagctcagtgctcctgacttggtggtagtggagtgacaaaaccattcatttatttattcccaatactgggagtcatggaacagccttcataaggtggcatccaagcagcacaatgtccctcctgttcctgagcatt

SEQ ID NO: 149124 - DNA, 131 bp, Homo sapiens
aagagatgtgatgagaccgtctacttataaacagttgctccagctactggatacagaacagacagtgatggaagcacgagatcagctaagaggctaataaaaagagagtggtgacttggatcggggtgtag

SEQ ID NO: 149125 - DNA, 388 bp, Homo sapiens
gagcaggaagctgccctagatttgggcagtaaccagtagaacttgatactgacgccagagcgtaaaaataaacacctcctacagttctgtcttaatccattggcatcagagttgctattattaacccataggcctcacaggcagctgtgatggtcagacaacagcctggacaaaacctatcctgccaacttgggatcacactctctccccttcacctactggaatatgatctggggccccaggagaagcaccatcagtctaggagcatgccctacaacaggtaacactggcggtggattagtatctttggttttggagagccttgaggctcccagggccagcctaccagcctagagtatgatggccacagacaggatgactgattcag

SEQ ID NO: 149126 - DNA, 518 bp, Homo sapiens
agatgaatcaaccagagtttaagcttcctcattatgtgtctgaatttggaaagaagtggacagaagacatcagaggaaaataaagaaaacccctcaagaattacaactcccatataatgctgtgagatctcaacaagtctaggagcttttttggatcctgaaatgaagttcatagatgatagagtacatctataattttaaagtcaacatgttgtcctagttgaatagaaaaaataaaagtaatatataataaactaatattttcaatgatatgtaactgtttgaccatgactacactagaagtagttaaatgatgctggcactcgtatatagaactcatgaatgtgagaactatatgtgcagattgatataggtgtgttattcggcaacgcaaatgctacgggttgtggtatttccatcagtgacataattttccaaacactgaacagtttttctgcaccaaagtacttgcatccctggaaaattgagcctgttaaaatcttgccaaagaaaaaaaa

SEQ ID NO: 149127 - DNA, 475 bp, Homo sapiens
aagatggcaagggggcgcatgtgtgatgtttcgggtgtgtggtttgctcatcatctgccccacagtgatagtttcatggaggcgggagctctctgaccttaggacttgtcagatgagcaaatgcggcttcctttctggtcagattccagacccagggagatgtgggtgacaagaaaagatgaccaatggctcagacataatgcacccacaccacagagggtgatggtaaaaaaacgcgtctctgccctgctgcctcgttgctatgaaaacccaacaatacccacttgggtttgcccacataatgcatacaaaatagctgttggggtcaagcacaccaattcggaagtgacagaaacaatactcctgtattgtgtgacctgatattgctcagtgatatgtatctcaacacccagtgccacctggtgaaatttcagtcaagaaaatgacacagttcctttcatacccccagctctct

SEQ ID NO: 149128 - DNA, 425 bp, Homo sapiens
acattttctccctgtgagcacgttgcaagggaaaccaaaccctcaccagcttgggcctgggatctgggtgtgtgactccttagtgtggcgttgttagcggtggcagcctccctggacaaggctcagatggctctgccaacattggccttggggtctgcttttctctttgccaccctcagattggcaggttctttatttggacatgttaatactttgtcattttcccagagagtgctcctgttcttgaaccatctggccccttcagtgcaactctgtaggactgtgctctgctccgtgggggttggtgtcactgtttaactgctggaggatgttcttaccacaatcgttttcacctgcatggtgggtgcccccctgccttcctctactgccttgaataggcttgtatcttgaaaagttcacgttct

SEQ ID NO: 149129 - DNA, 227 bp, Homo sapiens
gcagttacaacaatgctggttgtgaaataaaattatcaaaggatattctcctactttaaatttaagactgatccttggggtcttaagtacaggatgagtcactgggttcaacgtgtgggcacacatgtaggagagaagtgctggcatttctccaagtacagagatagtggctgctgtccagttatagtcaggtttccaagggcagccactatctctgtacttggaga

SEQ ID NO: 149130 - DNA, 196 bp, Homo sapiens
tggttgggggcaggtgtgtagaattgggtatcacacacacagaaggctaaattatccatcaccctcaccatggacaatttaggcttcattctatttagaatttttattaagccctttttatgattctgtctgaagacagggctgtgataagcatgagaaaatcttttgtcaaaattgctaactctgtatgttaaag

SEQ ID NO: 149131 - DNA, 151 bp, Homo sapiens
agaataagtccaatgaagttctgtggttaatgactggtttctctcacccaagctcagcagtcagagtcttcccctggaatgagaaggtaacatctcagcatgatcctcttctttctacagcatgggtctggctgatctctgtctctcgttg

SEQ ID NO: 149132 - DNA, 447 bp, Homo sapiens
ataagtaaatggcagggcacagggtggccatggggcagccacaggccccagaggccaggaggggagcccttggctaggtcctagatgtccccctggggtgctgctctggggtgagcctcataggcctataggtgggggataggctggtgggcatggtcacaatggggcctccaagtgaacaccatggtccagccagtgtcccagctgggtgacctgcaggctgggctgcccccacttaataagcccattttcctccctgaggtcaaagccatttgtttctgttcccattgttgagggagcagggccctcccctccctagccctgtgggtggggaggaggtctgtgggagaactcctggagtcggcctggcatgggcattgggaaacttggggcatcggcaggagcagcttcaaatgaggacgtcaacgaggcatcagtgcggggcag

SEQ ID NO: 149133 - DNA, 344 bp, Homo sapiens
cagcattccccgtgatcctggttttggaaaaattaaatggaacacttttgtccatttctgtacctagaaaatcagactgggaggaaacccacaaaacagtaccagtggctatctccggggaggtaggactacagacaacttatttttcctattgaattttttctataatttacacattttccatgaggaattatttaactaccagaagagttatttttaaaaagtctatcccctccgattagacacattgtgctaacagtctgtagaatcactgagacctgcaaatgttcccatcgcgttaagaaataaaagctaagaagtgatcaaatgcaaagcagggagaa

SEQ ID NO: 149134 - DNA, 311 bp, Homo sapiens
gaaatggggagaggaatcaattagacatgagaactattaggaacatggtaaacatctttaatgatagttgtagtcaggaagaataattaccattatgtcatttaaatagacaataaaatgatttttgtcaattttatgtactaataaactcaataatataaggttaaagagagatacactttatttcctccgtgagtacaagattataattttaatccactagtttgtctttctgtggttgtcaaaagtgcccacaaagaagacatacagatcacaaataaccacatgaaatgatgctcaacatctttagt

SEQ ID NO: 149135 - DNA, 798 bp, Homo sapiens
gtgatccgcctgcctcggcctcccaaagtgtggggattacaggcgtgagccactgcacctggcgtccatttcttaattcacatggatttcgaaaattactgagaggctaagaaactaaagttttccttgagaatgttcatataaattcaatgaactggtttatgttaattgttatcttactatgtatgagagaagtgtaatggaaagagcctgcagataatgctttttggacatttaatttagtcacatttatttcattgctgccattttattttgctttttcaaattttatttgtagagtaaaatgcaacaactgatgttttcttttttctgttttagatctttgctaattacacatttatgcttttgtaggaaaacattcatgggttctaattagcctttctgaacgttttcccttctttagtgagggtgaaaggttctatgtcttcttgccacccccagccccagtcatcatcatcatcagagtcttggtttgagtaggaggtgacttggtcttgagattctgttggctctcgacaaaattggcaaagacaagcatggcccaggttattttgctgagggaaagagatagaagggtgagtgagtgagtgtgtttgtgtgcgggtgcatgtgtgtaatttataaataggatcaattgcctactttaataagtatatagaaataaaatagtaaaacaaatatgcccaagtatgaactcttcagtgatgcttgtcttgtaccgtcgtctttttttctgaggttgttggtgataagtgatactgcagttagtgattattg

SEQ ID NO: 149136 - DNA, 471 bp, Homo sapiens
tggtgaccctccccagtgcctctcctggccctgaaggtgccactccagtgcccaccagcctttctgaacgttttcccttctttagtgagggtgaaaggttctatgtcttcttgccacccccagccccagtcatcatcatcatcagagtcttggtttgagtaggaggtgacttggtcttgagattctgttggctctcgacaaaattggcaaagacaagcatggcccaggttattttgctgagggaaagagatagaagggtgagtgagtgagtgtgtatggtcgggcttgaagggccttacatatttactgtgttatctcattatcctctaaacagactgatcagtactattatttttctttattctgcagatgagtaaactgagtaagtgggacacttgggaatcaaggtcaggcccctatggctccaaagcaaaacattcatatgatacataaagtgttagtctaaaggta

SEQ ID NO: 149137 - DNA, 475 bp, Homo sapiens
ctgggtgcgtgatgatacgtaccagcacagagccgcagcggctgtcaccttgcaagggacagtgtggggcttgccgatcttgttcccccagtagcctctgcgcacggggacgatggagagcttggccaggatgatggccccacggatggcggtggccacctccttggagcacttaacacccagaccgacgtggccattcaacgcctccgcggaggtgtgccatggccgacggtgtcctggcagggctggagaagggattgtctcatgtgtccttctgcaggcaccaggttgtccccctggtctctaacccccagccagctgtctagtccagtgtttcttttctggattcaggaagtaagtggggtgtgtgtgtgtgtgtgtggggtgtgtgtgtatgtggtgtgtgtggtatatgtgtgtggtgtgcatgtctgtgtgtggtgtgcatgtctggtgtgtgtgtgtgttgtgtgtg

SEQ ID NO: 149138 - DNA, 345 bp, Homo sapiens
gtgactctagaggctccccttataaccccacgatcacccactctatcaatgaggttttatatggcctcccatgaacaacgagaggtgtgccatggccgacggtgtcctggcagggctggagaagggattgtctcatgtgtccttctgcaggcaccaggttgtccccctggtctctaacccccagccagctgtctagtccagtgtttcttttctggattcaggaagtaagtggggtgtgtgtgtgtgtgtgtggggtgtgtgtgtatgtggtgtgtgtggtatatgtgtgtggtgtgcatgtctgtgtgtggtgtgcatgtctggtgtgtgtgtgtgttgtgtgtg

SEQ ID NO: 149139 - DNA, 184 bp, Homo sapiens
tgctgggattacaggtgtgagccaccgtgcccaaccacagagaatctttttaagcatgaaacttttgaatgttattgtagcctaatgcccctggaacagtagtaaaacagggccatcttatatgttgtttctgaataaactggcaaacaaatagaagaaaaggaagaggaggaagcagctgagg

SEQ ID NO: 149140 - DNA, 261 bp, Homo sapiens
ctcagttcctgagttccttctttgtgaaatgtggtcactggatagtatctactttctagtgacctggcatgtcagcctgaaaccttacaaactttcagtagaatgttagtatcactaattgaaactcttaacatgttttgacgccaagaataacagcagaaaatttttaaaaagtaattcagaggatgaattaaaagctcaaacatttcaggaatcctgtaatacatacattatgcttctttcaaggtagtagtaaatgag

SEQ ID NO: 149141 - DNA, 310 bp, Homo sapiens
ctgcccggctgagtttattgggttttaaatggtctgacaactgtatctgtggcttaaactgacaaaggtagatgaagccatggcaaggcaaaagactaggggaaagaaaactggacttttaaaacaagcactggctgggcgcggtggctcacacctgtaatcccagcactttggtgggctgaggtaggcggatcacttgaggtcaggagttcgagaccagcccggccaacacagtgaaaccccgtctctactaaaaatacaaaaattagctgggcttggtggcacacacctgtaatcccagctactcggg

SEQ ID NO: 149142 - DNA, 217 bp, Homo sapiens
tgcaatccaactacctatacaagtcagtattatgcaaaatagaccccacaggattgagaggggactaaagaagagagtctgttgggagcaggtctgaaaaacacagctgaacacacaccacaggtccaccatcgaccttgtgatcattacagggatggaacaagtcatcaagccaacaggtccccgggttattaaaatctagagaaagttggctggg

SEQ ID NO: 149143 - DNA, 448 bp, Homo sapiens
gaggagggtggatgtcgcaccaggggacatttggcaacgtttgcagattcttttgctggtcgcagcgtggggtgtatgctgtgggcatgtggtgggcagaggccagggatgctgctgagcctcctcccgtgctcagggcagcccctaaggcagaggctgcttgtggggcccaaatgtcagcagtgctgagctgaggatctctgtccaggaggcacagacgctgtcctggatgctgtccagacagcatctgctctgccctccagggggacagacagacagtggacacagcccagatgcagcctgatgagtgagcccaagggagtgcctgtcccctcgggactgtgagctccgtgggggcaggaactgggtctgtttgctcatgatccccagatgagtcccatagccagtctcatcaccatagctggtgttatttttgttctgagctctg

SEQ ID NO: 149144 - DNA, 423 bp, Homo sapiens
cagttgacatctgagtgggatgattgagtagagagaactgaaccttgagaccctctagtgtaaataggtcagaaactagcaacagagactgagaagagcagctagaccgagaagagaaaaccaggaaagtgtaatgtctgaaaaccaggtgaaaaatccatatcagggagtagaaaattgtgaaccatgtcaaataccactgatggggcaagggaatgcatggagatttcagtactgcatttagcaacagggaggtcacaggtgaccttgacaagagcagtttcaatggactagtgggggcaaaagtctgaccagagaagagaatcgggggagaagaatcagaggcagcaagtgtagacaagtcttccaaggagtttgccataaagaaggcaggaaatgggccagtagatgagtgagatgtgt

SEQ ID NO: 149145 - DNA, 179 bp, Homo sapiens
ccaggaatctatgccacagaaacctcagtagcttgaacagggctttatgtccgaggatgattataaaatttaacaattaggagcagctaaatgttgaaaaactagagaacagttaaataaattatggtgctgtcaccaggcgcagtggctcacacctgtaatcccatcactttgggagg

SEQ ID NO: 149146 - DNA, 623 bp, Homo sapiens
tgcccggaagatgacccgagagagaatgatgggagagaaactattctatctcagccacctgcacccagaaggggaaatgaaagtgactctggttctggagccaagaagtaatataagcagtggagggtctccgctcagcccatctgcggtttctcacagtgatagtacttcatccacgcagtcgctgtctcatggaggggcgccagagctgttggtggggctctcgtacaatgccacaacggggcgattatctgtggaaatgatcaaaggcagccatttccgaaacctcgctgttaaccgagcacctgatacatatggaaaactctttctcctcaattctgtgggtcaagagatgtcccgttgcaagacgtccattcggcgtggtcagcccaatcctgtctataaggagacctttgttttccaggtggccctctttcagctgtctgatgtcacgttgatgatttccgtttataacaggcgtactatgaagcgtaaagagatgattggctggattgccctgggccagaacagcagtggagaggaggaacaagatcactgggaggagatgaaggaaaccaaaggccagcagatctgcagatggcacactttgctggaatcctagg

SEQ ID NO: 149147 - DNA, 384 bp, Homo sapiens
tagaggatccccctcaacgctttatacttctcagtcagaattctgaagtcaacacgttgcctgaacctcaaactccaacacaaaaacccaagactagccaattctcttcaaatcaattcctgtaatcctcttcattccatgctttgtaaaaatgttatttgtgtagctggctgtcttcattatacaggaccttttaaaaatgtatttacttatttattttagagatagagtctcactctgtcacctagcctggctcaagcaatcctcctacctcagcctcctgagtagctaagactacaggcacacaccaccatgcctggctaatttttcaatttttactagacatggggtcttgctatgtttcccaggctggtcttgaacccc

SEQ ID NO: 149148 - DNA, 471 bp, Homo sapiens
tatcgagctcggtcccagttacaacagctccagttacaacagctccagttacacagctccatttacaacagctccagttacaacagttcatattggccaggctgatatcttggccaggctggtctcaaactcctgaccttgtgatccacccgccttgacctcccaaagtgttgatattacaggtgtgagccaccacgcctggcctattttaccttttattaagttgtaaagtctggtaaaagcccttatcataaaatattatatgcttttagatgtgggaagagggctaaatgttatctttataaagttagagatttaaaggctaagtgacctgtttattacattggaagacaggtctggacgtgggattagaattgtggagtgtccttcctgtggctggcctgagttcctttctcatgtaaggaaaaagcactgagaaaaagatgttatctggatctctgaggttattaa

SEQ ID NO: 149149 - DNA, 186 bp, Homo sapiens
agctcccatcacagtcccaggttcacaccatcacctatgggaccctcctgaggtgcacagccctgccatatgcggcctgagtgagcagctctttcctggggcacaaaaggccctcagccgtggtcactgcagcattctgcagtcagcgacacgtctgtccctccactacatttcaggtatacaggg

SEQ ID NO: 149150 - DNA, 383 bp, Homo sapiens
agcttatttttgtatttttagtagagatgggatttcaccatgttggccaggatggtctcgatctcctgacctcgtgatctgcccaccttggcctccccaagtgctgggattacaggcctgagccactgcgcctggctattatgttctttttcaaagttgttttggctcttctaggttctttttatccccatataaatttcaggatcagtacctcaatttttatttgtttttattttattttttttttgagatggagttttgctcgttacccaggctggagtacaatggtgcgatctcggctcactgtaacctccacctcccgtgttcaagtgattctcctgcctcaacctcctgagtagctgggattataggtatgcgccacc

SEQ ID NO: 149151 - DNA, 338 bp, Homo sapiens
attttgccttttgagcaaaaatattgatttattgaaaatacggcctaaaatatatgccaattatgctacttactataatagtttaacatacaacagcttgaaaatagtataattctttcttcacatgagccatgttatgatttccagtaatttgggacccactggtatgtgggattcattacaatgttcttcaaaattatttcatttattacatggactttgtttaaggaaacgaacagaaaaaaattaaatgtttgttttggagaagtttcatgctgttaacttcaaagcccctaagcctccagtggccctcttggatataagccacagatatgagc

SEQ ID NO: 149152 - DNA, 377 bp, Homo sapiens
cctggagtacaagtgtcaaatcagaatcatccttttcgcactgctttctctcttaatgaacagtaacctgatttatattgttctgcctggttaatgcatgcttcttctctgggctcctgtttacatcaaggtggaggggcactgctctacaagggtgtccatcttgggagggaaatgaagtagttcacctatatcatgatttaagttgtctgcaggaaaaatgttacgtggctctttagtccttcaagatgatcaggggacacagtattatagatctgatgtaaccttccccatttctgaaagacagttaacaaaattcagtccttcaaacgtatgtcacctactctgcaccagacactttgcatccagaggggtac

SEQ ID NO: 149153 - DNA, 409 bp, Homo sapiens
gatggatcttctccttccactgagaaacaggctcccacagatggcaggttttactgctggaccagagtcagttcttacgcctgagggctgggacttttagaactatggcaactctgggtatcttttcttactacttagctggacaaattgtttcctagcttttaaatgagggagagacaggttgatatagtataatgaacacccaacttggtttttttggtttagtttagttttgtttttttgagatggagtctcactctgtcacccagggtagagtccagtggcgcagtcttggcccgctgcaaactctgcctcccaggttcaaacgattcacctgtctcagcctcctgagtagctgggattacaggctcctgccactgcgcctggctaatttttgtatttttagtag

SEQ ID NO: 149154 - DNA, 267 bp, Homo sapiens
ccactgccttctgtcctctcctgggcaccacctggtaaggagttgccctccagtctctgcctcctcagggagctggcggtggcctcaccccaggcgttgctcacgccggccattcctgcacctgaaccccctctgcaccatgagccggccaggccacctgcctgtcactgccaggcgcccggtgcctgccccgccgcatctggagtccaccagaggcccgaggccccctgccgagtggaggagcacacactgggggggggtgtgcct

SEQ ID NO: 149155 - DNA, 390 bp, Homo sapiens
aaacaaataagatgatacctgagagtgccaaattatataggaatgaaatagtgttaatataattggaggagtaactcctgagattggatggtcagggaagctctctctgaagaaatgacaatgagctgagacctgaatgacaggagccagcttctaggggaagacagttccactgaataagaaataatttggtacaagatgaggttggagtggccacaggagtcctatagggctcggtagttcaagataagatgtttggaatttgtttaaaatttttttttctttttttctgaggcaggagaatggcttgaaccctggagccggagcttgcagtgagcccagattgcgccactgcactccagcctgggcgagagtgcaagactccgactc

SEQ ID NO: 149156 - DNA, 368 bp, Homo sapiens
ccaggtggaggaatggggttgactcaatggcaatccaaggctgacagctgtgctaatggatgacttaggcaagaaatacagtgattgactcatgaaatgaaaagcaggactggtctcacggacagctgggattcagacttcagaaagcctccatcaggacttagcttctttccagccctttgccctttctgctgtgttggccttagtcttgtgcttcacagtggcaggatggctttggcagctccatcctcatgtcctctcccctccacatcccacctctctgaagtctcagcaaaagtctcatgatttattggctttggtcaggtcaggtgtccattgctgaaaaccaattcccatggctggttctc

SEQ ID NO: 149157 - DNA, 140 bp, Homo sapiens
cacctttgctgtgtttctgggccaagggtcttgccttcatcttccttttccatccttttatccgggaggattgggagaaaatccttgttaagaaaaggtctcttggccgggtgtggtggctcacgcctgtaaacccagca

SEQ ID NO: 149158 - DNA, 182 bp, Homo sapiens
tttaccaagttgtgcaccatcactgcagtctagttttgagcatttccatcattttaggtgctttttattttttcttcttagtgattaacttttaacacaaaaaaattgttcaaactttgattcagtagttctagttgagtattattttctaagatgattgttggagatggaaacaaggattt

SEQ ID NO: 149159 - DNA, 354 bp, Homo sapiens
tggtgaaaggacacacagatcaatggaataaagaccagaaacagacccacgtacatatatgaccaactgattttcaagatagtagaaaggaaactgaatagagaaaagacagtcttttcaacaaacaatgttggaaaaactgactatccctaaaattaacaagaaatagaacataaattcaaatataaaatcaagaattatacaacttctagaagaagaaccctcagctaggcaaagacatcttatctacaacaacaaaaccatgatctagaaagaataatttgttaaatgggccctctccagaataaaaaatgtctcctcttcaaaacacactcttaaaagaatgaaaaaaca

SEQ ID NO: 149160 - DNA, 543 bp, Homo sapiens
aaagtgactaaggtgtgaagtaataagacagggaaactttcattgcatttgccctccccacactcttctatatcctgtggtccagaagaaacattaaatacacccttatacccaccaacaaacgaagaagtaaaaactgccattaagccaacttcttgaatttattttgtatgttgtaaaatccagatagctacatatagatgtgtactttttgaaaatgtatcccatcagccagtgatagttgtatttccatggagattattccagtcgcctgtatttgaacaattatacaggatctgactgtaattagaaaaaggagatgggcccaagtcaacctagtacaagtttggatttcacattttaaatcattggttaaataaaaacaaagtgaagatgaaaatgtttcttttgttaaaaaagataagaaaatataaaattggagcttttattaatttatacatgtctcagagaaataatagtcacagagaagtagcagacagtggcatgcacttattagcttctcacattattatattacactgg

SEQ ID NO: 149161 - DNA, 182 bp, Homo sapiens
ttgtcatttcatttttatttcactttggttttctttgtacgacccttcaagaagtcaagggtgctaagaaaattataattttttgagattgatacacatctagtgacagaaagggaaaggcttgtgtccagaattcttggaacagtgagcagaatattggcatctacctgagcatccacaga

SEQ ID NO: 149162 - DNA, 282 bp, Homo sapiens
gctctgtatgtctccagtggaatgaagaagggggtaggttgtaaggtatggatggaagatgacttatttttgttccttttggattttgtactccatgtataagttctgtattaaaaaaaaattccagcaccaattttaaaaacaaatattatgtcacagactcaacaataatctgtaccggccagattcaattcaggggttaccagtttgttcattgtgctctctgataccaatcagaatcacaacaggattttgttgtttttgtcaacatgaatctaaagt

SEQ ID NO: 149163 - DNA, 351 bp, Homo sapiens
atgtcacagctcaacagcagcaactgtgttttgccagggtcttgagatggggtcttgctatgttgctcaggctggtctcaaactcctggcctcaagtgatcctcctaccttggcctctcaagcagctgagatgtacaggcatgaaccactgtgcctggttaagaatgcaaataattatcctcctgtctgtatgaattgtccaaatatgatccaatgtggtgatgaatgtagagtggatggggaaaaaaggaatgaaatgtaagaaaactagatcagactttactagtagcattagcaatggcagaagttctctgagggcggagcatgaagaattatgaatcagaaatattt

SEQ ID NO: 149164 - DNA, 271 bp, Homo sapiens
ccatccaaaaaaatcttgtcatagtcatataaagacgcaaaatttcttatgcaaataagcttttgccaagttcttatctagaatctttgcttcatttcaaacactggtaacccacttatcgttagttctcaattatctaatgttgaaaatatgttctcaggtacacagttttccatcagcaacatgttaatgtgtaatattatttatgagttacattcagcataaaagatatttacaattgtcattgttaatctgctattatatctgagcc

SEQ ID NO: 149165 - DNA, 318 bp, Homo sapiens
cccggcccatggtagtggcatgaacagctcctttactggcagtggcatgaacatggcaacagctcctttaatggcagagatgttaaaatgtgaggaaaatgtacacctcagaaattatgatatgcagtatatagacataaccagcacaggactggcctcccgaagtgctgggattacaggcatgaacatggctcatctgtacaaaaactggaccacctactgagtgtgatgaaatgctgtctactttttagcttttctgtctctttcttttgttctcagggtaagtaaaccgactcagagtgcctgccattaaaggag

SEQ ID NO: 149166 - DNA, 430 bp, Homo sapiens
gacagagttttgctcttgttgtcctggctggagcgcaacggcgcgatctcggctcattgcaacctccacctcccaggttcaagtgattctcctacctcagcttcctgagtagctgggattacaggcatgcgccaccacgcctcgctaatgttgtacttttagtagagatggggtttctccatgttggtcaggctggtctaaagctcccgatctcaggtgatctgcccacctcggcctcccaaagtgctgggattacaggtgtgagtcaccgtgcccagccgacttgacatctttactatgttgaatcttcccatccatgaacatgatatttcagtccatttatttagctattttctgatttctttaatcaatattgtatagctttcagtatataaatgtgataaaagttttattaaacttacacctaagt

SEQ ID NO: 149167 - DNA, 302 bp, Homo sapiens
tgaaatgagtagccaaatgctacacatcttgtaaataagaagggtcttggtttctaagatccttctcactgagggctctcctaactacacagtcagatatacagtgaggcctacagtctatggaagagcctggacaacaggtgaaaaagaatgccctccccacaaccctccatcaccacaattctgtacagcctatagaattaaaaaacaatatcaggtaatgcttcaaacttgataactttcaaattacttaaaagtcacacaaattattaatatttatatttaatgttaaaattatgttc

SEQ ID NO: 149168 - DNA, 453 bp, Homo sapiens
tattagtgggaaaatgttattttatagagatgcatactgaagtatttaatggtggaatgtcatgatatatacaatttactgaaaataactgaattcggctttaaaataatctgacaaggatagctagtggccttgcacagtggcaggacagatctattaggagcagcaaagtacaggggaaaagcatgtacttttcagacagctatgagtttgaattttgttccaccatttaccagcttcaatttttctctcaaccagtgatgagattaaataacgtatgtaaagcccagggcctgggtcataagaactcctcaacaagcagtatgactatattctgaggggtgatttatcagtgagccagggtggaaaaacctcatttgagtaatcctcaactgttctgcaacattcctagatgtttctggtgtctactttaaacaggaaaaacttcccatg

SEQ ID NO: 149169 - DNA, 289 bp, Homo sapiens
gtggagggaaggatcagtggtgtgagagaccgtgacaaggcggcagcatcaatggcctgcaggtttgctggagcacaggtcggagcaaaagggaaccgggaaaatagaaggtcatcagaatgcaacactgcaacggattatgcaggtataggggccgctggcaaaagaaggtttaaggtatgaccaaggccaaatccagtggggagtcctttttggaaaccttgacagctgtggtcatggtcgacctcatgggaaattttgcaaacttgatcctgtgtcaaatgagttc

SEQ ID NO: 149170 - DNA, 141 bp, Homo sapiens
tgccatctctccactcatcacacagtcacctttctgaaaggatattacctcatagaacagcttcctaactattccatatttttacatgtgctctctgccactagactacaataacctcaaatataggaactatgtcttcta

SEQ ID NO: 149171 - DNA, 416 bp, Homo sapiens
gtgacccagcaaaacctgtcacatacaaacaaatccccaaatatagaagcccagtatgttaaagacaaaacttcacaatcattagacgaaaacatgacagtggtttccagcctcagggaaggtcaggatgttctgagtcggtcggaaatagcaccattcataaaggataagatcagctgatcatgtgtaaggcttaagcttctgcacatcaggagcaacagaaacgcagttcaaagacacaaccgagaatccgtaatcaggaatatcaggaactcctaccaaccagcagaataagacccagaccaacaaccagaagaaaaatgagaaaaagacatcaacaggcaattcgcacgggagagaatccaagggagaggtaagcgtggtaaagacgcctgactccgccgagtcatcagaga

SEQ ID NO: 149172 - DNA, 579 bp, Homo sapiens
tgagaggaatgcttaagcgatcaccactcagacaacagagcaagaccctctctctctctcaaaaagagaaaggtttgaaatcccctaaactggaagatttttttcaagctctctgaatctaattcttatagaaaaaccatttattacaacaaagtaagttttactttacaccaatatggttatctaatagtaattataccattaattgaacatatgccattcaagtgctctattaactttaaaatgtgagataacaaaaaatcattttatgtattagcacactcaattagcattgggctgcactccagcttgatggtctcaggcaacagaacagtaaatcttatatagccaaaatgaagactgataaagagaaatctcttgtgtgcaaattctgctacaagagggagaaagatacctttctaaataatgaaggggattccactcactactccattcaaatatacttacgaaagctcaggagacagcaaaatggagaaaatgagtaagctaagttttatgttcctttcattgtatgcatattttcttatgctcgaggagcctagtgttataggaacttta

SEQ ID NO: 149173 - DNA, 420 bp, Homo sapiens
taatttttaaaatgttataatttgcaatagcaacaacaaaaatataaggtacctaggaataaatctgacagaatttgtataatactgtgtccggaattagtgggttcttggtctcactgacttcaagaatgaagccgcggaccctcgcggtgagtgttacagctcttaaggtggcgcgtctggagtctgtcccttctgatgttcagatgtgttcggagtttcttccttctggtgggttcgtggtctcgctggctcaggagtgaagccgcagaccttcacagtgagtgttacagctcttaaggtagcgcgtctggagttgttcgttcctcccggtgggctcgtggtcttgctgggctcaggagtgaagctgcagatcttcgaggtgagtgttacagctcataaaagcagtatggacctaaa

SEQ ID NO: 149174 - DNA, 450 bp, Homo sapiens
tgaaatacaggggtggagcaggcagcagggaggccctgggggcttgataaatccccaagcagcccattcctgcctggcaccacagggatccttcaggagggaggacagaggagcagaggtaaaattccaagtggaaaaagacttccttagctgaactttgtaacaatttgaacgggccaagaagcctcctgcccagaactcagggaaaggcgcgaatctggcttgcagacttcacaggcggggaagaactaaagcccttttttttcctgcaactggaaggcagaaagccttgagcaattttcaagcccaactagccttccatctggaaacagacttggggttgttgtggagtacacagtgggagtgagaatggccctctggtttgcatgggagctgagtgaggcctgtgactactcgctttcccccacttccttgacactctgtgtggct

SEQ ID NO: 149175 - DNA, 364 bp, Homo sapiens
cagtaaatggtcagcagtagcccatccgaaggtaatatgtattgcattcaaaatccgaagtgtctcaccaagcattgtgcttgatggtggatggggttcaaggttcaggtttaataatctgtttttcactttagaataacctgctttagtgtcactctaatcctagaaacttcactgatgtggttagcccttcaaattttacaggatttatctcccacactccaacatgcatatatctaaagttactatagtacttgcttcttcctgcctgttaggccgaattagcataacgctaacaatttaatagtatatttgatgttctattgggtataaaagaaaccaaagtccctctagattatgagtg

SEQ ID NO: 149176 - DNA, 402 bp, Homo sapiens
gtcagggtttctaagcaattgctcccgaagtttccacacagggttccacatcaccttgcttatgcataattcagacaaggcaacagtgatgtttctccttggcccctgagtcttgactgttccaacccccactccaggcactgtccctccccagccctcacacacactctcgtcctgcttttgctggggatggcactgctgtgctggggagtctgtccatctgtcatccactttggctctgggagacactgtggcgaatagtcaagtcctgctcagttccggaagacacctgtacacatctcacaccagggccacctggagccaggtaacccgagtttcaggccactatgcaaatggacccaggtccacaggccgttttctatcagaaggcacccaagaaag

SEQ ID NO: 149177 - DNA, 736 bp, Homo sapiens
  misc_feature (529)..(529): n is a, c, g, or t
gtctaccctccctgtccccgcaaacacctgcagagttttgattttgaatgaggcctttaattcctcttggtaatgcttataaattttctgtacacaggtgatgcacatcttcccttagatttattctcaggtatgtaatcttttatggtgcttcttaaatggcatctttaaacatttcccattttataatcctttgttgctagtgaatagaaatacaactgatttctgtatattggcttgtgcctagtcaccctgctaagctctgtattcattctaataatagacctgtaggttcttctcaattttccaggtgcacactcacatcacctgtgagccacaggcatggtggtgtgtggcaacaacaacattcagacagaaagcctaccatctttttggccaggagaacaagaggacagagctggggcaaccaggactgccaaggggtaaggtgggaacactccaaaaagaaaagagtcagtgagggagacctcaagttctgttcttcttcctggcagcttcggacgaaatnacacaggcatctcccatgcccaccacccgttaggaatgtccattcctgggctgcgtgcgcaggtccagcagccagtctgtgcaggcgcctggcccggccagggagattgaggcagacccccacaagccactgaaccccagtctcaagttttctgcacgacctgtacttcagtcaccaaacactcctcgccgctcgccacggttctcc

SEQ ID NO: 149178 - DNA, 2359 bp, Homo sapiens
ttgttcagtcctcaattgttggacattttttttattataatgatgccatgatgatcgtttatgattcactgtttttattttttgatttctttgattttagtggaggtgaacatttccccataataatgagcttcattgatttgtaaattatattatctttgagattatattcaaagctataaaatcatcaactcttaggatcacaggcaacctcaaaagttgtctagttcccatctattcctcgaccctctctacggagtttgtataaaacccatattttcattacttcctaactctgataattataggggatatattttaaggattaaaactagtatcttaaatgtttttatatcagtcagtttaaaaactaatattcagtttagtctttcagaactttgagtcacgaaatgcatctttaaaagcagggtacatttattgaaataaaacactctacagtgatctggatctttttttaatttatttttttattatacttttaagttctgggatacatgtgcagaatgtgcaggcttgttacataggtatacacgtgccacggtggtttactgcacccatcaacctgtcatctacattaggtatttctcctaatgctatccctcccctaccatcccaccccctgacaggcgccttggtgtgtgatgtttggatcgttttttttcttgaacatacaaacgttagtacataccttttctgtttgtatgcagacatatgaatgttttttcagaagaggagttacactgtacacacacagtcctacagcttattcattcagccctcactagcagggtgctttgtgagccataaatgcagggacctgttctttttggtcactgatacttctcaaaggcttagaacagttcttggcacattgctcaatatgcatctgatgagtaacaatatatataagagtcattcttctatgtcatttcaagagacctgctttatttttcttagtgccaagtcatatatttgaaagcaaactgtagttgcaggaagtcaaggattactaaaattcagttctcaatattgttaggactgttatagcctttccttgaaatctgccccaagtgttaatttttgaaatggcaaattggaaaaccaggaatcttatgtgtttttgacattggacatgaggagaaacttccaggtcattcactatatactctcctgaatatatttagattctataaattgtaatgaagtctgctttaaaatatgactaggcaccattcagattaaaaagtgtaatttaaaaacatacaatatgttggctgggcgcagtggcttacacctgtaattccagcactttgtgaggccaaggcaggcagatcacttgagtccaggaatttgagaccagcctgggaaacatggcaaaaccctgtctctaccaaaaacgatagaaaaattagctgatgtgttggcatacacctgtagtcccacctactcgggaggctgaggtaggaagatcgcttgagcccgggaggcagagtgagcagcgattatgccactgcactccagcctgggtgacagagccagaccctgtctcaaaaaaaaaaaaaaaaaaaaaaaaaaaggatagcgtattaaacagataccccaagtatcctaaggaagctgtaaaattacatgctggggatataattttgttaaattacatttatatttaattaaacatgaggtccatttagattttgggttgattcattcatctgtgattactgagcatttgccatgtgccagtcaatcagtattaggcaccagagttaccacagtgagcaagagagacatggaccccttctgcaagatgcctagacaattaaatggccaatgaaactaaagtgaggtaagggttctgatgtgaaaagctgagggtgtgatgaggacaagtggcagaaagttcacctggcttggtggaagggaaggtcagagaagacctcttagaggactcagtaatgtccattgaggattttaggttgaagggaatgtttgaagtttgagggcccttttgaggaccaccaagaacttcactgtgctgtaggatattgagcaggaggtgaagctagagagatgtgtaggccacattgcagagtttgaacttggggcaatgggaagccattgaagggttttaaacaacccaagtggtgcattcttctgtaaatgttagagagatcagtggctgccctgcacatcaaaggggagaacgattggagacaggcagattagatggaaggacggagttgtactccaagccaaagatgatggagagtgaattaagttagtgcaatgggaccaagtctagagctatttagaagtgagaagtgacacggaaaaaaaa

SEQ ID NO: 149179 - DNA, 1358 bp, Homo sapiens
atgaacagggtctttttgatacattgcctggtgtcttaattaactttgctgtgcgaaaatcattgacattaatatttctttctaaaaatatctaaagaatgtaaataactttactccttatgttactagtggacatttaaggtgttatgtacttaatatctttttagtgtatgctgtagtgtggcagcatgccacatgctgaaaggaaatgtacaatttacaaagaaatggcactttagaaatttgtgctgctttttgctttattcatttcaagtacctttgtaggtggacaaaatttaatataactttcttgtcaacaattaacaagaatataggaagcacaagaaagaaaacaaaaaattggtcctaccactcagacagtgatagatgtatgtgctattatgctgttacgctttaaaaaagaagtagccatacatcataatcattttcctgtatcagtaagtattctctttcaatattatgtgcaatggctgcttgtatattactttttttttttttgagatggagtctcactctccagcctgggtgacagagccagaccctgtctcaaaaaaaaaaaaaaaaaaaaaaaaaaaggatagcgtattaaacagataccccaagtatcctaaggaagctgtaaaattacatgctggggatataattttgttaaattacatttatatttaattaaacatgaggtccatttagattttgggttgattcattcatctgtgattactgagcatttgccatgtgccagtcaatcagtattaggcaccagagttaccacagtgagcaagagagacatggaccccttctgcaagatgcctagacaattaaatggccaatgaaactaaagtgaggtaagggttctgatgtgaaaagctgagggtgtgatgaggacaagtggcagaaagttcacctggcttggtggaagggaaggtcagagaagacctcttagaggactcagtaatgtccattgaggattttaggttgaagggaatgtttgaagtttgagggcccttttgaggaccaccaagaacttcactgtgctgtaggatattgagcaggaggtgaagctagagagatgtgtaggccacattgcagagtttgaacttggggcaatgggaagccattgaagggttttaaacaacccaagtggtgcattcttctgtaaatgttagagagatcagtggctgccctgcacatcaaaggggagaacgattggagacaggcagattagatggaaggacggagttgtactccaagccaaagatgatggagagtgaattaagttagtgcaatgggaccaagtctagagctatttagaagtgagaagtgacacggaaaaaaaa

SEQ ID NO: 149180 - DNA, 924 bp, Homo sapiens
tgtggtcccagctactcaagaggctgaggtgcaagaattgcttgagtccaggagtttgaggctgcagtgagccctgtttgcacaactgcactccaaaaataataaaaataaaatacataaaattttaaaacctaagaacttctgtttatcaaaagacaccattaagagagtgaagaagcaagcccttgagtaagagaagatatttgcaaatcataaacccaatacagggtttgtatctagaatatttaaagaatttccatgagtcattaataacccaatagaaaacatgggcaaaagatttgaacaagcacttcacaaaagaggctttgtaattttctaataaatgctagcaaggaagtgcaaattcaagtcataaggagataacctctacagagccaccagggttgtccaaaatgacagactaataatactaagtgccagagagaatatacagcaactacagctgccatcctctggctggtgtgagtgtaaattagtataaccacattggaaaactggcaggatctactacagctgagcatttgtgtatcttatgacccagaaattctacaaaaatgttcatgactctctagttatagtaaccaaagactggaaacaatccaaatttccatcaacagtggaatggataagatgtactgagcaaaaaaaacaaacacgacgaaaagacaacaaattgttgggccgcttgtggaccttgaaaaagtttctgaaacatgtggttgggccacgggcccagtggttaccggaaacatgcgcaaaaacggtacccaagagaaaaccgggcacaaaccaaggcgggaattccaccatataaaaagccccgggggaaccgaacgtctggaaccaaccccacgggagcacggaggccaaagggctcacacagggagccaagaacgcattcat

SEQ ID NO: 149181 - DNA, 391 bp, Homo sapiens
tcccttgggagcgcatagaaacaacttacaattattttattaatcagcttgagtttggtctttcttctgtcccactacaccatgaactccgtgcaggcaggagccagggccaccttgcttcttagcatctagtcaagagcttggcacacagctggactcaactgttggttaaattaaggaagaatgaagcactcacaacatatggctggtgtattgtcgtactaaatgtgaatctatatccaaacttcaaactttgaatgttactccagatgtcacaattgtccagtgagttcactgcctgaatgcttgagattccgggcccctggcatagggccttgtgcatagtaggtgtgcaggagaagcctgttgagcatgtggatgaatggctgac

SEQ ID NO: 149182 - DNA, 419 bp, Homo sapiens
acaggtggacattggcatgcaactagcttttaggttttaattagttccttgcatctcccctgtgttcgacgctgattcttccagatgcatggaccaactaacagacaaggagtgggacattatgctgataaccttcctgtaattgcagtcttgggctttatttcctctctctctagggaaactggcttgaggaagctagctgggggcgggattggaggagctgcttaacttttctccctctggacctaataaagtttcatttagcacacgctaacccaaagccttgaaatgattggctagtcctgttttgctgatggaaaatgacctgttcagggttactgaactaccaagttggtggcagagctaggagtagaatttaggtctccttggctatcaactagatcctctgaatattcgag

SEQ ID NO: 149183 - DNA, 401 bp, Homo sapiens
tttctctaagttcatacatgtacaagcatatacagacacaaatgtggggaggcaagaaaggtcgttttgttttgtttttcacaaaaaatggaagcatactacttatacatatgctttctctcttttttaagcataccaggtatatacatctcaaatttaatacacacagaattttaagtatgaaaatgaatacaatttactagaccgggtaatatttacatttacaaaagttattattttgtatgtaaactttgaaaagacaaggattttacaacaaaatatggccgcccgatttagttagacctcatacttcataacatactggttattataatagccatgcataaataattcaatcatttataataagcctacctaatgagtcttaaaagctatttgag

SEQ ID NO: 149184 - DNA, 316 bp, Homo sapiens
gggaaagaggaagaagagtggatgagatacgtaagagtgcctgagggctaattttatgaaagctttgggaagttttaagaaaaagaaaagctatttttcaaggtacatgtgtgtatgcgtgtgtgtgtgtgtgtgtgtgaaagacagaagaaagagggagacctaagaagagcatgacacactcctccttgacggactgtgagagtgagcgtgcatggcatgtgtgtcacacagatggctgggacgacagacagagtgcgtgcatgcgtgcatgcatgtgtgtatgtgtgtgtgtgtgatgcacgcactgacatat

SEQ ID NO: 149185 - DNA, 567 bp, Homo sapiens
ctgtctcctcctttctcctatcgacataattgcatgaaaatccaaaggcagaaaacagcctttccaattcctactcttacccctaacccaggcttctttaatccagaggcagtcagctgattaaaactcagatctgcagttagacagattttaccagctgaaagaccttgtgactgttacatacccatagaatggagataatatctacctcacagggttattttaaagataaaatgaaacaatgtatgcctacaccaatacctgacacttagcaaacattcattaaagagtagctattattatttcactagaaacatatttcagtctgggtactctctggtacctccagcagaaagtgagaagcaagaaatactctttgatataacaggtctatattctgctcacctcggtgaagccaattttaaaattactattatctggatcatggagtggacttaacaatctagaattgtcattagctcacatcctgccctcgttagttcagagttcggtgaaaagcataaagctactcatatccagtcagttccagctatatggagcgtaaga

SEQ ID NO: 149186 - DNA, 732 bp, Homo sapiens
ggagattttccgctcataccccctgcatttctgattccccctcccagaagtccttcagaatgcccccgacggaccgtgatcatcttccctgaagatctccttcccatatccccaaaataaatcttcctcacagactttgtgaaatgcccccagatcccaaaaactcacctagaagactccatccccctccccaccgtattgcaaccatctctcatacacactcccccttcacgtatccctctggacctttccacagatcccaaaagtctcccccagaggcctcctgtctccccctggtctcaccaccctaaaatgccctagagatcaccctcatgtagcccagtgatcttcaccgggatccccttccccacccccactcattctaaaaatctccagcaattgcctgaaatctccagaggactctcagcatcatattccaaaagcttcttccaaaatcccttttacatactccacatcttttccagtcccccacatcacacgctccaaaaattgtttaaggatcctgaaaactttcctcatggtttttctctcagatcccgtagaactccccttcactaacacctcagaatccccccttgcagaccggttttagaggaattttctgaagatcctcctcacaacccctgtaagaccgtaagattctcttggtgacccctctgatatgcaggttttcaggaccccccccccccacacacacacacagcttagaga

SEQ ID NO: 149187 - DNA, 462 bp, Homo sapiens
ggagattttccgctcataccccctgcatttctgattccccctcccagaagtccttcagaatgcccccgacggaccgtgatcatcttccctgaagatctccttcccatatccccaaaataaatcttcctcacagactttgtgaaatgcccccagatcccaaaaactcacctagaagactccatccccctccccaccgtattgcaaccatctctcatacacactcccccttcacgtatccctctggacctttccacagatcccaaaagtctcccccagaggcctcctgtctccccctggtctcaccaccctaaaatgccctagagatcaccctcatgtagcccagtgatcttcaccgggatccccttccccacccccactcattctaaaaatctccagcaattgcctgaaatcgtccttaaattataacagttcacagccacagaactaatcatatttaaagtc

SEQ ID NO: 149188 - DNA, 234 bp, Homo sapiens
aaagtgttgggattatgggcgtaagccagtgtgcccagactgtctcacagttttctgaagcactgttaattttttaaaaatcttttttctctctgttgttcagattggataatgcctattgataatcttcaagtttcctgactttttttctgttgtgttcattctgattttgagccactccatgagttttatttattattgtgtttttctgttctaaagtttccatttgtattt

SEQ ID NO: 149189 - DNA, 142 bp, Homo sapiens
cttcctttccttctaaagggcttcccctccttgactcctaacccccaggcagagattgtctccagggacacgaactagacacggcgggcatttcagcatcactcccagcacggggccgggatgggccggggggcgcaagcca

SEQ ID NO: 149190 - DNA, 210 bp, Homo sapiens
cagagtacttttgtatataatataaagttttatataaaatgtagaaaatacataatggaaatagttgcctttttaagttttagataattgtgaacccctttcattcgctgttaggatgatagagtttgtggacttgtccttctctcctttctctgttcctcagaattgaaggacttcacaagggagatgctggtgtgctggaaaagaatg

SEQ ID NO: 149191 - DNA, 202 bp, Homo sapiens
gtgggctttattagagttgccacattatctagggcttcacctgggggtacctgcaaattactcaagataattaatgggtgaatatcctccccttcatgcatttcttatttgccactaccaacccagacagtaactacctttattcttgaagtttaccctcaaattttaaatgcagtccccaaagcaacacacattatcagaa

SEQ ID NO: 149192 - DNA, 270 bp, Homo sapiens
  misc_feature (118)..(118): n is a, c, g, or t
ttgatgttctaccttactcttcttattccgacaagatatatcccatatatatattatttttcttgggtttttttcttgagacagtctcgctctgtcacccaggctggagtgcaggggnaaaatctcagctcactgcatcctctgcttcctgtattcaagcgattcccctgccagccatcaccagtttccacccatttgcaccatggatccactcagaagctgcagtggtttcctcttgcccatgatgacaaagctactttccttatcctg

SEQ ID NO: 149193 - DNA, 353 bp, Homo sapiens
cctcccatggggccggcctgctcctaccccacccacttccccttctccaggataagcccgctgcaacagctccgtctcccagtgtctcagcctctctggctgctcagcccagcctggtccagctggctatgctggcatggaccctagtctggtggccagttataaatagcccctgcacccacagccttggcagggtgctcctagtgtgggtgcagaggacacttgagaagaggcagccgtgcctgccatcctgaccatgccaggcccagagctgccatggaggcacccaggagcaggcccaaggacacatgggccctatgagctgaggaacctgccctgggcacagggttctg

SEQ ID NO: 149194 - DNA, 249 bp, Homo sapiens
  misc_feature (111)..(111): n is a, c, g, or t
tgggctttgccaggtgtcccccatcctgatgcacggcccggtggtgcggtctccaggcctcccaggattctcagctgcgccgtctccccagtccccaaaccccagtggtgngccgccaggggactggaccgtcagtctgtggagctggggctgcagctggtggtgtttccaacaagggtcttttggctgcctggctccagggagaggcctctggaggcaaggggtaacctaccgggaaagcctcaaagg

SEQ ID NO: 149195 - DNA, 589 bp, Homo sapiens
ttttgctcctacttcctcttgcagcctcaaattcacagcctccttcttggtctctgtattctagggacactggcatttcccttccagaggctttgaacatgcgcttccctcgtactgagctaaaatgctaaccatccctgcagtggcataatgaacactgctcaacgctcatttcctaaaggatgctttccatcttcctaagcagcaccctgtacatctccattgtagtctctgtcatacttgcattgtgatattttggggacatgattatttgattaatatctgtctattcccctagcttgtacaatccatgaaggtagggaccatgtgtctttctgctcattattgtatcacagcatttagtccagtgcctggtacataggaatggacaataaactttgatagaatgaaatgctgggtgaaagacaggtaggaaggatggtattttcacttggcatgtgtgaattgcacaagggcatctgattactcagcacagatggagcatgaggaccagtgccctgatggttactttattcctcttcctccatgctgcctcctgtcttctctctcttcttctggatatgacttt

SEQ ID NO: 149196 - DNA, 124 bp, Homo sapiens
tgattccttattttacttatgtttcagtttctcagttatgatagggagatttcctttatatcagctctctattaaaaatgcagttgaaatttatgatgtagaaatcttgtcacagtctgaagat

SEQ ID NO: 149197 - DNA, 396 bp, Homo sapiens
aagtgggcagcctgcttccaatccaagcaggcagctttccgctcatctgcaggtagcctcgtgctgtggcagcacaaagttgtgtgagccagagctgaacttgtgatccccacgggcatctcctgaggcgcacctctcctgagagagaaagctggtccgtccagcccattcagggctcagcctccccagccgtcgcagggctggcttgctgaaaggtctgggtgttaacacagcactcctgttctctctctctgaaggccctttatgctggcatgaattccttttctcatagagatctgaaagctcttttgactaaatgggtcacctttctgagtattttcataaggctgtcagcctttaccgtgccagacaagttttctggaatttcctttccag

SEQ ID NO: 149198 - DNA, 288 bp, Homo sapiens
attctgatctatttgtttctgagcatttctttgtaagcttaacaatggagtagtgcatcagagtaactgatcaatataaccttccccatgtggatgctctgaggaatacgctttagaattttagtgatatagaagcttatttagaagaacatacacagtcttagggagcatactcttggtttattaattaaaaaaactcatatgttaagcagctgtgcaaatgcacatttaaataaccattttaccataggataggactagaataccttaaacattgttttctgcctt

SEQ ID NO: 149199 - DNA, 345 bp, Homo sapiens
gaaaggagacgagtatggcccaaggtaggattaagaccttcagaggctctgggtaccacaagatgtaattacaattaaaaaaacaaaaccaatctgtaaacctcaaaacaattgcattttctccagcttaaggaagactgtatgactggaaggatatacatcaatggaaatatgatttagaatctccagtgatacttttaaaaaaccataaatgttgggatccttcccttgatctactgaagtgatttacctggttccatggtaggtgtatttcacaaaacacaagtaatccaaatgtacacctctagttaagaaccattagactgaaaacaaatgagcccagaa

SEQ ID NO: 149200 - DNA, 341 bp, Homo sapiens
gtgctggtgcgatctagaggaccccagcgacattagcgcagagaaatggatgccatctggggtcactgtaactctctatgcacctcccattggttctgtttctctggagaacactgactaatacacacctcatatggttataacgaagattagataaactaatatatgtaagcatgtttagaacactgcctgccacctagaaagctcccctggaagtgctagatgctgttatcgaatgagcatctactatgtgcgaggacattttcacgtttcctcatttgctgatcagagccacagtacatgatgggtggtgggattcccattttgcaaatgagaagctg

SEQ ID NO: 149201 - DNA, 173 bp, Homo sapiens
tgggggtgtctcagcttgtgaagaggagatggctttgagcagggctgacactgaaaaggctggaagaaaaaaacagacacacaagagtctcaggatcaggtagcataggaaagttgtggacagtctttgaggagcactccctcaggcaggcaggcaggcaggtcatgagctat

SEQ ID NO: 149202 - DNA, 368 bp, Homo sapiens
  misc_feature (41)..(42): n is a, c, g, or t
  misc_feature (45)..(46): n is a, c, g, or t
ccttaccgcgcacgtttcccgcgaatggagaggagaaggannggnngccttgctggtcactctctgatgtagatatcattacaattatctttttatacatgataaaattgaaacttgggagcctggaaggaagcaaatgaagccataagggcaaggccctgatgcaatagaactggtgtccttgtgagaataggaagatgccaggagtgtgatgcacaggagaaggaccatgtgagaatgcagcaagaaggcagccatctgcaagccaaggaaagagacctcaggagacaccaactgtgctgacaccttgatcttggactttccagcctccagaacagtgagaaaataaatttctgatgtttaagcca

SEQ ID NO: 149203 - DNA, 356 bp, Homo sapiens
  misc_feature (41)..(41): n is a, c, g, or t
ctggcctggcgaataaccataataagaagaaggggggcctnttggtactctctgatgtagatatcattacaattatctttttatacatgataaaattgaaacttgggagcctggaaggaagcaaatgaagccataagggcaaggccctgatgcaatagaactggtgtccttgtgagaataggaagatgccaggagtgtgatgcacaggagaaggaccatgtgagaatgcagcaagaaggcagccatctgcaagccaaggaaagagacctcaggagacaccaactgtgctgacaccttgatcttggactttccagcctccagaacagtgagaaaataaatttctgatgtttaagcca

SEQ ID NO: 149204 - DNA, 359 bp, Homo sapiens
tatttctggtctacgtttgtaccaactacaccgcccccctcgggaactctatctctgatgtagatatcattacaattatctttttatacatgataaaattgaaacttgggagcctggaaggaagcaaatgaagccataagggcaaggccctgatgcaatagaactggtgtccttgtgagaataggaagatgccaggagtgtgatgcacaggagaaggaccatgtgagaatgcagcaagaaggcagccatctgcaagccaaggaaagagacctcaggagacaccaactgtgctgacaccttgatcttggactttccagcctccagaacagtgagaaaataaatttctgatgtttaagcca

SEQ ID NO: 149205 - DNA, 357 bp, Homo sapiens
  misc_feature (47)..(47): n is a, c, g, or t
cggcgtgaggtgatggtgatgtggaggtgggaaaggggggggggggncttctctgatgtagatatcattacaattatctttttatacatgataaaattgaaacttgggagcctggaaggaagcaaatgaagccataagggcaaggccctgatgcaatagaactggtgtccttgtgagaataggaagatgccaggagtgtgatgcacaggagaaggaccatgtgagaatgcagcaagaaggcagccatctgcaagccaaggaaagagacctcaggagacaccaactgtgctgacaccttgatcttggactttccagcctccagaacagtgagaaaataaatttctgatgtttaagcca

SEQ ID NO: 149206 - DNA, 512 bp, Homo sapiens
aatttgtaagctatggaagaagtgactcatctgcttgaagggagagatgttgaaggagcgtggagccagggaggagggaacgcaggaacacgatgggaacccacaggtggtttatgaaggagccctcagaaacagagaggggaaaatcaacgatatcacaaacaacagaatgtgcagctgtcatggaagttggtgtttacaaagtctctgatgtagatatcattacaattatctttttatacatgataaaattgaaacttgggagcctggaaggaagcaaatgaagccataagggcaaggccctgatgcaatagaactggtgtccttgtgagaataggaagatgccaggagtgtgatgcacaggagaaggaccatgtgagaatgcagcaagaaggcagccatctgcaagccaaggaaagagacctcaggagacaccaactgtgctgacaccttgatcttggactttccagcctccagaacagtgagaaaataaatttctgatgtttaagcca

SEQ ID NO: 149207 - DNA, 383 bp, Homo sapiens
cttgacgtacgtaaaaccggacccattatcccgcaggaggaaagacacgcggccttgctcgtgctacctgtaagctctctgatgtagatatcattacaattatctttttatacatgataaaattgaaacttgggagcctggaaggaagcaaatgaagccataagggcaaggccctgatgcaatagaactggtgtccttgtgagaataggaagatgccaggagtgtgatgcacaggagaaggaccatgtgagaatgcagcaagaaggcagccatctgcaagccaaggaaagagacctcaggagacaccaactgtgctgacaccttgatcttggactttccagcctccagaacagtgagaaaataaatttctgatgtttaagcca

SEQ ID NO: 149208 - DNA, 382 bp, Homo sapiens
  misc_feature (46)..(46): n is a, c, g, or t
  misc_feature (68)..(68): n is a, c, g, or t
aagtacgagcagccgcttcctatgccagtgaccgtacacgaaacangtcacaattccgctcctgctgntagtactctctgatgtagatatcattacaattatctttttatacatgataaaattgaaacttgggagcctggaaggaagcaaatgaagccataagggcaaggccctgatgcaatagaactggtgtccttgtgagaataggaagatgccaggagtgtgatgcacaggagaaggaccatgtgagaatgcagcaagaaggcagccatctgcaagccaaggaaagagacctcaggagacaccaactgtgctgacaccttgatcttggactttccagcctccagaacagtgagaaaataaatttctgatgtttaagcca

SEQ ID NO: 149209 - DNA, 380 bp, Homo sapiens
  misc_feature (58)..(58): n is a, c, g, or t
ccaccgacggggaggctgggttgtggtgggggcggggggcgcggcgagggaagttacntgtgtagctagtagtctctgatgtagatatcattacaattatctttttatacatgataaaattgaaacttgggagcctggaaggaagcaaatgaagccataagggcaaggccctgatgcaatagaactggtgtccttgtgagaataggaagatgccaggagtgtgatgcacaggagaaggaccatgtgagaatgcagcaagaaggcagccatctgcaagccaaggaaagagacctcaggagacaccaactgtgctgacaccttgatcttggactttccagcctccagaacagtgagaaaataaatttctgatgtttaagcca

SEQ ID NO: 149210 - DNA, 375 bp, Homo sapiens
  misc_feature (40)..(40): n is a, c, g, or t
  misc_feature (55)..(55): n is a, c, g, or t
atagagaaaatgaacacagccatataaacccaacaaaacncactttatgggtacngtagattcattttctctgatgtagatatcattacaattatctttttatacatgataaaattgaaacttgggagcctggaaggaagcaaatgaagccataagggcaaggccctgatgcaatagaactggtgtccttgtgagaataggaagatgccaggagtgtgatgcacaggagaaggaccatgtgagaatgcagcaagaaggcagccatctgcaagccaaggaaagagacctcaggagacaccaactgtgctgacaccttgatcttggactttccagcctccagaacagtgagaaaataaatttctgatgtttaagcca

SEQ ID NO: 149211 - DNA, 381 bp, Homo sapiens
  misc_feature (46)..(46): n is a, c, g, or t
  misc_feature (60)..(60): n is a, c, g, or t
  misc_feature (71)..(71): n is a, c, g, or t
  misc_feature (73)..(73): n is a, c, g, or t
tggtatatggttgatctccgcccgcatgttttgcggaagacaaganaagacgctttactnctatactagtnantctctgatgtagatatcattacaattatctttttatacatgataaaattgaaacttgggagcctggaaggaagcaaatgaagccataagggcaaggccctgatgcaatagaactggtgtccttgtgagaataggaagatgccaggagtgtgatgcacaggagaaggaccatgtgagaatgcagcaagaaggcagccatctgcaagccaaggaaagagacctcaggagacaccaactgtgctgacaccttgatcttggactttccagcctccagaacagtgagaaaataaatttctgatgtttaagcca

SEQ ID NO: 149212 - DNA, 372 bp, Homo sapiens
  misc_feature (52)..(52): n is a, c, g, or t
ctcggggtgcagcagagacattagtcaaagggagaagaggctactgggtacngtagattcattttctctgatgtagatatcattacaattatctttttatacatgataaaattgaaacttgggagcctggaaggaagcaaatgaagccataagggcaaggccctgatgcaatagaactggtgtccttgtgagaataggaagatgccaggagtgtgatgcacaggagaaggaccatgtgagaatgcagcaagaaggcagccatctgcaagccaaggaaagagacctcaggagacaccaactgtgctgacaccttgatcttggactttccagcctccagaacagtgagaaaataaatttctgatgtttaagcca

SEQ ID NO: 149213 - DNA, 360 bp, Homo sapiens
ctcgcattttgtttagttttagttgtttttttggctagttgagcacagtctgtctctgatgtagatatcattacaattatctttttatacatgataaaattgaaacttgggagcctggaaggaagcaaatgaagccataagggcaaggccctgatgcaatagaactggtgtccttgtgagaataggaagatgccaggagtgtgatgcacaggagaaggaccatgtgagaatgcagcaagaaggcagccatctgcaagccaaggaaagagacctcaggagacaccaactgtgctgacaccttgatcttggactttccagcctccagaacagtgagaaaataaatttctgatgtttaagcca

SEQ ID NO: 149214 - DNA, 365 bp, Homo sapiens
attaaataaagctattccttttttttagatcaaacccacacctactgtgtactgtaatctctgatgtagatatcattacaattatctttttatacatgataaaattgaaacttgggagcctggaaggaagcaaatgaagccataagggcaaggccctgatgcaatagaactggtgtccttgtgagaataggaagatgccaggagtgtgatgcacaggagaaggaccatgtgagaatgcagcaagaaggcagccatctgcaagccaaggaaagagacctcaggagacaccaactgtgctgacaccttgatcttggactttccagcctccagaacagtgagaaaataaatttctgatgtttaagcca

SEQ ID NO: 149215 - DNA, 358 bp, Homo sapiens
tgcgatgagctaggctgtgtatccatgtcttaactgaacgcggggcattgtctctgatgtagatatcattacaattatctttttatacatgataaaattgaaacttgggagcctggaaggaagcaaatgaagccataagggcaaggccctgatgcaatagaactggtgtccttgtgagaataggaagatgccaggagtgtgatgcacaggagaaggaccatgtgagaatgcagcaagaaggcagccatctgcaagccaaggaaagagacctcaggagacaccaactgtgctgacaccttgatcttggactttccagcctccagaacagtgagaaaataaatttctgatgtttaagcca

SEQ ID NO: 149216 - DNA, 358 bp, Homo sapiens
ggcgctgtagagcgtccggccctgtggccggccccgccaaagaaattcgatctctgatgtagatatcattacaattatctttttatacatgataaaattgaaacttgggagcctggaaggaagcaaatgaagccataagggcaaggccctgatgcaatagaactggtgtccttgtgagaataggaagatgccaggagtgtgatgcacaggagaaggaccatgtgagaatgcagcaagaaggcagccatctgcaagccaaggaaagagacctcaggagacaccaactgtgctgacaccttgatcttggactttccagcctccagaacagtgagaaaataaatttctgatgtttaagcca

SEQ ID NO: 149217 - DNA, 362 bp, Homo sapiens
  misc_feature (44)..(44): n is a, c, g, or t
ggtccaggaacaaatatttatacggcagaaaccacaaacacccngcacaatctgtctctgatgtagatatcattacaattatctttttatacatgataaaattgaaacttgggagcctggaaggaagcaaatgaagccataagggcaaggccctgatgcaatagaactggtgtccttgtgagaataggaagatgccaggagtgtgatgcacaggagaaggaccatgtgagaatgcagcaagaaggcagccatctgcaagccaaggaaagagacctcaggagacaccaactgtgctgacaccttgatcttggactttccagcctccagaacagtgagaaaataaatttctgatgtttaagcca

SEQ ID NO: 149218 - DNA, 345 bp, Homo sapiens
tttttttaatgcttgtaatatggaaagagggggactgtctctgatgtagatatcattacaattatctttttatacatgataaaattgaaacttgggagcctggaaggaagcaaatgaagccataagggcaaggccctgatgcaatagaactggtgtccttgtgagaataggaagatgccaggagtgtgatgcacaggagaaggaccatgtgagaatgcagcaagaaggcagccatctgcaagccaaggaaagagacctcaggagacaccaactgtgctgacaccttgatcttggactttccagcctccagaacagtgagaaaataaatttctgatgtttaagcca

SEQ ID NO: 149219 - DNA, 393 bp, Homo sapiens
  misc_feature (41)..(41): n is a, c, g, or t
ctggcctggcgaataaccataataagaagaaggggggcctnttggtactctctgatgtagatatcattacaattatctttttatacatgataaaattgaaacttgggagcctggaaggaagcaaatgaagccataagggcaaggccctgatgcaatagaactggtgtccttgtgagaataggaagatgccaggagtgtgatgcacaggagaaggaccatgtgagaatgcagcaagaaggcagccatctgcaagccaaggaaagagacctcaggagacaccaactgtgctgacaccttgatcttggactttccagcctccagaacagtgagaaaataaatttctgatgtttaagccaaaaaaaaaacaaaaatgtggtcctatgtggcctcaaa

SEQ ID NO: 149220 - DNA, 379 bp, Homo sapiens
  misc_feature (66)..(66): n is a, c, g, or t
ttacattttcatttagaaatcaatttatagagaaaaggggggggctttcgtgtttactgcgagaancctactctctgatgtagatatcattacaattatctttttatacatgataaaattgaaacttgggagcctggaaggaagcaaatgaagccataagggcaaggccctgatgcaatagaactggtgtccttgtgagaataggaagatgccaggagtgtgatgcacaggagaaggaccatgtgagaatgcagcaagaaggcagccatctgcaagccaaggaaagagacctcaggagacaccaactgtgctgacaccttgatcttggactttccagcctccagaacagtgagaaaataaatttctgatgtttaagcca

SEQ ID NO: 149221 - DNA, 382 bp, Homo sapiens
gcgtcgggagttggtgcgggaaaggttgtggggagaacgcggggaggctacgtgtctgcagtagcaatcatttttctctgatgtagatatcattacaattatctttttatacatgataaaattgaaacttgggagcctggaaggaagcaaatgaagccataagggcaaggccctgatgcaatagaactggtgtccttgtgagaataggaagatgccaggagtgtgatgcacaggagaaggaccatgtgagaatgcagcaagaaggcagccatctgcaagccaaggaaagagacctcaggagacaccaactgtgctgacaccttgatcttggactttccagcctccagaacagtgagaaaataaatttctgatgtttaagcca

SEQ ID NO: 149222 - DNA, 358 bp, Homo sapiens
acgcccacccgccaaccccgcacatactcttcgccgcaccggcacattcgtctctgatgtagatatcattacaattatctttttatacatgataaaattgaaacttgggagcctggaaggaagcaaatgaagccataagggcaaggccctgatgcaatagaactggtgtccttgtgagaataggaagatgccaggagtgtgatgcacaggagaaggaccatgtgagaatgcagcaagaaggcagccatctgcaagccaaggaaagagacctcaggagacaccaactgtgctgacaccttgatcttggactttccagcctccagaacagtgagaaaataaatttctgatgtttaagcca

SEQ ID NO: 149223 - DNA, 375 bp, Homo sapiens
ctctagtaccagaaaaacccatgacgaagggaggggggggggctagtggctacaggagatagccttctctctgatgtagatatcattacaattatctttttatacatgataaaattgaaacttgggagcctggaaggaagcaaatgaagccataagggcaaggccctgatgcaatagaactggtgtccttgtgagaataggaagatgccaggagtgtgatgcacaggagaaggaccatgtgagaatgcagcaagaaggcagccatctgcaagccaaggaaagagacctcaggagacaccaactgtgctgacaccttgatcttggactttccagcctccagaacagtgagaaaataaatttctgatgtttaagcca

SEQ ID NO: 149224 - DNA, 409 bp, Homo sapiens
  misc_feature (66)..(66): n is a, c, g, or t
ttacattttcatttagaaatcaatttatagagaaaaggggggggctttcgtgtttactgcgagaancctactctctgatgtagatatcattacaattatctttttatacatgataaaattgaaacttgggagcctggaaggaagcaaatgaagccataagggcaaggccctgatgcaatagaactggtgtccttgtgagaataggaagatgccaggagtgtgatgcacaggagaaggaccatgtgagaatgcagcaagaaggcagccatctgcaagccaaggaaagagacctcaggagacaccaactgtgctgacaccttgatcttggactttccagcctccagaacagtgagaaaataaatttctgatgtttaagccaaacaaaaaaaaactggcctcgctggcctca

SEQ ID NO: 149225 - DNA, 494 bp, Homo sapiens
agatattggtattttatccccattcacgctacacacaactcttgtttttcaccctgttaggaacaagtcggggatcttacatgaataggcacaggattggtcacagaagtcctcaggcatctgggaatagcttcccctggtatcaaggctggaatgttgaggctgaagcattcagtcaaggagatggcaagcctgactccgggtccctttctgagtggcagcatctcatcctcacgagtctgtgtctcagcagagcaggtcgagctgcctgagggcttctctttttatagtccctgtttggggatccacctgtgtctggttatcttgaaggttggtgcgccctagcatgtgatgtcgtctcaaattggaatatcccaatgcagttggtctaaacagatttgggcattctggcagacatctgcacttacaaactaactgtgataacatatttacactatacccataaattgcactccaaacaatgacctaatcat

SEQ ID NO: 149226 - DNA, 173 bp, Homo sapiens
caggtagttgcgtttcttctcaggtagttgcgtttcttctcaggtagttgcgtttcttctcaggtagttgcgtttttttgcgttgagtgctttcgcttagtaactcttataaaggagcaaatattcatatgattgtaagagaacagaagaatgctttcttctttcttttgcta

SEQ ID NO: 149227 - DNA, 477 bp, Homo sapiens
caatcttatttgctcaggagcatcaaactaagcattctaatagaagaagttaattccaaaagacttctttatagtcttttggtgctcaggaacatcaaactaagcattctaatagaagttaattccaaaagactttttatccaatatttatagttcttgcacctatttacatattgagaaaaaaccatgctgtcctcacttttgtctaagtattggcctgtatggcttctttttaattggcaaattataatggctatatatttaacgaatctaacaatattaaacaaatggcattcaattacactccaaacactaaattgctttaatttgggaagaagaattcctggagtctcgctgaacagttatcagtcattcagaattgctcgccttaatataaaaagttctgtacttaaaaaattcagaaacagcagcattatacaattggagagttcacttatttttcttctggacatttaa

SEQ ID NO: 149228 - DNA, 452 bp, Homo sapiens
cagattccaggttggaggtttgtcaagcaggtgtggctaaaggactagtggttaagggagttaatggtcctggtgagaacagtggggatgatgcaccttaagtctggaaaggctagggaaggaattatgaagtgtggtgggagtgctgtctatcagaggaggttgtgggggcaggcatggtaatcttgcacaaatacaaggaataaagtagtaaggctagagaaagttctgaaaaaggaaaatgagaatttaggatcacaaaattctctattgtgaaatagcctgatgtgtaaccctagaagcaaatgttcaaaactgagtagagggaaaaagctgtaagcaattatggcaagggtattgggtgggctttcctctataagcaattatggcaagggtattgggtgggctttcctctagaacactgaagtcatccaggatgatggtgggacatg

SEQ ID NO: 149229 - DNA, 622 bp, Homo sapiens
tgacccatcatctgcccctcctccctgcagagggggaagtgagaaggaggggggccagagaccctgccttctgggccaggaaggctaataaaagcagaagtaggaagagtaacggggccctctggtcaccggcttgagccccaccatgcagaccccagcagatttccccagggttgagagagacttggttccctgtcccagaaaggtgagcagaagagtcgcctgcctccagcggtgtctgtcaccatgactgggcaaggaatgggtttgggggtggctctgtcccttgggatttctgggtggtttcctgtctctgtccccagggagtgctctcagtcagaggcagacaggtgaggtggaggttcagatctcagggtggggtgtgcaggtattgccatgtgggcttggccccctcttagtccctctttgagccaggctttctgcctgtcccgccaggaggttacactcaggggtctgatttgactgcagttttgtggtgtttttgtggggctgttccacccactcctccatctgtcaggaagggttaggtatcttcccctgaagataagattgtgtctccgagggccaggacctacagtgggaggtcacagacggaccctag

SEQ ID NO: 149230 - DNA, 451 bp, Homo sapiens
ctgggttcccaggcctatcttgggaagggcaggaaagggcctctacaagctgatcctcttcccagctgccatctcagaccttctgtcatcctgagccatgccaggtgcccggctgaggcaggcaagccccagggcccactgtcactcaagggcagagctgggtcaacattgggtgcctgctcacatctagtttgggaaagaaagttcaggtcgtctaggctctggttaacactgactcatgggcgaggattccctgtgtgtcacattgcttcagaggaggggggtcttcatctgagccatgggaccctgagagtttcaataaggactctgggggggctcagagcctcctgacattgtaaaatttgtatgaatgtgttttctggggaggagatggccctgagctttcacccaatacccaaaaggacccttaaccccccaaatgttcaagaga

SEQ ID NO: 149231 - DNA, 157 bp, Homo sapiens
gcggccgcctactactactactgctcgaattcaagcttctaacgatgtacgggaatcatgtcatcttgacccagctgactggaaattttcaatactgtcttttaactgttgtactccagccagcctgggcaacagagtgagaccctgtctcaaaaaa

SEQ ID NO: 149232 - DNA, 225 bp, Homo sapiens
ccatgggtcatgaaacaaatatggtggattgcaattggtgtataggggagaaaagggaaatgtcagagggtgtcacaattttcaaggatatttcataaaacctttgctttgatcttaggtgttgtgtacatgataaaatgtgtttcttatgggggggtcatgtcagaggagttgaattacattggtttccatgctacttgatggcaattgtgaatacttgatttg

SEQ ID NO: 149233 - DNA, 310 bp, Homo sapiens
tttgtcattaccaacaaaatttgggagaagcaaacagtctattcatacattccataaaaaacatgattttatcatcttattctaatcaaatacagaatctgcgtatgtgacaaacttttaatatccactgatcacaaaaaggaatactttcaactgaaaagtgccagcagagctttctccctacctgcaaggagccagaacatcctcattatagtaccatctaccctaaatgataccaaacctaagggcctttcattattttagagttaattctgtgaaaaaatatgtgcagaccaaaatgtgggttgga

SEQ ID NO: 149234 - DNA, 251 bp, Homo sapiens
tacaggtgtaagccaccgctcccggccttgtttttatttttattttttacaatcctttaaaaatgtaaaagtcagctttactttgtgggcccatctattctatggatggggtttggccgatgggttctagtttgctgcacctgctggtataagtgtatagtcacttccttgggtcagggtcattctactttggatctatctttgtaatttttttttttttttagacagagtcttgctctgttgcccaggct

SEQ ID NO: 149235 - DNA, 836 bp, Homo sapiens
ttatcaaggagcctcgttctcttgcaggatgtctgccagctcctctccagccacccattctcatagcgggtgagccagaccacatctgctaatccaggagcacagctcaggactagtctatgcggatggaatctctctccagccttttctctatgtcagttttatctacctggcaagaaaaaacaaaaacaaccccaaaacaacccctccccacaaacacaacacaaaacaagggactcgaaaagttggagaaaaccttttaatgtgtttctgtaaaatcctttcttaggaggtttagtacaggtactacccatcagcaacttagccggccaggtgagttggtgcagaagggcttcggctgaatttataccagagccatcgggagtgacttggccacctctcccaattaccacaaggaagtcttaaaattgaatttcagtttcagcagatacttcagatttacctgagcaatatcatagacaatgtactcattatatagtagacaagtgtcattcacaccagatgaaatcccagtcccaagaggaacctctgcaccatccagagtaatactagctgaagggtcaggggtagttttgcccaaacctttgacactgtgcttgccctttgggtaacttgctgatatgtgaagcgtgcttcagttcatacattttccaagggcaacttctcccaacaggattaagcccgttgggcctccctgagaatgtatggcagtattggcactcttggaggccatgtagcaaaataatcctttaccaacatgtagcccgtcatgggcactttaggcgggcctatccaaagaccctgggacaggatcc

SEQ ID NO: 149236 - DNA, 476 bp, Homo sapiens
cttgctcaactcctttgtgaggtgatttttcagtgaactttcagaaggcaaaggggaagctttcccttggaccctacagttttggtgctgtgggcaggctcaccaaagccactctgctcttctagaagccacagtgaagggaacccagggcttgacaacgggcaaaagggtaagaattcctcaacagtcaggctcccagcctgtcttcctgtgaaacccagttgagcagacaggaaaaaaataaccgtttatctcctctacataatctcaattaatgggagtgatatggtttggctctgtgtttccacaaaactctcaccttgaattgtagtaatccccatgtgtcatgggaggaacccagtgggaggtaattgaatcatgggggcagatttttcccatgctgttctcctgatagtgaataagtctcacaagatctgatggttttataaaggggagttccactgcacacgctctct

SEQ ID NO: 149237 - DNA, 324 bp, Homo sapiens
tttgggaggctgaggcgggcagatctcttgaggtcaggagttcgagaccagcctagctaacaaggcaaaaccccgtctctactaaaaatacaaaatcagcccggcatggtggtaggtgcctgtaatcccagctcctgggaaggctgaggcaggggaattgcttgaaccagggaggcagaagctgcagtgagctgagattatgtcactgcactccagtctaggtgacagaggaagactccatctcaacaacaacaacaacaaagaatggaatagaaatctgaaagcacctaagcaaagtttcagatttagtaatgatagttatag

SEQ ID NO: 149238 - DNA, 831 bp, Homo sapiens
cagatattggatttacatcttaaaagcctcactcatcgacttactcactctttgagctcaaagcattaagaactgccactgagattgtggactccatccgcttcacaaccgccaactctcctaagtgaggacatggatgaaaaccctgtagcaactgaaggataattaacagtgggagtcagagggtatttgctttgtcagggctgcatgatctttgaacagaaataaatatacctcattatggcaacagaaaggtgctgacattaaattacagtctaccgtatacctggtcagaatagagatagaatcagtccctcttctaagttcggctggcactttacccatttttaagaaggaatattgcgtgatttgccaaggaagggtgaaaaaggacaaattgtaagcactggttaaaaagagagctcttctgctggattttacaattctccatgaatgagatgaatgttttgtctgtcatgctgcattctcaaatacagtcagttacaaagaaaggctcacttactcccttttaagatagtcacaccaagaagataaagaagctgaagtcacttccctaggagccacggctttgctggcaagtcaaaccaacaaacattcattgagtatctgtgtacccaggactttcctaggcactgatggaaaaacataagaagcttgggactcagtcccaggacacttaccctccccaagcagagaaggaaaactgagtgtgcctcatttagcagtctgacaaaacaaaacctgaataatcaaatgtcccttgtttcatttttgtaactttattttattttgctataatctatgtacctt

SEQ ID NO: 149239 - DNA, 303 bp, Homo sapiens
ttctctttgccccagtttcctcatttgtaaactgccttaaatctttcggggaacaagaaggaaggggtatgtatcaatcaatcaatccataatttctagccattctttaaggtccacctccatgaaacttggcttcaatcttcttgcccagtcatttctcctctccagttccttgtatagcatttattgtttactactcaatggctcaatcatggtttttttttgttttttttttttggaaacgggttccggcccttaaacttcctaaacttagggggaaccctctaaattcaccctgcagcc

SEQ ID NO: 149240 - DNA, 146 bp, Homo sapiens
aaggaaaggcattccaggtggaggtaacagcgtaggcaaaggcacggcagtgtgaaagcactgggtgcgctggatggctaggatggaattgatcagagcagagctgcacggagagatgtaaaggaagatggtgctgcagacactta

SEQ ID NO: 149241 - DNA, 294 bp, Homo sapiens
gaacaactacctactttaaaccagactcatgtatttttcatatactgccattataattaacgccatggactttcaacctcctttttaggaccaaaatcttccagaaccatattaaatatcacatttgagtcaataaaaaaaatttgtcatttatttttgtgatatttgtgcactctttcatcaccgagcacatcttggctcgatgtctctaacagtctaactggttttaccatttccactctcagtcccctcctatctgttatgttgaagtcacagacattccctgactctaat

SEQ ID NO: 149242 - DNA, 353 bp, Homo sapiens
catggtggggctggaaagctggggaatgagatgaggggaacataggtcaagtgtgaaccccaagatgtgagaccaggaaggggaacatcacagcttcctagttctgccatgccaggcgaggacacttgaaaccagtccctgtttccctcctgggcttcctcctcaatgtcattccttcccagcaccagggccaaatgctcagccctgctcagttgaagcgacatcttcctctcttcccaaggagcccaatttcctctgccgctcacgtgcaggcaacagtccatagttcacacacagcagtggggccaggccagactctcatcactatgaggacttcgtggctgacgtgcagg

SEQ ID NO: 149243 - DNA, 442 bp, Homo sapiens
ctatggcctgtcacaatgtttctgggagagttgggattccatataaggttttaagtaatgggacatctaagtaactgggtacgtaaggaagcccaggataggtaaaggaagtggtttgccaaggcctattaggacagctcatccgaggatgggtctaggaagtacacaatcccacttaaaaggaaaacagtattttggaaacagcatatataagaaactgcaggttttggaggtatgaaaagcaggaggaatgacaacttgtctaaataattcttggaggaagatgaggaccagaagaatcctgcaggaaaaaataaactgccagtatacttgataggaggtatttcagtgcaattttgagggtagtgcacagattgataactctggatcccgctggtttgtttatgggtgggaccacctaagttgactagggcaggcctat

SEQ ID NO: 149244 - DNA, 363 bp, Homo sapiens
ttccagcagcaaatgggttatgtcgaccataaagcaacaccttcttttcttgttggatttgactttaagacaaatgagtgtattgcctgttccaaataggaggcacaaagttccagcaatctaaagcttacaagcaactagagacagaaaggggagagtgtagcctttcaatgattatctcattaaaacccttcttctaaatttaacaggattctataaatcttagaaaccatggatcacattcctagtatcctaacctggtatccaggctttctaactcaatgatttcttccagttaacaaaagccaaactagtcctatttcggatagagatggaacaaaaagggggcagtgggggcgtgtg

SEQ ID NO: 149245 - DNA, 378 bp, Homo sapiens
tgcctggcacagagtaagtgcccaataaacagtggcttttctcactggtggctgttactgttatctgctgatgcaaacacctctccatagtaagctgcttattccctgattcctgggactagattttattcacattcccacactgcacatcttgggctcttggattaaatgcttactaaatcaatacatgaataacataaaaatgtgatccctaccttcaaggagaccagactctggttctgaaataatcacagcagaaggcagaaactacatcaccatagggagatgtagttaaactaaaaggtttagaggagaaagatattaataggcaggtttaaggcaggtacttagtaggcactttgttcagcgtagtgtttt

SEQ ID NO: 149246 - DNA, 442 bp, Homo sapiens
ccagcgcgtgagcctgtttccctatcccctggttttgagtttctggcctgatcgttgcatgcttggcttcactgctactttgtgaaactctttgctgagattttaacctgggctctactttcagggcacgatgggattgagacacatcttgggggatgggtaggcaggtgagcaggtctgaggaggaggctgggtctgccttgacctgtcctctcccatctctacatacttaccagtaatcagtgcttgatgctgaaggtcatactgagatggaggctatgggcaagagtttgaatctgtgtggtcttctgtgggtgctcactgacctgctgtatgtggatttccatgcaccagacacatgctcttagaatgtgcctggcagcttgagcaggattgagggatctagagctttcttctggctgcttcccccacaatcaaggag

SEQ ID NO: 149247 - DNA, 174 bp, Homo sapiens
tttgaatgcataaaataacatatataggatgtcatgggaaaaacaattacagtgaagtccagtgatcagaatgtttcagtgtgtgtttcagcatgtgcttccatggcataggtgcttctgttttacatgtgacagataggcataaatgacacaatctctgtaacagctgtgaca

SEQ ID NO: 149248 - DNA, 330 bp, Homo sapiens
ctcgcagcttataaaggaaagagggtgacaagaatgaagcctctgacttccagggctctttgtcctgctccaagtcaggcattagttctgtctgtcaaaatccagattatcaaaggaccatagtataaaagggctctgcaatatggggaggtgcatccacgcttctttgggagaaacgcctcacatgttggcttcataaaactcttctatgccccgtaggttggacaatgagaaataaataatccagacattggtgtttttgataggtggttagagcttccccaacagggggagtaaacaaaagaaccatcttaatttcaagcttagtta

SEQ ID NO: 149249 - DNA, 460 bp, Homo sapiens
cagtaaagatgtaagtggcccttgcaggccactgaaaatagactctttaggctcccagaaatgggttctgttcggacccttctaccacatctttctgtagcctatgcagaggaagacccgagtctagtcatgttgggggaagcggaacttttggtcacagtctccaaatttagtcacatttctttttttacttaagttctatttaagatctagtctaatgctatttttatgtggctttttaagtagtgcttgttaaaaagagaatacaaaattctaataatcactgctaattatttatcagaattctgtaaaaagcgttcgtcattgtagataagctgtggtttctaaaagcattagaagtcattttgacaagtgccgcggaaggtgggcaccggggaaggtaggcgccggggaaggtgggcgccgggaaaggtgggtgccaggtttcccttcatctctg

SEQ ID NO: 149250 - DNA, 333 bp, Homo sapiens
tgtaatatccttacagaggattttaagatgtgtggtatgtttaaaccaagtattttcacttggggcctttacttcatatgaggtcccactttcagatgcaactcaacattaggtttaaaaaagacacagggaagagaaagctgatggtatgacgcctacctcctgaagcataaactcttagattacagcccgtgtctccacaaggcattctgagcatatttgttttttttgtctgtggatcaaagggcagatatcaaatgatataaattttaccttggggtatcactatttattctattctctactctttgccagtctgtgaggaaaacctct

SEQ ID NO: 149251 - DNA, 122 bp, Homo sapiens
ccagccctcctcctcaggttaagaaaggcaaagagccctgcttttggctgtaaaaagccaggttccctaatcaggtgaaggcctgaggcagggactccttagggcagtgtaactagtagcca

SEQ ID NO: 149252 - DNA, 143 bp, Homo sapiens
agctaacatcagaggaaagttttgttttaagagttgtgcatttgcataaagttttttgattttccttgttctatggaccacagagcaaaactactgcttagcttaccttgcagtgagtttgcttctaaacagaaacactatga

SEQ ID NO: 149253 - DNA, 168 bp, Homo sapiens
ggagtttgaggttacaatgagatatgtctgcgccactgccactgcactccagcttgaatggcaaagcaaggccctgtctctacaaaacaaacaaacgaacaaacaagtattagcctgcacctgctccaccaaaacttctatagtgttggaaatcctagccagagcaat

SEQ ID NO: 149254 - DNA, 317 bp, Homo sapiens
agtatttcctagtgttgcttaattaagagaatcagatcagctgggtgcagtagctcacacctgtaatcccagcactttgggaggccaaggcgagtggatcacctgaggacaggggttcgagaccagcctaacatgcagaaaccccgtctctactaaaaatacaaaattagccgggcatggtggtggatgcctgtaatcccagctactcgggaggctgaagcaggagaatcgcttgaacccaggaggcagaggttgcaatgagctgagatcgtgccattgcactccagtctgagcaacaagagtgaaattctgtctca

SEQ ID NO: 149255 - DNA, 303 bp, Homo sapiens
ctgccctctgccagtgagggcaaaggaccagtgtaacagcctttctgggtacctgtactcagtgggtcccgagctcttgtccagtgtccaagaagaatgaggtcatgcttgacaattgaagaatggtgagggcagagaattttattgagggatgaaaacagctctcagcagagaggggagctggacgggggacgagaagggcaggtcatcttctcccgaagtcaggaggtctcctccccaaagtcaggccatctcccctctaccaactgagtatggggtctttataggcacaggatgggggtg

SEQ ID NO: 149256 - DNA, 289 bp, Homo sapiens
tgtttgtatttttagtagagacggggtttcaccatgttggccaggctggtctcaaacatctgacctcaaggaatccatgcatcttggcctcccagattgctgggattacaggcgtgagccaccgcgcctggcccagtctcggtatttgaggtcatgctggtttgtaaatgtctttttggcttgaccgtggcctctgacccctctcccattggagcagcgtccccgcgttacctgggccagggagataggtgaagaacttgctgcttgttacgcgtgtggggcttctttg

SEQ ID NO: 149257 - DNA, 329 bp, Homo sapiens
tagaacagctgaccacagaaacaggctagggtaatcctacaaggtgaagttcacaaggccagtgcctgcttccatggtgcctactgccaggcctgctattgcctttgagatctgactcagaacacaatgccaagagctttctattagatacaaacacccgactttggacactctgttactcaggtttttttaatccctcacatagaaaagcaccagagttgtcaccatacagagcaaccccagattcaaggacaaattgtttgcatctgttaaaagtcttacaacttaagttaccattttatgaaaactaccttcttgcctctatcttt

SEQ ID NO: 149258 - DNA, 711 bp, Homo sapiens
tgataggaatttctgtgatgctgccaaaatgttcatttctgcacatataaatccaactcccttgcatttatcatagctgaaaaattctttgaggtttctgtaactggcttttaactgtctcagtgcctgttttttagagggttagcatccactaggaaagctttccctgtcccatttcctcaaagcaaggtgcttcaaaagacagaacagctagaagtattccagggtatattcatgatccaagcacccactcctgagaggagagagaaacagaatttagaggtaatcccacccaatttttggacttttatgcaatttgacttaaaaaatccacaccaatctggaggcatatggatttatttactcatttcctttgcagaagagtactttaggaatcatttctgcctttcccccacctcctgcctttctctgtctcatcatttggaggctacaggggaaataaatttatcttgaaggagtgttatgaatatgattgtggccattatttgattaaatactcaaaagatataatcctacccagcgaccatgtcacatgaaggaaccatggttaccatcaattactgttcgttttctgtaaacatggacctgagccaactttagggggaaaataaaaagttggcaaatgatgtatttggcatcttccatctgtctttttttttttctctaccccttcagtttttgctctgggtt

SEQ ID NO: 149259 - DNA, 228 bp, Homo sapiens
tttgttagaacttcaaatgtaatcagaacaaaactgaaatgcagtgagtagactgttagataaaaagaaactctaagttcacgtgtgggtttcaatgagactgttagataaaaagaaactctaagttcacctgtgcgtttcaattactccaaatgccctcagtttccctacttagtgtggatggatgcaggcagttgatggatgagtatacattctaggtaatcaagg

SEQ ID NO: 149260 - DNA, 383 bp, Homo sapiens
agttcgacggagactctcacaatcaagagggaattcagtcttgaatttgtgagagaccattcaggcttgtgggaataggtgctgcagagctgacgccaaggtgccctggatgggatggacagtggtggagacctagggtccaggaggaggagacacgggagcattccacacctttgacccaggggtcgggggcagagtggcatgtgctgtggacagaaagagatgcacaatgcaagtgcatgtggtggttgggaagagtgatctggggaggaggagcattgtgattcaggtgagggaacaccacccaaggaatgtccatctggcatttgtaaactgaggtgaacctggcatttgggagagaggtggttgggtagagaattggg

SEQ ID NO: 149261 - DNA, 370 bp, Homo sapiens
tcaaacactggagtatggagaaaagatgctgtgtgactccaaggcttagacacaaaaggccacacagctcctgcctggttttctggggaccctcactctgggggacaccatccacatgtaaggagcctgggtctgcagtctgccctgctggaaaggcctgtgtaggtgctctggtcatcagccccagccgagagccaacacaactgccagctgtgtgtgtggaccacctgactgctcccccgagcagggctttcagatgactgcagcctcagccaacatctgactgcaaccacaggagatgagccacccaggctcaaacctaacttgtggactgccaatagcaaagggaccagaactccagatccggtaa

SEQ ID NO: 149262 - DNA, 457 bp, Homo sapiens
gtctcatctgaatcctctataaaatatgaaaagagaaaattttaaatttgggttgctggaatattgagactcagagaatttgaaactttttccataaccatagtaaggctaagatttattaagtactcagatacatttcatgtcacatggttggttttcagctaagacaggattggaagcagagtttcctgaatttcaggctctatttttcctcacctacaatgaactattttgcctgtgcacataatgggtttctgttaggaatgaaatatattttgtcctgaatctgtttacatttcaggaaaagcagatcagttctggaccagagcttgtcatattcgagataaaatctctcttccaaatatccctcccttgcacatttgatttctgattggcttccctcccttttctcctccttcttctccggtttttatttctattgtccagatcacatgtg

SEQ ID NO: 149263 - DNA, 828 bp, Homo sapiens
  misc_feature (768)..(768): n is a, c, g, or t
  misc_feature (772)..(773): n is a, c, g, or t
  misc_feature (775)..(776): n is a, c, g, or t
  misc_feature (781)..(783): n is a, c, g, or t
gggtggcttctctgcccaggcagatcaggaatggtcaccgcctgtgtgtgcagtgacaggtctgggaacagacaagggagagcttgtccgggaggctggaccctcacaccgatgctgcctgtgcctggcagctctgtcccgggcctcagaacagacactgaccaacacgctcctcagggtctccaggtccgggtcctggtccccggcagagcttcccatccatgggaagaagcaccgagcagccttgctggctcctcgcagggagctgggatgcatttctaagagcagcatgtgtgaagcccggggtctgggcaaaggagtgtttggggaagagtctgctgttgttggagggtcggaagtagaggggaaggaggggcacgcggtaggctgaggaggtggctggcgaccctgtggtggggacgagggggctatgagcagaccaggagccagcatcacgtttctctgtctccagaatcgaggacggagagctgccagagaggccctggcggggtgtctggggccacctaaagggcgtgggtggattaaagctgaggaaagcctcattttgggggactccgtacttaacctttgaggccctcagagctgcagcctgtggtttttcgaagtcaatcacctcccagggcctcgctcctgccttcagcgacagccatttatcagggagtctttgacccaaggagacctgaaaggtcatctggtccctctcctacccccaggcacagagcggtactggcttttaaagggaagccntcanntnntcgtnnncccccacagagagagcgtcgggatcctctagatcacatgctgatg

SEQ ID NO: 149264 - DNA, 111 bp, Homo sapiens
tttttaaaagcaatgttgtttttggcaatggctatcttccatgttaataattattgatctgtagcataattttaatggctgtaaagtattcccctgcataggtatgccatt

SEQ ID NO: 149265 - DNA, 311 bp, Homo sapiens
agtgcccaccagctaactacggggattgagaacaagtctttagaaagctcatgtcagggtgatattgggatagcatctaactgcatcctcactggactcatcttactggacaggagatagaccctttcagtgttgttgaacttgagtggtgagttgcatgtgacacaagcagtgttctagtcacattcaggaggaccaggtatcaaaccgtgatggaaatataaaaacaaagtgacactaactaggttttcatcatttatggtataagaagtgcttgtagtccataaacctaattttaatgtgagaaaatc

SEQ ID NO: 149266 - DNA, 543 bp, Homo sapiens
  misc_feature (456)..(456): n is a, c, g, or t
atcaacgcttatacttccctgtagcttctgagctacagtctttctcaatcagcctccttttactgatgacatgcttctgaagaggaaaaagttgctttctttttctatgagaattttccagtttttcgttttgttttgtttattatcttcctagcatctctcttcctcatttccaggtgatgctggcaatctattttacagtttagcacaacctttagactctaaagaggtcatttaaaggtgctttccaataagaagcattttagtgttgtctctgaaatgtttttactctccccctgcaccactcagaatttacatagtttttgcgtacataaatgtgctctctcctcccccaaatttagtaaaatgtaaaagtctgagttactgtcaattttgagatatttaggaaatttaactcaataccaaaccagccatttctttgaagtataaagcgtngagctcaacgctttatacttccggaaagggcctcatgaaaaagaactattacaatcaaaaacagctttatctagtgtccaaacagtc

SEQ ID NO: 149267 - DNA, 215 bp, Homo sapiens
ccacttcacaccatctcgtggacacatcccaccctttgggcagtgctgctgtgcagacttatagccagggcagccaggagagagcatccccaggggaaagccattctcggttcccaagaggcaactcctccaagtcactgtcaacttcccagggggctggctagcatgtaagggggaacctatttaacaaaaaggtgtgtctcatctgctgtctg

SEQ ID NO: 149268 - DNA, 203 bp, Homo sapiens
gtgggcccagtttcatggggatgggcccggtttcatggggatggacccctgcaccatccgaggtgaccattagcccggctccccgggaccagccctgagtgctccctggggaaagcgggacctgcagaggatggttttccaggatccgcctgaccacccacccccagcccgctcttacccccagcttccctgacctccatcct

SEQ ID NO: 149269 - DNA, 422 bp, Homo sapiens
gtccagtctcctctggcaacatcgcagagcagacacgggtgattccaggcaccatccagtgtccagccctgagccagacacatgataggtactctatcaaggatcaataaattgattgctcaggtttatttggatacatttcattggaaagtactctgtgatcagacctgtctgcagagccctcaaccctacagccctgtcctcatgctcttgaccatgacttcgagtcatggagaaacataacaatcctatttgtttactgagtgggtgcctgccagatgcagctatatcatctttctaatgcctccaacaacccacaaactagagacacttatgcccaactaggacacgcttggcaaccacgaagatgcccgtttactcccagaaaattatatgttgcctttcggagaagaggggctcat

SEQ ID NO: 149270 - DNA, 213 bp, Homo sapiens
ggttagaggatcccggcacagaagacgtacccgtacattgtgtgaaccagtattcttttagttgaaagtgataaaaaccctcctcaaagtagtccaggggcagaggttatatggagtttcttaggactccgttgcttttgctccaagtttacatggttaggattttggatagaaaaagagagaggggagtggggtgtgtgggtggcagggaga

SEQ ID NO: 149271 - DNA, 339 bp, Homo sapiens
agtctgaacatccaatcaatatcatacagacttctcttcaaactcgcctatcattaaatcccttggtgtgaggggcttcacctgactatcacaaacattccctacatagcaaatctgaatgaattactaaaatattttcaattctttagcactagtacaacatttacattcattcttttaagttcattggaattactatattgaatacttctaaaaaatgtaagccattccctatgtcacctagcaataaggcatttaaatcaaccagagtccttagaactgattaagataagttaagagagtaacaaagtatttgaagataaaatatccaaatataca

SEQ ID NO: 149272 - DNA, 517 bp, Homo sapiens
aggtgggaaagacttttgccaccaacatgggctgtttgagcaccaaaaaacccataatggggagaggccttatgagttcagtgaatgtggggaattgtttaggtacaactccaaccttattaaatatcagcaaaatcatgctggagaaaggccttatgagggcactgaatatggaaagacctttattagaaagtccaacctagttcagcaccagaaaattcacagtgaaggctttctttcaaaaaggtctgaccccattgaacatcaggagattctcagtagaccaacaccttatgaatgcacccagtgtgggaaggcctttcttacacaggctcatctggttggtcaccagaaaacccatactggagaacagccctatgaatgcaacaagtgtgggaagttttttatgtataactccaaactcatcagacatcagaaagttcacactggggagaggcgttacgagtgcagtgaatgtgggaaattgtttatggacagcttcacactcggtagacat

SEQ ID NO: 149273 - DNA, 362 bp, Homo sapiens
agacacgggaactctcggcaccgtgtgtggtcatctggggcctgacagcatcactgcacagtcttctacagtagctgaggccagctaataacaggctttggttatcagaaaccaaaacccaacaaaccaaaatccgaatcaagacgcttacccagtgggtttctgctcaggaaattaaactgtggaagcatatacaaccaacatttgaattcaaacaggtttttgagtttcaagttggtgctttaaaggtgaacccctggctgcctggaaacttgaacctgtcagacccgctcagaacctgaggtcgggcaggctcagcctcacccacttctggatcttcagctctcactcccacatcttgt

SEQ ID NO: 149274 - DNA, 286 bp, Homo sapiens
ctcctgaggctgcggcagtggattggctgacacgcagatggctctgcctggtagcagggatttaataggcaaagcgatgcagggaggagaactgaaagggaagaatagctgtgctaagcctgttgccttctggttaaaaaaatttatagatctatttataacctgccttgctccacaaaggatttgaggcggctgccttcttgttgggaattccttgatgccaatgcttggcatctgataccatggacttcctggcccgcagcaaggggccaagtcttccttgttc

SEQ ID NO: 149275 - DNA, 346 bp, Homo sapiens
agtacccttcaccctacactttctctttggtttggtttttatttgcatcctgagcaaagggatttttgatcaatagacctcattcctttgttcctttgtgactttacagtgaatctctttatctggttttagacctcacttactagttcctttgtgacttatgatgaaatatatctgcacgtgatctctttccagttttattcaaaccctatttagtaatgactattggctgtctcagtgatttgataagttgattcatgatagttcgtgctttgtccttgggacttgtattgtttgggagcctgataatcagtgtaagattttgtgactcagtgggccttgctgt

SEQ ID NO: 149276 - DNA, 334 bp, Homo sapiens
tgctgtgggcaggagggagggaatccatggggaaggaggaaggaggaggagggcagggagcagaggaaggggagagtgaggcagaggcacagaaaaggctcccgtggaagggggagggcacctgggccagcagattgcctgtggctgggcctgtaggcagagccggggtacaagggacccaacagctgctgggcagtgagtgggggcgacgggactgggccagaggggaggaccagctaagctcagttaactggatgccctttcctgggaatggctccaggcacactccccagcccacagcagggagggagagatcagccagcagccagccagg

SEQ ID NO: 149277 - DNA, 361 bp, Homo sapiens
ccccaccttcccaacccaacatcaccacctcactttcacactttgcttctttttgctaaatgtcactggaaggtccttctgtccatggtttcctcttcttcccactctgagaccagagccatgctgcaggctatcaggtgctatgcacctgccaattgcgctctttaatgaaactctgaaatggacatggccgctggacacaacaggaggttgaccacagagacctgcacgcagggggggatgccagacctacatgtgagacagcttcaaacagcagagcttcagcccaagtcctaactcctccccatcggagctcatcaccaaaacacccaggagccccctgagaaggttgtctgggggg

SEQ ID NO: 149278 - DNA, 356 bp, Homo sapiens
ggttttccgatagatgaaacaaaaaaaaaaaaagggaagcttggccgaacaggttttatttccatttgagagtttaaacctcatttcacaaaatccagccagtccatagtctttatctcaatcatatgcttcatttagttaattggaaaaatctcagacaccccctcatttctacttggtttccaagggttgcatggcatgagctagtggatgggacagagcgggaaggacaagggatcagtggaggcctatcaagacccaaacatggagcatgtagagcacatgctgatgttcagatgtgtcacccccaatttaagtcattggtatcactctggaacattccctggaaggggctg

SEQ ID NO: 149279 - DNA, 193 bp, Homo sapiens
ggatgtggttattcttacttctagaacctaaaacaaatccatgggtttaccttgggttaaaagatgagttgaaaaagatatgctaactattcgagactgaactgtatcctcaaattcgtatgttgaaggcctctcccagagcgtgactgtgtctagagacagggactataacgaggtaactgaagttgaatta

SEQ ID NO: 149280 - DNA, 2965 bp, Homo sapiens
  misc_feature (1002)..(1002): n is a, c, g, or t
cgctgccccgtccacgccgcccgcgccccgcagtcccacccgcaggacccccggccgcgccagggtctcgcctgcgccccccgcgcccgcccgcggactacaagtcccgccatgccccgccgccgccccccggcttccggtgctgcgcagtttccggagcggatcgcaacccggagtccggatccgatcccgctctgcacattccaaaggcagccgcgcgccgccccggtccagccgccatgccgactgttctttgttacattcgccggctgcgggcaccgttggcgatcggagtcaaaacccggctggatttcccggagccgctccgggatcgccctgcgcgccgcccgcccgccggggtcttcgccgccccggcccgcggccccgcggcccccgccgccgggcggcgtcgtcgccgaggccccaggggatgtcgttatcccccgccctcgggtacagcccatgcgggtcgcacgggggggtccctggacccccaaccccgcgtttagagaagctgagtcctggtcccagattgggaaccagagggtcagtgagcagctcttggaaacatctctagggaatgaggtgtccgacactgagccactgagccctgcgagtgcaggcctgcgacgcaatcctgccctacctcctggaccctttgcacaaaacttttcctgggggaaccaggaaaatctgcccccagccctggggaagattgcgaacggaggaggaactggggcaggcaaggccgaatgcggctatgaaactgagtcacacttgctagagccgcacgagatacctttgaacgtgaatacacacaagttcagtgactgtgagtttccatatgagttttgcacggtctgcttttcacccttcaagctgctggggatgagcggggtggagggcgtgtggaatcagcattcaagaagtgccagcatgcacactttcctaaaccactcagcaacgggcatcagagaagcaggttgcaggaaggacatgccngtgtcagagatggctgaagatgggagcgaagagatcatgttcatctggtgtgaagactgcagccagtaccacgactccgaatgtcccgagctgggcccagtggtcatggtcaaagactcctttgtgttaagcagggcaaggtcttggcctgccagcggacacgtgcacacccaggcggggcaggggatgcggggttatgaggacagggacagggctgacccacagcagcttccagaagcagtccctgcaggcctggtgaggcggctcagtgggcagcagctgccctgccgttccaccctcacctgggggaggctgtgccacctggtggcccagggcaggtcatcccttcctcccaacttggagatcagacgactggaagatggagccgagggggtgttcgccatcactcagctcgtcaagcggacacagttcggtccctttgagtccaggagggtcgccaaatgggaaaaggagtctgcatttcccctgaaggtgttccagaaggacgggcaccccgtgtgcttcgacacctccaacgaggatgactgcaactggatgatgctggtgcggccagcggcggaggccgagcaccagaacctgacggcctaccagcacggcagcgacgtgtacttcaccacctccagagacatccccccgggtaccgagctgcgcgtgtggtatgcggccttctatgccaagaagatggacaagcccatgctgaagcaggccggctctggcgtccacgctgcaggcaccccagaaaacagcgcccccgtggagtcggagcccagccagtgggcgtgtaaagtgtgttctgccaccttcctggagctgcagctcctcaatgaacatctgttgggccacttagaacaagccaaaagccttcctccaggcagccaaagcgaggcagcagctcccgagaaggagcaggacacaccccggggggaaccccctgcagtgcccgagagcgagaatgttgccaccaaagaacagaagaaaaagcctcgaagggggagaaaacccaaagtgtccaaagctgagcagcctctagtcatcgtggaagacaaggaacccacagagcaagtggcagagatcattaccgaggtccctccggatgagcctgtgagtgcaacgccagatgagcggatcatggagctggttctggggaagctggccaccaccaccactgacaccagctcggttccaaagttcacccatcatcagaataacaccatcacgctcaagaggagcttaattctctcaagcagacacggcatccggcgcaagctcatcaaacagctcggggagcacaagcgggtttaccagtgcaatatctgcagcaagatcttccagaacagcagcaacctgagcaggcacgtgcgctcgcatggtgacaagctgtttaagtgcgaagagtgtgcaaaattgttcagccgcaaagagagcctaaagcagcacgtttcctacaagcacagcaggaacgaggtggacggcgagtacaggtaccgctgcggcacttgtgagaagaccttccgcatcgagagcgcgctggagttccacaactgcaggacagatgacaagacgttccaatgtgagatgtgtttcagattcttctccaccaacagcaacctctccaagcacaagaagaagcacggcgacaagaagtttgcctgtgaggtctgcagcaagatgttctaccgcaaggacgtcatgctggaccaccagcgccggcacctggaaggagtgcggcgagtgaagcgagaggacctggaggccggtggggagaacctggtccgttacaagaaggagccttccgggtgcccggtgtgtggcaaggtgttctcctgccggagcaatatgaacaagcacctgctcacccacggggacaagaagtacacctgcgagatctgcgggcgcaagttcttccgcgtggatgtgctcagggaccacatccatgtccact

SEQ ID NO: 149281 - DNA, 2038 bp, Homo sapiens
cgctgccccgtccacgccgcccgcgccccgcagtcccacccgcaggacccccggccgcgccagggtctcgcctgcgccccccgcgcccgcccgcggactacaagtcccgccatgccccgccgccgccccccggcttccggtgctgcgcagtttccggagcggatcgcaacccggagtccggatccgatcccgctctgcacattccaaaggcaggtgtcagagatggctgaagatgggagcgaagagatcatgttcatctggtgtgaagactgcagccagtaccacgactccgaatgtcccgagctgggcccagtggtcatggtcaaagactcctttgtgttaagcagggcaaggtcatcccttcctcccaacttggagatcagacgactggaagatggagccgagggggtgttcgccatcactcagctcgtcaagcggacacagttcggtccctttgagtccaggagggtcgccaaatgggaaaaggagtctgcatttcccctgaaggtgttccagaaggacgggcaccccgtgtgcttcgacacctccaacgaggatgactgcaactggatgatgctggtgcggccagcggcggaggccgagcaccagaacctgacggcctaccagcacggcagcgacgtgtacttcaccacctccagagacatccccccgggtaccgagctgcgcgtgtggtatgcggccttctatgccaagaagatggacaagcccatgctgaagcaggccggctctggcgtccacgctgcaggcaccccagaaaacagcgcccccgtggagtcggagcccagccagtgggcgtgtaaagtgtgttctgccaccttcctggagctgcagctcctcaatgaacatctgttgggccacttagaacaagccaaaagccttcctccaggcagccaaagcgaggcagcagctcccgagaaggagcaggacacaccccggggggaaccccctgcagtgcccgagagcgagaatgttgccaccaaagaacagaagaaaaagcctcgaagggggagaaaacccaaagtgtccaaagctgagcagcctctagtcatcgtggaagacaaggaacccacagagcaagtggcagagatcattaccgaggtccctccggatgagcctgtgagtgcaacgccagatgagcggatcatggagctggttctggggaagctggccaccaccaccactgacaccagctcggttccaaagttcacccatcatcagaataacaccatcacgctcaagaggagcttaattctctcaagcagacacggcatccggcgcaagctcatcaaacagctcggggagcacaagcgggtttaccagtgcaatatctgcagcaagatcttccagaacagcagcaacctgagcaggcacgtgcgctcgcatggtgacaagctgtttaagtgcgaagagtgtgcaaaattgttcagccgcaaagagagcctaaagcagcacgtttcctacaagcacagcaggaacgaggtggacggcgagtacaggtaccgctgcggcacttgtgagaagaccttccgcatcgagagcgcgctggagttccacaactgcaggacaggactcatagcacaccctggagagggggggcccggcggcagtcggcttagagacctaccagatgacaagacgttccaatgtgagatgtgtttcagattcttctccaccaacagcaacctctccaagcacaagaagaagcacggcgacaagaagtttgcctgtgaggtctgcagcaagatgttctaccgcaaggacgtcatgctggaccaccagcgccggcacctggaaggagtgcggcgagtgaagcgagaggacctggaggccggtggggagaacctggtccgttacaagaaggagccttccgggtgcccggtgtgtggcaaggtgttctcctgccggagcaatatgaacaagcacctgctcacccacggggacaagaagtacacctgcgagatctgcgggcgcaagttcttccgcgtggatgtgctcagggaccacatccatgtccact

SEQ ID NO: 149282 - DNA, 952 bp, Homo sapiens
tggaagctgggagtgacgcccgggcgcattccctcctttctcgcatacaggctcgggattagctgggaagttttggaaggaggccgttttcatgctgcttgtaacctggaacttttttcccacctgtcttttcccaacttattgacgtccctgggcaggttcacccatcatcagaataacaccatcacgctcaagaggagcttaattctctcaagcagacacggcatccggcgcaagctcatcaaacagctcggggagcacaagcgggtttaccagtgcaatatctgcagcaagatcttccagaacagcagcaacctgagcaggcacgtgcgctcgcatggtgacaagctgtttaagtgcgaagagtgtgcaaaattgttcagccgcaaagagagcctaaagcagcacgtttcctacaagcacagcaggaacgaggtggacggcgagtacaggtaccgctgcggcacttgtgagaagaccttccgcatcgagagcgcgctggagttccacaactgcaggacagatgacaagacgttccaatgtgagatgtgtttcagattcttctccaccaacagcaacctctccaagcacaagaagaagcacggcgacaagaagtttgcctgtgaggtctgcagcaagatgttctaccgcaaggacgtcatgctggaccaccagcgccggcacctggaaggagtgcggcgagtgaagcgagaggacctggaggccggtggggagaacctggtccgttacaagaaggagccttccgggtgcccggtgtgtggcaaggacatcgcgttgatggatgaccaccagagggaagagtttatcggcaagatcgggatctcctcggaagaaaacgatgacaattctgacgagagcgcagactcggagcctcacaagtacagctgcaagcggtgccagctcacccttcgtcggggattgctttaggtcc

SEQ ID NO: 149283 - DNA, 873 bp, Homo sapiens
aattgaggcacaaattgacctccaggctttctggtggccagagttagaacagagtcaggttcacccatcatcagaataacaccatcacgctcaagaggagcttaattctctcaagcagacacggcatccggcgcaagctcatcaaacagctcggggagcacaagcgggtttaccagtgcaatatctgcagcaagatcttccagaacagcagcaacctgagcaggcacgtgcgctcgcatggtgacaagctgtttaagtgcgaagagtgtgcaaaattgttcagccgcaaagagagcctaaagcagcacgtttcctacaagcacagcaggaacgaggtggacggcgagtacaggtaccgctgcggcacttgtgagaagaccttccgcatcgagagcgcgctggagttccacaactgcaggacaggactcatagcacaccctggagagggggggcccggcggcagtcggcttagagacctaccagatgacaagacgttccaatgtgagatgtgtttcagattcttctccaccaacagcaacctctccaagcacaagaagaagcacggcgacaagaagtttgcctgtgaggtctgcagcaagatgttctaccgcaaggacgtcatgctggaccaccagcgccggcacctggaaggagtgcggcgagtgaagcgagaggacctggaggccggtggggagaacctggtccgttacaagaaggagccttccgggtgcccggtgtgtggcaaggtgttctcctgccggagcaatatgaacaagcacctgctcacccacggggacaagaagtacacctgcgagatctgcgggcgcaagttcttccgcgtggatgtgctcagggaccacatccatgtccact

SEQ ID NO: 149284 - DNA, 913 bp, Homo sapiens
tggaagctgggagtgacgcccgggcgcattccctcctttctcgcatacaggctcgggattagctgggaagttttggaaggaggccgttttcatgctgcttgtaacctggaacttttttcccacctgtcttttcccaacttattgacgtccctgggcaggttcacccatcatcagaataacaccatcacgctcaagaggagcttaattctctcaagcagacacggcatccggcgcaagctcatcaaacagctcggggagcacaagcgggtttaccagtgcaatatctgcagcaagatcttccagaacagcagcaacctgagcaggcacgtgcgctcgcatggtgacaagctgtttaagtgcgaagagtgtgcaaaattgttcagccgcaaagagagcctaaagcagcacgtttcctacaagcacagcaggaacgaggtggacggcgagtacaggtaccgctgcggcacttgtgagaagaccttccgcatcgagagcgcgctggagttccacaactgcaggacagatgacaagacgttccaatgtgagatgtgtttcagattcttctccaccaacagcaacctctccaagcacaagaagaagcacggcgacaagaagtttgcctgtgaggtctgcagcaagatgttctaccgcaaggacgtcatgctggaccaccagcgccggcacctggaaggagtgcggcgagtgaagcgagaggacctggaggccggtggggagaacctggtccgttacaagaaggagccttccgggtgcccggtgtgtggcaaggtgttctcctgccggagcaatatgaacaagcacctgctcacccacggggacaagaagtacacctgcgagatctgcgggcgcaagttcttccgcgtggatgtgctcagggaccacatccatgtccact

SEQ ID NO: 149285 - DNA, 1894 bp, Homo sapiens
tgttcccaagcagtgctggcactgctggttcctggtccagggaccacattttgaaatcactaatgtaaggtgtcagagatggctgaagatgggagcgaagagatcatgttcatctggtgtgaagactgcagccagtaccacgactccgaatgtcccgagctgggcccagtggtcatggtcaaagactcctttgtgttaagcagggcaaggtcatcccttcctcccaacttggagatcagacgactggaagatggagccgagggggtgttcgccatcactcagctcgtcaagcggacacagttcggtccctttgagtccaggagggtcgccaaatgggaaaaggagtctgcatttcccctgaaggtgttccagaaggacgggcaccccgtgtgcttcgacacctccaacgaggatgactgcaactggatgatgctggtgcggccagcggcggaggccgagcaccagaacctgacggcctaccagcacggcagcgacgtgtacttcaccacctccagagacatccccccgggtaccgagctgcgcgtgtggtatgcggccttctatgccaagaagatggacaagcccatgctgaagcaggccggctctggcgtccacgctgcaggcaccccagaaaacagcgcccccgtggagtcggagcccagccagtgggcgtgtaaagtgtgttctgccaccttcctggagctgcagctcctcaatgaacatctgttgggccacttagaacaagccaaaagccttcctccaggcagccaaagcgaggcagcagctcccgagaaggagcaggacacaccccggggggaaccccctgcagtgcccgagagcgagaatgttgccaccaaagaacagaagaaaaagcctcgaagggggagaaaacccaaagtgtccaaagctgagcagcctctagtcatcgtggaagacaaggaacccacagagcaagtggcagagatcattaccgaggtccctccggatgagcctgtgagtgcaacgccagatgagcggatcatggagctggttctggggaagctggccaccaccaccactgacaccagctcggttccaaagttcacccatcatcagaataacaccatcacgctcaagaggagcttaattctctcaagcagacacggcatccggcgcaagctcatcaaacagctcggggagcacaagcgggtttaccagtgcaatatctgcagcaagatcttccagaacagcagcaacctgagcaggcacgtgcgctcgcatggtgacaagctgtttaagtgcgaagagtgtgcaaaattgttcagccgcaaagagagcctaaagcagcacgtttcctacaagcacagcaggaacgaggtggacggcgagtacaggtaccgctgcggcacttgtgagaagaccttccgcatcgagagcgcgctggagttccacaactgcaggacaggactcatagcacaccctggagagggggggcccggcggcagtcggcttagagacctaccagatgacaagacgttccaatgtgagatgtgtttcagattcttctccaccaacagcaacctctccaagcacaagaagaagcacggcgacaagaagtttgcctgtgaggtctgcagcaagatgttctaccgcaaggacgtcatgctggaccaccagcgccggcacctggaaggagtgcggcgagtgaagcgagaggacctggaggccggtggggagaacctggtccgttacaagaaggagccttccgggtgcccggtgtgtggcaaggtgttctcctgccggagcaatatgaacaagcacctgctcacccacggggacaagaagtacacctgcgagatctgcgggcgcaagttcttccgcgtggatgtgctcagggaccacatccatgtccact

SEQ ID NO: 149286 - DNA, 852 bp, Homo sapiens
gatgagagcgggtgaaggctgtgggtgtcctggcgtccctgggccacctgtcagcccctcgtcctggtcagatgcccacaagcgcagcaggaagagtcaggagaatgggggtgtttggtgcttggagtggggctccctgagtgtggagttccctttctagggcaggtgaacagcaagagcaaacatcctttgtgttcctaaatagagcgggagggtggtggaggtcagagtcataacagacacaggcgtggagtcgcccgggcagcacgtcgggggctcggcatctgtggactctgcgctgggccatctcactcacggcgtgtccctctgaccaggtggacggcgagtacaggtaccgctgcggcacttgtgagaagaccttccgcatcgagagcgcgctggagttccacaactgcaggacagatgacaagacgttccaatgtgagatgtgtttcagattcttctccaccaacagcaacctctccaagcacaagaagaagcacggcgacaagaagtttgcctgtgaggtctgcagcaagatgttctaccgcaaggacgtcatgctggaccaccagcgccggcacctggaaggagtgcggcgagtgaagcgagaggacctggaggccggtggggagaacctggtccgttacaagaaggagccttccgggtgcccggtgtgtggcaaggacatcgcgttgatggatgaccaccagagggaagagtttatcggcaagatcgggatctcctcggaagaaaacgatgacaattctgacgagagcgcagactcggagcctcacaagtacagctgcaagcggtgccagctcacccttcgtcggggattgctttaggtcc

SEQ ID NO: 149287 - DNA, 505 bp, Homo sapiens
agtgtgtgctccccgaatgcaagtccattttgttgtcttaagaaaacctgacaagcataatgttgtcagaacccctgtattaggtaaaatcttacatgcacgttgcctgggatgggacccaggatagtgaacaataggatttgtactgtgacatttgaagttttcttttttgccacttctgtattctaggctctcatcaagtttttgcctggccttttgctgtagacttctgtctggtctcccacgttctactttaaatccgtccaacccaatattccacagtactatcagtggaggtctttctggggggaaaataaataaattaattaatgaagagcaacctgctgctgtatgtccttcgtttaaactttcactgactgctaagaggccacactcaccaggtcaagcaataacttatcatcatttagttcagaagctagtaaatataaatatggatagtctgtgttattaggatgtcactagaccagttaattcattaaattca

SEQ ID NO: 149288 - DNA, 379 bp, Homo sapiens
ttatgtttcctcctgaaacactcttaatccttgtttggaggaagtttatctgcctctattctaactgcctagcaaaagaaagttaaatattctttggagaaagacataatcaaaagcctctatgattgttcatgcacagtgtctagcaatcaataaagaaatatcaactatttcaggagacagggtcaaatgatgataaaccaaacaaacaaatcatacacaataaaaattatccaggtattggcattattgggcactggctttaattatgattaatatgtaaaaatagatgaaaatgcatagtttcttcagagaactggaatctctaataggggatcaaatggaaattttagaactaaaaatagataccagtaagaaa

SEQ ID NO: 149289 - DNA, 155 bp, Homo sapiens
tgtgcccggctctgcccactacacccctgctactgggctggacccctgacgtggtcatagaaacagcgcagtcatgggtctccccgtggccgtcacgggtcccctcatggtcctcatgggtacaggtccccccatgatcctcacacgtccccccc

SEQ ID NO: 149290 - DNA, 302 bp, Homo sapiens
cacctacctcctcctcattggtacagaccattgtaaagatgcacaaagttcctacggacttcccgacccgcccccttccatctacctcagtcttagggggaaaggtgggggtgaatcctggactgcgttagctccaatgagtcaccaccctgcggctcctgaccttaatccatcttagtacctgtcattgacatcctcccctccctgagtggatcgatccaacataacccccctcttcttccacctagtttgacaccaacccctgtccggttgagcggagcagtgttcggttgagcgcgtga

SEQ ID NO: 149291 - DNA, 851 bp, Homo sapiens
ctgaaaacttactgtgatttggccttaagataggcaaggccaaattattaagacagaaaggctgttggtaaagagggaagattaaataggaaagtcaaggtaaactaatagtagtctagtagcatcacctttttgtattaatgattgtctattgcctgacattttgatgagtcaaaagccttttcaaagatttatcgataagcaactttataatttctttgtagtattatacaattgcctctcaacatatatatgcttctcctatgccctttaattcccaaagtgttcagtcctagatgtttaactccttagctacttttgtaccagggatcaaactgattgaaagtaaatggtttattgtgggtcaaaaatgaggaaccaggctttgccattaagcttgattcttctaactctagctgagtcccacctggctttttcttggcttctgtaatcatgaactatttccaatagccagtggatataaggagttatagtagaaccaatggatggtttatagttgagaccctctgcattgtatgttacctatttcaagatttaagagtcattgctgggcacggtggctcacacctctaatcctagcactttgggaggccaaggtgggtggatcacctgaggttgggagtttgagaccagcctgaccaacacggagaaactccgtgtctactaaaaatacaaaatgagccaggcgtggtggcgcatgcctatgatcccagctactcgggaggctgaggcaggagaactgcttgaacccgggaggtggaggttgcggtgagtggagatcacaccattgcactccagcctgggcaacaagagtgaaactccatctcaaa

SEQ ID NO: 149292 - DNA, 410 bp, Homo sapiens
aagtagaataggctagtttgagggaaatctatgcaataaactaataatccaaagtaagaggtaataagggagtgtgaataaggaaaaggaaaactaaaggatcccatcggtttctaccttcagtaagtgggaagaaaaagcaagtttgggtacaaaaaggcataaaatgaagtagatgaggtgtagaataattagtttgggcttagacaatatggacacatttgagttcgaggtttcaataaaagaaagaccaaaaggaaaaggtctaataggaagttgactagaaagagaaagagttcaaaaaaagaggtagaaagaatcgctaggataaacatatttagaaatcaccaacatacatcaacaattttaaaactggccaagccaagtagaaaataaatatccatggtcat

SEQ ID NO: 149293 - DNA, 319 bp, Homo sapiens
ccactcggtaatttcttttattcttagagcctgaaaagctgctaaacccgcacacaaattttaaaaattggaaggaaaatgataactcatcaggttgcccaaaggccaaaatgttttaagaagtagatctagatacaatttttgtgttaaaggttcctagaggttccatttgggtaacttgtgtgtgttcattgaaatgtgtggcaaagagtgtgttcttttggtgcttagtagtggaatctggaaagaaagtttgtcaagtgaattgatctttggaatccttattttctatgaagatctttgatgaatacagtgtctt

SEQ ID NO: 149294 - DNA, 334 bp, Homo sapiens
ggctgaggctgggagggtagagaatgcaccaaaaagtcaactaaggcaactatccggaatgattggaaatttccatatcttgaaattgcagtggcattgcacaggtatatacatttaccaaaactcacaaagctatacatttaaaataggtacattttattgcatgtaaattacctcaacaaaagtagcagggagaaggagaagggtgatctgatgtctctgaggggtgctcccttttggggaagccaatacatcatttctttctcctaagatcctccacgtggtcacacagttactgagaagctgttttaatctatacaactgtggggattct

SEQ ID NO: 149295 - DNA, 196 bp, Homo sapiens
agtgaacagaggagagggaagccttgttggaagagggcagtaaatcacagcatagctatccagactgcaattatttacttagtgcattcagggtcttgtgctaggtggtggggataccgcactgaaccagacagacaagggtcctgttcctgcctgccctcggggtgtgttttgggaattcctccttgagggtgct

SEQ ID NO: 149296 - DNA, 409 bp, Homo sapiens
ctttgccaggaccttcttgagctgctcagttgcaggaactggtaacatgttaactagcttgagtcatatttctgggtcttggagttgaaagagtacctaacatggaggtgtttgtgtatatggagatttgacttttatatttttttagaactggaggaatttgagtttatataggagaagtagctaatgaagagcaaaactgaagaaacgggggataataatgcagaacggtgtgatctgcagtgagactgagagcctggggtgggagatcaggcttaacaagagggacacctcttcctctaaggccacttgaaagaagcaggaatggggtgctagatgatggggacatggagggagttctcacaccatggcttctgtaccctctgtgaaggtagcaggtgaagtcatt

SEQ ID NO: 149297 - DNA, 144 bp, Homo sapiens
cttttagaaaaaaacatctcttacaactcctaccaccacccaaactcaagactaggtatggttcctggagaacaataatgcaaatttacatgatacattaatccaactataatgtgagcttttttttttttttttttttttttt

SEQ ID NO: 149298 - DNA, 409 bp, Homo sapiens
gatggaaattgtgaaatgtaatttagcttgaggaattgaattaatgttttctaatagccctgagatattcactgatttataggtttgaatgctgggaggtgcatttgtgtttctctgtgtgtgcgtgagctcatcctagttaatctaaataggtgtttagaaatgatgcacattctatatcataaaaatatgtattatctctgtgactggtgaatattggtatggtttatttgtgtctgtcatggaacttatacattgctttatacacctggtataaattcgtgctcaactgagaaatatttgttgaattttaaaaatcctttaaatgtatatgcatatatatgtagacatggaatcacagatgtatatatttagttctaatgttttattttcaagcaggtgcagaatt

SEQ ID NO: 149299 - DNA, 247 bp, Homo sapiens
gacacagagagtaactcatctgggaagagtgagataatcaagaaagcagagatgtcttgaggaatgccaccttccttaaacccctgcccaaatacctcttatcaagactcctgacctcggaggcagtccagtgggtaagaaatcccccaacttcccatttccccaccttactaccctccacgcccacaaactggacacatgtacctttctctattgccaggtgtgagcagtctacaggaggtacttt

SEQ ID NO: 149300 - DNA, 548 bp, Homo sapiens
atcctcccacctcagcctccaaaagtgctggaattataggccaaatgggcattttagatgttactacagacatccaaatctctacctgtaagaatatgtctcactctagattcccttcattcgttcatgcattcaacaaatattcaatgagcggggacttcaggattctgggctacaatggtgaacaagacaatgatgaactcgatgctgggtgcttttgttctaataaacaaagagacgagcaagacaatttcagatagtgataagtgctatgaggacaagagacaagaaggtgacgccaggcagggtcagggctcgtgggacacctgctgagggagggcctttctgaggaggtggggagtgtagacctgaatgatgctaatctggaagcagaagcttctaggctgagtgaggccagtagaccaagcacttgacccaaaggcccaggtgtcccagggagtgagggtcaacacgggaggctgcagcagttggtgggaacacccacacaggtttaaaaggaatgagaataactggagtctctggtttta

SEQ ID NO: 149301 - DNA, 528 bp, Homo sapiens
agaacccatctccaccaaaaatacaaaacattagccaggcgtggtggcacacgcctgtagtcccacctactcaggggactgaaatggaagaatcactttcacccagaaggcaggggtgtggtaagacaagatcacagcactgcacttcagcctgggcaacagagcaataccctgtcttaacaaaagaaaagattgatttacggaattaataaaataaaagaggaaaagagctcctcaatctgacaaaacgcatctataaaaaactcacagctaatatcttacttaatagcgaaaacactggatgcttttcctctaagattaggaaaaagacaagaaaattccctcttgttaacttctactcaatactgtaccataggttctagccagcagttagaaaaacaggcatccaaatttgaaaggaagaagtaaacctatctttatttgtatgtaacatgattttatataaagaaaaccctaaagaatccactaaaaaattactactagaataaacgagttcagcaaggttgc

SEQ ID NO: 149302 - DNA, 461 bp, Homo sapiens
tatgcaaagcctactcagactccattagttgtaaatttttggtggccattgttttcaagtaagataactcgattgcaaaaaataactcaggaaataagttatttctaaataatttcttaattcaactctcatattctattgacatatttcagatttaacttactagctttgcatctttcctttgcttgcaaatattttgatgataaattctagtctcttttgattagtaatttttctttagatgaatcacacatctatggaattctttttttaaaattccttattttcttcttgatagtttgctatgatcctcatctttaacacaatttcagaaatttaggaatgtcttacatataacttaaagttattcacaaagaaatcaacctcaaagcagtcaattgattttcaaaagcaacaaactgcttgacattacttgccccaaccaacaacagaagtctttc

SEQ ID NO: 149303 - DNA, 343 bp, Homo sapiens
caggctgggcgaatgactccccaccatccaaacacagccgcaggacaggttcggcggctgtcaaatccgatgtcccaagacaaggctctgagagtggtttcatttcatcactctgaccacaaaatgccaaaagaggacatctgtagtgtttgcaaatttctaatgcaggttacatggaaaataaatccaattctaaagtaaccggtaaccaggataaatatttggttttattttattttatttatttattttgagatgtagtctcacaccgtcaccctggctggaatgcagtggtgcgatctcggctcactgcaacccccacttcccaggttcgagcatttct

SEQ ID NO: 149304 - DNA, 292 bp, Homo sapiens
tggggcatattgcttttgagaatttagcagagagcattcaaatggagtctggatgtgatgccaaattatgcagatttggagtttattttggttaggtttcccatgagtaggtatgtaggcaacgtaatactgttctcagtttatatggtctggaatttcccttataaatgttatataggctttccttattgattgttttaaaacacaaatatgtatgattttgagaaaacacattaccagaagactattcttgataggtttttttgccaaaaagattgttgtaccaatggat

SEQ ID NO: 149305 - DNA, 553 bp, Homo sapiens
ttccctcctgcctgctgccttctgttcctctgcggttgtgttttcttcccttgtcttaatagtctaataaagtttaaattgcagccccgaacacacacacacacacacgcacgcacacacacacgcacgcacacacgcatgcacacacacacgcatgtgcacactcacacacactctgcactttcccgccaacactttgggactacttaagagagttccctccttgtttgggagtgggaactcacagcttgcctgctcccagcacgacctgtacccaactgtgcagtcatctgggtgttcggagacaaaaaacagacaagccctgctcctccaactcttgcaaggaggcatgtgttgtaggagactgtattgtgccccaaatccccaaggttccagaaatcagcctctcttcccctgccttttcctaatattttacaaatgaaggaaacatacagctgggctttgaggagccctgagccctgactcctcttcctgatcctgcccctctgaataacacacttctcattttggagctatcatttctgtatctctt

SEQ ID NO: 149306 - DNA, 279 bp, Homo sapiens
cagtctggtagtcaggtactggtcggttctctgaggaccagggatccaagagactcaaaggaagaggggtttgtgtggagccaggctagagctggttacactgtccctccaatgggtgcagcccagtgtaggcaggacaggcaggggccaccccagggcctgagccccaattaattctcattaaggataatcagacttcagatcccaagatgggcctagagccaggccctgggccagagtcagggaattccatggggctcccttggcccttatcaacac

SEQ ID NO: 149307 - DNA, 225 bp, Homo sapiens
aaatagaagttgaaggtttaaaaaaaaagaagaaagaaagaaaggggttgaggatgcaatgaactctcaaacagtttaggaaaataaagtgagaaggtgaatctcaggatacacatgagaaagagagatagggagattgagagactgtgggagaaagagagacagagagagatgggggagaggacttatactatgagagtttttgtattattctggcgactcttc

SEQ ID NO: 149308 - DNA, 142 bp, Homo sapiens
tgaccagtccttggcctgcctgattgtgcagagaccaaccctgagaacagcagtctgtcacaaatgcccaggttagcacaaaaactcactagccaccagtcatgctacaaagatcacagagagcgccatctcctagcacccc

SEQ ID NO: 149309 - DNA, 195 bp, Homo sapiens
atgagatgtaagatatgtataccagaagaattggggttatatatttgtgatttgggttgtgaagatgtattttccatgtgttttctcagatgaatgttggcgatttgtatttgtctaatgtttggcagatttggaagaattatcttgtgcacatgggcaataacagagaaagtgcttgtgtctattttgtggatg

SEQ ID NO: 149310 - DNA, 488 bp, Homo sapiens
caggaggtgcagttttcaacaagctaagctctgaaggccaccaaagaaatcagataacagttaaaattttattgagcacttactgattaccagacactgcgctgggtgcttcaaatatataaactctttttaattcttgaaacaacactactgagtcacaagataagtatccttcccaaggtcaagtaacaagtgcagtgagctgagagtcaaaacttggtactggagttcaagagaggaataaggatcagtgtttaatttgtgtattaagggtgaaagctatgggaagttcaaagagagtagtcagaaactcctaaaatcctacttttgctcaaagtctaaaatatactgagtgtttactgttaggtacatactaaacactttgcgtatacactcagccctccgcatccatagagtcaaccaactgcaaattaatgtttaagggcaagagaagatgggtgtcccagctgtgagagagaaaaagagag

SEQ ID NO: 149311 - DNA, 338 bp, Homo sapiens
tagctgggactgcagtgcacgccgcacgtctggctcattttgtgtattttggcagagacagggtttcactatattgcccaggccagtctcaaactcctgagctcaggcaatctgcccgcctcggcctcccaaatcccaccagccattctgacagaggagacatggcatgtgataccgtgtctggccatggatgggccagacataagctatcttgtttaattttcattaatgataataacagctaaccttaattgagcagctactctgttccaggcactgtgctaggtgctagttgccttatgtatactaactcaatccttgcaaacaatgtgatgagg

SEQ ID NO: 149312 - DNA, 564 bp, Homo sapiens
tgttatagtcctcagctgtgcataatccagccctttgtgggccatagccctcctctcattcaagggggagggtatcaaattatctcaaaaatcttttctcacatgggatttctattggaggaagcaaataaaactgtagctaaataaaaactacaaaataattttgcacaaagaagaaattttcttgcagattaaaaaattatgattagaaaaacttccagggtagttatatttgatcttaagaaagatgtaaatagaaattataagctaacattataggccttatgtttttagaacagaagaaataagctaattaacatttgactgtgcactgatgtttgtaccctcatgacagaatcctttaacttttgcataagtataaatcagatcattcaagaaaagaattctctatttttgtgtttagaaaatgaaataagtagtggatgacttttccagatttttcatgatctatcatagagttaaaaaaatttatttttcttatttctaaacaacgctagtggtgaattgcgtggaagatattaacaagagattcctgtagcacta

SEQ ID NO: 149313 - DNA, 751 bp, Homo sapiens
cccaggaggttgacgttgcagtgagctgtgattgtgccactgcactccagcctgggcaactgagactctgtctcaaaataaatgagtgaatgaatgaatgaatgaaaggaagtaagacagaaaagaaaggaaaaagaagcagctaagcatggtgtctgatgcctgtaatcccatactttgggaggctgagagacggaaggatcacttgagccaggagtttgagaccagcctggggaccagcctgggcaacatagtgagacatttgtctctacaaaaaataaaaacaaaattaggtttggtggcatgtacctgtagtcccagctactgaggaggttgaggtgggaagactacctgagcccaggaggttgaggctatggcgagccaacatcatgccactgcactccagcctggagtgcagagcaagagtctgtctcaaaaaaacaaacaaagaaaacaacacaaaatgagttggggggcggggagaaggagttctccaagatttatataggaagaagtacagtggtatatagtatactgctacttgagttaaaaaggtttaaaagcaaaagatgaagatgaaggagcaatgcagatatgttaggaagatttacatgttcactgtacactctgtacagcttgaattgcgttaatctttgcatagacatacacatgtatatatgcgtatatatcaggtgttttaaaaatatatgggtttatatatgggttttaaaataagacaaatctggttttg

SEQ ID NO: 149314 - DNA, 373 bp, Homo sapiens
tgaaagtggggggcctgttccaaagatggggtgcggggtgttggagaggataaagaaagggatatggtgtttgcttctaggaaccacattctctgtgggatgggggcccccagggcaagtttaaaggaaggcaggggcagggaacctggggaaggtttgtgaagcacccaggaggtcgcgcctcagaagaggagcctgcaggctgcctccaaacggatggattccgtgatgccccagagggcagaagactagactttagaaagagagaaaggacagtggcctatggagcccagaacctgggatttgaggcctgacctatctctccctgactgtgtgactgtgagccatcacgtacccaccccgtcgggtggag

SEQ ID NO: 149315 - DNA, 363 bp, Homo sapiens
ctttgtcagggcatgaaatgtaatttgccctgggactaaacactcacctggggatgttaatgtttgtgaccatctgtactactgaagagaagaaattatttttatatctatggtaaattactcaataagctttttgccatcttctagagattctgttatcaaggttcaaaaatttaattgtaggctttaactgttctgctagatttgagcactttggggcttttagattctgtggagaaaatctttagccttctataaattgaaattaacttaatcaatcaagtcattttcaggatttaaacaattttctagaaattataaaattgaaattcttttcatgataaaactataaaaggtaaaaaa

SEQ ID NO: 149316 - DNA, 255 bp, Homo sapiens
attcgcagtctaagcctatggtgtgtacagcacaacacagagggcaggcagaacgggccaggggagaggagatgcatcaatcacttttcttcccaagtccaacctggaggcgttgtgaggcaacgtctcttttgagtctaccttccaagctctcacagccaatctcaaaccttcctcttattcccttacccgtcagagcctcatcttcatgattaatgaccctcttaggggtcccagccccgtgcaccttcctaa

SEQ ID NO: 149317 - DNA, 303 bp, Homo sapiens
gaaatgaatgaattagaaggtgtagaaatcagaatcatggaggcctgatatgaagcttttgcaataattggatacatgttatgaagaccttgagtgtatagtggtgggaataagcagaaatgaacagaaagaaggtacatttctaagaggggacagtatctgaaatgaagttttgtctaactttgcattcagtgtaatatttgaatgaatgaatgctgaactttctgactctgggttattttaagaaggtggcaaaagtatagctacatgattttgaagttgggtgacagaatggagataccg

SEQ ID NO: 149318 - DNA, 978 bp, Homo sapiens
ttacagagctgagctacagtgcagttcaaagcaggccttcctttttcatcacaacatggaggagttatgtcagtctctcccatcccttcaccaagagggcctctggggaagaagcatgaccaggtttgcaccctagaatgtctgtcctcagtggtctcttctaggaccttaggggtctccctgcccaggggcagagtatggccctgcggaggctagagcttccccaagagagtgcaccctcctgacctagatattagatatatttttcctgggtggagagatatgtatgggacttctctctcttctgggtccagatcagaggtagtacatttgtgtttctagagcggaggccctcagagccctggactctgagataagagtcagcaccacccacagcacccctgcaggtgacactcccttatccagatctccccaggcaggaggcatcagcattgccagtaaggagacagaagggcacagatgaccttgaaaaggggaaaagggatgccctccctcccacaccacagctgcacccacttctccgtggcacccagttgtgtgcaacctggtatttctgccatttggaaatagctgtgatcacagtgggcttgcacatcttgcacaaagcttcttccctgataaaaaccggaaagtttaagtgtttgggataagggaacggatgggcagccatgctatgaggaaggaagtcagcgctctgcacgcatccctgtgcactgtccccttgccctccacgcggctctttgggtgaagggccgctctgtgggtgaagggcctgggtcctgggagttgaaggtgcagcacagcaaacctgagtgtaactgggagaggcccctctgcctgtgaactttaaagagcagctccgcagggcagtgccggctccagctgatcctccctttgaaagcaaactgcaactgtttctctcctgaatttaatagagcatgccaaaaaatgacagca

SEQ ID NO: 149319 - DNA, 175 bp, Homo sapiens
gggaatatattgagtttcagggaactttggaacatgctaataagcagggcataaaaggttaacctctcagggttaattacaaagaaaaatcttcctgaaactggatatctatgttaagaaagaccagtccctgagctctcctcattctttctcctgccacagtgcagaggaagac

SEQ ID NO: 149320 - DNA, 308 bp, Homo sapiens
agcagtcctcccacttcagcctcacaaaatgctgggattataggcatgagccaccatgcctggctgacaaactattttatagaaaattctggaagaataaaaaatgaatacccaacaatagagggaaagagttaactaaagaattggcttggccaggtgtggtggctcacgcctgtaatccctgcactttgggaggctgaggtgggtgtatcacgaggtcaggagttcaagaccagcctggccaatatgatgaaaccctgtccatctctactaaaaatacaaaaaattagccgggtgtgggggcaggc

SEQ ID NO: 149321 - DNA, 122 bp, Homo sapiens
atcaaagaggaggaggaggaagcacaacagtgacgtgcaagaaacgccgagcgagcaggacagtagtaaaggctacagaaaggcaccggaagggccaagagcactgttaatttgcggactgg

SEQ ID NO: 149322 - DNA, 796 bp, Homo sapiens
gtgaaacctttgtaggctcatgctttattccagaatgatggaatgcactgcaccttcaggaagctgtgctaggaaaagtctttccttggtcattagagagttaaggaagtaatggcaagattatgggcaaagttaaaacattagccagattctttgttcttgtttcgagtaattttaaaacactattttctgagcctttttttttttagtctaaacttgattttgaaaggtatggtagcttattgtagagttatagataattttaaaagtgactctatttttcttttaactacctggaagtaccatttaggctctagtaagacaaagcaggtatttaaaaaacaacttctgagtactcatttctctgttaccactcttaccttctttttctgtgtccttccctgtatccatacccaatcctttaaaaaggggaggcagagggggaagttattacagttattgtccaggttcatttatatataaagagctctccttcctggattgtactgtttctcttaaaacaaattttagtgaatatttcactttttaagtatatatgtgaaatcatttgagttaatttttaatatatagttgtttatactgttatgtttggttgaactactgttaatacatgtgcatatacatatatagcatgcatttgtatgtgtgtatatagaaaactttttagaaacttagagtgacacgatatatcataaataacgcagtcatggacatttggaaggaagagcttctactgtgatgtaaaaagatatagatatactttgtccttataaaa

SEQ ID NO: 149323 - DNA, 428 bp, Homo sapiens
ctggaggggtggacaggacagggagcttcagtaggaagaagagaggaaaggatatttctatccaggggagggggaaggaaatgccaaagagagaagggagagtcagagtggaactcttgggaaatactcccttacttagtcatcttggatgtcagagtaaagtaggtcaggcctcgattcttaacattttatttctatgactccagtagtcattacacatccccaaaatgagggctctgatccctaaaccacacaccagctgtacagaagcaactggcacaggaagtggcagtgtggtgtgatggttagacacacgggctttggcatcagatatgggctcaaatcctggttcagtcatttactagctgcagggctttggtctgcagtctgttttttgttatggccttctccagttttggtaccaggga

SEQ ID NO: 149324 - DNA, 392 bp, Homo sapiens
gcatcggttcacagtccgcccatgtaattatatgaaacctacgtcactctatcaaataacatacttttaaatatggcagaatgaggtacactagaggtttggtcatcatctgttaagtctactgaaggctgtcttattctcccactggactgaacaaatttatgaccatctgctcttgaacccacatctgtggaacgactttttgttttcttttccattttttccctagcacctgaagatgatgattttgtaacatctttggaaggagaacctgtggaacacctatctttatagaggctagtgaaactctttcgcttttgggttgactttctttcagtttctccagtaaccagactgattgtactagctgtatctacatcagattctggtga

SEQ ID NO: 149325 - DNA, 382 bp, Homo sapiens
ttttttcccttgctctgttttgattcctatctttcaaattaaaggttttcttaaatgtttgatgttccttgcctatctgttcagacttaagcctgaggcttttaaaaaagtttttatttttaaagcaagttgggaagtctttccatggtatgggcctgtgacatggtcttcctctctgagggatgaactggtgaatctggctttccgtggggaccctcagctgtcagtgtctccaggtctctcttttttaggctgttttgttttcctgtctaagcttgactgccagaattctgtggtgaattggggaaaaggagggtggtgggtgggtggtaagttatcattcagtatttaggcttgcatttaatccccatcatacctccct

SEQ ID NO: 149326 - DNA, 424 bp, Homo sapiens
acatgcagctcgtacccccaccggcaggttgtactcatcaaaagcaggtattttgaaaaattggcagtaaaatttcagagaatatgcagtataattataaataaaatattctgatgagaaacttttaataagcatttaaaagaaacaagtggccgggggtggtggctcacgtctgtaatcccagcacccaggaggccaaggcgggtggatcacctgaggtcaggagttcgagacccagcttagccaacatggtgaaaccccgtctccactaaaaacacacaaaaaattagctgggcgtgctggtgggcacctgtaatcccagctactcaggaggctgaggtaggagaatcgcttgaactagggaggcaaaggttttgatgagctgagatcacaccactgcactccagccaggcgacagagcgag

SEQ ID NO: 149327 - DNA, 224 bp, Homo sapiens
acatagaattttgtttgtacgtgagtttgattcaggtaggtttgtatcttggagtagacttgagattgctattagaggattaagtattattggaacatggctatttatgttaaattgtcatcttctttctctttgtcttcgtatgtagcggtatggtatttgcctctctagctaaagagggttctggagaaagagatcattaaagcagagatggaagatttgaa

SEQ ID NO: 149328 - DNA, 758 bp, Homo sapiens
cttctagactgtaaatgatgtctaacatgatgtcatacatggcatgggatttttcttctttttcattaagaaattattttttaagacagttaaaggctaaagtaggggaaggaatgggtaaaagaagaaacaatatgatggtaagatgatcttaaaggcagcatttagaaaggaaacgagagagacagtataagttggagaagaagtaaaaaggtgagaaataaggattttccttcagattatcttctgttatatcctatttgaattgctgaatatcataaccattttatgtttttctcttcaggggaatctggaggattcatttgggttattaataattgttgatgataagatttgaaagattgctataatcctatttgtcattaaaacttaaatacttctctcaaggatttcctagttactatatagttaccaaaagctatagtttttagcttttgaattttaatgaaaaatacattattgtgaagaattaccagaaagaattaatttagggagagaaaaggggggttaaggcatgaatgatcttgagtagtttctgccttgtggaaagtttgaggagaatatttgagtatgtttgttcgccagactgttgaagcgaattcattctcagatcaaaatctgaggtttcaaatgctgaaataggtagtaatttctttttatcagttttgacagcttattttgtgagcttattttttagggctggcttaaattctttcccctatagataaaaattaatt

SEQ ID NO: 149329 - DNA, 383 bp, Homo sapiens
atctcagggaggaaggagctggggatttgaattcctgggcctgaggaatgagggtctgagacgaggactcctgggtctgaaggaagagggagctgggggcaatggctccgatgaggaaccctatgggcacccgctgagcaccggctacccgtagctctccggccgctggggccgggtgttcacagtgcggctgggcccgcgccctgcggtggggctgtgcggctacgcagcgctgcgggacgcgttagtgctacaggcggatgcggtctctggccgcgggtccatggcagtcttcgaacgcttcacacgcggaaacagtgaggccccggcgctggacttgccggcccggacgctccaggctgggcgggtaaatggtagaggcg

SEQ ID NO: 149330 - DNA, 300 bp, Homo sapiens
ggctggacaacccttgtcctaactctgccagcactgtccacacgctttatttctttttttaatttttattcttttggtcagtagttgaactaatatcataggctgggccctggttgatttttgcagatgtggttctcaaagcttagaattgggtacggaagcaggtaataaaactgcaataagtactttcggaaaggaaggacaaagtgcttggggggctaggcaaggggtcagagaaggcactctagagcaagaggcatctgcactgaaacttgagggataagaggaaggggtgaggag

SEQ ID NO: 149331 - DNA, 379 bp, Homo sapiens
ctctgtcaccatttagcgcttctctccatgtgtctccctcttcatgtggcattttcctcttcttataagaacaccagttatactaggttagagctcaccctcatgaactcatcttaacttgattatatttgcaaagaccctatttccaaataaggtcacatgcacaggtactgaaaattaggacttcaacatatctttctagggaacataatacacgggtgttaattcctactaagaatcttgcaaccaaaactgtgtgccagtgcttgcttccagagaacccaatccatgacatctcttttctctttcttgtccataggtagagatacttggaatatttttactctttcattgcctgctccactctaagctactaaat

SEQ ID NO: 149332 - DNA, 132 bp, Homo sapiens
ctgagtttgcattgagagttccactgttcttttaggagtatcccagccatttgatgctgcttcacttattgcttgataggaacctaagactatttaactgtttgctcctagttcattttcaaaaaaaattta

SEQ ID NO: 149333 - DNA, 507 bp, Homo sapiens
tgattacactgaatataaagaataattgaaaacttatgtaattttttttcttcaagagctcaaagctacatatgcctacattgctgcaattgtatgtattacttattgaattttctaatgcaacttaaacattgattttgggggtttttaagttataaaagcaggaaaaacaaaataattttttattttttaagtacatgttttcaagtgtatgtacaagtccacttatatttaggccatactgtgcattacagtaagcacactcttgcacaaagaaattgagtgtgtaaacaatcatagcccaaggtttcccattattatgtgaacttattgttttgttttccatatacttcccagatttgcttatgctatttcctcctattgaaatgattttttcttgctcttttctgaatatccaaatgtagttcaactcaaatgccaccttctctaatacttactcatctaccactgtggtacttagtctcttctttaaatgtcaataacctt

SEQ ID NO: 149334 - DNA, 385 bp, Homo sapiens
cacatttcaatcctaatccaaaggattttcattgaactagttcactaataatctggccaacgaggaagacaaaaagggctgaccctaaaaagacaattcccatccaagcagagagagagatggagttactcacgccaagtcagaaagtcattttcgggggcatttggaaatctttggagtgaacttcccgatgctatgaacattgtttgagaccctggagacactgcctgtgtcactgtgggtttcccagcttccagccggggaactccagactccagccggggacagctgggtgtggaggagcggatgtggaggcaacgccagcagcacaaacagcagctctcctcccggccggcagacacatggaaggacagcctctttcagc

SEQ ID NO: 149335 - DNA, 415 bp, Homo sapiens
tcactatcatgtcctcaagctgaccccccacccactgctccaaaggttttctgatcttctacaagatgggaaaacgcctctgggtgaacatgacccgattgtggatcccagagcagggattacctggctcatctgccacagaggcccatttccgccatctttctctctgacgtgcaattacaccctcctttttccttggttcttgtaactgaagagccactttacaatgattttgcaaagcctagagaattgcaacatttgtgtgaggcattatctcacattcagatcattgctggctgcaaaatcagtaaagcatgctaatggttccctggaagcttaaggtttttagtagtatgtggcctaggtctctctctaacccttagataaacacagaatggcttacttcctgtaggtt

SEQ ID NO: 149336 - DNA, 742 bp, Homo sapiens
tgaaagtccctgggatctgggaacttttatcgttctgaggaacaagaaaaacagagacacctggaaaagctttgcaggaggagtggccacaggtcacctggtagcatgtacatgtctgcagggcccagctgagttctgggggatggaaggtggctccaggaaatggtgacctgaggaacaggtaggggctgagaacgtggggcctcctctgggaagaccatcgaggaagcaggacatgagtggggaggggcagtgttgtgtgagggagctgggcagcaccgggcagtgtccaagaagggtgtgggggagatggatgggtgggggcagccagagcagagaacaggtgtagacagcaggtgagagagcaggtggggggagcaggtgtagacaacaggtgagagagcaggtggggggagcaggtgtagacagcaggtgagagagcaggtgggaggagcgggtggaagaggaaggtgagagagcaggtggggggaatgagtgtagacagcaggtgagagggcaggttgggggagcaggtggaggaacaggctgacagctgggcaggtgcctcttcagcaggtctctgtgagtttctactgtggactttgcagtgaggtcagtgggaaccacggagggtgtgagagagagtgtgtgtcctaatgctgggaagctggggtttctccactgaggcacgcattgctgggaaggccaggccagatctccctgcccctgggagcccccggga

SEQ ID NO: 149337 - DNA, 408 bp, Homo sapiens
gctaagctagaatggaagagctgggattcaaatccagaaagacttgctccatagggttctcaagcctataaccagtatggaaacaggcttgacattaaatccagcatttccccatcttgtttggttatggaaccttattatcttttagtatttatagagagattagtcagttgtccacggcatggaccctgggaagtgttgcctgagtcagtttacactggtgactgcagtcttttaaacagcattgtttcagactataactagttttttctaacttggttctctgttgataatacttaaatgttatatttatttttctatttgagagccttatattttgacttcaaggcattttctattccctttcacaatgaccttcccaggaatcaaagatattgtcaccaccac

SEQ ID NO: 149338 - DNA, 313 bp, Homo sapiens
tctcaaactcctggactcaagcgatctgtctgcctcaccctcccacagtggtaggattacaggtgaaaatcactatccctggcagttttttaaaacttactgttaatttcagaacctgagaggaaggaaatactttaggaaaaaaattatgaataatcagaacatagtttatcttagagataatgaaaattataaatctgtcattgaattacgcttcattacgttgaaacttaacagcttttccatggaataaagaccacagtcttgagtaaaatagataatcagcttgacttctttgaattagttgtatgag

SEQ ID NO: 149339 - DNA, 266 bp, Homo sapiens
cagggccaaaccccttctagaccacacgctggatacctgggagcggccactgccaggggccccctcgtccccttctctggctcttcctcccgagggcaaactgtacctgagaaggaaccaaggatggggctgggtgcctccactgtgtacttgccctggccaggagccaggtaaactgaacaatacaataacattttgaccttgatgttggttttagaaagaaatgggtggaattctttttatccgccgtgggttcgagcagcccg

SEQ ID NO: 149340 - DNA, 549 bp, Homo sapiens
acaggctttccaacattgtctgtgactcttagtgattctaaaattctagcaatggcacaagattgagtggaaactctgcctcaccacaggactgaccatgagtagctcacttcaatggattggtatttcacaacttagcctggacatcggtcaagttggtaagccctgcttctggctatggctgacccaacttcaggacctggagcaccttaactttttgtgaatctaaagaaagaaaagcacacacacgtcatcatatcttcactttcagggtgttcacaatccccttgtggccagaccatggtcccaagattaagacctcttggcccacatgaccccttgtttgcctctcgacagtagaatctgctgcctgtgaccatctctggcacagcattagcctccaatcgcccctctcccggacactgagtccacatcagcactatggatgaatctgcctccaaaaaaggaatgagaggagaagacatatagggaaggaatcaaaaagaaaaggaaagaaaaactatgatgtgaacccaaagatgtgtaact

SEQ ID NO: 149341 - DNA, 599 bp, Homo sapiens
gtcgagtctgcgcacgatggctggcatgctcattctcagctctatctcatcatgctaggctagttctcatgctagggaagggtgctatgactacccaggatcatgtttataaagggcccagtgacagaatcccaggaacttaatggtgtttaatgatgtttctttcccttctcctcctgagtaaattcagggccccaggtcatctctgtgctgggctccagggctggcagcccgggccagtctccctgcctgagaagcgtgattcactgacaggtggcatccgcgaagatgagtcgagagctggctgcggaacctccatagcactctgcaggtgaaaatcccaggagtccttgggatctgcaagtgaaaaagaccgaatctgccctcgggactgggaggagacagagagtaaacaaacgggcagcggacaggtaaataccgaaggtgtgagcaggacatcccggacacacggatggcgaagatgaacagaggaggggggcagaaccactctggttggggtagacggcaaggtcctgctgagctcttaaagaaagggcactgtaggcccggtgcggcggctcgcacctgtaatcccagca

SEQ ID NO: 149342 - DNA, 320 bp, Homo sapiens
tgcaggcagcaaagctataaaaatctggatgacagaaacatagcacagtgaggctgggaaatcagctcagctaagtgaggacctgtattgaggttagtgttagaagcaggtccagaaagatagcatagtcactctgaagtgacaccaaagacagagagtcactctgaagtgacaccaaaggattttgctcagaagatgctacagaaaaaaagttacatatcaaagtggaggtcctggtatatcatgagggtgcttctgattaacaaaagccagccagctgtttggagaaatctaaatacgttaacagcctgtccttgtcc

SEQ ID NO: 149343 - DNA, 456 bp, Homo sapiens
atgacgaccctcattatcttgagaaaagaatgagaaatgagtgttttggacactgtaataaccacaacttcccatgaggaagaaaaagaaaaaaatctaagaataaagactaaatataggtttcattgctaatcaaaattgcatgcgtgcaacaaatccataatttcagttcataaaaatagctttaagtaaaagttcacagatgaagaaaaaatgtttaacacaacatgaaattcatattctaagccacctgctgcaaagatactttcacaaaactcctagcaacttctttggatcttgtttagaagacttttagatgctcccactgaatgaaaggtgttaggttaatagcgatttcctatctgtccacgtatcatcaacgtatttcctacatttggcaaccaccaccaatcccgatgtttcacaggcaagataccaagatcatcacacacatcc

SEQ ID NO: 149344 - DNA, 286 bp, Homo sapiens
tgatgttctggaggtccctccaggggctgggtgaggaggccttccccaccacctccttgtcttcctgggaagcaggcacccgttcagaggccacgttcccacaggaccaggctcctcacccccagcatcacccttttccacggggttgtgccccttccttggtcctgtccactcacacacacccgtgtccgtgtccatgttcacacctgttctgtgtccactcccacacacctgtgtccactcccacacctgtgtctcgtgtccactcgctcacacctgtactgtc

SEQ ID NO: 149345 - DNA, 269 bp, Homo sapiens
catctacctttgactctattcctattaaaaatgggttaggaaagtgctttcaaaatcaagtgtgttcatcagggaatcatttacctaagtcttcttaacactgcttagtgaatattaagcctgatatagtaaatacacgctaaccactaaattgaaggggaaagagggagaacaaagaggcatgtaaagtacacttactttttctagtaggaaaaagccaattaaaactatcacctattagttatattggaatcagtcttacaggagga

SEQ ID NO: 149346 - DNA, 315 bp, Homo sapiens
acccataagaaagaatgttcttgtaaaagatcatgtggattcatgatgcatttgtgcttactttaaaaaacaaagttggtcagatatccttaggaatctcttgtgattaaaattcctgggttgaaactctagaagagatttctcaaactttgaagcaattgtttagttaatatggacctgagagattctatgccttttaccaaaaaaaatatatcttctaggattactttgcagatgggacataggtaaaaaagcatggcctgaagtgaggagaagatgtgatgaatgacaaaggtgtcaaccctcaggcaccat

SEQ ID NO: 149347 - DNA, 626 bp, Homo sapiens
taatttttattaattaattaaaattattaaaacatgagaactttaaaccagccattgtaaatattcttagtgatttaaaggaacacatgaagatgataaggagagaagtggaagatgcaaaaaaggaaccaatggaaacctgtggatgaaaaatattagagaattttaaaactcacaaaatgggattaacagcagatcatacactgcacaagaaaagatcagagaacttgaagagagcgaaagaaaccatccaaaaatgaaacatagtgagaaaaaaaagaccaaagaaaaattatgcacagagagcctcagagactttagggacaatatcaagcagtataaaatacatacaactgtagtcccaggagggcagggatgggagtgtgggagtgttttaagaaataatgggccagacacctgcctcggcctcccaaagtgctgggattacagacatgagccaccgcatgtggcttattctgtatcttaattgcagcggtggttacatgagtgtatgcttttgtcagagctcaccaaactctacactcaaaatggctgcaccttatttcccacaattatatcccaatgaggttgattttaaaaccaaaataaatattgcctttgcatga

SEQ ID NO: 149348 - DNA, 756 bp, Homo sapiens
ccagattgcttctgttatttaagtcaatattttattgaggtataattttcatagggaaatatgcacaaatcataagagtgcagttcaaagaatttacacaaagagaacactcaaaggcacatcaagaagcagattttacagaactccaggggcacctctccttccagccaccccttgcttctccttgagtggccactgtgttgatttgcaactcccatagtgccaaattccattgtaaggttcaagagaaatggtgacagacagagcccttgtcttatccccaacctcagaagctttcagtagcataccagaagtatgatatattctcaatcacagtaaggaacttcctttccgtttgagctttcttgcagtgtttgtcaggactcagtgttgaactttattaaatatcctttctgcatctgtggccttgtggattcaggatgggtgggcagagaacctgtctatgctgggcaccgcctcgtttgcaaactctgaaaggataatggaaacacactccgtcttccacaaatgtcttcgtgatgtgtgaatccttagtctcttcctctccatccaccctaatggagtactgtaaccagcggctttttacttccgggctggccatctgggactttgggacagtggacgtgtagctgagctagaagggcttaccttctttggaccaagtgattaccctaagtaacctggccgggtttttcttctattgtgcgttaaactaggatgccctaggactgataa

SEQ ID NO: 149349 - DNA, 448 bp, Homo sapiens
ccagcctgattgttaacagtgcccccttcactctcagaagtctcctggtttagatgatacatgacatggttgccctactgagaacgcctcacagcccactctctgctgcctgcatctgggcattgaaatccagaaagccctgctctacccaagcccattgcatcaccctgcaagggctcccaaagggcactcggctgtcaggcttgtctcctcagggaatgagcagaactctggaggccgagctgatgctatggctggagtgggaaagactgaatttagtacctcctccgtaccccatgggtaagcctacccttgtcgctgggctagggtccacctaggctcccccatccttttctggggtaagacctctctgctaccagtcttcagccacgggagccttctccaaatggctagttctgtcagaaccagggagccatgtcccattgac

SEQ ID NO: 149350 - DNA, 218 bp, Homo sapiens
ccaagcctttgctaagtgaacagcaaagtgatgttttaaaaagtcagactcacagggaatgggtgaagtgggagagaagacagtagtgaagttctggaagctgggaagcagatgggtgagtgatcatttactgagcagatccgagaaagccagattccatgtcggcagtgagggaagctaaggattcatcctgtttgtgctacagaacactcaaaagt

SEQ ID NO: 149351 - DNA, 641 bp, Homo sapiens
cctagaacataaacatggatggaggtgagtcagcttcaaccacgccatgaggaacagtgccttagaagatggcagagacactggaagaatggaacctgagtcatggaatgacctcttattgtagagctgcttcgctaatcctagactgctcacgtctggactgttactagaaaaataagtaaacgtttaaatttttaaagccactgtgttttagaatctttttgttatagaagtttacccatatcttgtatttagcaagtgagagcttgagtcaaactttctgttgtgaagaaatttaaatcaattatatatgcagataaagctaaaacatcttcctacttaaaaaaatctgttataattgattttattttaaaatctatgagaacctttaagtagattatatttcagtgagggacagcatctttttttggactagtatatggaaatctttttggcagcgggaggataacacttcatgttaaaaaatttaatacatcgtggaaaacttgaaaattaaaaaaataagtaaaaagaaaaataaaatcaattcagaggagcccatcatcaatattttgtattatattcttcaagcttgattctacgcacatagaattttatttttgaaattggattatctgcat

SEQ ID NO: 149352 - DNA, 563 bp, Homo sapiens
cctagaacataaacatggatggaggtgagtcagcttcaaccacgccatgaggaacagtgccttagaagatggcagagacactggaagaatggaacctgagtcatggaatgacctcttattgtagagctgcttcgctaatcctagactgctcacgtctggactgttactagaaaaataagtaaacgtttaaatttttaaagccactgtgttttagaatctttttgttatagaagtttacccatatcttgtatttagcaagtgagagcttgagtcaaactttctgttgtgaagaaatttaaatcaattatatatgcagataaagctaaaacatcttcctacttaaaaaaatctgttataattgattttattttaaaatctatgagaacctttaagtagattatatttcagtgagggacagcatctttttttggactagtatatggaaatctttttggcagcgggaggataacacttcatgttaaaaaatttaatacatcgtggaaaacttgaaaattaaaaaaataagtaaaaagaaaaataaaatcaattcagaggagcccatc

SEQ ID NO: 149353 - DNA, 261 bp, Homo sapiens
caaagtgatacgatatgtgataatggactctgagtgtagactcttctactttattaataataagaagaaagcagttgagattagaaaagcttgtagtaaattttcattcatcacaaagtaattgacagactcacccttttatactaaggaaagtatttattgagatggtctcttcaaaggaaagaaaagcactccatctaaagttgggcaaaaaatgaccgccagttgacacggctgagtgaagcaggaccacaacactca

SEQ ID NO: 149354 - DNA, 173 bp, Homo sapiens
gcccaagcagtctgatttcagagacttcatcatgacaatatagtatacctacaaacgtgtacttccctgactttaaaatctgagtaaattgggggctgggtgcggtggctcatgcctgtaatcccagcactttgggaggtcgaggcgggtggatcacctggggtcaggagtta

SEQ ID NO: 149355 - DNA, 294 bp, Homo sapiens
caactgagctggcaaaaagaaaactaggcaagtatgacagatacatgatgcacaggctaagtgcaaaggaaagaaaaacaccaactgcagggatgagggactcacccctttagaagtttctacttgagcagctagaagactacaatgccactcatcaaaacagtgactcagggggagtatttgggataaaggaggaatctgatgttggaggtcaaatttgaagtgtctttaagacctacaggtaacgagacagctggacaaacacatggaactcaggacaaaggctctaaggac

SEQ ID NO: 149356 - DNA, 319 bp, Homo sapiens
ctgtggtaactagtactgaggggtggggaaggctacagaaatgaactaagatgccttgttctcaagggacagagagataagatagatatgtagagtcctcagaagttattaatttaatgtgctaagtacacagagggagtaattacatctatttagggagataagggggcatcgataaacacctctgctaaatgaaaaaaatctatacattcacgaactttcctttaaaaaacaacaacaaaaaaaaagccaactatttttaatgatagcctggattaaccagcacgtttcccatttcctaccactgctgggtgactgt

SEQ ID NO: 149357 - DNA, 352 bp, Homo sapiens
cgaaggtgatgggttacaggtgctgggtttctccacatgggcagtttctccccaggagtctcactccttacatcatcatctagagcagtaattaatttcagaaaccactcctggctgccataagctgcacacccacttccagaactggcttaacccgccaggaagccacagtcctcaagggacagtcacccagagctgcatgttggtgagtcagagacgagaacaaagaggaagcaatgacccctgaacacagagcccttcccagcccagagtgctgctctaagcctaacccaggctggccagggcctgaaagacaaagaagaatgccacagagaagggccagggcactaca

SEQ ID NO: 149358 - DNA, 588 bp, Homo sapiens
tgcatttctacaaggtaagtacaggacagagacagctgaggagtggaaggcaatcagtacagtgttgcaatcctctaacaatccaagcatttctaggtgagtaacagtgacatagacagtcttaggatagcctcaaaccaacttcgtgagcccttttccagttatctaaggtcctgactatccgtaatcgtaaaaaatgtctcaaagaaagaaaagagtaatgaatagatttcttctttatgggagttaaaaactgaatataattatggcagcttcaaagtagacggacacatgttggttttgctgctcttcatcctgtgctgcagttgaaaagtctgaccccaattatttgtccctgtgtgctataaaattcttaatcagagctgagtagaataagtagtctttgtttctgaagcctattcaaagaaaggcttatgtgaataccaactctgattgtgatgaggactaagagttgagaccaaaattaatccaattctaaacgacacttaataagtcagcgaacacaaagataggctggaatccttagctgtgcccagcaaaacttcttcagacctcataaattgaatt

SEQ ID NO: 149359 - DNA, 792 bp, Homo sapiens
gttctctctgtggggttctaaccttgaaataggagcatggggcttgccttccccttctccattcctccaagaaagagaaaggaaaggaagagaaaagaaaaagcatcctgtattatgtgtaagtttgtaagaatccttactatgagttctgagtacaacatctttttaactcttttctctccctctcctgcttccttcttcaatctccagctaccattcatttcctgatttcatttataggtcttaccaggcaagaaggccaagcagaaggaacctacatcagggaagtgctgggctacgggccccacctggacttggggttctgggcagcctgaacacaggtttcttagtttcctgaagtaattgagcttgttgccttaacttcagttaaaacactgatcgtgctttacttttaactgagcattgagacctcttataatattccataaggctggatattgttttgaggaagacgatttttcctcttaaccttgcctctgtgtttgtgtgtgtgtttggtcggtgtttagacagttttccatgcatggaccctgattacagcgggagcaggcaacgtgaggtgcccgcaatcagacatccagctccacatggtggcctccctgcccccagctcatccttacgcagtgccttcaaattgagtgtcttcaaaggtgctgcttagtctcactttggttgttgtgtcgctgtcgtatttttcttttttcgcagtattgaaatgttcactcctagggaccgaacactggttttagtgtccatagtggcaaaaaaaaa

SEQ ID NO: 149360 - DNA, 263 bp, Homo sapiens
tgcagctattgtaaaagaggttgagttattcatttgactctcagcttgctcactgtaggcgtatagcagaactactgatttgtgtacattaattttgtatcctgaaactttcctgagttcatttaccagctttaggagctttttggatgagtctttagggttttctaggtatatgatcattaccaacagcaaacagcgacagtttaacttcctctttattatactttctagtattctctcctttccttattttcatagaagct

SEQ ID NO: 149361 - DNA, 347 bp, Homo sapiens
aaggagagtcaagtgagcccctaactttactgtgaaccccagcactagaaccacctcagtgaaccccagtgccaggctggcacccatggacccaggcaccaggccagatcccacagaaccagtctccagacccatccttgcggatccagtaactgaggctagcctgctggagaagtcaggcagcaagcctgctcgtggactatgccagccatgctgtccggaatctctggacaggctgactggtaaagggcttcctatgttaaagctcctctgtaaagactggagaggtgactacttcttcaaatatgcagacaccagtgcaagtccataaggatctcaaatgatca

SEQ ID NO: 149362 - DNA, 398 bp, Homo sapiens
ttacatcagctccagctacatcatgctccagttacaacagctccagttacaacagctctagttacaacagctccagttacaacagctcaagttacaacagctccagttacaacagctccagttacaacagctccagttacaacagcatatgacctatcttggagaatgttccatgtactgatgaatagaatgtatattctgcagttgttgggtagaatgttctgtaaatgtctgttaagtccatttgttctagggtatagtttaagttcattgtttctttgttgactttctgtctagtgctgtcagtggaatattgaagtctcctgctattactgtgttgccatcatctcatttcctagagcttttataaatgggagctccagtgtttagtgtatgta

SEQ ID NO: 149363 - DNA, 285 bp, Homo sapiens
aacacaccattcagttagccaaggcctctgacagacatgtaagctgctttcatcttcttgcaatgacataccatcacaaaggaccatgcctccttgtgcccatgcatgaaaggtgccctagggcctcactagggtcttgcaagcagtaaggccacctgggaggctgctagtcccatgccttagaaggtacttaaccggctttttaaccagaccccaggcgtttccatgcacaatacgatttgagaccccaggcagcaatgtgctattgaaacttctaaaactagg

SEQ ID NO: 149364 - DNA, 607 bp, Homo sapiens
tgaactttccaattagcaacttcttttactttgaaaatctcatatatttctatgaaatattacatattttattaaatattacatattagtctaacgtagtagtagtggaatagacgtgatcttaaaatctgtattagctgtgtgatttttgacaaataactttccctgtgtttccaatcatttgaaaaaggactaaaagtcctaagtgacttccaacattagcgatctaataccctatcatcaaatctgtattttcagctgagagctttaaacttgctgctgtgaagtttaagggaaatagcacccattatatatcaacccgatcattttcttctgtcggcaaaactgcagagccagcttgggttgtagtaatacggtgaccgccatgtgaaacatgtttcttggtgttttcttttaaaactgccaaatatagaccttaaccagctgtaaggcagtgcttgaggtgtggagacacctgaggaagctgtgggctttctccctcgaggtgggcccacgatgagttttaagcaagacgggcaagcagtcacctggcaccaggaaaaactccttgccctctggagggagtcgccccaggaacgtgggtttt

SEQ ID NO: 149365 - DNA, 2393 bp, Homo sapiens
gagatgatgggacagctccccctcagcaagactctggcctaaatgtatttgctttatttacacaacaagaggataagcgtaaacacgggcactttcagtttgtggcactgaaggacgatctacacagggcaccctgcagaggccacaaccaaggccgcctggcttcccagtgggacaggcctaagggaggacttctggcccctttgcttgatgttcatgttttatgccttgatatttctttttggttgcattccctggagctcatgtagatcattttacttttcagaggtgctagttctggtgcccacacgcacacacacaaaaccatcaactcttctggattccttggttttaaagcttgcctcatacaaagtacagagacatctttttcaggaaacattgccaccacatgcttgaaggaccgcttatggctacacttagacatctccaaccaaggtctcttcacctccttctacaacaatgcactttgtctgcactgggacaaaaaatgacagccttttttcttttcttgtttttatttataattagggcgtggagcatttccgaactttcacgtcataaaaaatgcagcatagttaatcagcagcttgcacttctgagggcacattcacctcgggggaggaggaaggaggaggagctggtgggtgctgagactgcagtgtcctccttcccagcagctggacccagagaccaggcaccaaatttttttgatgaaattatcctaaggaaataatcaaatttgtacagaaatttatgttaaaaaatgttcatggcagcaccgtttaaaatggggagaaaattggaaacaacagaattgtagcaatacatatgatcattaaaaattatgttttagaaagatttttaacagtctttggaaaaagttggtgacatgttgctagtttttaaaaaaagtacagagtatgtacagtatgattccaattttgtgtttaaaaattagacatagtggtaacctagcttcagttccagataagatggagaaggcatactcctttcatgtctcccactgaatgcagctataaatcctggagagtagacagggagaaactatttgaggactctggaacaaagacatagtagcaatcgactggtgaagaagacaagaatttgaagtacggtcaagtatctgtgggctccacatctgtagatacaacctacatgtattgaaaatatcagaaaataaaaataacaatacaacaataaacatcaatacaaataacacaccaatacagtatagcagctacttacataacactgacattgtattaggtagaagtaatctagagatgatttaaagtctgtcggaggatgtgtgtagcctgtatgtaaaaaccacgttattttatatgggggactttagcatccaaggatttgaatatccacgggggtcctggaacaagttccccatagacaccaagaaacaactgtattcctgaaacagtcttgagttatcattttctttcttctccctctatgtatgtacatagagtgtacatacatagagtgagaagcaaagaaggtccatgaaatggaccaattcttttgaaaactgcaaattaccacagttcatctaacatgaaatagataacctgaatggtccaataactagtaaagatattgaattaatagtttaaaaaccttctgaaaggtaaatctctaccctaaatgatttcactggtgaattctatcaacacatttaatgaagaaaaaactccagttctaaacaactttcagaaaagaagagggaacacttcctcactcattatatgaggtaagcattgccctaataccaaaaccaatgttaacacaaaatatgaaacctacagaccaataaccctcatgaacataaatgtaaaaatcctcaagaaaacattagcaaatttaaaccagcaggatataaaaggaataataatacaccataacaaaaaaagaaactatccttggaatgcaaggctggttcaatatttgaaaatcaatcagtgtaatctaccatattaacagtctgaagaagaaaaatcatgattatatcaatacagaaaaaaattgacaaaattcaacatcagttcatgataaaattctcagcaaactagaaagggaaggaaatttaacatgacataggacatctacaaaaaaacctacagaaaatcctaaggagtctatgagaaaatttcctaaaactagtgagtgagtttaacaagatcacagagtgcaaggtcatcatacagaagtcatttttatatcttagcaatgtacaattagaaattaaagaatatcacagtagcttcaaaaatatgaaaggcttagaaatctaacaaaatgtgatctggatgctgaaaatgatgagatgataatga

SEQ ID NO: 149366 - DNA, 137 bp, Homo sapiens
tcaggctactataacaaaataccgtagactgggtggcttatgaacagagatttatttcttgcagttctggacactggcaagtccaagagcaaggtgctggcagattcagtgtctggcgagggccttgctttctggct

SEQ ID NO: 149367 - DNA, 350 bp, Homo sapiens
gtggtccctgctcccccccgaccccaactccttctcatcatcatcattagaaaggcctcatgagatccagtctcgtcagcactttgctgatgaattaatcacaactggctggcgtgttctggccactgtggtcttggtcacccttggcctaatgacagtgtttccagagataagaatatagaagttgccagagctccaggggcccagaaacaaccatgctctgtcctaattacatctgaatctgttcttgggggaaacaggagccactcatgtttttaaatccttggccattaaacattttaaatataacttggcctgggtaatatttaaatcctgacatttggctcaca

SEQ ID NO: 149368 - DNA, 479 bp, Homo sapiens
tgtagagacagggtctcactatgtttcccaggctggccttgagcttctggcttcaagcgatcctcctgcctcagcctcccaaagtgctgggattataggcatgagccgctgtacatggcctacattttcttaaggtgcacttttatgtgtgtgtactctggaaataccttgattacctgcagggtggccaggttctttaaatctaaaacactagcccctgtacactcgaacacacttatacgaatgagttttgtgtggttctgtggccgtcacccttgtcatttgagactcacagtaggtaaaaatcatatgcctttctgtgctcattcccatctctgttattacaaagttttcttgggaatcaaatgagaaaatatattaaaatgctcacacctataatcccaggacttttggaggccaaggcaagaggattgcttgaggccaggagtttgagaccagcctgggcaacatagcaagac

SEQ ID NO: 149369 - DNA, 294 bp, Homo sapiens
tctcactgaaggatgtccatgtcattatttggtagctaaactttatgtgcctacacagatacacacaccctgtacaaagacaaacaggtgtgaacttcagactttcccttttgagacaagtgttgatcaggacttaagataaggggctttgaaaagtagtgtgctaagtaagactttggaaggaaggtgtcgatgcacttgatacgtccttttattccctgctctttgaacatacttgtggataatgacagagatcatttccaagtggcccaaagcaacagatttcagcaccca

SEQ ID NO: 149370 - DNA, 352 bp, Homo sapiens
aagagaaatgaaaggggagtgtagaagggtcgagcagctgcattctttccaggctttgatcagctttcagtcaatccacgttttgcatgtgagagggagggggccgaggatcagtcagttgctctcagtgaatctgcattttcacattagatacacagagagtagagggggcagtcgcacacgcatttgtctcaggtgagcagatgagtgacttgtagtcctgccttccttccctacctgtgaagataagctgctgatttacactgtcagggtgaaattcaacagaaccgttttaaggtaaagatcttggggttcacaaggaatttccttgtgagtaaattgtgtgggaggc

SEQ ID NO: 149371 - DNA, 145 bp, Homo sapiens
cagcgctgacgtcaatttacaagaatgaaaagtgagaggagggtttgtgtgtgcaagagactgagttgggggcccaggtgcagtggaggtgtcctccccactgagcgggtgagccagggcagtgtggggcgggcaccatgggaaa

SEQ ID NO: 149372 - DNA, 564 bp, Homo sapiens
taaatagtcaatgttcgatacatgttcattgttaccacacccattcttcctcattacttccttcacctcctcccaaattcttctacagtaataataatattactattacaactattatcattaaaaccagaggccagtttagttagatttggtggtatctgatatgattcacattaagagagttataatgaagacctgcttgtgattgcaaaggttcacttgcaaagggataggatgaatgggatgtggattagcagcagcattataaaaaactttacaagtttcagttgagaataatctaacatgcttcgacctaaagaagcatacaagtaagcccaaaaacaaggagtagggaagggcatccaccaaccacaaggccaagggaaggcctaggtatctctacaggacagtgaagaattgtgacctatagtttaatccaccacaaagggcatgcactggtatggttggacagtttttaaagcatttatccatcctaaatgggcagtcccaatgcttgattagtagtgccagtgtaatgcctattgttaagtattttgagtagca

SEQ ID NO: 149373 - DNA, 345 bp, Homo sapiens
gggagcaggactgaaggaaacgcggcaggtgttaggcaccggtcgcggcaggacgcagcatcctctgcactgatggcccctcccgtgcagccgccccacaaatcacacctgcagggcttcccgaggccagggctgggaaataccaagttctgagccagggattactccagcctcgacttgtacagccctgcttagagcaaagtgagcttctgctcctccatccacacaagcccatccagcctcagccctgcttgaagactacgctgtccacaaacccctcccatgggccacgctggtggctccattctctgtggcctctggctaagtgttcacagctccactggg

SEQ ID NO: 149374 - DNA, 516 bp, Homo sapiens
cagtactctgggaaagctgtcactgaatactgttcccctgacagcagacatcatacatcatggataaaagtcaaaaacctaatcatcatctcctcatgggtctggtgcagaggagccatggtggcattgaggtctgggagcagtaagtggctgtgtccagggagacgggtttttgcctatttattcatgcaacaagtttttatcaagcagcatcgtggagtggaaagagccccacattgggtaggtagagacctggattccagctctgccatttgcaagttgggtgattttatctgtaaaattgaggatggtgattcttcctcaagatttgctctgtggacttaaaggaaatagtgcatgtaaaggcatctgttaatgttaagccagggctgagaaatattgatggatgtggttgttctcaaatggagaaatgattattggaagcttactgagcatggagctctatgctgggtattcaggggattttacaaggacgtattccagcacaactcctta

SEQ ID NO: 149375 - DNA, 1075 bp, Homo sapiens
gtcaacctaaggcttataaacagaagcccacaagataaagcagaaactcatcgctgccccaggccaagtgagatgggggaggggaggcctggagccccaaatgctctcagaatactctctccccactgaccaagggtcttattcttggatgagaaccccaaggagcacagtttaaaaacactgaggttttccttgggtctcttcaagtgccaacaatatgattctgtggctttatggggtcatcagccagtgctgtgaccaaacacataccaacaacctctctttccagagaatcaacttctccttgtaaccttcaacctctgggctcagtgtctccactgctatgcaatgggttgaggttatggccactcagagcttaatgtgagactgccccctgatagcctgggcttggcccaggagaagtcaccacaccataccgaatcatttttcttatttgtgaaattgaggacaaaatcactaaccagatagatcagggaggctggctagggaagttttatcccctagagtaaaagcagagggagttaggctagtgattgggttaaacagctccatcctggcagctctgtggaaatgcattcacaggtttcaccccatggggcacatcacccagaagttaaatggcttataatggccaagggctggttaagtccaagggcggattttagaaaatcctgcctggagtgacaggctgctcgcacattgaaaggacactacctccagggatcaatgacttttcgtggccttgaaattcacatagaagcagggcgtagtggctcacgcctgtaatcccagcactttgagaggccgaggtgggcggatcacgaggtcaggagattgagaccatcctggctaacacggtgaaaccccgtctctactaaaaatacaaaaaattagcaggcgtggtggcaggcgcctgtagtcccagctactcgagaggcttaggcaggagaatggcgtgaaccccggaggcggagcttgcagtgagcctagatcgcgccaccgcactccagcctgggtgacacagcaagactccgtctcaaaaaaaaaaaaaaaa

SEQ ID NO: 149376 - DNA, 147 bp, Homo sapiens
atgctctgcaattttttcttccaaatgtttttctctgactctttgggtggaggcaggtacaataaaagaataaactctgaattaccttccatttaacatctgacacctttcaaattcagctcttgaaaatccacagctctttaattt

SEQ ID NO: 149377 - DNA, 562 bp, Homo sapiens
ggggattccctaatagaatgccatggcatgaatagacatgttattgacccattcaccaatataatgtatgttggagtgcttccactattgggctattatgaataatgctgctatgaacactcacatacaaatctttgcatatacccttttttgtatgtgatatggtttggttccctgtccccgttccaatctcatgttgaatttgtaatccccaatgtcggagatggagccagatgggaggtgactgaatcatgggggtggatttccccttagtgccattcttgcaatagtgagttcttgtgaaatctggtcatttaaaagtgtgtggcagtatctaaggctaccttttaaattaagctttctgtagtaacaaaatcaggggagagatactcagttttcctcagtaccaaatataagcccccaactagagcaaaaaggagccctaaagttgcatgatgttccattaagtgttttggttgaatgcatatattgttatccacctttcagagagggacatctacccatctgaacccctgggaggtctgactgtctacaaaatcca

SEQ ID NO: 149378 - DNA, 124 bp, Homo sapiens
gtactatttcttctaatgtttcttatgagttagtaacgtatgtctctattcttagcacaatttgtcacctttattttccttaggtgaaaattgaaggaacatagatttgaagtttaaattctaa

SEQ ID NO: 149379 - DNA, 417 bp, Homo sapiens
  misc_feature (361)..(362): n is a, c, g, or t
agtcttaatacatatagcagagtacgaagatagttcggtatatattttgattagtaatcaatgaaaaataacttataaatttgtgatattttattgaaatagtaaagagtaacattagaagtgtaaattaaagggcaatagtattcctgcaatagcatttctccagttgtgagataataataattattattattttctgagacagagtctcactctgtcacccaggctggagtagagtggcacaatctcggttcactgcaacctctgtgtcccgggttcaagcgattctcctatctcagcctcctgagtagctgggactgtaagtatacaccaccacatttggctaatttttaaaatttanntttgtagagaaggggtcagggggtatctcactttgttgccttaagactggtcctg

SEQ ID NO: 149380 - DNA, 815 bp, Homo sapiens
agggtgaggcaagttccagatcactcaggagcctgcagcagagctcagggctccggactccttacccagtgctcctcacggcaataatccccaaaccataagcctcccaaggttatatggacatagacgacatgctaggcgggaatgcactttggaaaagtgcacaaggtgagtaagagtgtggggctaaggtgtttccaatgggcaaagggatgggagagaaaaagagcagtttgcttctgtccattggaagccgaggacctaaggcagcaggaagggcagaggccagcaggtgaagagccctgcttagccacaggtgactgagaggccagcagggtgtcagccctgctgaagaaaagtgctcttttcagctataaaaatgaggaagtcaggaaatgtgacattaggcaggcctttaactgattgtgggagaacagggctgcgggaggcatgccaaagaaacgactggcattcactacgcacactataccaagctgggccctggaagtgggtggagctggccatggcctggctgtgggtctctgggccttggtttccacagaacccagaagcagcctttacttcaagatcatcacagatagccctgggcatagctgttaccaggcatattcccagtatggtcttttcattctctgaaagcgtcagtcagggcaacgactgcaaaagccaaggctctcacatcagaggctgcgaaagaggaagaaggcttcggcccaggaggagtgtgcagctcagagccccctctgtgtgtgcgctgcatccttccttcccattagtctgtctacctgacccct

SEQ ID NO: 149381 - DNA, 251 bp, Homo sapiens
cctcacctcaatggggttaccttccacatctcaatggcattaccttcctcacctcaatggcattaccttcctcacctcaatggggttaccttccacacctcaatggggttaccttccacacctcagtggcgttaccttccacacctcaatggcattaccttccaccatcataggccacctgtagagaatggccaccagagagctacttaaggaagctgatgcttcagtgatggattttttcgggaggcctt

SEQ ID NO: 149382 - DNA, 720 bp, Homo sapiens
ttagctatgtgcatgaatttttggtaaaacaggacaactcatttagttgtggctgaaactccactggaaatttttttggtttgtttcttgtttattcagcctggctaatctgagctttctcagagattgtttagtgctgaactcagcaacaaaaatcagttctaggaatttgccactgctctgactgtgcagaggagagctctgattatgttttggaaataacttcagaggttttgctgtaatctgagcttgctgacagtcactgtggcctgaactcctttctagtgattgcaccctttaaataggaaatgccttccagctacttgggcagtgcgatacttgtttagttgtaggcccaggagcctcatgcaaagaaaaattcttatcagaggttcccatttcagttttctttctgggctgttctgttgcacattttgttgttgttgggctgacatgtattacagcatttctttataagcccccatggctcctcttttcagtagattaattatgttattactcaaagggaaatgttgaacaaagcaatggcgactccattttattaatcttaaaaaaaaaaactggaaataggccaggcacggtggctcacgcctgtaatcccagcactttgggaggccgaggcgggaggatcacctgaggtcaggagtttgagaccagcctggccaacatggtgaaaccctgtctctactaggaaaaaaa

SEQ ID NO: 149383 - DNA, 289 bp, Homo sapiens
cagaggcgagagccgtatgctacttgtacttctgtcagtgttggtggaaataagagacggattttacctactgtattacattcaaccagcaattggcagaacccccagctcagcgggttttcttgacttttttttctgctgtgagaacaatgggatgcaaaagggcttcagaaaaggagagcagcagatacgggattggggtcacttttcttctaattgccttgtaattggggagtggtttccactttcccactatctcactggtgggaggggaggaagacagatgtgg

SEQ ID NO: 149384 - DNA, 459 bp, Homo sapiens
agccgggacaggagagtatagagtctcactccctgatgtacttggcacgtaggagaagcttatcagtgctgggattacaggtatgggccattgctcctggccctgggtcttacattctgaagcatctgtcactatgtaattagaatattttctaaaatcttttgaaaggcttggactattgtaatcatttcctaagtttacataaagtctgtagtcactcttcctctctccactctacgtgccactgctggggtaatttggcagagatttagcttagatagtgtcacatgctcaaaaattttatctttgttgtctattagtaagttctagtttattgaactgctactgtcgattgctaactctcaaaaaaatccttcagttcactgtcagtatttccttttatgtttaatatgtttttactctttagcgaggttttatctgtggtgtgatcttatatga

SEQ ID NO: 149385 - DNA, 299 bp, Homo sapiens
ccgtccaatttattttctgaatattttccatctgctgttgctgaatctacagatgcagagctcctggatacgagagccaagtgtgctttgagagtagggtgggtgaggttgctaatgagtacaggggagcaggtgttgatcaggaggaccctgcactggggcatctggacgtcctgcctcaggacttgagactccagttggatggcacaggtagactcagcccaggtcaaagccgtccccttgaagtttctttttatcccaagctctttctggaccctggaattcggcatcccctaggc

SEQ ID NO: 149386 - DNA, 491 bp, Homo sapiens
acagagcctgcctgctgggatgtagaggaggggggttccagcccctcctgtcccgcgtcaggtctgtagcacacaagctgcctgcccagggtcctcaaatcagctgtcttcactctgacctgcaggtctcggctcctgcatactgcaagctgggtgccttccttctacagaacccatgcccccttgcaaggaaaccatggaatttccccaggagtcttcgacaactccaggccacaggaaggtcacaaatggtcagaaaaggaatgaatttgaaggaggaagaaccagccctgcccacgttgtctggggcccctcccaaggggacaggaaagctccacaaacaggacctggaacatccagggagcgtctgggctgcagaagcccgctgtgcaaatgtgggaacggaggtagcttgtctaagctagcccagaggctgatccacatcaagccccgtcacagctgctgctcctgccctgtactcccagttgaca

SEQ ID NO: 149387 - DNA, 280 bp, Homo sapiens
ggtcatcctcattgctacactcccaccagtgccgtgagagcttacaaatgccatggaaatgtcagcaagttactgtcaggcctctgagcccaaacctgcatgtattcatccagatggcctgaagaatcacaaaagaagtgaaaatggcctgttcctaccttaactgacaatattaccttgtgaaattccttctcctggctcatcctggctcaaaagctcccccactgagcaccttgtgacccccacccctgccagccagagaacaaccccctttgactgt

SEQ ID NO: 149388 - DNA, 260 bp, Homo sapiens
accttgagctacttgttccgctgtgtagtgcctcattgttctcatctgcagcatgaggctcagctttagagaagacaatgggcataaagcctgaccgtgttcctggaacccctctcgtatttgtatagctttctctttcctccatttgctacagggcacaggcacactaatgagcagcatggttttctgtttcttaacggcattgtggtatattaggagtctttggttataagagacagaaaactcaccttagaccagct

SEQ ID NO: 149389 - DNA, 379 bp, Homo sapiens
tctgcctttggggttcaagcgattctcctacctcagcctcccaagttcctgggattacaggtgcacgtaacatcacccatctagtttttgtatttttagtagacatggtgtttcaccatggtggccaggctggttttgaacttctgacctcaggtgatctgcccaccttggcctcccagtgtgctatgattacaggcttgagccactacacttcgcctgtgttatgtattttagatatagatttataaataaggaacatttctaacattttaaaataatggctgcatcattattttccaccagcagtcaacatgggtttcatttttattgcatcatcaacagatttggtgtatcaaaaaaaaattatagtggccattct

SEQ ID NO: 149390 - DNA, 133 bp, Homo sapiens
actgtggctactacagctaattggttactggctttgccaaaggaggctgtatctgtaccttctccatctcttttagcgtatctttggaaaaagaactctctctactccactgttctgaatgccattcctccag

SEQ ID NO: 149391 - DNA, 420 bp, Homo sapiens
tgcttagagactgtcctttacacacttccaaaggctggtctgattgcaaaatccaatacagatcaacctggattatctgaggtgtgtaactcagccacaattctgacacaaaaaatgagatctccccaccccgcccccaacaaaaaaaagctgagatcatttggaatccaaagaggaaatatggttttcctgaatttgacctggtaatatcacaattccatgccacagctaagcacagttacgtttccttttactgttatactgagaaaaacaagatcatttggccacatgaacatgtgcatttgatcatttaaaagctattttagtaggggggaaatgtttggaatgcttctgaccataaaaataattctgggcaggcacagtggctcatacctgtaatcccaacactttgggaggctg

SEQ ID NO: 149392 - DNA, 386 bp, Homo sapiens
ctaatccttgcttctcagggggctgaggcaggaggactgcttgagtctagtttagttgactagcctgagcaatatggtaagatcctgtctcaaaataaaaataaaaacaaaatcttagaataaaaaaatacaaaccaaagaaagaaactgtatggactaaacaccagaatgggaaatgacagagaaaagagccaggacacttgtaggtaagtcaatagaaagtatctaatctgaaaaaaagagagaaaaaaattgaaaacagtgaacaaagccttacagatctgtaggacaacagcaaggggtcttaatgtcttaatgacagttgggtcattaaatcctataagggggccaggcgcagtggctcacgcctgtaatcccagcacttt

SEQ ID NO: 149393 - DNA, 246 bp, Homo sapiens
ctaatccttgcttctcagggggctgaggcaggaggactgcttgagtctagtttagttgactagcctgagcaatatggtaagatcctgtctcaaaataaaaataaaaacaaaatcttagaataaaaaaatacaaaccaaagaaagaaactaaaaaattagccgggcgtggtggcgggtgcctatagtcccagctactcgggaggctgaggcaggagaatggcatgaacccaggaggcgaagcttgca

SEQ ID NO: 149394 - DNA, 473 bp, Homo sapiens
tatttaatagagatccttttacctaaagtagtggcagcaatgtcaaaggtgccactcagcattgcctactgggtgtgtttattacaggcacttcattttcttcttgtaaagtaattcatattcattgcagaaattgtggaatgtatgagaagttaaaagcaggggataaaaaacatggttaacattttttcttgtgaatttttgagctgttctcctataattgagagcaagttatgtatacagtttgtatcaaggcataactaaatataaattttgaattttatgtgttttcattaacattcgtaaacataatcagcattcaatttattccagaaacatttattgaatacccaatataatggttaagagtacaagttctggaattagttccctcatctgtataaatacaagtaatagtacagtactttattgggttgttgtgaacattaaaatgcttaaaactgtgcctagca

SEQ ID NO: 149395 - DNA, 778 bp, Homo sapiens
aactggctctgaggctgcacctggatgctttattagtgatggtcacttaaaatgacccttcaaaatggactgtgtgccaggaagggcgctgattcatgtgtggtatcgcctttagtcctcatggggacttagtgaggtacctgctctctgttgtctaggtgaggaaactcaaggcatgggaggtgtgctgacttgtctgacagcacaaaattagtgctgggtggagccaattcatccccagggactgtaactccaaagccccatggttggatctgttggttcccagcagtgtgggttcgaattcatgttctacctcataccagctgcctaacctctgtcaagtcatgttacctccctgagcctccctgagttttcttctctataaaactgaaacaaggtaggtaaagttttcccatgataacacctactttagagattttcagcaagaaccaaagagagcatgtagaagcatctaggaccgtgtcggctgcacggagctatctccttcaagttctcttagtcccctccttacacacagtggacagcatgactcagagggcctccctgatgcctgcatgtgctggtctcagccctgtgttccccttgaactctggcctgctcactgtcctcttgtagctttggatgtccgcatccaagcccatctcactgcacccttgagactcagctctgggatctcttcagctccagccctctaactcagctctacatgagccagtgacctcagggccacactcaggagtttgttgcctgctccttc

SEQ ID NO: 149396 - DNA, 722 bp, Homo sapiens
tctcacggttgcacctgagaagtcagctctctcctcctcctcccgcccccttcccttcctcctccctccttagaagtgaatcttatttttcttgtactgtttttgttaagagttacttttagtattctgcagtttcatgatatcaaggggtgaacttttttttattctgctaggaggtgtctattttgaaaaattattaggtatcatctcctcaagtgttatcactgccacattttatctcttttctcctttgggaactccagatgactgttagaccttcccattctttaaacaaggtcttgctgtttcccaggctggagtgctgggaccacaggcacgtgccaccaagcccgggtaattttattttttgtaggcgtggggggctccctttgttgcccagtctggttgaccttcccattattcatctattttattttcctttgcttccattatctctttgtgttacattgcagataatttcttttgctccatcttctggttcagattttcttcttagtcacatttcatctgttgctaaactatccactgagttaaattttaggtattttatttttaacttctagtttttttcaaatatgcttttatatttttctatcctttaagtattttctaacatcttttatatctgtacgctcactaaatctttctccagttaatgttttctttttttctttttttttgagacagagttttgctcttgc

SEQ ID NO: 149397 - DNA, 228 bp, Homo sapiens
catggcattttattgtaaagtacctggaacaaaacccagcacacccagtagatgctaaaaaccacatgcattgcatgtattcatattataaattctaagtagagatttttttctaagcatatagaaaagtgtgtttgtatggattatgtaaagaaatatgtaggctagaaaaacattaattgtaatactagtggaaatactaattttcagtgttgaagtatttggtgt

SEQ ID NO: 149398 - DNA, 357 bp, Homo sapiens
ttaactataaggcagcttccagttatgactgaatggtcttaaaacatccatattatttttttagacaaaggaatgctctatactgcacagtcagaagttagatcttcctgagttatggcaaagttacgacactggggtcctcatataaaagcataagactcagcaaatagaggacaatcttcttcacgcatgcataaattagaaggagctacagcctgtcaatacgatttcagacacacaaaatcattgtgaggctaaacttagcagagacccatgaaaatacccactataggatcagaccaattaactgatcaaaagagtagctgcaagaaatttaacttatttaatatataacca

SEQ ID NO: 149399 - DNA, 138 bp, Homo sapiens
gccagtgtagctggaacagggcaagaagcagtaggaggtcaagtgaaggaaaacaaaacaagctcctggggtgaagtgacagtttgctgtatggactggatatctatgttcatttcctcagcttccatcgtattatag

SEQ ID NO: 149400 - DNA, 181 bp, Homo sapiens
catgttttcacttagggggcagcccttcctgtcccaccatgactgaccaattacactagccaaacctcaccaactcctaagttcagagccaggcctggctctgaacttaggaacagctgcctgactgcctgaaaggttgtgatgtggtagttattccggctggagtccccagaaagccagg

SEQ ID NO: 149401 - DNA, 197 bp, Homo sapiens
aaggcttatctcctctcagataaagaccaacagtccttggatggggacagccagttggctgtgaaatgcatgcagagaagctgagcttcagcctaagagaagagcgaattaaagtgacagaagccctttgggaggcggaggagggctgactgcttgagcccaggagtttgagaccagcctggacaacatagcaacct

SEQ ID NO: 149402 - DNA, 393 bp, Homo sapiens
agaactcataaagaaaactagaaaataatttgaaattaatgaaaacaaacacatatagcaaaatctatgggatacagaaacaagtaactacatttaaaaagaagaaagatcttgaattggcaacctaaacttctacctcaagaaactataaaaagaaaactcaatacaaactaagcagaaacaagggggaaaaaatacagctaatacaaatgaaatatagactagaaaaataatagatgatcaacaaaaccaaaagtttattctttaaaatgatgaggccgagcacaatggttgacacctataatcccagcactttgggaagccaaagtgggaggactgcttgaagccaggagtttgagaccagcctggaaaacatagcaagaccctgtctct

SEQ ID NO: 149403 - DNA, 966 bp, Homo sapiens
gtttcctgttgtttgtttgatgatctcaaatggagtccacaggcgtgcctgccaccacctcaacaccaagacgtgctgcacaagggagggggtggtacaagaacaggaggagagacatagacacagatccatagggggaaaaggccatgtgaccacagaggcagagatgaagtgctgcagccataagccaaggaactccaagattgcaggtcaccaccagaagctggaagaggcatgaaggatcttcccctggagacttcagagttggcttctggaaaagcccaaaaggatgtgtcttcttcatctctgaatcaaccaaacttcagttcccatggcctgcaagaactgtctccctgttctcagcaaattgtaccccattcttccaatcactcaaacccaaactctggaaatatctttgatccctttcttcattgacttcacatctcatccatcaccaatattctcttgcctctaacttcaaaacatatccagagtctctgcatatcatattcatattgctgaaaagcaattgtaacaggaaaaatctaagaaaaaaaagaagcattgtatacagaagtacaaagataagaaaaacagctgacttcttctcagaatctatgcaagtcagaaaagagtggaggcaaaatgaaggtaaagacaacaccaaatgcaggtgagcagatcaacaggaactctcattcgttgctggtgggagtgcaaaatggtacagccactttggaagaaaatctggcagtttcttacaaagctaaacatcctcctgcaatacaatcctcaggtaattcccttggtatttactcaaatgaacagaaaacttatgtccatgcaaaatcctgcacacaaatgtttatagtggtttatccataagtgccctaaactgaaataatgcccgtagcggccacactttttttttttaaattaatataataataaataattttaatttta

SEQ ID NO: 149404 - DNA, 367 bp, Homo sapiens
ttacactttctgggaccaaaagccatttctaactatattaaaaccagaaaaagaaaaacacacacacactcacaatgctgtcagaagagctaatataatttgtacaatggaacagtgttttttgtttaaccaaataagaacgctgcagcatcgtttcttgagagcttatctccactctaaaattcacatctgttaatctcagccttaatcaattggtgtaaatgttacagaaagggaaggagcccctgtcaacaaatgaatcatactaacttttctctgaggcttctcagctctgatccggctgctgaaacagttgagctgaggggaaatctccaatagcttatttactttatggtacagagtatca

SEQ ID NO: 149405 - DNA, 477 bp, Homo sapiens
ggctaatgcctgagctcctgccctttctatgcagtgagggtcaagatcctcagctagtgtttgagggaactggtgtaacctgggtctctcattttctaccatccaagttgccacctctgtcggggtcccactctaatttgggcagccactaagcaatattttgaaatataccttgttcatgagtttaaaggatcaactggtaggtgtgtccattagcaaatcctatggaacaaatatctgctcttcctaacccaaataactagcatgcatagcgggatctatgctcggtccgtacgtcactcagtgactgggaaggcacgctctccatccatgacagtgtcatgtgctctgaccgtaccattagcctgaattctactagtccctccacattccatttccttgcgcatgggatcgcaaagagaaagacctagtctgtgccggacatgtctataggcggggggtggatcactgtatgtt

SEQ ID NO: 149406 - DNA, 437 bp, Homo sapiens
agttgggtgggcctggagggtgggcagccagggactacctctcgtctcagtggtgttcgataagcaatttaagagccagatcctgggggtctgaaagtgatgaaaacccagcccttgcccaaataacagagcctgaggctttctattgcccagcaagttgaactcagcagggaagtgaaaaggtgtcagagagaaactcagggcataagttcccagcatttattattgtttatctgtgcatgtcagataagagtacagtggctggagccccttaccctgtccatgtgagcaagaactgcatgtaagggtgacaaaggaatgaatttccatatccattagaaaactcagctcccagatagcaaaccctgaagagagacatgcatattgattcttgaaatgaaatattttcaagctgacagtttggtagcaataaacgt

SEQ ID NO: 149407 - DNA, 876 bp, Homo sapiens
  misc_feature (24)..(24): n is a, c, g, or t
  misc_feature (191)..(191): n is a, c, g, or t
atgtgaggaagggcatacggagantagtgaaataagtgatagggaatgacgctgttgagagaggtgtgtgggcataagtgaggactagtatatggaacaggttctgttgggtgggatagtggcatggcattgttgggggaaacgaggaaacacggcgttaaaagtgaggggaataaaggataacactaaanctatatagtactaattgcaatagaagtagagggaagcgaagggatcaattaattaaacctctcactagaaggcatatggggtcggcaagaagctccaaccgtttgagggccacaagtagggcggaaggtagtttatttatgttcattaattaagaaaagcaataggtttatttcttaagagaagaaataatattaaattgtatgcaaaatttaaatcagagaatgaaaaaatgaagaggaagaaaaaacgagtaagtgcaataaatacaaaataataaaatcatgattgatattaatattaatgcagtgccataaatatttgctttaaatgtaaatgttctaactataccaattaaaggcaatgatttttttttaattttattattattatactttaagttttagggtacatgtgcacaatgtgcaggttagttacatatgtatacatgtgccatgttggtgtgctgcacccattaactcgtcatttaacattaggtatatctcctaatgctgtccctcccccctccccccaccccacaacagttcccggtgtgtgatgttccccttcctgtgtccatgtgttctcattgttcgattcccacctatgagtgagaacatgcagtgtttggttttttgtccttgcgatagtttgctgagaatgatggtttccagtttcatccatgtc

SEQ ID NO: 149408 - DNA, 328 bp, Homo sapiens
tgatcaagtgtcagggagaggcccaggcgacgggtttcctgggggcaggagggccgggggcaccgacagataaacaacagaggcaagaggagcaaggggcaccacagatgtaacacacagggagtgaggggacagtgagtgagggccacacggtgtgggcagcacagactcgcacaccgtgaattcacctgcacttcaaagcagccctgtgaggcggggtttctcattccaatttttactgatgaggaatctaagtctcgagggatgaaggaacttggccatggccataaaactggtcagtggcagagctgggatgagaagccccatg

SEQ ID NO: 149409 - DNA, 444 bp, Homo sapiens
taaaaccaatgagactgcaaaataccaagtgagggttaataaaaacatggacaggaaagggacaaggatagataagaaaaatgaaagagacagaacacacggtgactggtctgagggaaaaaagggagcagaaaactgttcaaaggcaactggtgttttgagtctgggttacagggaggttagccaagcaaacaacagaggtaggagtaggttgagaggaaggagaccgtcaggggtgcagatgggttgttttacctgtggtgactttcagatttagggagagatttagagatatcaaatggacaactggagatgcaggagaatcttatatgcggagggttaatttttcagtccataatggtgattcccaaatccatatgaccatcagaatcagctggggaacctgtcctcccccaaaagtcccaccctaagaaatcctaagta

SEQ ID NO: 149410 - DNA, 382 bp, Homo sapiens
gcggccgcctactactactactgctcgaattcaagcttctaacgatgtacggggacatgtcttactttctggctatagtttttaatagacttttcaactatatggctcattttaactgaaggtttaaaaagtcattttgttgtctcagaggtataaaattaccatcaaataagcagacatatgaaggaaaagaaatataaaatgcttttctggacctctaaatgaattgttaaaaaccctgcaaaccaaagcaacatttctcctctgaaattatattttgcaaacatattttagaaggaaaacttgaactgtcaaaagtagtgaaatgtctccagtgtttatggatgtaataagtgaattagctgaaaccccatccaaaaaa

SEQ ID NO: 149411 - DNA, 329 bp, Homo sapiens
ggtgttcacagtcaggtgaataggaagtggcagtgcaggtgacagtgtttggggtgtagacagagttctgtggcaagaaacacaggggccctgctgaatccagttattgctattcgcttatcagtcttccttccaggggacctcttttgcaggttctttcattgggaagaggctctgtttaaggacctagcttgctgtctgctgccctaggggctgaccatgctcttcagcaatttgggttataatgtgaggcatctattcttatttctagctttcttccttgtggagccattattggacttaggaagttggacttgggcaagtcactg

SEQ ID NO: 149412 - DNA, 354 bp, Homo sapiens
tactcgtctactcatggcaaatctaaaaccttctacttcagcttaggcaagacatcttcttgggtcagtggtagatgtgaacaatcttcgtgggtcagtggtagtttaacagtttgttaaactgttgttaatcaatgtatctactctcggtgattttaagagagaaaagaagactttttgtttttgtctgagaggagtttttaacctggaaagacagctgaaacgttatctgaaatgtgaaatgttaaacattttattattaagagacagtgtgttttttattttactcacacagtatgtgtgcatttgtgttttctgcgactgcacatttgtaataataggctcatattttgt

SEQ ID NO: 149413 - DNA, 461 bp, Homo sapiens
ccttggtggctctcatctgctttccagtggtacagcagtgattccctgtaaaccagctaagtcagtatctttaagtgacatttgcttaactgtcttccctgaaaaattggggtgaatttggctgtaggttagtttttagtatatttgtctctgttttccaccagattataatcttttttggggagggactttttacccccttcgaagcatcttgtgctttttaaaccagataagaatatgtattctttatttgattcagaaagaatggtcaacaacttgaaaccagctttatatagaagcacatggcattaaatacaatgcttcagaatcagtgtttctttccttctttgtcattttccttataatggtaagtgccagtgtagttttccttgtcttaggagaattcatacctgatgactataatggtttgtgagaaaaacccacactctaggtttcaggca

SEQ ID NO: 149414 - DNA, 492 bp, Homo sapiens
tgtgaagagatcttgaggtgatcctttcttctccatggtcaggcagatatccaggtatttggagtgcccacttgtctgattcaacagcccgacctgccccaccattcctagacatagatagtggtgcagtgagaccctctctgcttcatgtccaggcagatcctgaggcattcagagcacctgtttccctggttcagcagcctgagtcataccacccctccatgcagaaatcttggtgcaggggtgctgtctctgccccatgcctaggaagatctccaggtatctagagcacccactctcctagattgagcttcagctgcccctattaccatgcagagatcttgaagccaaggtttctcagctccacatgtaggcacacttctgggtacatggtgaccacccactggattctcctttggcactggtgcttgtgcctgccatcagggaacctgctggcagacttgcttggtccagccctacccttcatggctc

SEQ ID NO: 149415 - DNA, 419 bp, Homo sapiens
taccgcatacaggggctgagcggcgggagctgaaaaccagacattccggtgtcaggctgagcgctccagtcatcagtagggaatagcagaataggcacgagagggcacctgtacaccttcagaccagcctgagtcataccacccctccatgcagaaatcttggtgcaggggtgctgtctctgccccatgcctaggaagatctccaggtatctagagcacccactctcctagattgagcttcagctgcccctattaccatgcagagatcttgaagccaaggtttctcagctccacatgtaggcacacttctgggtacatggtgaccacccactggattctcctttggcactggtgcttgtgcctgccatcagggaacctgctggcagacttgcttggtccagccctacccttcatggctc

SEQ ID NO: 149416 - DNA, 264 bp, Homo sapiens
cctattgctgtgtcctcttaacagaggaggaagctcagacttagatcccataagtggctcacctccttaagttcccacagttggagttagaagaatagcaggcaagagaaaaggacctcagaccaaaacacaactgatcgaggctgccccatctctcctgggatttttataaagggcccctcaagtaccaaattcctgtaaaacacagggataataattagaagcctggacagttccataaagaaggggagagggaggagaggg

SEQ ID NO: 149417 - DNA, 512 bp, Homo sapiens
ggcagatacctctactgctcagatcacacaaggtaatgaacatgtgaccgggtctggctacatgactcttgcggtccagtgcaaaacgaaaacacaggctcttgttcaaagtgactatgaatttcaagatgaccatggcagaacatgaaagcaagcatggggcccttctgggcaccagccatgtatgatggcacaggtcatgtgtgatggcacaggtcacgtgtgatgacacgggtcacgtgtgatgacacaggtcatggcctgagaggccggccctgtatgtgtgctccatagacaactactgtctgtgatggtcttcacagtggagcaggcgtggccttgtgcaggggaccccatcctgcaccccaacctgttgaaagccttggcctgtctcgcctcttaggtggcctcatgacagagttggaacagacctgccagtcaataacaccaccctctgaggacaaagactttcacaccccaggcatccaagcaggcatttgccaacctcaggc

SEQ ID NO: 149418 - DNA, 658 bp, Homo sapiens
actgtggcccctccaaccaccctactttaagtggggtgggctcctaggggtacagaacgtgacctgcaggtatgagctccatccaccttgggtgccattaacgtgtggaaactgtggcctccgctacaacagtggatccaatttatccaccaaatatatgccgtgggcctaccaagtaccacaatggttgctacggcttaagtaaaagtctggtagttccaccgtcctcaaagccttggtttactggtttgataggcagaaaactgaaagaccaaaaagagaaacatcctctggatgttggactggcatgtggggcgtcacgctcaagtcacttgttctgtcactcagcctgccctgtgctgtgcagatgttccgaggtgcagtggcttcaggtcacagccgactctggggagcattttaagttccagagatgctgtgtgggtcctgctggctacacagccaagagtgcaggatgtgggtttgtggggacacagaagcagtggacgctggtgaaagtgcctacctgtggtctcagggagatcacttctcttcgtcctgcaattcaaggatgtcaacctgagagtagatgtcactgtgacatcctggaatgaggcttttctccacagtctcttctccaaggccactctcccttcctcct

SEQ ID NO: 149419 - DNA, 303 bp, Homo sapiens
gcatgtgccaccacacctggctaatttttgtattttttgtagagacagggttttgccatgttggccaggctggtcttgaactcctaggctcaagcaattcgcctgcctcggtctcccacagtgctgggattacaggcatgagtcactttgcctggcctctttcctgagatgcatggtgcttatgataagcacacattatgtctaggtccctgcttcaagtgtggcactttggacacatgctttccacattccgattttgtgccaaaacctatgagatgattgcaatgtgggaatcatggatgg

SEQ ID NO: 149420 - DNA, 465 bp, Homo sapiens
tcaacgctttatacttcttattcaggcattaggagggcataagtctggtgatcctgcttttagtgatgctaggattgactagccatgtgcatgattgtattttcctcatggtttagctctatttatgatgattgccctgaatcacttatttcattaagagttgcaaatggccatttttctgattcttttattccttctaaatttagtgcctggaattacagtgtaatgaaggtctcatcactcggattgtttggttaccaaaaatgcaatttagtattttagcaaaaatacagtgggaaggataggacatatctgattgttgattttttttttttggagacagagtcgggtttggtaacccaggctggagcgcagtggtgtgatctcagctcactgcaacctccgcctcccagtttcaaatgattctcctgcgtcagcctcccgagtagctgggattacaggtgc

SEQ ID NO: 149421 - DNA, 1149 bp, Homo sapiens
tggccttgaaaaatgacaccccacattcctggagcggtactggagccaccagagtgagcagaatgaagctgtttttaaagcctcattcccaaagatttgtcctttcggaactgtctcgtcagacctgtctggtaatactctggaagactccacatgcaagattgtctgtatttgacctgacttggagatttactggtttctggtatttacagaaatctctgtcctatccttactcaacaaccaagctaaccaaatagagacttcagttgccacaagtaacaaagagtacagactttgtagaattagttcaaaaaaattattaaatatacaaaacagctaaaaaattgcagcaccaacaatatactctggggagggagataatgattttaagaggtgtcacaatgtattattttaagtagtcatcaacagaaattacaaggcatgtaaagaaacaaagtatggctctataataggaaattaagcaactaatagaaacggttccgagaaagtacagactttagtcttactagaaaatactttaaaattggttattttaaatgtgctccaagagctaccagaatgtgtgtctaaacaactgcagtaaattatgaaaccaatgtctcaccaaatgcaaatattcacaaagggatcgaaattacatatttttgaaaaatttatagaaattctggagttaaaaagtacaactaaaatgaaaatttcactataggagctgagcacaaaatttgaagaagcagaagagagtatagcaaacttgaagataggtcaattgatattatctagtttgaagaacaagaagaaagaaaatgaacacagctttggaggcctttgggacatcagcaacaaaacaagatgtagattagaagaacttcagaaagaagggagaccagaaagggatagaaagaatatttgaagaaataacgaatcaaaacttcccaaacttgatggaaaacatcaatctacatatctaagaagctcaacaaactgcaagtagagtaaactcaaagagatacacagtcagacacatcataatcaaactgttgagagaatcttgaaagcacgagagagagacaagtcatgttcaaggatcctcagtaagctgatttctcacaataaaccacgatcggccag

SEQ ID NO: 149422 - DNA, 467 bp, Homo sapiens
caaaacccaaccaaatgtcttctttccataggcattcaccagttcttctagatgatggtcactcctttctccatgttcccattagccctttgctcattactttattagagccttagcatcttctctttcagtttctttcctatgatagaaggaagactctggaaggcagagcctatctcagttttctttgtaaccagtatctagcatttctgcctggcatacagtaatcactttgtacacaagtaccgaactcaatacatgaaattgagttgtatctgatcacagatacgtgtgggttggaagggttaaggagtctggaaattgcttcatggcacaaggtagattttgatattgatcctagaatcacaggtttacaacaggcagagacagaaaggctggaaactccaggtagagaaaacagcataagaaaaggcatggattaagaaaacagagggctgggcacagtg

SEQ ID NO: 149423 - DNA, 254 bp, Homo sapiens
gccacacgcacacactcactggcatatgcacagcacacacacacgtccacttactcccattacacactcacatgcacacacatatgcacaggcacacccagacacgcccacttattccaacacactcacatgcacacacatatgcacaggcacactcagacacacccacttactcccattacacactcacatgcacactcacatgcacacactcagacacgcccacttactttcattacacacatgcacacaca

SEQ ID NO: 149424 - DNA, 657 bp, Homo sapiens
  misc_feature (63)..(63): n is a, c, g, or t
  misc_feature (71)..(71): n is a, c, g, or t
gagttcgacttaaaataattttcttaatttttaatcatagaaccaaccccgtcgagtctacgnttcatagnattcaagcaccgcgccctcctcagcagcctgagcatctctacagggatccacctccacggaagagagctccaggtcttgaatctgcctgcatcctgctgcaacagcagctctgatgttttctttgccttcctgccagttttcctgttcgtcgattctggctgcctttttgccgaggccaactagcaccacgctggggaagtcctgatgcagaccataaaagtttcgagtcttgcctgccttcagaggtggtccagatatgttcaaagtctctctcagctttccagctatcaatttatcaagattctctcctgcacttgtgaactgtggcacatcatcttctttttctttggaatagattcctaaaacaaggcccttcgtcatgtctgcagcggagagaccccggctcccgaaacatctcacggccagacgtcagacgatgactcgccccacccaatgtttgtattttagtagagagagggtttctctatgttggtcaggctggtctcaaacctcgacctcagttgatctgtctgcctcggtctcccaaagtgctgagattacaggcgtgagccactgcgcccagcc

SEQ ID NO: 149425 - DNA, 571 bp, Homo sapiens
cagtggagcagaatgaatggaacccacatgatccgctggggtgcatcctggtacgcccttgccctgctgtaattgtgaatggacacatgcaacaagcccagccttaggagagtgtgatcatcaagggctcacacctctcaggaatgaagagttggttcacaccaccaggcacctggaaataccactggcccaggagcaccttacaccatgttgttggcttcaggtcctctgggatttctcagttaaaaaagaaaagcagaccggcgcagtggctcacgcctgtaatcccagcactttgggaggctgaggtgagcagatcacctgaggtcaggagtttgagaccagcctggccaatatggtgaaaccccatctgtactaaaaatacaaaaactcctgggcgtggtggtgcgcacctgtaatcccagctacttgggaggctgaggcaggagaattgcttgaaccctggaggcagaggttgcagtgagccaagatcgcaccactgcactccagcctgggtgacagagcaagattctgtctcaaaataaataaataaataaataaataaataaat

SEQ ID NO: 149426 - DNA, 167 bp, Homo sapiens
aactgtttcatgccagagctgagaaactgtgatgaattaagcaatcttcaatcatgtctctcaaccaccttttcttgataggaattcagcaaactttcctcctactcctgaagtataactccaaaaggagttaaaagtttggtgtctctggaggcagagaaatctta

SEQ ID NO: 149427 - DNA, 476 bp, Homo sapiens
tccttccacctaagcttggtgagctttggaactggtggtaagaactgatccaaagtgtgtgctttaacaaatccttccaaagaaaacttggaaatcagctatttaaacttggagtccacttctctgtaggaagggcattcatttgaacacaaatttagttcctgcgccataatgtgcagtgttaagagtaaccctgaacaatgcatttgctgcatggaatagctttctcagtacaactgtgtagtgctgtagagctccctttttgcccctggaattagccccaataccccccgttgacagcttcaacaagtgggatccaggtatgacatctgagaagtgagtaaaataaggctccagtcgacaatggggcaatggaagtggccaggcagccaggctctgggcagcaaccacaccagaggctagctcctggaggcaaactctatgattgatgtgatgaagtggggaaagggaagggg

SEQ ID NO: 149428 - DNA, 400 bp, Homo sapiens
caaccaaccaaacaaacctcacaaaactactgtctgcagttttcaagtgtgcagtatattgctattaactgaagtcaccgtgatgtagacttcttgaacttattctgcctgtctaaatgaaattttgttttctttgaccatcgtctccccggtccccccgctctccagtccttggtaaccacaattctactttctgcttctatgagttcgacttgtagagtccacttagaagtgagatcatgctgtgtttgtctttctgtgccttacttatttcccttaaaataatgccctccaggtccatctatgttgttccaaatgatggtatttccaccttttttaaggctgaacagtactccactgtgtttttagatcacattttccgtatccatccattgatgca

SEQ ID NO: 149429 - DNA, 185 bp, Homo sapiens
acccccgcctgacacctcctctgataccctctgcctgacacccctctgcctggtaccccctccacctgacacccctctgcctgacaccccctctgcctgacacccctctgcctgacaccccctctgcctgacagcccctctgacaccgcctattttacaccaacccctgttcggttgagcggaga

SEQ ID NO: 149430 - DNA, 300 bp, Homo sapiens
caaggcctttttagttcacccaaaagccagatgactcccgatatgtgggcaagcccaacgaagatcagctactttatcaagattagctgctttcattttttttaaataagcctatttccgataattgtaggtttatgatcagttgctttgcttttcaaagtataacatgcatactaggatcttgttagaatgagattctgattctgtagttttggaatgggtttgagaatctgcatttctttcttttttctttctttctttttcttgagatggagttttactttgtcgcacaggctggag

SEQ ID NO: 149431 - DNA, 248 bp, Homo sapiens
aaggcaaacgggtcactggaggttttacggccccagctctggccctctgcctccctctctctcatcccaccgggggctgggagaggccagggccttcccccgagagttggattgtcatctgacacactgtggacagttgttctagcccaggtcttggggaacgaaacctcactttactttttctagatcttctcccttcatctctatctccctcttctgtctctctgtctctctgtctttctgtgtct

SEQ ID NO: 149432 - DNA, 340 bp, Homo sapiens
gaggtttaagaatggggatgagatgagcttcctttccaggagggctctactcagaagcttttcctgatgggagcctctggcttttgcctctgcctcatggagttttctatccactgtgaccttcatctttaccccaatcccagggtttggcctggattcctgagagggctctctcctgacaaatggtagcactagtggcatcttttaactgttcaagccaagctgttggggtagaatgatcccccaaaggattaaagctttgtggggaccttggaggcagggaaggaaaaatccatatgctgagtgtctgcatggtgttcctaagtatgagatctcatta

SEQ ID NO: 149433 - DNA, 122 bp, Homo sapiens
cattctcagaatgagaaagacaatgaacaataaaacaacacaaagttcaaaaataaatattaccaggaatctgagatgaaattaaggatatgcagcaatgaaatttaatgaatttacctttg

SEQ ID NO: 149434 - DNA, 257 bp, Homo sapiens
cccgtgctcaggaacttccagctccgtccctgtggccagtgccctgacctcggggtctgacagcccctgtctagacactgccatgtttcctgctgcctggactctggcctgctgcccagatcctggcctcagccctcactcccttcattcggctcaccagaccctggaatcttgccaaagcccagctgcaggtgcttatctgaatcacattcagcttttaaatcccccaggtggtagcccaggggtctatacgccca

SEQ ID NO: 149435 - DNA, 389 bp, Homo sapiens
atgagctgttcctagttcctccctccccagcccatcttcagctagacctaacctccctctattctaaagctctgggaaagtctggagctaagaccattaatttcaaggctccctggaccaccttaaagccaggaaactgatccatcccacacctgtcttcgtttctctcttcttttccataagacctcttactcatcactggcccaccgttggctggctttctccacctcagcatttcgcactgtgggttaccatgtggctggatgtgctatgaggaaaacaatttcacttcctttaaaacctgccatttgaaaatagtaacaccctggccacccaaatgaaaaaagtgagacttttcaaaaggaaagaaggaaaggaacaaagaagga

SEQ ID NO: 149436 - DNA, 512 bp, Homo sapiens
agttcctaaattccatctctccagagggaagaccatgaataataattgaaaaagcacagcactgagactcagataaccctgggttcgagcctcagtattgtgttacccagtacctttgggcattactgtgttacccagtacctttgggcatgttagttggttccttagaggggacttatctccctcatatcccttcttgtctgcatcttcagaggctcagtattcttatcttaaaataaggacaagaatatcttcttagcagtgatgttgtaaagattcaatgagataatgtacaaagctggcacagacagactctcaataaatggtatcttcaagactcttaacaacaaggctgggcatctgtaacaggcctcactactccatgaaccgtaacaggacatctccgtaagttgggcccaggaggccaaagtacagtgctgcaggagacccaggccaaaccaccagtctcagggctacctggatggagcaagatggtggctcctgaagttgga

SEQ ID NO: 149437 - DNA, 144 bp, Homo sapiens
tatttaaaatagtatattataaaattgcttgactgaagtttaacttctaaaaaatttgtactaaactgagtttttctgttcagtttcataagtgcttcttaaaatagacatgcattttgtggtagtctgttgaatgctgtttgg

SEQ ID NO: 149438 - DNA, 433 bp, Homo sapiens
ggctcctacaggaactttgggtccttttcctgctcctggcctcagtttctccatctgtaaaatgaggaggaggtgggtgggaggacatataacttgtagacccaatgttatatggaaactagggtcctgggattgagagtttttaaccctgactgggaaccatcatccctgcagcatgtgttaaatgcaggttcctgggctcaggctcactaatcagagaatctctagggtagggcctctgagtgtacatttttggggcaatttagaaaagggagattaaatgcacagaactccattttgaagtacacagttcagtggtttttagtatatttgcaacattctgcagctgtcaccactccctcactcaaatgccccgagagattccaattgctgccggtccctccgggcagccctacaggtgcatgtcctgagg

SEQ ID NO: 149439 - DNA, 239 bp, Homo sapiens
ccccgactagcccgacatgttccgacggacatcgtgatcctcgaggatcaccatgtccgtgtgtgtgtgtgtgttggggatgaggtgataggtgagtgggtaaactaagtgtttaggttccttctcaactcagacatttctgatgatgatgtcctaatgcagggatggtataacaaaatagatacaacatgcatagtctggcagatgaggaatattttaaatagctaccaatcatttag

SEQ ID NO: 149440 - DNA, 347 bp, Homo sapiens
atactggcagaagaaaggagaatgaagatatgaggatcaagctgtgctcggtggtgaccttgccaacaagaacacatgagttaacgtggcagaaaagcaacccccaccccaggaacactggctgtgagccctgcgacggcaccctttctcattcactgagttgcaccaaagtggacacgggttttcttgaccttattttctatgttgatgaaacacttgtcgctaattacactttcaaaagtagagagattcatcatttacatttcacgatatatgtaattgttttagtgtattcttgacagccctattttgttaaagagagttacatggccgggcatggtggctca

SEQ ID NO: 149441 - DNA, 382 bp, Homo sapiens
atgaaggtgcacggcagagatgtacagacagtggcttgttccgagagtggcaggaacctggagtgtacagagggttgtacgaagagacactacaaagtaggttggggtctggttttagagactgagatctctagtctggttctcggtgggcaagggagagccactgtgaggttctgagcgaggcaagtgaagtggccactgttctgtgttggacactggttctgacaaaggaaatgtaagtgaagcctgtagctggagcagctctttggagactgctctgctgatctagacgagaggcagggctgtggtccttagatgggtgggagagggagcagagttgagatgagaagagtattagcagagttagaatcgaccaggaccc

SEQ ID NO: 149442 - DNA, 508 bp, Homo sapiens
agtgggaaaaatttaacaactcccaaaatgggctatagtaatcaagacagtatggcagcagtacagaaataagtggttcaataaactgaacctcaaatgattaagaagacatcaagtaaatgggaaatgcaagatgtttgaataaattgagaaaactggatctctgagtgaaaagatacaggcctacatcataaacaaaaatttttggccaagcgccatggctcacacctttaatcccagcactttggaaggctgaggcaggcggatcatgacgtcaggagattgagaccatcctggccaacatagtgaaactccgtctctactaaaaatgcaaaaattagctggacgtggtggcacgtgcctgtaatcccagctactcgggaggctgaggcaggagaatcacttgggcccgggaggcggaggttgcagtgagccgagatcacgctcttgcactccagtgtgggcatacaggactgagactctgtctcaaacaaacaacaaaaagatc

SEQ ID NO: 149443 - DNA, 249 bp, Homo sapiens
agggtctcactatgttgcccaggctggagtgcagtggctattcacaggcgcgatcccactactgatcagcacgggagttttgacctgctccgtttccgacctgggccggttcacccctccttaggcaacctggtggtcccccgctcccgggaggtcaccatattgatgccgaactcagtgcggacacccgatcggcatagcgcactacagcccagaactcctgaactcaagggatcctccagcctcagc

SEQ ID NO: 149444 - DNA, 339 bp, Homo sapiens
ctaatctttatttctttttgcccgtctctactgcaaaaacaaaaattatccaggtgtggtgatgcgcacctgttatcccagctactcaggaggttgaggcacgagaatcacttgaacccaggaggcggaggttgcggtgagccaagctcacaccactgcactctgtcctgggcgacagagcgagacttcatctcaaaacaaacaaacaaacagataattcctctctcatacatttcccttcagaaaatagaggcaaacaaacaacaatctccgtgatagctggcacttttcttccacttctaactgccctatacaaagtgcaaaacgattctcacttca

SEQ ID NO: 149445 - DNA, 219 bp, Homo sapiens
caaatctctacgagtactcttatttcatatgacacttatttgcttataagttcgtcaactatgagtcagtgagttccccgagggcttgggactgtgtttcttttaccctctgtgcccagcatgtagcacagcactggacttgcaagatgtgtttgttatttgaattgaaatggagggaaatagcgaagtcgggacctctgaaatgaggggtccaggcca

SEQ ID NO: 149446 - DNA, 267 bp, Homo sapiens
caagggccctagacgtgaactgtggaagacgctgaataaggaccaacatgtctacagtccagcctagaaaacaggatgcctgtaatcattattcagtgagcagcaacctgcagcagctcctcctgactggcagatgggcctggcggccacccagaggctggggacacagcaagaatccagcacagcaccgatcccgattccctcctccccaaactacctgagccatggacctcattttgtggacaaaattaaacttgccactttcac

SEQ ID NO: 149447 - DNA, 440 bp, Homo sapiens
gaggaatcgccatagatacttctgaggggattttccaggccctgcccctcttctctgagaagcgccccctcccacaccataggtctcaatggccatgtttaccctgccggtcactttccctccatgacctctgctgatgaaaccaggggtggagacccagccactggacccaatccagaaactgggccgggctgtcaacctctgccaggaacttggaagtgggacatgagactggctcaatctagtgtccggttacctttagacactggcccagtgaggtcatgtgagcatgggggctgtgctttggggcctatgtgatgatgaatgagcgaaagcactgatcagatgtgcagagggaagcagaggcaggagagaacaagaatgacgaagcagctgccttagttcctgacaacttcccagcctccagttccaggccctgg

SEQ ID NO: 149448 - DNA, 430 bp, Homo sapiens
agctgtcagctttggaattcaaagaagtccccttcctaatggtctttgtcaagataaagaaatgaaagaaaggggccaagggttcgagagagttgagaccaaaccagaggctgatcctcccccttagctaatgcaatgggctaagcgagagcttcactgagctacatgtttagtggctgctggttaattacctgagtcttaaaataagaggggacgcccatgttgggaaggcccagtcaaattacaatatgggactgagccgctgggagctagtttccagtggagcacagggtctccaatgatggtgctgagaggccttaatacgccaccaggcatgctgctaagtgatattttaattaaaccttaagtgacatatctcctgtctgtgactctgatggctttttaattcaggtcccattgcagcacgact

SEQ ID NO: 149449 - DNA, 576 bp, Homo sapiens
ctccaccaactatacctgcacaaacaaaactgaatgaaacaaatgtggaacagtcccctacaatttatgagaaaccaagagcttcttaaaagctggcccaaaggaacctgcttttttcataagcataaatattacttcagattaagttcctgcttgacaatttcaaattcagacctttggaaattcattccaggaaacaatttacataaaaagaaattaaaaatgaacccacaagtcctccccattgtacatataatgagccaggatgggtaaaggcagaaggtatcttattattaaaaaaacaaaatactacatatgaatcccaccatgtataccagaagaggtgacaaaaataaggctatgacactatataaccgaaagactgggatgcaagtgatcagggttcccaatctctttctctggtctaaaaaatagagatctaactagattaagaagctcttaatggaaatttattatcagaatcacctggggaaccttatcaaactatactggcttaggtccaacatctactcagtacctctgggggtggggccaggtagtctacctttttatggg

SEQ ID NO: 149450 - DNA, 628 bp, Homo sapiens
tctccaaattgtctttctacctttttttcccttctttacattaacaccatttctatttgcttggtgttgattatatctctctataaggatttaggagaaaataatctgattatttaatacaaaataaaactatagattagatactgtgtctttctttgggaattcttcaccccattcttttgtggtttaaaacagttctgtcatttcctacatgttttctggattattttctggtttcttccttttatgtaaagccgtgagttggtgctttagcattctcaatatttgcattttcaaagaaaatcttttttaaatgaaccctctgcttccaactgacaggttttcaaattctgtgacaaaaaaaataggatgagggaagttttttcttgacttcttgaatctttgctctccgtgattagttccttaaagttatttattcttctgtatttctgaactcatggatttcccaaaagttctatgtgcacgtgtgttaggattttttgggtgtatggggattggcagtaatgttggtggttgtgtttttacaactctcactgaaaactccccagccctaccctaatctgagcaattctattagataggaaaaaaaaaaaaatccaggtctcat

SEQ ID NO: 149451 - DNA, 496 bp, Homo sapiens
ttcaaatattctgtcccaaggtcatatttcttcatatattttgtctagaaaatctggttgtacatatggcctgtatcaaacattttaatattcatacagcatattatacttgactaaatgcggcaaacacttattaagtgcctattgtatgaactcatttggctggcatcagaggcgcacgcaaatgaataatgatccgataggggagagaaacaaacagccagcaaaaatgtaaggccgaataaaataagcatgaaatgaaggcaggtataaaacctacaggtatggaaaaggatggataatttctggctgaagtggtatttgattgggcctggagcggggagagtgatcttgacaagcaaagaaaagcagcagagcatttcaggccagtccaggaggagggagcttaatgggctgaggttctggctccctgaagtgtgtggctcactcaagagaaagagaaagaacagtgttcctgcagtgatgagagacatgg

SEQ ID NO: 149452 - DNA, 537 bp, Homo sapiens
aacgtctggtgcaagctgagtggatgcagtgagaatgaaagggaatgaacccctgtggcaggaaaataaggccccagaatccggctccctggtgtgccccctctccttttggggcctgcttttgggtttccttctagaagggtcaaagtgccctcctgccggtgcagctcttccatggcccgctctgactctgggccttcacagtcatctggcccctgctttgacactccttttgctcaagtcacaatgggcagacccagacccaggtgtccagatcacgtaagaggtcagggtcatgcaagaagaaagacagtatccctggcttctgggccttttcatagctcttagggaatcatgccagcagctatttataggtagaaagaccctaacctgctcctgtagaaagaggatcactcagcaaaagagtagcaaaatacaggctattagcccagctctttcgctctcactagtgagcaactttctgatttgtatgataagtttgcctaaatagcccccctctcccccatcagattgcca

SEQ ID NO: 149453 - DNA, 681 bp, Homo sapiens
ccaaaatctcacactaaagaacttactcatgtaaccaaataccacctgttccccaaaaacctatggaaataaacaatttttaaaaagtagaaataaaggaaatgcaagagatagtatggtaattatgaagtgatgcaagaaaaaattttaaaggtatttgaacatatttagggcatagagaaagaagccatagaggagaggttaaagttaaaatgaaggactaaatcatggaggtctctctatctccaagatcagtagaaggaaatggtatcattgtcttgaggctacaatgagagatggcttttttccttgaagataaactctacacaattattaatattgcattttattttattccatatgtatttgtaacagtggagggtgagatgttgggtttaggataaacaggtggagatctgaaaatgtagcaggaagaaactgttgcattgtggaagataaatttgtagatggtggtttttaaagttggtggattatacaactaggcctcagttttctcttggcacttaaagcactgggactgaggtaagcttcaagaagggacttagatgtttaaactgtcactaaaaggaatgggagataacgatgctgaatcctgctttacctggcaaccctagatgaaggagaaaagtagatgtagtaaaatttctaaatagataagtg

SEQ ID NO: 149454 - DNA, 306 bp, Homo sapiens
ctcaacgctttatacttctctgttttttggtttttggtttctttttgagcacagagtttcattcttgttgcccaggctggagtgcaatggcacagtcttggctcaatgcaacctctgcctcccgggttcaagtgattctcctgcctcaatctctctcccccaaacatgtaaaattttcctcaagtggactctcaatcaaatgtatcaaaatattaatagattctgaaaagcccaagcagagcagcaaatgaagacgtatttatctgatctttctccgaaataaaatctcctataaataaacacctt

SEQ ID NO: 149455 - DNA, 317 bp, Homo sapiens
gcctgcaggagcgggtggaggaggccgccttagcaccttgtctctttgcctcgatcttttcctcgcaccttgagctgggtataaagccaaaccccggccttgcagaaaggatggagaggcttgatgagcgcggaggacagatgaatcattaagagcagacagcggcactgtagacatgcagtgcccgcggcatttaagtgcagggacacagctcttctggagtcagaaagccctgcaagtgcttcccgttaactgtcatcctagtgatgcaagactgccagcgaccgactctgctattgagtatcttcataccgctg

SEQ ID NO: 149456 - DNA, 463 bp, Homo sapiens
ccccctcttatatgcaaaggtctttgtgaatattctgtgtaattatttgctcctttttgctccccagcccctccacctcagatctggttagtgattccaggacagaattattgcttgctcatctgaacatcccccactgcatagcccagccagcactggacacacagtagacactcagtaaatgtttgttgggagaatgcaggctttgatgtagaaagccttcctagaattacttgctcttacctaacagtggtcttactgcttcttatacaaagactccaccacctgaggctttctgggactcagtttccctgtctgtaaagtgactatagagcaagcttatccaaccaacaggccgcatgcagcccaggacagctttgactgcagcccaacacaaattcttaaaatttctcataacattattagttcagcccaaagccaggtacaaaaatagcagcagctg

SEQ ID NO: 149457 - DNA, 209 bp, Homo sapiens
tatgtacacatatttgaggtgcttactttttttattcaattaacaatctagtagtttggaagctactgagtttgacagctgtttatttgcatctttaataggaagggcacttcaggagttaacaaagataaatgaaaaagaatcttgttatcacagacatcctgtggcagcttcttttttttcatttgttttctagaagaacgtgtaca

SEQ ID NO: 149458 - DNA, 943 bp, Homo sapiens
tgtctagtactgcactgtttgtattaggatagctttatagtatattttaatatttgataaggaaagcctccttcttcccttttctttttcaaaagtttcttagaaatttttccaaacttactcttcccagtgaaatttagaattatctcatcaagttcccctcaaaagtcttgaaggcactgagtatatagattaacctagggagggttgacatcttcacaataaggtgtcttctgatttatgcacacaatatgctttctcagggttttttttttttttgtcctaaaataaaatcataggttttaataaaggttgcatacatttctttgaaaatttacatttattttatactttttgatgctacctaaatgggatcaatgttttgaataaatggagacctctgaaaggtaccccacccaaaggaaaatagccaaactatatgaacaaaagattcaaggaagaggaagctcagcttccctcatagtaagcgaaaaccaaactgacatagtttttttccgtcagacttcaaaaaaataaataaataaaagaaagaaaacaaaaccaccaccaccaacaaaaagtgggtatgaggaaaagtcaaccaccacagctgcggaggatgccttggctgcacctataaaaattcagggtgcacatggctttgacttagaaaacccacttctgggttccatgctagagaaacacccctgacacagaatgtggtcagtaatgttcatttctccactattgcacacatgtaagtctgaaaagtaaatctttgctttaagtagttggtggtagtctatgctgatgggaaaatggaaacacaaagctgttaaatatttgattaaaatcacccaaaaagtcagttctcctttgtctttgtctctttccccagctgctgaattttgtattttctgttttttaagagagttgccttcaa

SEQ ID NO: 149459 - DNA, 320 bp, Homo sapiens
tctaataatcaattctcagcttaatctctacttatcaacaagcatttaacacatttctttcttgaaatacattctccttggctgctccttctcactgtcctttgctagacaatcctcatcttcctaatctttaatcgttggtgtgtcccagaacttgatcctaggaccctatttccacctacactcactttatagttaatatcatcctgcccctacggctttaaacatcctgttttataactccaaatcagccaggagcggtggctcacgcctgtaatcccagcactttgggaggccaaggcaggtggatcacaaagtca

SEQ ID NO: 149460 - DNA, 598 bp, Homo sapiens
tttcttaagtgatgcacgtgttttgtgaaatgtaaatgaggcgcaaatatattatgctggcgctccccgtagcgggtgtactgcgtaacattagccatgctcatctgaccaaaaacaggcaggatttatgcaggctgaatatatactttgcttaaaggacttgagaactgtgacaaagcaaatgttaagttcacgttccaaccgaaattaactttattaggagtgtcgttgtcgtatctctggccgtcctttcccttagaataataattgtcactttaaggtctttgcctggtgaagaagcacatagcgacctttctacatttgagataggtttgcgcggaacaaaagcaggcagacactgttttggatgtggatcattcagaaaaatagtccagcttttattattagtgttaaaattatctgcaaacctaggtttttgttttttatgttggggtggagaaatttctattgatgagcagattctctttgaaaaggaaaatgaaaggaatctccagagatgatttggcttactctcctctcttcaggtgattgtcaggttgatttgtgtcttaaagatctgtagtaagggaaacaaagt

SEQ ID NO: 149461 - DNA, 235 bp, Homo sapiens
gcatgcacggagaaagccatagttagatttatgaaaagctatatattgtcaaggtgggcacagcagaaggacaagaatgtgagggatctaggatgctagtgagaatgtggtttaattgaaggtcttggtcatgaggcccaggctaggtcgggggaaaaaggataaaaagggtgctgatagactaagggattgggaaggggtggagaaagtacaggtcttgctaagactggcaggt

SEQ ID NO: 149462 - DNA, 396 bp, Homo sapiens
tctcactaactagttagaggtctgggaatgcaggaaccaagagttttatctcctttggaaccttcttccattattgctcgcaaagcacaagtgttttggacataaataattgaatcagagagcaaaccatctaattcctcaaaattaatttaggctgagtacacaaacacatacataccagttatttcttttaagttctagggcactatattatcagtagctaaggttaacaacccttcttgttgagttgtcctaagtggtttattccatagtagttgctcccatacaatgtgggtagttgaactgagtgatcaccagttgcttcagacagtttttttttctatggcgttgagctattcacaggactgacttaaaaacaaaccaacagaagtttta

SEQ ID NO: 149463 - DNA, 443 bp, Homo sapiens
ccagcctgggcaacatagcaagaccccatctctacaaaaaatttaaaaattagctggaaacagtggctcacacctgtagccccagctacttggcaggctaaagcaggaggatcacttaaactcaggagtttgagacagcagagaaccataattgcaatactacactccagcctgggtgacagaacaagaccctgtctctaaaaagaaaatgcaaacatattatcaaataattcctgtttaaactggacataacaagcacagctacatgctgaacctcatcaaaggtgtcttttgtttggctcatgtacttttgaaaataaggatgaggcctggcacggtggctcctgtaatcccagcactttgggaggccaaggcgggtggatcgcttgagcctggggtttcagaccagcctgggcaacaaggtaagactccagctctacaaa

SEQ ID NO: 149464 - DNA, 494 bp, Homo sapiens
ggaagttacagtgagccgagatcgcaccactgcactccagcctcgtgacagagtgagactccatctcaaaacaaaaaccaaacaaacaaacaaacaaacaaaaaactgcccaagactccaacagaaattacttggtctccttccaggcgacactaagaagcccaatcctggctcttggaaatggtgtgggccaagaaaggaggaaatatttcacaggctaatactaataattgcttcattttataggtgcctgatgaagtgccaggcacctactatgatatactatgtacacacatgaatttctgttgtcatgcacagagactcacagattatatctattcaacaccatagaagccagtcaatctaggcaagaaacccagctggattatttccttgatatcatctacataaaatcagcctgttgactatttgatgcactccctctcacacttaaatttggtcaaccagtgttgctgtgtggctactgtaagcat

SEQ ID NO: 149465 - DNA, 220 bp, Homo sapiens
tcccctgcgtgtgtgctcgtgtgtgtgctgtgtgtgcgtgtgtgctgtgcgtttgtgtgtgctgtgcgtttgcgtgtgtgctgtgtgtgcatgtgtgtgcgtgtgtgtgccgtgcgtttgtgtgctgtgtgtgcgtgtgtgtgtgtgtgtgtgcgtgcgtgtgtgtgtatgaatgaagggacagagccagtatgaagaaagtaaaagttgaagattaggc

SEQ ID NO: 149466 - DNA, 281 bp, Homo sapiens
cttgaagttcattagcagagatgaggtcttgctatgttgcccaggccagtctcaaactcctgagctctagtgatcctcccacctcggcctcccaaaatgctggaattacaggtgtgagccactgtgcccggcctccatattgcttattttcttagataacctgtatgagttgataataagttactatttactgagcacttaccaggaattggaacccaattaatttcattctaacaataaattcatcagatggctatgctattgaaacttctaaaactagg

SEQ ID NO: 149467 - DNA, 393 bp, Homo sapiens
gtctgtggcttgcaggtgactgtcttctccccgcttcttcacaggggctcccctctgcacgtgtctgtgtccacgttgccccttatccaacaaggacacatttctattggactagggcccaccctagtgacctcattttaacctaattacctctttagagaccctatctccaaatacagtcacagtctaaggtactggggttatgagttcaacatataaactttgagggggacagaattcagcccctaacaggccttaaagctcagcccaggatgagccctggccagacagaaaaaaggccctaaaagccacttaagctactggcaacatctgaaactctcatttcctgatcctgggataaatcttcttctgaattaactgagcccagccctc

SEQ ID NO: 149468 - DNA, 461 bp, Homo sapiens
cacacacccaacacggtcacattcccaatcacatacaacacacacatgcattctcaaacacacacacggtcacattcacacgatcacatacaacacacacatgcattctcaaacacacctacacagtcacatgcacacacacacaaaacatacacatgcattctcatactctcacccacagtcacatgcattcacaacacacacatccattctcacacacacacccacagtcacatgtacacaatcacatacaacacacacatgcattctcatacactcttacacagtcacatgcaatcacatacaacacacatatgcattctcatacactctcacacacccacagtcgcatgcactcatacgccatcacatacacactcacataaacccagttaattacatgcacacaatcacatacaaaacacacatgcattctcatacactctcacacacccacattc

SEQ ID NO: 149469 - DNA, 410 bp, Homo sapiens
aattacatgggaggagtaccaggcagtcaatcatgagaaataataaacatgatcaaacttcattaaaaatgaaaaattaatcaagaatcacacatgggcaagcagcaggagccatgcaggaaagctctgaagggagggaggcggttgggttgctgagtgttaacacccctccagggaacatctccagcctgaccatatggatcagagtgaataacaccgagccacatgggtttggcctggcagggccgctgttgctggcaccgtttttgcctgttacctaggaacagagggggccaggattagacaacgcttcccaacatcaataggccaaatcacagcagaatcgaaagccaacttgaagataattgtccctgaacactgtcagctacattttttagagtttaaaactt

SEQ ID NO: 149470 - DNA, 366 bp, Homo sapiens
aaacatactaagtagccttgttttccaaggttataacatgctctggggacatgctcattagggggtcaggagaaggagccaagggcatttggaggcagccactattcctgactttcagattctcttctatcaaggaagaagaccaaaataaataatttccaggtagttttagcagaagtgcagcaagacccagggggtgagtacacatcacaaattcccaggaagatcaacgccatcccagctttgccaacaactgtttgagatgtttcgcaagtcagtgagcttctcggaacctgagtttcccttcttataaaatgaaggcatttgaatcccatctttttgaacaatactatgtcataattttat

SEQ ID NO: 149471 - DNA, 709 bp, Homo sapiens
ggagatgccagagagtacagaacttttcaaaagtgttcaggggaaatgcagaggaattaatttcttcctctgaatgttccttttttgtgtgctctgtgattcctgctggacagaaagtgtctggtaataggaaaagcaggagatttattatcaggcagaacttcctctgttccttgttatctgtgtggctcttgggcaagttacttccttacctaatttcttcatttgtagaatgatgaagagctgctttccaagtttgtgaggattacatgagataaggaatctcaaatgcccaagacctagtacatgctcagtaaacattagtatcttcagttttccctctttctagaaattagaacttttaataccatatcacagttatattgtaaaataaactctggggcaagtggattggctcacatctgtaatcccagtgctttgggaggccaaggtgggaggatcagttgtggccaggagtttgagaccagcctgagcaacatagtcggatccccatcccccttctaaattttttttttaaattagctgggcatggtggcatgcacctgtagtccgagctcctcaggaggctgaggctggaggatcgcttgagcccaggagtttgaggctgcagtgagctgtgatcttgtcactgcactccagcctgggtgacagaatgagaccttgtctctaaaagaaagaaggaaagaaa

SEQ ID NO: 149472 - DNA, 221 bp, Homo sapiens
agagttgtcgccaatgtcgggagccactccctcattcagtgagtgctgataagaccctcagctgagcactgaggatgtggggacgggaaggaggggaaccagatgtgttcccctcccccacaggcctgcagagtggagagagaaaaaaaatgctattaagagcacatgaaagctccaaatgtaggtaggaatcatcactgcccagaggggcagtcccaggg

SEQ ID NO: 149473 - DNA, 377 bp, Homo sapiens
ctgttccctggcttgttcatccatttgtcccctgctgtgagccagggacggtgctaggttctgggattgaaagatgaacaacaatcaccccagtgccccttctcctcttgtctcagcatcgagccttacggagcagtgtgcagagtgagagtctgaatggggggagcccagcgattggagaagagaaggtccaattttgcctgggctggggaaggaagagccttcatggagaaaactgagcgtccaagagaggggcatgtgctctgcacagggaacagaatgtgcgaaggcatgaggaaccacgcggctgtgtgcaagcagctggcatataccaggcacctcatggctgctagttaagtgtgggctggggattgtca

SEQ ID NO: 149474 - DNA, 277 bp, Homo sapiens
aaaattcactgagtgtcacgatgcttacctgtagtcccagctactgggaaggctgacatggtaggattgcttgagcctgggagtttgaggctacaatgagccatgattggaccactgaactccatcctaaatgacagggcaaggtcctgtttctaaagaaaaaaaggacattggaatcagggtcctctccatcctgaggtgcctacaaggcatctctctctgcaaacgagtaaacatcaccctccaactccttacagagtggagcagcaggaaaact

SEQ ID NO: 149475 - DNA, 281 bp, Homo sapiens
cctgtgaaaccatcaccataaacataaacataaacatcatctctaaaagtttcttcctttcctgtttgtgataagaacatttaacatgagctctactctcttaacaaatttttaaatatacaatacagtattgttaactatatgcactatgctgtacagcagctctctagcagttactcatcctgtataactgaaactatataccctttgatcaacaccttccagattctcccaccaccccagtctctggcaaccaccattctactctctgcttctatgag

SEQ ID NO: 149476 - DNA, 173 bp, Homo sapiens
cctacccttgtacttctgtcctgtactatcattacctctctacctccctcccttcctcccctgcccccactagaatggaagctcctggagggtggggcccacatcttgtcttgcccagcatctaacagttgctgaataaatgttgaatgaataaatgcaggaatggatgagaa

SEQ ID NO: 149477 - DNA, 394 bp, Homo sapiens
tcttggcatgtaataagaacctacattttgttatataattcattttgtgatttacatttctataatttattcaataagcctaataaatgttaggtaatgaatgaatttagtttcatgagtaaaaaatagtacatgaatgatctgtcattgtacaaaactgctgaattatgaatatggtttttgtgagtattttcttcccttcctccttgtcccatccctatgtcctttcttcttaaccctaacctcctacaaccagaggatagcacgttgagggaagaaatcgtcagaagttttaatataattatattcaggatgagagttctgttcaacacaacatcattggttaatttagtaatttctagaatgctgcccagacttgaaaatactttcagta

SEQ ID NO: 149478 - DNA, 174 bp, Homo sapiens
gaggaatcctgagcagagccccagctcctgtgactgccgtagcccttgcgtgcaagagggctggccagggcttgtgggtggacttcaaaccaacacttgagtgccctcaccaagtcttggcccctgtgtgaattcctgcctttcccagaaatgagtccagggtgtctgacctca

SEQ ID NO: 149479 - DNA, 204 bp, Homo sapiens
gttttattaaaagtgctgagtgataatcccactttgctgtcttggccttcttattccttggaagccgagtctggacagggagatggacaggtgctcgctgggttgggggaccctgcaagaccacagctgggaccagccccagagaactcttcccacctggtagctgcattccctgagctgggtggggatgcttactgcatcagg

SEQ ID NO: 149480 - DNA, 195 bp, Homo sapiens
atagaacaaacaaggtgcaagattagtagtggcagaaaacattaaaaccgagcctaaacagacattgtggagaagtcataaaatggaaagcttggataaatctattttaaggatggggagcatgcaaaatataaacttccacaggacgtaggagcagtagctacagggagaaatcttcagatgcatgcacaacag

SEQ ID NO: 149481 - DNA, 301 bp, Homo sapiens
atagtgattacttctggtgatgtgattatgagtgaattttctttttcgttcacatgaaatgtctaatttttctataattagaaaaactgttacttctataataaaaatagtttactataaccaacaaaacttggtgcttattttatgtgacagtctatgaatttgaatagaaaatggcatccatttgtgttctaattaatgttgtaatcctgttctttcactctcttttcaacttttttttgcttctcctcaattaaagaaattctcgtgtactgaagaaaccattggtgagaaacttgtc

SEQ ID NO: 149482 - DNA, 609 bp, Homo sapiens
gtatatcttataacttcatctaaattatttggagatggatgcctacaacctacaattggtggaatctaggtcatctgcctgtgcctagctgcaaaggaagcaaaagaagaaagtttcctgagttcttcctggagaggtgagcttcctacggctggaaattccccgaagatagcaaatgtatttaacagttgttagaaagccaaacaacatgagaaatatccactacactgtgaaacatccgttcctctccctaaaagaaactaataccatcttatagagaacagtattagatatattccttttctcagcagaaggatacacattaacatttttatttttagcttcaaagaagaggcaaaaattgagtataatttaacgtaagaaagcttcttcccagggcacctgttgctcttagaacattctgggagagagggtgggtccaaaaagtcactataaatagcatagaaagaaccaagggtatctgtcaggagtaggactgggataggggagcaagagctggaagcactggaggttctttctgtgagtttgacttttgtccccactattgcataggtacaacttgctccattctttcccacctacactagt

SEQ ID NO: 149483 - DNA, 186 bp, Homo sapiens
gtcttctaccacaggcccagtcacccaactgcttttttgaatcttctctgatatggatgattaaatgtagttctattttgctgtgaaaagtttgggagttttcagttcttttgtctttttccatcttcttgcaacagatttggaaaacagattcttaacctgtgccattttcagagtcagtcacct

SEQ ID NO: 149484 - DNA, 557 bp, Homo sapiens
ttgatgtgattattacacattgcatgcttgtatcaaagtatcttatgtaacccataaatatatgcacctaatatgtatgtactatgtacccccaaaaacttaaaataaaacagtacctggaacatattaggcactcagcaagtatttatttaatttgttgaataaatgctaacaactaggtaagattcttattagagatcagcagtattttgtgaaactatattcttattttcctagaaatgtgggttaggaaataaaatggcagttaaacttagggaagaacactaaagagaacagcaagcagaccaggcacggtggctcacacctgtaaccccagcactttgggaggccaaggcaggtggatggcttgagcttaggagtttgagaccagcatgggcaacatggcgaaaccccatctctactaaaaatacaaaaaagattagttgggcatggtgacacgtacctgtagttccagcctcctgagtagctgggactataggcgcatgctatcacacccagctaatttttttatttttagtagagatgaggtctcgctg

SEQ ID NO: 149485 - DNA, 706 bp, Homo sapiens
ttgatgtgattattacacattgcatgcttgtatcaaagtatcttatgtaacccataaatatatgcacctaatatgtatgtactatgtacccccaaaaacttaaaataaaacagtacctggaacatattaggcactcagcaagtatttatttaatttgttgaataaatgctaacaactaggtaagattcttattagagatcagcagtattttgtgaaactatattcttattttcctagaaatgtgggttaggaaataaaatggcagttaaacttagggaagaacactaaagagaacagcaagcagaccaggcacggtggctcacacctgtaaccccagcactttgggaggccaaggcaggtggatggcttgagcttaggagtttgagaccagcatgggcaacatggcgaaaccccatctctactaaaaatacaaaaaattacccaggcgtggtggggcatgcctgtattcccagctacttgggagtatcacctgagccctggaagtcgaggctacagtgagccatgatcttgccactgcactccaggctgggtgatggaagtgagaccctggctccaaaaaaaaaaaagaacagcaagtacaatgaaaagccagatctgtagctactactactacatgatgatacttaaaacgggaagatgaattcaatctccctttcttgaactcaaaaagctaaacttccaaagt

SEQ ID NO: 149486 - DNA, 264 bp, Homo sapiens
ggggaagctgggtgaaggaatacagaaactctgtgtaaagctaagtttatctacaatcattttaaagtaaaaaggctttttctttgttttttcttttataaatgagtcctcagataaaagcagcacaccaaatcctgagcaagaagatggagaacaaatccacacttaatttcaaatgattccaaacaaaagcatatatacatatacagagaaatatattaattgaataagattaaagagaatactcatgttcattgtactatt

SEQ ID NO: 149487 - DNA, 225 bp, Homo sapiens
ctatagaaataccagacacaaggaagtctctggatgctcaggcagagccttacaagtactcttagctcctttggatcttagctcctttggattaagggtctgggcctcaaaattgcaggcccagacattctcttttttaaattcacccgacattgatcaaggactgatgctaagttgactcgggttaattgatcccactttattcatctatagtgggaaatgtgc

SEQ ID NO: 149488 - DNA, 280 bp, Homo sapiens
gcattttgtttgccaatgcgtactatatccattatttatctttcccttgcacttgtagattgggtggtgataaaaatcttccatatttcattttcctggagaaggcgggtagagtcactagtgatgaattttatcttcaatctgttgtataattttcttaaagtatctcgccgtgttgtgagctgttctcagatttcaaattgttttgtgaacctatagctttggagcagccaaacctttgttgttagagcttcttagcccaggctatcattatcattgt

SEQ ID NO: 149489 - DNA, 833 bp, Homo sapiens
  misc_feature (74)..(74): n is a, c, g, or t
  misc_feature (226)..(226): n is a, c, g, or t
  misc_feature (228)..(228): n is a, c, g, or t
  misc_feature (637)..(638): n is a, c, g, or t
  misc_feature (661)..(661): n is a, c, g, or t
  misc_feature (676)..(676): n is a, c, g, or t
  misc_feature (682)..(682): n is a, c, g, or t
  misc_feature (684)..(684): n is a, c, g, or t
  misc_feature (689)..(689): n is a, c, g, or t
  misc_feature (693)..(693): n is a, c, g, or t
  misc_feature (695)..(695): n is a, c, g, or t
  misc_feature (706)..(706): n is a, c, g, or t
  misc_feature (717)..(717): n is a, c, g, or t
  misc_feature (726)..(727): n is a, c, g, or t
  misc_feature (729)..(729): n is a, c, g, or t
  misc_feature (740)..(740): n is a, c, g, or t
  misc_feature (742)..(742): n is a, c, g, or t
  misc_feature (750)..(751): n is a, c, g, or t
  misc_feature (766)..(766): n is a, c, g, or t
  misc_feature (776)..(776): n is a, c, g, or t
  misc_feature (833)..(833): n is a, c, g, or t
ttgtaggggactgactctcttctttaaccgccgaatcagttgaaacgcggtgtctgggcgttgaaaaagggcantaacagcagtgcggaaatcccggcggcgatagagataaccacaaaaaatccgctccagtgccaggtatcgagtactttcgccagcggccaaccagcaagcgacgcccccagataagcaaacaagccgacaaaccccgtcgccgcccctgccncntctttgtgggaacactctgccgccgccataccgattaacatctgtgggccaaagacaaaaaaaccaatggtgaagaagcaggttgcctgcatcacgtagctggcaaatggcataagccacagggagccgactgaaagcaaaattccggcggcgaaaatcaaattcatcggccctcggttgccgttaaacaatttgtccgagccccaaccggctaccagcgcaccgataaatccgcccagttgaaacatcgtcactgccgtattcgccgtgaccagatcgtatgagtttactaaggaaatataatagaagttttgggtctctgaaaccttgaacgagttgcatttaaatttaacaaaacgacactaattttcttatttattttttcttaaatgaaatttaaactccatgnntttaagccatttagatacatgantcactggatagctgntaaatntnaaccngggngngatggttgatncttttgaaaanaaatagcanngncaatgttctgnancagagacnnataactggaaaaggntgataatatntacaaactggtggcccatgaaaaaatcttaacggttaaatatttaaggttgacaaan

SEQ ID NO: 149490 - DNA, 494 bp, Homo sapiens
attttttttcagacagggtctcgttctgtcactcagcctgagtgcaatggtgtgatcatagcccactacagccttgaactcctgggctcaaaggactcttctgcctcaacttcccaaggagatagaactataggagcacgcaaccaggcctggctaatttttaaaattttttgtagagacaggatcttgctatgttgcccaggctggtcttgaactcccagcctaaagcaatcctcccgtcctggtctcccaaagtgctgggattacaggcatgagccacgacgcctggcctatcccttctttcaactgggctatttgtctttttattattgacttataagtcttttacatattctggatctgagtcctttatcaaatacatgatctgtaaatcttttctcccattttgtgggtggtcgtttgactttccagatggtgccctttgaagcacaatgtttttcatttaaataaagtccaatttagctatttttgtc

SEQ ID NO: 149491 - DNA, 896 bp, Homo sapiens
accatgcagataaatcagaaactagagattggttacctgtagggagtgggagggagaagaagggagtggagatctgtgtagcatggatgaaatgtgagtggcacttctcagagtatatttgtcagtataactctgattcttagaaccataggaatgttttaaatgcttctatgcaattgccaccaaccaggatgtgggagaccaaataagcaattaccacctacccagatgcaggagaacccaaaaaggaatagtaaaattcacataaaagaggatagggagggaaagaactcacctaagtaactgtagaaaatagtgtcttgattaaataacataaaactagaggcaaaaagaactgtacagtcatgctgtagtgttgagatcagaagtatgaaaataaactcatgttttttaatatttacacagacatacagaaatatagatgtgtgcatatgtatgagttaatttgaatatgtgtatttcctacctctatcccctgagagggcatagaaacaatgacaccccagtagcattgagaatacctagtgcttagatcttggtctccaaccattgctcttcaatgaaaggaaccagggctccttgagaagtagttccttacgggactggtgcagagaaaatacaaggtaagcctagatcatcttgtggtgccagaaagtaatgaagtgcttaaaaagatgaaaacctgttcaaagcacgggaacctacctgaaggagctcctaagaactggaccaattttagcaaccacaaaaataatgataatattgcattttcatccatagaataagtacacgagtccatactgatgtaaatagattgtccagtcatgtcactgctctacttaacactcttcagtgacttcccattttattctgag

SEQ ID NO: 149492 - DNA, 1775 bp, Homo sapiens
accatgcagataaatcagaaactagagattggttacctgtagggagtgggagggagaagaagggagtggagatctgtgtagcatggatgaaatgtgagtggcacttctcagagtatatttgtcagtataactctgattcttagaaccataggaatgttttaaatgcttctatgcaattgccaccaaccaggatgtgggagaccaaataagcaattaccacctacccagatgcaggagaacccaaaaaggaatagtaaaattcacataaaagaggatagggagggaaagaactcacctaagtaatctggtagcaactagaaacaaaaagatgaaatttttgccgtctatcgtcatatgtaataaatcacaacacacaagttaggatgctgattaatccacagagaaaactttttcctaattcaaatattgaaaagaatttttcatattattttttacattgggaatcaacataagaaatggtgtacttgatcatatttttacacaaatgatgataaaatgtacatacagtcatctcgcaatacaagtcaaaaacgtaatgttaaattatttaaaggtagttctggtgtgccagaatgatgtagcctggatatgataacttcattatttgactggattgattgttcccaacattgtcagttagatattcgttcctttttatttcttttagtttgtttttgtttttttgcaaacactgatatattagtagctggactatcaacatctattgaagagagaataaataatgataaaaatcttatgaatttattaacatttctatataaatttgtgttttgttaataaaagctaactcgtgttaaatttagcctaaagctgcctccgtatatattttaagttcagactaaaggtttctctataagtagtgaactgtaacctaactaaatgtataaacagactataaccaactcttataccactcaccaagttttggtcaatcaaaggtggccaactgttcaaatcctgttcaaataagacaaatgccaagctgtaaccaatccagctatttcttcacctcacttcctcttactgtctgtaaatcctttctgacttcatggtagcactgaggttgccatgaacctattctggtttgggggggctgcccagccgcaaatggttctttgatcggttaaactctattaaatttagttcaaagtttttcttttaacagatggtgtcagaaataggacctatagtagaacttccagcgacccccggaagcatagagtgaccaaatggtgtacccgctgggcccattgtgtccattgctctctcgcagccactggggatcgtgggtaagttctctttcagactttgaagctccacggctttgtgttctgagctatctgagtttgtttgagcagatttttttttttttttatctgaactgggtttggaagttgttacagaaactggactgggtccaggatcaaattaggtctgataattaactgacttagatctagttaaaggcctcagatgtctgaatcagacagaaactgacagtaaatggcaatattgtaggtagtatgaacttcagctttcagaaatttgcagggacttttgtgttctatcccctttgtttctttttcttgcactcataggtaggaaaaaagtcaatgactaagttgtgaggaaatctgagagccaaagccaagattcaacataaaaatgagatccttaatttctgaagaactgagtactccactttctggctacaactacctacaaacacttac

SEQ ID NO: 149493 - DNA, 164 bp, Homo sapiens
agctgagtgtggctgttagctgacagcgagcaaggatgtgggggtctcagtcctacaagtgcaaggagctggcttttgctagccatctgaatgcattctgaggtaggttcttctcacagcctcctgatgagagcacagctcactgactccatgattttggtttt

SEQ ID NO: 149494 - DNA, 309 bp, Homo sapiens
  misc_feature (10)..(10): n is a, c, g, or t
  misc_feature (47)..(48): n is a, c, g, or t
gaaaggaatnaagaagggggggagaggggtgaagattgagagtgatnnaggaggaagtctataatggggtctcactatgttgtccatgctgatctcaaactcctgggctcaagcaatcttcccacctcagcctcccaaagtgctgggattacaggagcacaaaggaaaggccatgcgaggacacagggagaagacaggcccctaccagtcaggaagggagccctcaccagaaactgagctggccagcacaatggtcttggacttgtagctccagaactgtgaggaaataaatttctgttgttgaagcca

SEQ ID NO: 149495 - DNA, 256 bp, Homo sapiens
caggctggaatgcagtggcatgatcacaacacactacagcctcagtcccctgggttcaagcaatcctcccaccttggcctcctgagtagctggggctacaggagcacaaaggaaaggccatgcgaggacacagggagaagacaggcccctaccagtcaggaagggagccctcaccagaaactgagctggccagcacaatggtcttggacttgtagctccagaactgtgaggaaataaatttctgttgttgaagcca

SEQ ID NO: 149496 - DNA, 517 bp, Homo sapiens
cgacagatggagagtgcctttctactgcctgtgtgtcctcaatactgctctgattggccttctccagtccactgctcatcccatggctattgtgcctgctgagtgcatccccaaaatgatccactgcatgaagttcatggaggaacaatgtggaactccactttgtgacgcctgtgttccagccagagggagccggtgcctgctatggaagaaaggtctgcctgtgctttggggaaaaagtagtccaccacgatctacctttgctctttgacctctcaagagacccttctgagacccacatcctcacaccagcctcagagcccgtgttctatcaggtgatggaacgagtccagcaggtgatgcgggaacaccagcggacactcagcccagttcctctgcagctggacaggctgggcaatatctggagaccgtggctgcagccctgctgtggcccattccccctctgctagtgccttagggaagatgacccacaataaattctgatgctggccggagc

SEQ ID NO: 149497 - DNA, 900 bp, Homo sapiens
ctcaacgctttatacttctcaacgcttgatacttgctcaacgctttatacttcatctttttccaaacaccccttaccacctgccatatacttttctttaactcgttgttgttgcctgtctcctccactaaaataaacctttagagggcagttctttgctgttgttttcctgaaaatacctagcacaaagtagatgctcaataaatatgtgttgtatgaacgaacaaaggcaagcaaatagaaaccattaaagggttttaccggggagaaacaattcattttgattcatttgattgtataagtacattttaaaattccacttcctccatttatcattacctagaaacttggggatttcacattagggaggtggctacatgcccaactggcccttaactttagctaccaccaattcatttctacaatgctaccatagtgatctttcaaacatatctactcccatctcctgtcctccactacctacctgccaaggctgcaacaagttccaggctcccacacactgatgccccagcctcacaagctgcttccacaccagactggctaactctccaactctccccattcgcctcttccaggaagccttcctttcctggaagtataaagcgttgagacattagggaggtggctacatgcccaactggcccttaactttagctaccaccaattcatttctacaatgctaccatagtgatctttcaaacatatctactcccatctcctgtcctccactacctacctgccaaggctgcaacaagttccaggctcccacacactgatgccccagcctcacaagctgcttccacaccagactggctaactctccaactctccccattcgcctcttccaggaagccttcttcctggaagtataaagcgttga

SEQ ID NO: 149498 - DNA, 882 bp, Homo sapiens
ggtgactctgaggatcccctcacgctttatacttcatctttttccaaacaccccttaccacctgccatatacttttctttaactcgttgttgttgcctgtctcctccactaaaataaacctttagagggcagttctttgctgttgttttcctgaaaatacctagcacaaagtagatgctcaataaatatgtgttgtatgaacgaacaaaggcaagcaaatagaaaccattaaagggttttaccggggagaaacaattcattttgattcatttgattgtataagtacattttaaaattccacttcctccatttatcattacctagaaacttggggatttcacattagggaggtggctacatgcccaactggcccttaactttagctaccaccaattcatttctacaatgctaccatagtgatctttcaaacatatctactcccatctcctgtcctccactacctacctgccaaggctgcaacaagttccaggctcccacacactgatgccccagcctcacaagctgcttccacaccagactggctaactctccaactctccccattcgcctcttccaggaagccttcctttcctggaagtataaagcgttgagacattagggaggtggctacatgcccaactggcccttaactttagctaccaccaattcatttctacaatgctaccatagtgatctttcaaacatatctactcccatctcctgtcctccactacctacctgccaaggctgcaacaagttccaggctcccacacactgatgccccagcctcacaagctgcttccacaccagactggctaactctccaactctccccattcgcctcttccaggaagccttcttcctggaagtataaagcgttga

SEQ ID NO: 149499 - DNA, 839 bp, Homo sapiens
ggattagaggtccctcagttcacctacactgcatatactttcttaatcgtgtgctgtctcctccactaaaataaacctttagagggcagttctttgctgttgttttcctgaaaatacctagcacaaagtagatgctcaataaatatgtgttgtatgaacgaacaaaggcaagcaaatagaaaccattaaagggttttaccggggagaaacaattcattttgattcatttgattgtataagtacattttaaaattccacttcctccatttatcattacctagaaacttggggatttcacattagggaggtggctacatgcccaactggcccttaactttagctaccaccaattcatttctacaatgctaccatagtgatctttcaaacatatctactcccatctcctgtcctccactacctacctgccaaggctgcaacaagttccaggctcccacacactgatgccccagcctcacaagctgcttccacaccagactggctaactctccaactctccccattcgcctcttccaggaagccttcctttcctggaagtataaagcgttgagacattagggaggtggctacatgcccaactggcccttaactttagctaccaccaattcatttctacaatgctaccatagtgatctttcaaacatatctactcccatctcctgtcctccactacctacctgccaaggctgcaacaagttccaggctcccacacactgatgccccagcctcacaagctgcttccacaccagactggctaactctccaactctccccattcgcctcttccaggaagccttcttcctggaagtataaagcgttga

SEQ ID NO: 149500 - DNA, 590 bp, Homo sapiens
ctcaacgctttatacttctcaacgcttgatacttgctcaacgctttatacttcatctttttccaaacaccccttaccacctgccatatacttttctttaactcgttgttgttgcctgtctcctccactaaaataaacctttagagggcagttctttgctgttgttttcctgaaaatacctagcacaaagtagatgctcaataaatatgtgttgtatgaacgaacaaaggcaagcaaatagaaaccattaaagggttttaccggggagaaacaattcattttgattcatttgattgtataagtacattttaaaattccacttcctccatttatcattacctagaaacttggggatttcacattagggaggtggctacatgcccaactggcccttaactttagctaccaccaattcatttctacaatgctaccatagtgatctttcaaacatatctactcccatctcctgtcctccactacctacctgccaaggctgcaacaagttccaggctcccacacactgatgccccagcctatctattgcttctcatcatcctgtttgttttattggatcaggaagtagaaattgct

SEQ ID NO: 149501 - DNA, 475 bp, Homo sapiens
cacccgcctcagcctcccaaaatgctgggattacaggtgtgagtcactgcacccagcctctctgtgaggtgtttaactcctagaagacaggggtggtccttgtacccgcttctttccaagcctccttccaagcctgccagtgggagcttggaatgtttctgtcagttttattcagatttcatgtaaaagaaatatgtagcactcattcagatttttgtgattatttgaaaaggattaaagggagataaattaatagcatagactttgtgtgaaattatggctctattgaaaatgaaatcccctgtgacagttgaagggattttgaggaaaatttcctttcaattgtctcttatattttccttctatgatcttttgtgctggctcacaaaaacagaaagccattaatttcatcttctagccgcatattttcattaaagctgtgaaaccccttagttttagaagctgtgaggggcgg

SEQ ID NO: 149502 - DNA, 306 bp, Homo sapiens
tgcagggaaacgcgcttaaaccctacagcagaggagcgggctggctgtgctccctacatccacatctcctgagtgcaggcctcggcggcagagttgcgttcagaaaaccagcaagcacatcccccaaccgaagaaacttggacgatctcagccttgtgcttgacaacctatcccccacctcccttaagtggttggggagggggatgagcggtggagtccaaagggatacagccacctcccggcccaaatgcaaattcatattcatgagagcgggataaataaagacaaatctccgctgtaatagca

SEQ ID NO: 149503 - DNA, 397 bp, Homo sapiens
tgcagggaaacgcgcttaaaccctacagcagaggagcgggctggcggtggacaccccggcctgtgctccctacatccacatctcctgagtgcaggcctcggcggcagagttgcgttcagaaaaccagcaagcacatcccccaacccgaaatccgagggaacgaagaaacttggacgatctcagccttgtgcttgacaacctatcccccacctcccttaagtggttggggagggggatgagcgtgggggaaattccatgtgtggagtccaaagggatacagccacctcccggcccaaatgcaaattcatattcatgagagcgggataaataaagaacgatagcgcgccgatattctatttgtgtttagtataataggtggtaggtacagtaatatatg

SEQ ID NO: 149504 - DNA, 428 bp, Homo sapiens
caaagtgctgggattacaggggtgagccaccgtgcccagtgatgtatttatataaaatggcaagcacttgttggtgactggaacttaggaacagtggggctggctgcttccctggggtctgaacctattactggataactcggggcaagaacccagtggacagtggggcctcatgggatggggaaaggagagccagtggcttacggacctcgtagaggtgccccttggcctttctgggggtctcgtcctatctgctgaagaatgcccgtcttgttctactgtaatggaaactggacatgtccatcagtaagggagtgattaaagaatgatatttggctgctttgcagtggcaaagtgaaatccacaatggtgtactgaatgggagtatccccacagtacaacactattcatgtagtggagggaaggat

SEQ ID NO: 149505 - DNA, 390 bp, Homo sapiens
ctgctccgcccctctctgggaacatgtctggggtatgtagtcacaggtctccccacagctccctgggacatgcagtcctctgccctttgatagggaagtttcctggagtggggccaaggcttctggcagttccgtggtccttggagagagagtggtgcagtggagactttgtgataaactctccctggggactggggtctctccctctacccctcacggacacctagcaccttgtagggtcctcataccacctgtccacctcttcttgtcctgattatacagtggtggttgttacagagaggctcggtgttctaaaggaaaaggggtggggaaagggagctaagcccccactctggggtcacttgttcattgaggggcaaggagacagcc

SEQ ID NO: 149506 - DNA, 306 bp, Homo sapiens
caggctgctctgagaccctcgatgtggggccaaggcttctggcagttccgtggtccttggagagagagtggtgcagtggagactttgtgataaactctccctggggactggggtctctccctctacccctcacggacacctagcaccttgtagggtcctcataccacctgtccacctcttcttgtcctgattatacagtggtggttgttacagagaggctcggtgttctaaaggaaaaggggtggggaaagggagctaagcccccactctggggtcacttgttcattgaggggcaaggagacagcc

SEQ ID NO: 149507 - DNA, 737 bp, Homo sapiens
tagaactacagaggatccagaacggcagccggtcctcactgggctgttcctgtccatgtgcctggtcacggtgctggggaacctgctcatcatcctggccatcagccctgactcccacctccacatccccatgtacttcttcctctccaacctgtccttgcctgacatcggtttcacctccaccacggtccccaagatgattgtggacatccagtctcacagcagagtcatctcctatgcaggctgcctgactcagatgtctctctttgccatttttggaggcatggaagagagacatgctcctgagtgtgatggcctatgaccggtttgtagccatctgtcaccctctatatcattcagccatcatgaacccgtgtttctgtggcttcctagttttgttgtctttttttttctgtcctcagtcttttagactcccagctgcacaacttgattgccttacaagtgacctgcttcaaggatgtggaaattcctaatttcttctgtgacccttctcaactcccccatcttgcatgttgtgacaccttcaccaataagataatcatgtatttccctgctgccatatttggttttcttcccatctcagggacccttttctcttactctaaaattgtttcctccattctgagggtttcatcatcaggtgggaagtataaagccttctcccctgtgggtctcacctggcagttgtttgctgagtttatggaacaggcgttgga

SEQ ID NO: 149508 - DNA, 293 bp, Homo sapiens
gtagagaagtgtgtgtgtatcttctataattagaagatagaaagctctttctccacccacatgccgggagaaatgtgaggcgtttgctttatcagctccagtttggggtttgcttctgctgcttcccagacctgaaagcgccttttcatgaggcgtctggaacacccagtccccaactgcagcttgagctactgcctgtgcttcaatgcctgccttgtgctggtgtggggagcagacatgcgctggtgctgatggggtggtccaggcaggagtctttgaattgctctcaggat

SEQ ID NO: 149509 - DNA, 344 bp, Homo sapiens
aacgtaggcgtaactagcagctctgatgactttcttacttgcttacagattgctgcttgaagaagagctgaacttagctggctgctgtgtctgctagatggggcctctctgctgcccgctgtaggagacaaactttgttgcttggcatgtgtggttaccaccctttatgcccatccacctgctgctcaggctgtctggttggcagccacagatcaagtgctccagatttctgatgaggggcagcaagggctgacctgggcagtagaccccacatgccatggactgggtcagctcatattacttacagacaagtgatggcttatggcactttttattaagccaat

SEQ ID NO: 149510 - DNA, 444 bp, Homo sapiens
tgatttgcactcaaactactcactggattgaattttactcctgatgaaagattctgaacactgtcctttaatcttacgatgaaaaaatttctctaacctgcctcatgaataagctattattttacttacaagaaattctcattttctagttaaaacgttttgaaattctacccaagggctcgtctatgtctctgccctcttggaaacaattggagtcaaatctgtaacttgctaatttgaccaacagtaattaaaataagtccatatttagggtcagttactaagatgtgatcttttgaatgttttcagaacttttcacaaactaaaaacaagcatagtaagcactcaaactgggtttggccaatgggaaggtaaaaaaaaaaaaaaagtaattttaagttttttttttttaaagttaaaactgattttgcttattttcttttt

SEQ ID NO: 149511 - DNA, 405 bp, Homo sapiens
tcaacacttgctattatttgtcttttattttagccatcctgatgggtgtacagtagtatcttgtggtttggatttgcattttcctgatagctaaggatgctgggtattatctgtcattttaaacatccattcccctcaggccagtgatcccttctgagatttgacagatgtgtttagcactggtgtcccctccttgtgagatcactgtgactacagacttacaagcttggggactatcgagaatgactgggcgttggttgggtcctcagggctccagagccatggtccttttgaagagcctgaatcaaggtatggggctctggagagttctgtgtgtgcttgtcacaggggtcttgtttattcaagagagccaacagcctttcatgaccccttgttcctcttcct

SEQ ID NO: 149512 - DNA, 390 bp, Homo sapiens
tagtaaatatatttacacacataataaacaaatgtatgtactgtctaaaatgctgacaataacatttttgtaaggttgtctttgagatggctttcacagcagtctacagaagtgtgaagtgtttatgtggaagattgcgtcctgccgtgccaggcttttcaagcagcctttagtacaatcttcttcacaggttattaatagctccttcaaggactgccaaggcttaaataatagcaggaaacacaagcatgtgtctctaggggaatcatagactacgcagccacactgagagaggatcacaagcaccagcaatcccagcagaagaacaggtgccctcagccacatcaggatttcaaaacagtcacgggacaattatcagcacacttattg

SEQ ID NO: 149513 - DNA, 346 bp, Homo sapiens
gctatgtgcccttggggaagtgactgaaactctcagatcctcagctggcacacctccatgattctacgtgagaatggcaaaggtggaggtgtgcagggtaccaggagcagtgctcacgcagacaggatcctcagctcaccctcctgaatcccacagggaggcagggcaagagtggatccatcagccagtctgggatctctctcctccaggggctcttcattgaaaccaactgtttcgtttcctgtcctcagctccaggccctgaacaggttgggaggcctcttcatcttcagagacactgcccacagctgttcagcctcttctcatccctacccccatccttgtcc

SEQ ID NO: 149514 - DNA, 436 bp, Homo sapiens
ttagcctaagcctctaagtcctctgggctgggctgatctaggatggttctggctgatggctctgctgatcttggtcattcctgcaactgcagctcagctgggcattggctggctgatctagaatagtcccagtgagggtggcttagctgggcccctttggctgtccatgtcttgtcatcctcctggctagcctggaatgttctcatgaaggcagaagagcaagtagaagtgagcaaggcctcttaaggcttaggctggaacatggtacgccctcactgcagcctcatcctattggccgagcccagagccaggagcagggatgtaggcagtacttgcccctttagtgggaggaactgcaaaatcacacagcaagcagtgtgggtgcagggaggggtgaagaattgggtttgataatgtgctgcaatagtcatgtcct

SEQ ID NO: 149515 - DNA, 551 bp, Homo sapiens
agagtcttccctgagcttggctggggaggagggggctgcaggaaggagctgtgagcagggcaggatggagattcgtgtggccctcctgggaggggctgggcagggctgggaaaggggtgggtgagatgttccggaactcagggaaaggaagagtctgggtactgccctgggggcacctgggcccaggtggcaggtggccagctttctgcctcctttccacctcctttctccagaaggcacccaccagctgtgtaaatagggcaggtgcccacggcccgcctcaggccccgtctcctccccacccacgctctctaatcgcggattatacacaatccagcctgatccctgggcagctgccctccctcccgcagccacctctggctctgagagatgggcttggggccagcctggggtcccaggagtccaggccaggatgagaacctgctctgaccccacctggacgcattaggcctgcctggacctgttgcctcaccccaagagagccacaggcaatgcaaaggctcctgttcatgtcagggcacctggaaggc

SEQ ID NO: 149516 - DNA, 419 bp, Homo sapiens
cttaaccactcagctggactgcttacatatagttacggagagaaaataggagagtcactgtaagaacactcatttggaaatggggagaagaggaagccctggccttaaagtgggttccatggtgagtcactgcttccccaggttctcctctgtgatcatcagcttacccattgtcttccatggctgcatgtaaggattcccattctgggggcgcacgtttgctgtaggctgaggggtctgaggactactctagagaagtctcaaaagcttgttgccaggctagaggtttctgtggcaacacccttaactagccagctacttgttgatctgactttgggtattgtaggactggtgagcaattccagcaaccttggaaatctgatccttgatctgaactctgctctttttttttttctctt

SEQ ID NO: 149517 - DNA, 788 bp, Homo sapiens
aaaaaaaagtgtttaaaaaaaatgatgctggtaccattggatgtccaaatgtaaaacaaaaacaaaacaaacagtcttctgcctgcttctggacgagcgaggagacttgtggtctggttcttggacttccctagcagcgtggcatccaaacgccaatctccactctcacctcaaaagaagaaatcaagaccacctcctgctctgggaccggaggagacattggcctctgcaggcttgccaaagtaggaagaaaaagaacagcaagaagccattgaacacattgatgaagtacaaaatgaaatagacagacttaatgaataagccagtgaggagattttgaaagtagagcagaaatataagaaaatctgccaaccattttttcagaaggggtcagaattgatagccaaaattccaaattttggggtaacaacatttgtcaaccatccacaagtgtctacactgcttggggaggaggacgaagaggcactgcattatttgaccagagttgaagtgacagaatttgaaaatattaaatcaggttagagaatagatttttattttgatgaaaatccttactttgaaaataaagttctctccaaataatttcatctgtatgagaatgatgatccatcttcaaagtccactgaaatcaaatggaaatctggaaaggatttgatgaaatattcaagtcaaacacagaataaagccagcaagaagaggcagcatgaggaaccagagagcttctttacctggtttactgaccattctgatgcaggtgctgatgagtt

SEQ ID NO: 149518 - DNA, 355 bp, Homo sapiens
cactacctggaacacggtgacgatggcccacagcagggagtcgaagttcttcctgtcaggcacggtgtctccggtgtctgtcttcaggctgaacttgcagccgaaaaggcgagagaaccaagaccagaggcgggacagacagagggaagccactctggatttgggtggcaactggaacctgggacacctgcctcattcagcctctctggactgtgaaagcccggcctgcctggctgcctagcctccagccgaccctgaccctgagctccaggctagacgggcacacagcaggcgctcagaacaccccagttggagcctggtgcctgcccccacccccggtattctgctcttgagt

SEQ ID NO: 149519 - DNA, 404 bp, Homo sapiens
ggaacatgttgatacatagtctatacatatcatgcactgaacttgtatgcttatactttaaaaatcaattacataataccaaaaacctaatgtgccagttttaaactctttcatttttgttacaattaaaataagttgtgttgggttcaataagcgtttatcttataactaactgaaaccacaatttaattcaactgtatatataataatattttatttttctcttaaaaacaatagtgacaaagtggcacaccattcttattccttttcattctttgggatttttctcatggcatttatatcccagtggcttttataatttaggtattttggttgttccaagtgaagaggaaaaggagcatttaagggtaacttcaactagagatcagatgaggataagaact

SEQ ID NO: 149520 - DNA, 584 bp, Homo sapiens
aagaattcctgtcacctccctgggaaatgctctcatccatgaggaagaacactgaaacttccagcaacacaaccctctgacctacccacattctatgatcgttcctttacttccatggctacctattaaactccaggttgcccagaattcctataaaatgtcaaactctgaaaccccactttggccataactcctatcctttggcctcttgatacccatattccaactaattaattaattatccagtccttggcactatctctaattcactcttctcccaaggatttggattctaaagccaatcatttaaattgcccttatcagtatcctgaattctctcatcctctgaagctctgtgaagcctgctgggccaccctctaactccataccaatcatgctctgttgggctccctaaaaatgcgggcttatagttccagtaaggcctctgatcaactcagctgcccacaccccatcaaatccctttcctgctgtcaggggagaagactggcagaatgagatgccatcttgggaaaaaggaaaattagaagaacctttttatcctaccacaggttcaagcccttatc

SEQ ID NO: 149521 - DNA, 376 bp, Homo sapiens
ctcccaggcaccagtttcagatcagcaaaaaatagcaaatgcccccaggcttgaaaagcaatctcacctctattaactcttctcccaaagtgctgggattacaggcatgagccactgcgcccgacatgcccgcttctgttttttaaacgaaagatgaacagttaagctggacttagccttggttttccattagcattattgctaagttggcaaccttggataaaatccactcttggaaacttttaagctgaacaaaagctgcactatgagcaggtgctatgataaagccaagacagcgctctaagtagaggggctgatgaaatagactaaggggagatcttcatttctctcctggacaatagcgagtaaaaaaaaa

SEQ ID NO: 149522 - DNA, 451 bp, Homo sapiens
tgaattaagggctacattttatagtatggttaagaaagcaaagtagcttatgtaggttttgttatttctcttgcagttatctatcattgcataacaaactaccctgaagcttaggggcttaaaagaacaacagttcattttttctcataatgaattggatggctctgctttacatggtgtgggttagggcacttgacaaggttgggaggtccaaatagccttattcacgtggctgatagttggtggtgctgactgctggttaggagtgtagctggggcttttggccaagggttttggttctctgttggttagatctctctgtaggctgtttgagttttactcatgttatagctgctgggttctaaagaaaatatattccaagcaaaggcaaataaatgtggcacaaatgatgctgtgtgatttctgagactaggtcatctgatgcctgata

SEQ ID NO: 149523 - DNA, 345 bp, Homo sapiens
ctctggatgcaagtgtctgaaatcaagatgtaggtatggccatgctctctcaaggttcgaggggagaatctgttccatgcctcttagctcgttgtgttactgccaatccttagcattttttggcttgcagctatgtcactccagtctgtgactctgttatcacaacataatccctgtgtggctctgtcttcagatggtgtgctccacttcttgcaaggatactagtcgtattggattaagatccaccctaatcacctcatcttaacttgattacatctgcaaagaccctattttgaaataaggtcacgtgcagaggtactggaattaggacttcaacctatcttt

SEQ ID NO: 149524 - DNA, 160 bp, Homo sapiens
atcctcatcactctacccttcttaaaatacctgtgatatcagagtccagtgggaaatgcagcatttgcacaatgcatgcttctagcccactgccagacacacagatgattctcaataaatgtcaatcctctttctgcctactgaaccttacacctaaatg

SEQ ID NO: 149525 - DNA, 531 bp, Homo sapiens
attctcctcacagactctttgtcacttctcacacctccacctcctcatcaggccacttttctcttcattcttccagctctcagcacctcatcctccctcatggtctaagacgatcccgctccccgctgaccgtccctgtggtaatagaagctacacagagtgacagcacccactcggcaacacagtctttcaccccagttactgtagtggccttctacaatgttccctggtccatgatcttgccccttcctattgcatctttcacactgttgccagcataattgttccaaaatagaaattccatcatgccactctctactttcaatcttttaatggccccagtggctttggggccattaacatctaatttggggataaaaatctaaattcttaatatggtatagaagcctgttccacctggacctgtctacctcggccctcacaggtgcccttcaccatccccatcccaaacaacttgcattttagcacatacaccatgctatttctcatctctgtcctggaaccccctct

SEQ ID NO: 149526 - DNA, 338 bp, Homo sapiens
aatgatggtcctcagctcacgtggtcctcagctcaatgatggtcctcagctcaatgatttgtcctcagctcacatgatggtcctcagctcaatgatggtcctcagctcaactgatggtcctcagctcaaatactttctcttccacgaagcctcctttgacttttatagtcatattgagacatgcttcctatgttcccacggtgttttatacctacccctttctaaaaacatgcattttggtgtctgcctctgcactcatggttagccctaagaagggagaggtgatgagtttcaacctttgcctggccttacaggtcaaaaatgggtgagctacaaat

SEQ ID NO: 149527 - DNA, 562 bp, Homo sapiens
taatgatcacgtcatggcaaatctaaatgcaagaatcatagcactgcttttgtcctgtgtggactctgtcttgcttcttctcctgtatttttatgttgctttttttttggacattgtgacagcattctaagtcctaaagcccacccatgtccacccatcacctccttttataatgcttattggtttgggtttcaagatatctttcatgagccatactcacattaccttcatgatattaatgaaatttcctacaattgcatgtagatcactgtttcttattattttgcatgaagtttagctgacacgaacctgctttacaaatgtacatttactcccaaattcacttgctttgcaatgctttagatgggtttacctaaaaaccttggctacaattgagagcacctgccagttccacaggagcaataatcagaagtggtttctgacactgagcaatgctatggtcacacagggactacctggaacattgagacaattaccttaagatcaaggcccctaaaccaaaagaagaaaaaaaaaagtttttttgtttttcaattgctgg

SEQ ID NO: 149528 - DNA, 456 bp, Homo sapiens
ccatcaagtaaatataccaaacactttatcttatgtgctcaaaaggcaaggtgtcatcatcacctttcacataccccatgagatttatttacagcttacattgactgtgaaactcttttatcccctgggagttctactttatttattccagataataggacacttgcaacctattaacagttgtaaacaggtctttcaagtacatctgacatagcaattacaaaatgtatttgttagacaaatatctagaattaaatcaggacaaagatgaagattagatgaccacaagaagtttctgcatagtttatctatttttcaaaaaaaaaatacaagtattatagaccctcagctacaaaattccagtgaataatttaatggatattttacttattatattttagaaaaacattatttgatgaatgtttatttaataaaacagccttacccttaatgata

SEQ ID NO: 149529 - DNA, 192 bp, Homo sapiens
caaaaaaacaaaaaaaaaagcagtcttgagcgttcagaaaatttatagaacactgtctgttctaagtcacacctatctaggagggcttatggagtttatttcagtaataatatagtagttccttctaaccttaagattacatgcatggctgagaatcttgagaaatttggattaagacttgataaaatattc

SEQ ID NO: 149530 - DNA, 392 bp, Homo sapiens
ctgtgtctgctcagcatcagggcctcccactgaagccctcccacaccctcacacccttgcctgcaccctgtgccctgaacctgccatgcacagccctggccaccccagcacatggggtccagtctgaagcagttgcccatgagggctgccccaggctgaagcccaggcccacgccacagctgaggtgagcgggatcttccaccaggaagccccagccttccagaagggaggtcttggagctccaggacagcaacccaggactgccagcactcacaaagcagcaagggggaggagctcactgggttcccaagggctgcgggagggtgaagaggtgacccagttgtggggcagggggagtttggctggcatggccacctcaggccctgcaggcc

SEQ ID NO: 149531 - DNA, 657 bp, Homo sapiens
gggtccgttacactctgcagctgcctctcacgcctgtaaggacagaactgacccaagttgaatttagtcccggaaagtggtgtctagaaagctctattttacttttctttttgtccagtagaagctctgttggacaagaagggcctgctgtttaggaatctagggaaatctgtttccctgagagacacagatgcagctgtgtgcagctcagcttaagtggacttgtttcttcacctgttaaaagagagcgtggagttggatagcatctaagaatccttctacctcagacattcccattctaaatatggtgggcctgacactgcaaaactgctaaagaagttccacacaaaaatgtgttttagccttaattacttattcagtttaaacaaaaaagaatttttttaaattaccagctcttttgttttcagttctcataaatacatctggtttccccctctctctctatctgataaaagtattctgaaaggcagagtccggagtgcagaggttagaggatctagaaggggaggtgagatggaggtggcaggggaaatgaggatggcagctttagtcgtaggctcctgctgctccctgctgtttctttttttttttttcttttggagatggcatctggctctgtcgccaggctggagtgca

SEQ ID NO: 149532 - DNA, 273 bp, Homo sapiens
catctataataccaccacgaggctgggtatgatggttcacacctgtaatcccagcacagcagagtgagactctgtcccaacaacaacaaaaaatccaaagtgaaagattaccagctagcaggcactgctagacttagaaacaacccatacaaatgggatacaccctggagtttattaccacattcttttgtattttttcaatgtcggtcacaattcacaacccaccaatgtttttataaacccaagggaaaggaagtttagaatggaatgtaa

SEQ ID NO: 149533 - DNA, 511 bp, Homo sapiens
agtgcagatctcagactctatttagggggctcaggtgcagcccagagaagagaagcgacttgcacaagagctgagagctccccgttaaggcagaattttcctcccccggcagcctccccagctgaggaggctgagccctatgctcatggaatagggtgggggcactggggtcacctgttcccacctctgggtagtggcttgccttgatcaggggccttccagagacagcatcttcacccagaatcagccatcaggaattgtagcccagtgccaggaagcaccctggggggagtaatgggaagttagttccgatgttgaatgcactttggcatgtttcaagcacctcaagtaagggcttgacttaattattcattcgtccttttagaagtgtttgtttattaactgtagacatcgggagacagagatgagcaggacaggtaagttctctgtccccatggagctgacattcccagggctatgctagcaacacagagagaggtggggaggcagt

SEQ ID NO: 149534 - DNA, 468 bp, Homo sapiens
tgtctacattgtgagaaggaaagtcttattcaaaagacaatgtgaggagagtcctatatttagttttaaacctcataaagtgctaaaaattgggattttcagtggcttgaccttatctcactgtaatttcaccattccaattacatgtatgtcctttaaggaaagtgattgatcatatttaccccagtcaaaaatattattatcaggagtctctgagcctactctggctgaaaaaaaaaaaaaaaagtctcaaggatggaaataattaatgtttgatttttaaataattagtaatgttcccccttagttagacatgtaaagaatattccctctacaaattcctacagattatctcttaattttatttaaattcagtgatgatttttctcttcagttcctaagaaatagcccatagggaagtagtttttccaggggaattctgtgaccaagtcactgtgaaatccaata

SEQ ID NO: 149535 - DNA, 380 bp, Homo sapiens
gcggccgcctactactactactgctcgaattcaagcttctaacgatgtacggggacatgtatgtcctttaaggaaagtgattgatcatatttaccccagtcaaaaatattattatcaggagtctctgagcctactctggctgaaaaaaaaaaaaaaaagtctcaaggatggaaataattaatgtttgatttttaaataattagtaatgttcccccttagttagacatgtaaagaatattccctctacaaattcctacagattatctcttaattttatttaaattcagtgatgatttttctcttcagttcctaagaaatagcccatagggaagtagtttttccaggggaattctgtgaccaagtcactgtgaaatccaata

SEQ ID NO: 149536 - DNA, 369 bp, Homo sapiens
acctcgcggagactggggccacagggtcacgctgcctcggcacggcgacctttcgtgggtaaccattcatctgagtgcagacagcaaatttcagggctcaaacaggagatcagtacctgcttctgtacatagaacagagtcagttacacgtggcggaagagaccctggggctgcccagggcggtgaggcagcccacattagagctgggagcattcgctgcccccccagagcaaggggacaaagggagatggtgaggtccctgcagcctgggggccagggccacctagcaggaactagaatcaatgtgggccacagaggggatggagagggagaaagggagggatacccacagcctctcttccccctgct

SEQ ID NO: 149537 - DNA, 402 bp, Homo sapiens
atgaatgtgaatcgggaatgagaaggaaccactagagaagcaagaggaaaaagagaaatggagaaaatgagcagcaatgaagcggctagaaaactacagagatagaaagggcaagagggaagagaaaaggtgggagaagtgagaaatggaacaggaggccactgcagtaccaagatgtcaagatggaagagactttgtatccaactgtcctccactgggacaacacctagtacgtgagtgtggtggccttaagaaggtaaagtgcagagagccactgagttactgctaccttcagtgattgacctatatccaatacacagaaccctctgctcattgtaagaaatgtgtctggggcatatcattgtgggtgttaacagtttaacatgatcaatatgtactggt

SEQ ID NO: 149538 - DNA, 565 bp, Homo sapiens
atcgtgaaggaggtgaagaagttggagcaggacccagggctcctccaggagtcctccagactgaggagcctcctcgaggagctgaggaccatcgttgaacgatggtcctcagctactggggtcaagtgattctcccacttcagcctccccagtagctgggactatagatggcatgagccactgcgcccagccttgccatttattctttttataatttaacaaatatttatggagcaatttacattaattggccccttgagacacaaagaagagccttcaaggcatcatcaggaatattctagatacaataaaatgacatgtatataataaggtatattttaatgaaatcataatggaatataaaacaattggccagcaatgatcaaaatggcctaacttctcttccacttttaatttcaggttaaagtaatttatattttttggcataaggaacaaattagggtttttagtcttgttttggtgcttattgccgataagtcattttgtgtcaggtttgtgtttgttttggtctcatctctactaagctgaggaccatcgttgaaaa

SEQ ID NO: 149539 - DNA, 134 bp, Homo sapiens
atgtaattatatccatctctttaattatttttagtgtcctggcttgatgatttttgtgcttatgctgggaatattgctctccctacctcacatggatatcaaaaggactaagtaattcttaatacttttttttt

SEQ ID NO: 149540 - DNA, 273 bp, Homo sapiens
aggggctagggggcttctgtgtagtaggtgacagtgtgtggcctgcgctgtgcctgctcgtgttgcctacatgtccctggctccctgattaaatgcctttgtggttgccttcctcctccttagtcgctctttgcaggccccctcttccctgcctacctcttacctgctgatttttcccagagttatagcccaagcctcattccagcctctttccattctagcctctgagggtgcggctactagccaaccgtggactagtagccaaccgtggac

SEQ ID NO: 149541 - DNA, 845 bp, Homo sapiens
atgtctgaaaacatttcatttcccatataaaaccttgtcatttaagcaactgggatactttgtaatctccttttgaactatgatagactctaaacccttatgtgaaaggcagttattgtgaattgctgtggtttttaggatgttgcccgtttccctgttcttccctgtttcttcagtgtcaataatgcgggggtctcttaagaaaatagctttgtaatttacttctccagacctagggaaatactgcattaaactgatgaaggtgcctcaggtgaactgcacttttgatttcagcaggattttctggttgttatgagtcagtatgtttctttctcttggcctaatatctttatattaggaaggagtgttgctgtaattagagaccattaggcattgcttgagccatttgtctattactttttgatatattggattttctggtaactcccaggttagagaagtggtccctccttctactctaatttctttgtaatcacagaatcagcatcttgtctctagagagttttgctagataattgggctgctccatgcctagcctagaggctttgggagtagaacccagacttatctaagctttgtcttccaaatgttgcatcactcaattactgtatgaattcttgccttgttgatgtgtcatttaagaaacagcttatatacaaatgatgaagtgtatatataaatcttcctagttgccaatttcataagattgaagaaactgcaagttttgagaacacttttaagcaatttatttaacctctaattggctaccttattcggtatgactggaagatgagatgtcacatcaaactgtgttatgaatattt

SEQ ID NO: 149542 - DNA, 489 bp, Homo sapiens
cggccgcagagctccaccgctgaggccaatcgggcaacactttattctataaaatagaatgaatgttttcagtattcacaattcttaacagttggctccacgctgacctcagagccccctgctgtgccaagtggtaggctttgattactggatggggaactggggcttgggctctaacagctaacctcaaggattccatcacttaccgaggcaattgaaaccctaaagagcaaggtgtaatgtcccaggaagccttttgatttgacttattaaattggaccaactttataaagttgctgatgggatgttctttgacctacaaaacattaatttcatatagtccaatgtaatacataggttcagtataagttcaaaactgacataaataacaattagactaaggagtcctgataccagtgatagattattgagatgtacttaaatagccatttttgctttaattatttatgatcttgaagtacttacaat

SEQ ID NO: 149543 - DNA, 197 bp, Homo sapiens
cccacaaccatctgaaagctttaaaaatataccttttaccaactatatatttgcgtgaggctaggtcatcttcttatcacttcttcaaaacaaattacagctcactaccagggtgcactattagccacgtaatacacctacacatgtactcactgtatctaaaataaaagttgaaattaaaaaaaaaaactaattgc

SEQ ID NO: 149544 - DNA, 400 bp, Homo sapiens
tgcccagtagacaagtagagtctgcctccatatcatcgaatggggagcttagcggaaggttctggaacctgtggagtgtggtgatggatgtggcaggtggcgtttgaagctgtccacaggcagccatttgcagtgtagatgctgtgttcctgaaatgcttaaaagcccagcgtccaagagtggaaagacagacctacatgtaacggagggagcgtgttcccagaaagccagaattcttagaaagcctctcattctgggctggcaggcagctccagctccaggcccccggggaggcaaaggagctcctccctccgcatgcggaacccacccggcccttccttccttaccccctgcatggcaagcatcccacaccgacggtggaaacacacgtgtgcacgca

SEQ ID NO: 149545 - DNA, 416 bp, Homo sapiens
agcttgatgttctgcattgctagggaggcctcaggaaacttacaatcatggcagaaggcaaaggagaagcaccttcttcacaaggcagcaggagagagaacccaaagctatttttatttgactttaaattacttcctggattttacttttgaatgtagatatcataaagtgataaaaattccactcaaaaaaataacttagttgtggccaggaatggtggcttacaactgtaatcccagcgctttgggaagccacggtcggaggataacttgagatcaggagttcaagactagcctgagcaacacagtgagaccccatctgtaaaaaatatacacatttttaaattagccgggcatgctggcgcacacttgtggtcccagctactcagaaggctgaggtgagaggattgcctgagg

SEQ ID NO: 149546 - DNA, 845 bp, Homo sapiens
  misc_feature (25)..(25): n is a, c, g, or t
gctaagcgtgactgactctcttagnaaccaccgctacagaaatcctttggctgaatgtggaggaaaagagcggaaggacttggggctgttgcagcaaaggagccccacctctgcaggttttgcccacactatgaagatgctgtgcagcccggggtgagggtgtcctggcttccataccgactaccatattcccctgtcccttgcaacccagtcttcctgctgtggctactaaagtctttgcctccctgctcatcaccgctcctcacacacttgaggttttggaagttgtcatgctggatctggatattgttaagttgttgatccttccaagaccagctgctgctctaccatttataaaaggccaagaagcctccatctccctttgtccagcacattctgattgtggtcaatctcaacagaaacacatgtagtgaaatgaaggccgggtatgtgggtcttttcctacgctgcaaaatggattcattgttctgcggaatttgagcctgaccagaacagcaggacttataagccccaggactgaaaataaactccacagtctttcagattcacaggggtcaggaaaggaggagacctagaagaatctcatgttccaaagacaaactctcctgctaccaaatacccacattctcggaagccgagaatatttggacatctcccagtgccagacttgcttgcatttcacatctgggcatggtgttgccctagagccaagataaactcacggtggggaagtccagggacacccaagtgttcaagaaatggcttttctcattcaggaatccttcccctgtcaaatcccaggaattatcttgggggtcagacag

SEQ ID NO: 149547 - DNA, 485 bp, Homo sapiens
tgggcagtgccccacagcagggatgcctgctgtcttgcgttctgaaaggacagttcccggcacctcgagacaggaggttttctatgcctatgtgactttgtatgttgcgtttccttctaaattttgttttatttctggggtgtgtgtactggtggagaactttggatttagtagaatatctgaggtgaatctaaatagattcttcccagtctcctggcttgtgtacctggacggttggagttgttgtgtcctgagatgggccaggccacaggcacaggaccaggggtttggtgtgaggcaggtcatgtgtgaggtacctgcttgatagccaaacgggcatgccaagtggttgagtaggggtctggagttgaggggagaggactgggctgaggtctagagcaggccattgttcatacctgcatcctctcgcaagcccgagacaggatgagattaccaagggagtgagagtagagaaggggagggga

SEQ ID NO: 149548 - DNA, 406 bp, Homo sapiens
ccactgacggttagagctttccgtgaaatttgtcagaagtgcatgtacaaacaatccacatgctcaaaactagagaaatgcatgtgaagaattggaggagaatgcatgctgccctgctttcacctgacagtgtgaagtcttttcatagctcccctatgcctgagcctgtatttatgggtccatcctgccatatatttgatatatataaaatgataaagcagcctgttaactggatttagtttacggcttttgagcaaaagtaccaaattgaagtcagagttgggtccttcatagttaaagccacccatgtaaggtgaagagaggggtttatcctcctgaaattgtcagtatggccatgttgatccaaatctagatgcagcaatggattctcagcccattcccattc

SEQ ID NO: 149549 - DNA, 397 bp, Homo sapiens
ctgtctatagaaggcgtgcaccgggccacagttgaggggatggggaggtgaaagcgagggttccgaggctcccgtgattgcggaacggggtgactatctgtcatgggaagcttgtacctgcctgccgctcactggatgcactccccaactgcgctttccaccgcctgtgccagggtctgtgctctttgaccaagatcagccactgcatgcttactcatccttttaccacctctccgtcgagagccggggggaaattaagggctgaaagaagcttggctagagatgcggggtgcctagagtcgtaggggaactcttgtgcgatgcggtgctgaatccgaggggatgcataggtggcagctttaacagctgcagccaggaagtaaccatgaatcaaatg

SEQ ID NO: 149550 - DNA, 436 bp, Homo sapiens
agagaggaaggaacagtgggagggaaacacttcagatagaaaacacttggacgctctttggataaatcagttgtgttcaacacactttccaaggtttttatggtaaagtggttgggatgtttggaaacataattttgattcaacatcctgaagtcattaaggaactgggagagggctgtagctcataccaaactgaatgcagaacgaggaaggctgcttaagtcagcatataatcactggtcatgaaaaatacccgtttaaactgtcgacagaattagttactcaaaagtcagattctggccggcttaatagaaatctgtatcttgttctgcggacaggtaaggttttttggattcctctagataacccaagattagaaccaaagctgtgtctaggctgcttctacagaggccactggtctctatcagaagcaccc

SEQ ID NO: 149551 - DNA, 446 bp, Homo sapiens
tatgagcttccagtgtgccacccccacccaggcaccccaccttggatagccaagagggctacctcggtaaaaaagagatcctaagacagacttgtaagctcaacccagagggtaatcctaattcatttccccctgcccaggggagacaaatgttgctatatcaatgactggggaaaaggcccacatatttttcatgtctcaccctcagactggagtggcgtctcactgcttctagaagattggaactattactgacttggtattcatatggaccaaaggtacctcctgttggacattccttaggcctgtcacatatggtccaagaaagcagtaagatggaaaagagagaccagctaagagctactccaaatgcccacaccatcagatgatcatcccaagtgtcagagatatctgtgaatcaagtgctcaaagctacacacattggg

SEQ ID NO: 149552 - DNA, 402 bp, Homo sapiens
tgcctgtaatctcagctacatgggaggctgaggcaggataattgcttgaacccaggaggcagaggttgcagtgagctgagattgtgccactgcattccagcctgggcaacagagtgagactccgtctcaaaaaataaataaataaataaaagaaactggagctgctaattttgttttgttttgttttttatgaagctgctaatttttaaattaagggacataaattattgtattcaacttttcatttactctatctgggcctgggaaatatcataattacactgaaaaccttgtaaacaatagcctgacctgcaacatcatcttagatgatttctgccccccttcttgcccccccccccccaagggcataggggggggggaactcctttaaagtcaaccttg

SEQ ID NO: 149553 - DNA, 406 bp, Homo sapiens
gaatcgagctcgcccgctgttactaaatagctgtactactgctgagtactaatgctgttggcctagcaaaaactaacccaaacagtaaatttatgccaagcattttcctcaggaaaaaaaaaatgtaggcatggtctacctgttgtattgattagtcccagaaatgtagttggtaaagttgggttttgctcaagtgtctggctttgtggattagctcagtcttgcatatagttttccataattgcttaacctaaaagcattctatttgattagtacaattagtttggctttctccctcttaccaatatcaattcatatgcattccctcctaacgttgctcactttattttgtaacaaagaatgaagacagcagaacttcctgttacttatttccatattagaagaa

SEQ ID NO: 149554 - DNA, 129 bp, Homo sapiens
aaattaggtctctggcctctgggctctttggattctacgatatatttttctcccttctgttcctttaaaggagcaaataagagggaccctgaagtcaccaaggggacttgagtcactgagtttatatcc

SEQ ID NO: 149555 - DNA, 409 bp, Homo sapiens
gaaactatagcatcacacagatttaaaatatgctagactgagacattcctggagtggcctaatgggaaaagcacagaggaggaagacctcagttcaatctgccttgactgtttactagctctatgtctaaagctgtttcctcatgtctatttattgcttttatcgtaagattcaaatgaaataacatctggtcagttttactttttaacacttgttttcaagacacaagattttattagagaacattttgagcataacacgaatttggggttgcttatgcactgtttagtctatgaaaaacactagggaaacacagaaaattgcacacacctgaacccagccaggtaagatgtacaaaacagacatgcacgtacctgaaacatgtcagctacctcagtccaccaccctc

SEQ ID NO: 149556 - DNA, 130 bp, Homo sapiens
aattgaacaggaatgtaccatgctgactaaggaaggaggggaggaaaaggtggtgcctacagaggtactagcatatgcaaaggtgagtagcagcaacatatgtaatttgacattgctatagcataaagtt

SEQ ID NO: 149557 - DNA, 474 bp, Homo sapiens
agcagggcctggtctgcccaatggaaccttctccagaggcctcccttgttaacattcacttcagctgcaagtttgacaactactgtggtttacatctcccaggacgtccttctgcccattcttggaaaggccatcccccttattctggctcatctgtcgtgtcctcccgggcatgtcttcaccctctcctcctgtgtgagtctctgggccccttgtttcccattctgccttgtgatgattttccttgctggtttcctggtgttttgggtctgctattgctgtagggcagggtctgcatgtgtgtattcactgttgccctggcactgaatagacaccagtacgcagttgaatgaggggattcccagcttacagatgagagggctgaggcactgaaaggtctggggggtgcgcagatctctctggcttctgtcctgtctgaaaggtttgggaggtgcgcagatctcgctggcttct

SEQ ID NO: 149558 - DNA, 546 bp, Homo sapiens
  misc_feature (23)..(23): n is a, c, g, or t
  misc_feature (59)..(59): n is a, c, g, or t
  misc_feature (79)..(79): n is a, c, g, or t
aggcggacattagcagcaacganagcacaaggtcccctcacactgacatccaggccgcntgtgcttttcccagcagtgntgcttgtgtgtcctccctctcatatgctcctgctagtcttctcattctcagctgatggcaactctttttagtcacagtctgacatttttggtatcctttactcttctttctcataccccagatttagtccattagaaaatgtggtataaagtgattggaaatagtaggaatccaatcacgtcccactatttccactgctcacaccccagttgaagtaaccgacatctccagcctgaaatactgcactcatttcctacagttttcccacctgccttgctcatcgccggcctttggattctgttctcagcagagcagctacagtgatccttttaaaagagaagttgtggcatgtctttattctgcttaaaactatctcattcaaaatcaaaatccttcccacatacttgagccctatgcccacatgatctgaccaaacccctgaccttatctcagtgactctctgctct

SEQ ID NO: 149559 - DNA, 192 bp, Homo sapiens
actcttcattttcctatcagtttattgttgtacatatgaggtaccatgctactatcagaattatatctaggttttttattttaaaaaactcagagaaaaaaatgtttccagtaattttcattcaatgtgaatgacaagaatattacagctataaacattgaaataaccatttcatttcttcctgaggaagtt

SEQ ID NO: 149560 - DNA, 332 bp, Homo sapiens
caagagttcaagaccagcccaggcaatatggcaaaaccctgtctccaccaaaaatataaaaactagtcaggcatggtggcgtgcccctgtggtcccagctacttggggggctgaagtgggatgatggtatgagcccaggaggcagaggttacagtgagccgagatcacagaactccaacctcggtgacagagtgaaaccgtgtctcaaaaaaaagaaatttctagaaatggacaggggtgcacctttacaagtttttaaatacaatggttaattaagagcttgtactaagagtagaaagaatgttggttctgcaagtctatagcctttattc

SEQ ID NO: 149561 - DNA, 327 bp, Homo sapiens
cagagcagtatatggcaaaaaccatgaagctagtccaaactagatgcctaagaaaggaattttacattaatttgcaagattgtttggttaacctctgtttctcccaaagtcgcacacttgcctcgcaaggtgctgaaaccgtcacatattagcaacagaaacactagcagctgattaccccttcacttgtcagttagataagaaaagtgagcatatactacatgccaagaactgtgttaggagtaggagatactacagagatgagcacagtgcctgccctcagggagctcacaggctggcagagaattttttaacaattctgaagga

SEQ ID NO: 149562 - DNA, 499 bp, Homo sapiens
tggaagacggggaggaggggcagaggccacacccagattttcagacctgagccaacagaaggaggaacaggcagagaggccacagctttgcacccatactccctgcctgcccagacacctggggcagctcgctgttcacagcagtccccaaaggtccaaagtcctgaggctgcagatctaattgaaaggtctgagtggaagagcttcagagatcaggatgtcactcccaacccactgccccaagtgttctaccagtgtcaacccaatcaatcttaaccaccccagaaggcatctcattttacagatgagaaaaccgaggccaagagctcacagccactcaaggtcacagcgaacagtagatgcaggagccagaattccacccgcggtggcagtcacacactttcaaccacaggctcagtcagcgtgactctccccagggcctggcagcaggtcaccgtgccccggccacactctcacaactgtccgtaacagggcccct

SEQ ID NO: 149563 - DNA, 437 bp, Homo sapiens
tcctagagatggggggtttcacgatattgcccaggctggtcccaaactcctggcctcaagctatcctcctgccttgacgttcgaaagcactgagattttcctctctgtcctgccgccatgtgaagaaagatgtgtttgcttccccttccaccgtgattgtaattttcctgcagcctccccagccaagctgaactcgacattcctctaagccggtcttacccaccagtggctgaaaagctttggaagatgaagatgatctggccaaaagagaagatgagttcatggacctaggggatatgtgacctgtttattgagtgattgtgaaagaggaatgtgggagattgggacagctgatccccggattcatgtcacgctgcagctaatgctggctggatccttagcctggcactctgttggaataaacctgggtctttggg

SEQ ID NO: 149564 - DNA, 671 bp, Homo sapiens
tccctcccctgctatgactctgcatttcacctctccaggaggctaggcaggtccccagtccacaggccggagcttctgcactcagggcctctcacagctccgtgactcctgggtggtccttagggtgtgagtgctttacccaggagcacttctactccatttggatttaggttatccttggagttagttgggctaatggttaaaggacagtttatgggatgatgccccattccacctttttgaacaaacttggcatggacagaagccagaatctccatctctctcatgctctcttccctatcaaatgtccctacctctaaataagtttcctccaggaacagcatctctggttgctttgtggaaggaaacacaaaacaatataactctccatttaaagtactctctacatgcccaggtctgctaacttgtgggataaggtattctgattgtgccctggggaattaaactgctctttaagtaaacccagaagataactaacaaataatcctgcaaattaatagtgcctaaaagatgaaagttatcagtttccttcatacatccggtttattatcagtggtgcaattaaattctattttctgctgtggtttgagcacttcacagcttgggaagcctctctcctgagaccttcacagggacaggccgtcacttca

SEQ ID NO: 149565 - DNA, 144 bp, Homo sapiens
ttacggcctccatgtctctctaggccactcagcccacaaatctcttcccactttggtcactataaagctgccaggtgatcattctaaaatgtacatttgatgcttttattttcctcagtgcatgagaatgaagtccattcaccc

SEQ ID NO: 149566 - DNA, 502 bp, Homo sapiens
gccaagaatccctaagtagcaaataaaacctttcaaccattgaagtagagttataacttccagacactaaagctggagttcgtcttttgcctatttaatctatatattttttattttttagagacagtgtcgctctgtcacccagcctagagtgcagtgacatgatcatagctcactgcagcctcaaacttctggactgaagcaaccctccagcctcagccttctgcatagctgggactacaggtcccagcacaccaccatgcccagctaaattttttacagagacgaggtctcactatgttgcccaggctggtctcaaactcctgaccacaagcaatgctcctgcctcagcctgtcaatattttacctgtatttctcatcagcttggttttttggtcatggttgttaatttttgaattatatgaaagtcctacatagaaggttctctcctggtgttttggcagatgtaagaaaattgatttcgtttgtagctgttaatttg

SEQ ID NO: 149567 - DNA, 511 bp, Homo sapiens
ggttattgccccccattttgggggtttgagaacccctctatttttctcccccagaggtgagcacagtacccacagtaggtagtatttcagccctcgctcattccctttctcctccatctagtagtccccaatgtctattgttctcatatttatgtccaattagcatttgttttttaaaaagggtggttgaagaaattctcagtgcttgtcagtgtctctcagtgcattcatttaattcatgagccctggaatgatggtttcatttgggcagaactctacaatcaaaaagaagtaataaaagggaaaaaaaagtgaaagccatcaactacaggattgaaattcccaaagcatcagaggtcctttcaaaaaatagtatgttgatttttaatttttatgacttattggctttgttcatgaaaatataaacatgttatcacaaaggattttttaattcaactatttctcagttttctctttcaccttcaaaataaaatatcataaattatttaaa

SEQ ID NO: 149568 - DNA, 243 bp, Homo sapiens
tttggactagtgcagcagtcaggatgacagaaagaaaagcagatgtacaaaaatgcagaaaaataaagtgtgaagtgtttgtaggtggagagatagaattctttgctatttgtattgaatccttaatatattctagtgcagaaagcatgaagcatggctaccggaagcacacgtgtcacacatcaaagggaagctgcagaaaacagcagcgttggtgcaattactctttcttatatttcccct

SEQ ID NO: 149569 - DNA, 400 bp, Homo sapiens
aagacacacacaaaaaaaacactgtaccactggctaatcaaatattagataaggcaaagtttctctatagctaataaggaataaaattaaaaactatcacaattttacatccctttcatgaattaataattaatgaagtatgcaacaacacctgttaacagaaagccataaatagatttcacatgtacctgatggaagaccatatattacctatgaagtcggtttttctgcctaagggagagaacaggggatcagacctcaatctgatcaagcctctggctccaactaccaatttataggaaatacaaaggacagaggaacacatgaaagtacaacatagtgggccaggagctgtggctcatgcctgcaatactagtactatgggaggccaaggtgggca

SEQ ID NO: 149570 - DNA, 133 bp, Homo sapiens
ctgacagtcctgggggctgggtccttacgacccccactgtgacttaagcagagagacagggcccagcctgtgcaccaaagccccacaggaacccagtctccgcagtggctccagccctcagcccctgccccga

SEQ ID NO: 149571 - DNA, 542 bp, Homo sapiens
tggctttgaggatcatgtgtatcatgatatataaatgacttaaatttaagtgctatgagatctgtgaattgactttgtaaactgtctagaaacaaaatgagttgttgcaaaaggtcaagtaagatcaagagtgaagaagattcattgtctttctagtcaggaggccatcagtggcctcattggaagcattgtcagtgaagtggtgaggctagaaaccagagtgcagtgaatcaggagtgaagaagtagatttagcatatatagcctattcttactagaagcttagctaccaggaaaggaaaaacaaaaggacactgactagaagtgaatgtagggttgaaggaaggttttctcaggtatgagtgtggggtactgataggaaggtgcaagtggagaggacaagtcagagatacaggagaggtggtgccaatcagagccgggcctccacagaggctgctgtaggggtgggaaatctggagctcagttctcttctttggtttgggaagttgagtagcaggtggagacagggtgcctcacgcagga

SEQ ID NO: 149572 - DNA, 367 bp, Homo sapiens
cgttggggctggtggtctggggcaacacagatctgccatcagacagcctgtgtggcttccgtggctcaccgtgcttccctgagcttccctggttcccgctgatgaaacagagaaatcacctaccataagagttattgtaggctggggacggtggcacacgcctgtggccccagtgacttgggaggctgaggcaggagagtcacttgaactcgggaggtggaggctgtggtgagctgagatcgcgtcactgcactctagcctgagcaacacagtaagactgcatctcaaaacaaaacaaaacaaaaatgctgcaacctatatagttcagagatctgaattgggttttctttgcaattctggaatcagg

SEQ ID NO: 149573 - DNA, 243 bp, Homo sapiens
gtcagcggcacaaatagcacagagaccttagcttcccgacctgtccgaaaggtgtttcctgggctgaggtcaaggcgttggcggccggctgtacctccggaggctccagggaggctttgtttcctgccctttgctgcccacattcctgggctcgggcccatcctgcctccagccgcagagcctgtccccatcattctctctgcctccacccatggtcatggctgcttccttgactcagccctt

SEQ ID NO: 149574 - DNA, 354 bp, Homo sapiens
tgaagaaaagggaaggctgactgaggttaaaaacaatggagcttgaacaggaacacagaaacagctctgactagaaagacaggtgtgtgtgtgtatgtgtgtgtgtgtcagagacagaaggatagagacagagagagagaaaatttgagagtgggaaccacagagcacaagaagaaaaatgagatagaggtttggagaatatgagcctgcgaacaatgagagaggtaggagaaagtatattattttcttttctgaggtgtgattcccatagagaatatctcccttgggggtaggttagatacctacgagatgcaaaacacaatgtgctctcagttctgccaggtacatatttaa

SEQ ID NO: 149575 - DNA, 280 bp, Homo sapiens
tggggaactagttttagcagctggtttcaggatcagttctgctatactcagtgttaataccaagctccagttaacttcctcacggagctgaagttcagcgctgggttgagaagatccagttctttttgagaagacacgcacacacagacacgcattccctgcccttcttttgaaataactcacttcacaaaaatggtcacttttcataaatggggacaatggggaacaatctttccaagtccctttggaaatgcagtcactccctcaaggcagagcctgc

SEQ ID NO: 149576 - DNA, 375 bp, Homo sapiens
caggcatgtctgctgcagtaggaatgtttcatttggtagagaggaaacataagaaaaagtaggattggtacccaccattattattaaaaagtaggattgctaccagccattattattaaaaagtaggattgctacccgccattactattaaaaagtaggattcctacccgccattattattaaaaagtaggattggtacccgccattattattaaaaagtaggattgctacccaacattattattaaaaagtaggattgctaccctccattattattaaaaagtaggattgctaccctccattattattaaaaagtaggattgctacctgccattattattaaaaagtaggattgctacctgccattattattaa

SEQ ID NO: 149577 - DNA, 297 bp, Homo sapiens
catagcctcatccagtggcatgccctcatccagtggcatgccctcatccagtgggggggcttccccagtttttggtatcgtatttatatcagcattcagacttcatctccggaggcagaggtttcctgagccacagctgcctggtggcagaggctgtaccatccaccacctgcactttgcctttgcaccctggggaacccgttggaaatgagcactatgaaaaggtggtggccgaccctctgccagtgtgtgctgcctggaggcttctaagcctggggcatctggagaggtgctttg

SEQ ID NO: 149578 - DNA, 430 bp, Homo sapiens
tgtgcacagcatctgggggcactcaggtggccctgctgtctctgggcctgtccctgacactggcaggggttggggcaccagagttcaaatgggggccgcatatcttgtctaaatcttccagagttttaagtcaagccagtgcactattgatacaatatgttgtgtcttcttctttgacaactacatcttcaaaatggaaaaaatatgtggggacctatggtttttatatgaattaatgttggcaaaatatcaaagaccactgaatttaactgttaatttaactgttatctaggtgttctgttcagaggccactcatgtttgaatgagtaacaggatcaagacatgatttatcaataagtgcatatatctcccataacattgattattttgtttttatttctgcaaatgactaatcatgttttatattaag

SEQ ID NO: 149579 - DNA, 186 bp, Homo sapiens
cttgacagtcagtagcagggtgattgtattttctgttactctttttattcagtgtaaggttttcttctcctttttatagtcctctactgagtccctggttatccttgacttagagcaattccatatcacatagatctccaaattccccagactagaaaatgtgctattgaaacttctaaaactagg

SEQ ID NO: 149580 - DNA, 311 bp, Homo sapiens
ctgggtttcagtctgtggggagttggaggatgagatggggaaggaacagcaggaagatttagccaaagctgggattacaggcgtgcgccacagtcttcgcctgatatcaggcgaagactgtggttgaaagaacacttggacggggtggggtcaggtcctagttcaggttgttctctttctatgtaagatactttaagtctctgggccctacatccttttaaagtgaagggatcagactggatgaaaaataaagtcaccttaatctaaattcaatttttcttatctctgtccttccacagtcttcgcctgat

SEQ ID NO: 149581 - DNA, 414 bp, Homo sapiens
catcatcctctgtccgctacgatccccagacacttttgcatggctgtttagacagaattttcctgcagctcttttgggagtagctcttgaaagtttaacccctgacagttgatgaagaacagtgaggcttaggaggcaggtaggcctttgagcaaataactctgagcaactggttgccattgtcagttcccctaccaagtatgcgtttgatttttaaaaggattccccaaagttctatttaggactacagagtctctaagaatgtatttctgttgtcaaggtcaggagcaagatcatctctgtggacctgtcggtttgaaggagttgcaagatattctcatcattcattgatttatatactcaaaaaacatatatttgcatgtgccaggaaaaggtaaggaaagggagccttca

SEQ ID NO: 149582 - DNA, 269 bp, Homo sapiens
cttaagtactttgagatactttagtacttaactttaaatacttcaacttaagtacttctctcagctcccctgccagggagtctgtgctgagactaaggtgaagctgcacaaatgctgctctgaagcagggctgcttttgagaaacatgcagccctcggccctatttaaataaaactgtttcaattagaaagaaattaaggctcttctcagtgctgctgcttgaattacttaataagctttaaacctcagccccacgccttccatgcagg

SEQ ID NO: 149583 - DNA, 159 bp, Homo sapiens
ccaccttggcttcccaaagtgctgggattacaggtgtgagccaatgtgcccagcctaagattttgacttttgggactcaagggcccagtgaaataggagtcaaagatccggggaggaggctggttttcccctgaagacacaatccaaattctatagcca

SEQ ID NO: 149584 - DNA, 405 bp, Homo sapiens
ccggtaccttccgggctactcacatctctgattccatgggtctgaggcggggcccgggaatgtacattgcaggacgcacttctgtgccgctctgcctgctcaggggtgataaccgcggcctcacacctcctcactagggggattcctcagggcttatgcccctgagctcacacatacccctgcacccgcccttccaggcccctcctctggcagttctcaggccagtggcagctgagacctgacactatctcgggctgtgctgctacagggagaggagcagagagcatggggacgtggagaagggagacgccatcctaaccctccaggagacacccaggctggtatcctacacatcctccctacagcgtaacgaaagctaacaggcagcacttagtgtgtgcagct

SEQ ID NO: 149585 - DNA, 777 bp, Homo sapiens
gcagatcaggaggtcaagagatcgagaccatcctggccaacatggcgaaaacttgtctctactaaaaatacaaaaattaattgggcatggtggtgcatgcctgtagtcccaactatttgggaggctgaggtaggagaatcacttgaaccctggaggcagaggtagcagtgagccgagatcatgctactgcactccagcctggcaacagagcgagactctgtctcaaaaaaaaaaaaaaaaaaagaaagaaaaagttgttcccccaagttcaaagtaaatgctaattttgaacaaaatcaaaagcaaatatagtcagcttcactataatctgggaacttacatatgcagcccataaatatgcctcagagtacaaagagcttaggatttgaaaggagaggacctgcgttcaagtttgagccccgacaatttctggttgtacgactgtgcataagaaatgtccccctatttgagctttagtgttctcatctgtaaaaatgaggataaatgaatccaatcttaggatagctttaacgtttagataatatatgtgaaagtgttttgagaactgtaaaataatactattatgtatgcattcttcagaacgaagtttagtagcacattcattttgtgttcaaatagcttggctttaaagaagcatctctttaagaataatctttgttgtggctttatgttacagatgggaaatgtattttaaaatttatttatgccctgactagttgattttcccatcttttaatcaagaccaaacagactttg

SEQ ID NO: 149586 - DNA, 599 bp, Homo sapiens
gtgggaggtgagctgaatgtggtactatttcaagaaaaagttggttgtgaaacagaagacatgtgcaccaggagagaaatataatgcattttgttttcttcttttactgtaagtgcttatctaaacccctcaatgaaatatgcagggaaacagacatatactgctggtaagactacaacctggaacatcttcaaagttcaataatgcagaatttatgaaaattaaatttatagataccctcagaccaagcaattccacttttgcatatttagcctataaatatatatttgtctgtaactgaagtgtgcaaggatttacaataccacattctttttttttttttttttttttttttttttgagacggagagtcagagctaagaaaaggccaaaagacagcaaagcatcacaaaatttcagaagagagtatcttaagaatgatgacatggctaactcgtcaaatactgctggggagtcaagtaagactggaaaaaaatacattagggagaaaagtccattggacttaacaagtaagaggctaacggccttgctgagggccgtttcagtagattggcaggggaagatgccagattagttgac

SEQ ID NO: 149587 - DNA, 657 bp, Homo sapiens
gtgggaggtgagctgaatgtggtactatttcaagaaaaagttggttgtgaaacagaagacatgtgcaccaggagagaaatataatgcattttgttttcttcttttactgtaagtgcttatctaaacccctcaatgaaatatgcagggaaacagacatatactgctggtaagactacaacctggaacatcttcaaagttcaataatgcagaatttatgaaaattaaatttatagataccctcagaccaagcaattccacttttgcatatttagcctataaatatatatttgtctgtaactgaagtgtgcaaggatttacaataccacattcttttttttttttttttttttttttttgagacggagtctcgccctgtcgcccagcctggagtgcagtggtgtgatcttggctcactgcaagtccgcctcccgggttcacaccattctccttacaataccacattgtttctaatagcaaaacactggaaccaacctaaatatccagcaaaacaggactaaacaaattactaaaaagtccctgcaatggaatactcatttcacaaactttgtaagtttaagttatataactttaagatcaaacctgtccgtaacatacaagaaaagaaaattaaatctgatctcattcatgcagaggcaa

SEQ ID NO: 149588 - DNA, 815 bp, Homo sapiens
cacttcggagcctggagcacagggcgagctctcctccgccctgcagcctcaggtaaggatccggaccttcactgctgccccaactggggctcctcagctcggggcctctaggggcttgggctgctggtctgggtggaggcgcgttgggggtgtcgaggagcttgggtgcaagccccatgcgggaagctcagggcaaagcgccttgaaaccctctctagtgaaggaaggtaaaatggctccgggaccccaggcggggaaagaggtgtccaaggaggagggctggagagtaaggcggggatggcagagggtacgcagaggctgagaagtgggaccagtgtctcaaggggcgccagcctcttcctccgcccaacatggccaccatttttgttgggatagccttgggctcctgccagggaacagcagggcagtgagggagtcaggactttgggctggtggggaggccgagaatcaaggctctggggagtcaggactttggggctggtggagtggctggggactgaggccctggggggtcaggaccttgggctgctatggaggctgggactgaggctctgggggagtcaggaccttgagctggtggggaggctgggaattgaggccctggtgtgttcaagaccttgggctggtggggaggccagggcctgaggccctggggggtcaggaccctgggctgttggggaggctggggacttaggccctggggggtcaggatcttgggctggtggggaggctgaagggtggggactgaggctctgggcagtcaggacctcacggttggggtggactggagacca

SEQ ID NO: 149589 - DNA, 837 bp, Homo sapiens
cacttcggagcctggagcacagggcgagctctcctccgccctgcagcctcaggtaaggatccggaccttcactgctgccccaactggggctcctcagctcggggcctctaggggcttgggctgctggtctgggtggaggcgcgttgggggtgtcgaggagcttgggtgcaagccccatgcgggaagctcagggcaaagcgccttgaaaccctctctagtgaaggaaggtaaaatggctccgggaccccaggcggggaaagaggtgtccaaggaggagggctggagagtaaggcggggatggcagagggtacgcagaggcctctgatgtcggctacgacacgatttgttctgtactcaggcgggggaacgtgacttccatccagacgcactggccagcagccccaggctgggctctcccagtgccaacttcaccctgggccctgtgagccgctcctacggcggccagtaccaggtgctaccgagtgcatcacaaactctcctccgagtgcgtcggcccccagtgaccccctggacatcctgatcacacggacagcatctctgacaccgtctctctgtcagcacagccgggcccaacagtggcctcaggagagaacattgacctgctgtgtcagtcaacggcggtatttggaacactttcatttctgtaacaaaagaagggggacagatccaagtccctcaattgacgtttgatcatccactgttccggagctcattaacgataccaggccgcaatttcccccatgagttcttgctgaccctcagcccacgcggtaacctatcaggtgctaaccattccagacagctccaaaccacacc

SEQ ID NO: 149590 - DNA, 463 bp, Homo sapiens
agagaacagctttcaagcaagcaatgaggaactccatatgaagcacctggagctcagcatataaaacaggcagacaagaagcagggaggccacttggcaggctgttatcattgtcctaatcagacataataaaccctgacccagaggaatgggtaggaaatgaagattgagacagcagtaaaggatgatagtattttgaccagaaaaactaggaatcttgttgtggccctgccagccctcctactgagaaaagcatcagacctttaagcatgtgcagttactcactccttccaccagcctagggggcctaccacagcccccaaatttaataaatccagggatggaataaagaaaactggggctaaagggggccactttcatgtggagacccatcctgggcatctcacacctgtttcctagctagttgatgcctccactcccctttgatctctaccctcaatgt

SEQ ID NO: 149591 - DNA, 879 bp, Homo sapiens
  misc_feature (417)..(417): n is a, c, g, or t
  misc_feature (646)..(646): n is a, c, g, or t
  misc_feature (657)..(657): n is a, c, g, or t
  misc_feature (731)..(731): n is a, c, g, or t
  misc_feature (770)..(771): n is a, c, g, or t
  misc_feature (842)..(842): n is a, c, g, or t
ttctaggcaagccattttacttactttggactcattttcttaatccaaaaatggaagtaaggcttgtcatctgtcttattcatagtcacaggtgaggagctacagtctaaatgcatacgcatgttgggaaccgaagtcagccatcttccctaggacaaatctttactcttctaaagaaggaccaagaataaggtctactttcagctaaccttttataaggttcagttttcattggatcaaaggagtataatctaatactttttaaatggggtcaaaacagtattataaggaaaatatttactgcaaatatttataattgtgtaaggagaatcattctttttaaaatcaagttgtgttttagctttagaatcttttaaaatcacaaggatttgagaatcccatccccaccaaaattanaaaatactatattagttattttaaaccagattcattacttttactgtttatggtataataaacttatgtatataaacattgaatatgcatggacaaagtacaagtccgaacatggataaggagtatgtgctgtatgttgggggggcattcgcataaaatatgagaaaatttacttatttaaacatatatataataaggggcaggaagaaaaaaaaaaaagaatggcctncgtggcctacnggggggagcttgcgggcccttcccttagggggggtaattgctgaacctcgctccctgctcgcgcgcttcggttncgggtgcgcgaggcggatcagcgactcaaggcgggagtnngggatcccgaagtcggggagcgcggaagaacagggagcgaccgccgtagagcccagacccggaaggcgggngcggcgcgttcctaggctgccacgccgcgacatgaag

SEQ ID NO: 149592 - DNA, 334 bp, Homo sapiens
gcagttatactgaggtataattaacatataataaactgcacaaaaagggtacagtgtggtagtcttgacctaggaatacacccatgaaaacacctccacaattaaaatagcacatctgtggccctcaaggtttcctcctgccccttggtaatccctccctgccacccttccgctgagctgatgatctgcttttcatcaccattggttagtttgcattttcgagtttttataggttggtgcaaaagtgattgtggtttttgccattgagaataatggcagaaaccgcaatcacttttgcaccaacctgtatataaatggaatcaaacgggatata

SEQ ID NO: 149593 - DNA, 162 bp, Homo sapiens
tcactacattccacaaggtgctcatgtgtcctaaaaacattacttcattttaaccatttcacaacctacacacaaataagtgcacaaagaaaaccaccccgaggggcagatggctctgacagtgcttctcccaagacagggtgagacggcctcactctccag

SEQ ID NO: 149594 - DNA, 321 bp, Homo sapiens
cctaaatgtattgattacttgtccccttcctcctttgtgacaactcagatgtattatatccacatactacttactcctctgaattcctccagggtagttatgcttttgcaagatgtggtaagtctatattgacaaagaaactcccagttatctatcaatttgttcctgaatgaatactgatgaggacattgttgatgatatcctaacgtatcttttgtatggggaagacctttgtctcagttgggaaagcaatgaggcttctcctaatttggcaagcctttttatgccctaaactcaccaagtcttcccaatctttcctct

SEQ ID NO: 149595 - DNA, 400 bp, Homo sapiens
tagcgtggctgctaggagtacaagttttgtgaatttttgtaatcacataatttgtcaatgggtgggagtaaagttttgctgatgaagttaatcctgtgataaacataaccatctgtcatttttagagaagcaacagcaggctctctgggataatatcctttgccatatggcatattgttctctatgaatatcttatacgttgaaagtgatattctcattataattcaaatttttgaagctgtaaattgcttggatttttgagcagttatgaacctctgctcttgtacacagaactttgaaaatgatgatttatgaacagcaatgactccatcttagaacaataaagacccaaggtacattttcataaggcacaattagatgccatgttgggcattgataa

SEQ ID NO: 149596 - DNA, 325 bp, Homo sapiens
ctagtagtagcccagctgagatgcaaagccctggtccagctccagagtccaggcttgaaccaccactgtacaggagaaaggggtcagatggccaccaggagtggccatcagggccttgagggccaggcttgggtcaggcagatgaagactctgaaatttcactgctcccagcccagcagcaaaaggactggacagagagactggtgccgggggatatgcatttccgaagcctgcgcaccaaactgctacttatgtcccgcaatgaagaagctaccaagcacctagagacaagcaagcagttggcagcagccaaccgtggactagt

SEQ ID NO: 149597 - DNA, 261 bp, Homo sapiens
atacagatctgaatttgccagtttgccatatccaggctgtccctgttgcctctggtccaccttaagctaggtgcaaacccagttggaggaaagaaaggaagttatgtgttctctcttcaaggaagaaaccagataccagcctcaaactcttgttcttaggtcacttctttccttggtccatttcactcctcactctccattcaattaaaggacttgcagattaggttatttgcaagtatttctgtaatttattctcctact

SEQ ID NO: 149598 - DNA, 288 bp, Homo sapiens
attctgctgagtggcaagtaaaaacaaaataaccacaaccacaaacgagaagtctgtccaaagtaaggggcccaagcatactctggacacagaaggggtccaaacaaagatgctctttcctggtcagatatctctggcccatccattctagaacattgtctgggcctcacttcagggctggcattgaaatgagaggagtatgtgatctcaagtctacgaaatgagcccatataacagcaactctaccaccccagagttcaataaaatcccaggagcacaggtctcaac

SEQ ID NO: 149599 - DNA, 160 bp, Homo sapiens
ctgtcttagaggaggagggagatgcacacctcatttctttctgttgcatctttgatcccactcgttcctgcctctttgggggccttccaccatccattgccactccctactttcatctcttcttttccactagattcttctcttgagtctgtaattaggg

SEQ ID NO: 149600 - DNA, 443 bp, Homo sapiens
cagccagggcgacagtgagaccccatctcaaaaagatgttgggacaagtgggcaaaaggaagattagagacttgctaaccgcaggtccctgccctgctcaacaagtgaggggttgactcctccacacggtgctggccactggggctgcagagacagataaggctcgtctggaatgggctgactctagagagagcatggatttgcagaattcatgtcataaactgccaagtcagtcaggagtcttacttgatgaggttgtgtagacagccatctgttgaggccgtgggaacccatccatcatgttcatcctagcacagggcttgacacacagtaggcatctgtaaatgatgttaaacaagcaggtggatgaaccgcaggaatgaacaagaaccattctctttaccagcatgctgtgtcccaggctttgtcagacagctctcctg

SEQ ID NO: 149601 - DNA, 288 bp, Homo sapiens
tctttgttcctggtattctttagagcaatagttttcatagcgggggatattctttttaagagtaccctagctactaccttcgctccctgtttgagaagtgctaaatatgtgtggttcagaaaagatacctcgatgatgtctatataatccttcaacctattccacccaggctgaaagctataggggaagagcaatacagttgacccatgaacaatatgggaattaggggcaccaaccccactgccatacattagaaaatctgcatataacttttgactccttccaaac

SEQ ID NO: 149602 - DNA, 487 bp, Homo sapiens
ttaaaatgatgagaacattcaaataatagaagcagaatttcaaatttgctacagttcctgtatttctatgctgtatctatgatcgtctgtactaccctttcagtgccgtatacagggttaaaggaaaagcaaatgtagaataagcacagttcgttattatctttcttttttcttgcagttccgcctttcatacaaccctttgagtttccaagattctccattgggcagcgggtcttcatcccctgtgttgtggtctcaggggacttacccatcacgatcacctggcagaaggatggccggccaatccctgggagccttggggtgaccattgacaatattgacttcacgagctccttgaggatttccaatctctcgctcatgcacaatgggaattacacctgcatagcccggaatgaggccgccgctgtggagcaccaaagccagttgattgtcagaggtgagcaaaggatcatgagccatgtggcat

SEQ ID NO: 149603 - DNA, 262 bp, Homo sapiens
gggccatttttcatttccttgaaagtgccaggtttcccttgtctcagagtcttccaagatactgttttccctacctgtagttttccttccctctcctagctaatgctcattcaatctatagatctcaactaaattatcacttgaaaaagccttctctgagacttttcagattaggtaaaattcttctatgtaagctcccaaagcaccttcctgttatttatcattagattagtttcagtgtttcatgaaagcaggaactaag

SEQ ID NO: 149604 - DNA, 225 bp, Homo sapiens
aggaggctgaggcaggagaatcgcttgaacctgggaagtggaggttgcagtgagccaagattgtgccattgtactccagcctagggcactaggagagacaaggaaaagacaaggaaaagagggaagtctgagtttcttataacctttcaaggaaatacctctacctaaaaatcccaagaagggatgacagaacataaggctcataaagatggcagttcagtacaa

SEQ ID NO: 149605 - DNA, 420 bp, Homo sapiens
gctgttccaataagcacttccatcagcaatgaatgatagttctgttcttccatatccttccctacatttggtgttgtgtgttttgactgttagccattctaatagatgtctagtggtatctcattgctgtttcaatttgcaattcctgatgacacatgatgtcaagcatcttttaatgtgattatctgccatctgtacatctccttaatgagttgtctgttcagagcttttattaattttttaattgggttgtctgttttcttactgagttttaaaagttcttagtatattctgagtacaagttctttacaagatatgtccatggcttgtcttcattgtcttaacagtgtctttcacagagcagaatttaaaaattttaacaaagttcatcttgtaaactttttctctcacagatagtgc

SEQ ID NO: 149606 - DNA, 241 bp, Homo sapiens
gcggggcggagagacctggccttatccctagaagctctctgcctgggctctcatgacagatgggatgggaacccagtgggtcttgtgaggccaggtctctgacactgtccttcccaacagtcccttactcttgggtcttgagttggtgtcctaggaagtccatgtctcatcctggggtaacccagggctcagctttttggaagtaggaagccagagacagcagctctgtgtgcagcctgca

SEQ ID NO: 149607 - DNA, 112 bp, Homo sapiens
atgggttaagaattaaaagtaccaatagcggtactacattcatgccacttagcaatgaacaatcctatttcctccaaaagaatgatacatcattatgacatagggctagaga

SEQ ID NO: 149608 - DNA, 377 bp, Homo sapiens
tgggtgctgactcagggggagtctggaagcccaggccaggagggttcccagaaccagctgggatttgggggccgtggggaaccacactcattgaaaggagtaaggggatgggtgcagggaagttgaaatccttgtgctggatgataattctgatttatatgcaaaggatgtgcaaaaactattagggtttcagatgagattctcttctttccttctcatttcctgaggcatctggttagcccacagtctccactagttgcccttaatgtgtaaggccctggagaccatgaagtgtgagggagatggatgtaaagcccctactgacgtgatcatgaatcgttacaggtgtggtaactgatgcgagcaggggctggtac

SEQ ID NO: 149609 - DNA, 686 bp, Homo sapiens
aggtataattgagacacaataaactctacctgtttaaatttgataaattttaacaaatatatacacagataaaaccatcaccacaatgaaaataaaatccacatgcataacccccaaattcctttgtgtcctttggaaattctcttctcccacctatggctcttcccccaacccaggcaactactgaactgctttcttgacctagacaatagttttcatctattagtattttatataaagaatcttttttgtctggcttctttaatggaacataattattttgaagttcattcatgtcattttatgcatcagtattcattccttttcactgatgagtagtgtcccattgcattgatgtgtcatggtttttatccatccatgttgatcgatatttgggttgtctctggtttttggctatcacgaataaaactggtatcaacagtgaaaaaaaaaaaaaaaaaacaaaacaaaaacacaaaacaaaaaaaaaaacacaaaacaaaccataacacaaacaaacaaaacaaaaacaaaaaacaaaaagcgggcggcgacccacaaaaagctccccacgggggggaccacactgactgcacacacccagcccttctgtcacacagaggcgcccactaagcggccagatataacaagcgagcgcggcgccagctcatcaaaaccgcgcgagt

SEQ ID NO: 149610 - DNA, 373 bp, Homo sapiens
gggcagaccggggagagggaacgggacgagagccagagggggtactcgtggaaacccatgcgcatatggtgcgacaagagcgtggccagggtatctcaactacaaggcgtacaagctcctcgtaagtgaacccacgcggagccagcatactcagggtaagtcgttcagcttcagtgcctcaatttccaaggtcctcagcatcctacaacagaaattaaatcttcccacataagcagccacatagccctctcactgtttcttagtttcagctgccatagcagagagtaatggcctatgtatttatttgaggtgcttgctcaagactctgttccctccaaagtgaaattcatacatgccacacagtctacatttt

SEQ ID NO: 149611 - DNA, 311 bp, Homo sapiens
ctgggagacttatggatacgaggagttcgtggcgtgtgttcaaacgagctgggagacttatggatacgaggagttcgtggcgtgtgttcaaacgagctgggatacttatggatacgaggagttcgtggcgtgtgttcaaacgagctgggatacttacggataccaggagttcgtggcgtgtgttcaaacgagctgggattccccacaggaatgtggggaaaatgcacatggtcagtttgtcttaattgtaataagacaagcttaatttccattttcatcgatgattttaaacctttttcttgctactcttc

SEQ ID NO: 149612 - DNA, 410 bp, Homo sapiens
acaaagcccgaaatgaaacccctgtgtatttgctgcagattcccaggtgcctcttaagtgtgaggataagctcagaaaaggcttaataggtttattaagttgtcatccattaaaaggttcacatgctccttgtgtgttgcataaggacaggtgtctgccacctcattgcatttctcactgagcattgcctaggagagggtaagccctaggatttagatccctctcagatgttcaggcagaataattttgtcaggacaaaagtaaggtcacggaactatatgaaaatggattatgaatcctaagatatcagcctattctcccctatgtctaagaagaatattcctcagcttatgactggaatgtcttgctaggggtgctgggtaagttttgtggaggtccccaccagcaga

SEQ ID NO: 149613 - DNA, 206 bp, Homo sapiens
cctcctaatacctctgtacccaggggaaaatgttgtcagagactcaggaggcaatgatctcatctctgaaaatgaccaagggaggaggaactgtgtcaatcacaataggcaactggacttgagaaaaggagaaatttgacctacactctgcatgtgctgggaagcttctctgggtaaagggtgggtggcttagaaaaacagtacaa

SEQ ID NO: 149614 - DNA, 468 bp, Homo sapiens
ttctcagtgagtgagattttaacattgtaacgtatcaccaaaaagtaaagtaatgcactacagactcttaaattgtcactatttcccttaaaccccctcaaaacacagacaaaaaataataatttaggaaatacgagaagtgtgggcgaggggtctgggcatgttacttctatcacagatttggagagatgttggccaattgtcaacagtctgtttctgggtcctgtggtctagagtcccccaagagcaagccaggggtctccctgagccagcccagcctcaggtgtgtttccaccaggttccaggccaggccagtcttcctgggccagtgtggaccatgtacttcctgtggttagctggggttctctaactttcccatctgagtcccctggggagctggtgaaaactccctcagggtttctgatgcgataggtctggactggagcctgataatttgcatttataatt

SEQ ID NO: 149615 - DNA, 536 bp, Homo sapiens
atggcatagccgattcctgagggaaaaacgacggtcagtgaacctgtaaaaatgtctataggtgattcccgggggaaaacacctgcaatcccaacaccttgtttggctgaggctggttacttgcttgaacccgggcggtgggggttgctgtgagccaagatcacaccactgcactccagcttgggtgacagatgggtgatgttggccaggtgcggtggctcacgcctgtaatcccagcactttgggaggcctaggtgggtggatcacaatgtcaggagattgagaccatcctggctaacgcggtgaaaccccgtctctactaacaacacaacaaattagccgggcatggtggcgggcccctgtagtcccagctactcgggaggctgaggcaggagaatggcatgaactcaggaggcggagcgtgccgtgagccgagattgtgccactgtactccagcctgggcaacagagcgagactctgtctcaaaaaaataaaataaataaaaataaaataaaatttaaatttaacttagcatc

SEQ ID NO: 149616 - DNA, 424 bp, Homo sapiens
ctccattcctttgtgcagacccattttcctctgatggagctggagctcatacaccctctacctggctggacctcacactcaccagtaccacatttaactcaacatatcagggccacttgcttatgtaactgcctcccagcacagcacccggcacatagcacagaaaatgccagaactacttaaatccaggctacagtattttacagagaaatccagtatttctctccaacaaatacttcttagttatctgtcacagtttcctccaaactcatatatactagtctctgaaacagggtgttgtgctatcatcactcttaagacacctaaaatatcctggtgatatcaggttaagtgatactgaatattcataccaaaaccctcagtcttgagaactgccccttcctgcaacacagaccaccagctc

SEQ ID NO: 149617 - DNA, 354 bp, Homo sapiens
tgtcctcagggtttgcctctctaatgataaagatattgataatacatctcagcagtttttaaatggaccaaggaagacagtgatgctgccattcttttttgattaccttgtgagtttcttggaaatatagtttcttctgttacttctccagaggaaatatgctgtcaagtcaacagcctgatctcaactgcaaaaccttttgttgagctgtatcctccttgacctctccagtactgacactgtcagaaggctgcccctcctccatggaactctcacctttccaggtctttcatggctctgtaccatcctgggcttcccttcccttccctctcccatctcaatgcctctactcct

SEQ ID NO: 149618 - DNA, 238 bp, Homo sapiens
ccagtttcccctcctgggatatttggtgtgcgacatgcccttcccccagccccagcgcccgttccctttggaagcctgggtgctcctcagaccacttggggactccctgcttcaccttcctgcatttgcaagagcttgtctcctgaggtggagagggggcctctgaagaaaggggctcccagcccaggccatcaacaaactaacgactctgtgtgaccttgggcaagtcactaccttt

SEQ ID NO: 149619 - DNA, 466 bp, Homo sapiens
gggatctggagttgaatctggcttagtagctgtgaaagattgggcaacttatttcacgtttaggagtttcaatttacttaactggcaaatggaataacaatgtctacttcacagcttactgcgatgatcatataagacataaagaacttagcgaagtgcctagactgtagatcacagtacgtgttagctttttgtgttttatacatcaagcgtaagtcttattttttacatctgtcatattaccctttccccagtattcagagtatttgagtgtatacgtacgggtggtaagtgttgtttttcattgaaagtgcagatcctaactttttttttcatgcagtaatcctcaaaaaggtagacgtctaccataattcagtctattgctccaattggaggatgtacagttgttttaggagttaaggaattgagttttttcttttttgcttttcgtctttttttttttttt

SEQ ID NO: 149620 - DNA, 233 bp, Homo sapiens
tagggaggaacatggatcgagtattcagagtatttgagtgtatacgtacgggtggtaagtgttgtttttcattgaaagtgcagatcctaactttttttttcatgcagtaatcctcaaaaaggtagacgtctaccataattcagtctattgctccaattggaggatgtacagttgttttaggagttaaggaattgagttttttcttttttgcttttcgtctttttttttttttt

SEQ ID NO: 149621 - DNA, 277 bp, Homo sapiens
acattctagcagtgattggtcaagaagaatgcggctgacagctgacacctggcttctcttcaggatgttgtgaattcggattggaccagcaggtctgccctgctgttagctctctagggcatccaaggacagaggatcattctcaaggcattcttagttgttctaactccattcaccactacaagagcatgggctttggaaacaggcagagttgggcctgaaacctgtgttcagcccttgatagcagggtggctttgtctctactgatcaatctctc

SEQ ID NO: 149622 - DNA, 712 bp, Homo sapiens
gtaaagccaagtcggggaaaggaactgcaagtagtgaaaaggccacaactctaaaccccacggatgctttctcccaccaacctcaaaaccacccgcaagggctttggctgacacctgcccatgaacagatgggctcgactccccccacccacacactcccaaggagactttcagctttctcaaggcctcatagccaggaacctccattctgagaactgtacctaaccacccaaacctacagaccctattaaaatgaagaaaagacctctcggcccccatttctggggctgcctcagcagcagcctaaacgtcatggtctcttgcatgtcacatgaaagcagccaaaatagagaaggcactctctcctcgtcctccaaaatgttctttctcaggaagtcctttcaagtagccaattatagtccatttagaaacaccagtaactggtgacaagccgatcactagcaacaccattacaaaacaaaactaagcagaggtatggtcacgaccttgtctcttacgcttctgagagaagatgtgatactcaaataccaatgtaatcaactttgcggtacttttgtttaacttgctaattattttttctttctgtgcaatatccaggcaacaactaaaaacaaaagcaaaaaacctggcctttttctggcctggagactcagtctctctcccccttcactctgctgtgcagagccatttc

SEQ ID NO: 149623 - DNA, 520 bp, Homo sapiens
gttccatgtgatttgccatgggctaatatatggaatgtgagagaaaaagaagaaacaacaatgcttccaagattttggggcagaggtactgaaaaaatgaatttccatttatcagaaagagaaagactgtggtaaagcaagttgggaaggaaacagcagctcagttttccacattcagtaaccctcccttatctagggtttcactttctgcagtttcacttatccatggccagccacagtctgaaaatattaaatggaatattccagaattaaacaactcgtaagttttaaattgagcactcttctgagtagcgtgatgaaatctcatgatgtcctgctgtcttctgccctggatgtgaatcatccctttgtccagcatatccatgctgcatgttgtacctgcctgttacttgcctaagcaagtggatggctacttgcttagtgtccatctcagttatcagattgaaaaagcagtacatatacatagggtttagtactatctgcagtttcaggcatcact

SEQ ID NO: 149624 - DNA, 348 bp, Homo sapiens
cctacgcttggtcgcagtcgatgctctctctcctgggctactaggcaggactcctgaccagctttctgcttccactcatgcctttctgccatccatcttcatagcagcagaacattgtttttaatataaatctcatcatggcactcccctccttcaaccctacaattattcccattgcatttataaaaagtccaaacccattgccctagcctgtaagtcttcacatgatttggctccaactaatattttggacctcatcttgtacctctctcctctttgctcacaacactacagccacaccggccttcgttctgccccctgaatgtgctaaagtcattccccccttag

SEQ ID NO: 149625 - DNA, 230 bp, Homo sapiens
ttcttttcgcaatctagctgcttttagaggacttttcagagacctcagttaattgttttttttgtattttgttaagagtgtttggttgtaatcagtgagggagatagtgtgcaatgcatgccttccatttggttggaactagaagttgagcaacacagttggaattcatcttttttggttagtgcttccccaggactttcacggacagaatcccaaaatagaacctgtat

SEQ ID NO: 149626 - DNA, 104 bp, Homo sapiens
acgaaactttgcttcctgaagaacaagtcgatgcaggcggagcacacgaggtgtatgacttctcagcggaggccccactcataggtgacccctcctcctcccac

SEQ ID NO: 149627 - DNA, 961 bp, Homo sapiens
acaagatatgaatataccagagtataatctgtcataggagaggtcaagccaagtcttaggtctttcagttagaatttcatacaatagtacatttcccttttgaggtgtgtatcatactatctttagtgctagaagtaatactttagccaaggaagtttaagttcttttgaagcattcattttaaaaaatagctttagttcttctgatctcagagctatacagatggtttggaccaagaggttttagtttaatgaacatgctttgcatgtttgcaaaggattttacctataaagtgagtcatcattagagtcttgcagtggtacaggggaaagatccataagcttttgttgttgttgttgttgttgttgttgtttttaatagagacgggctttttaccttgtcacccagactggtctcaaactcctgggctcaagcaatacgcccacctcggcctcccaaagtgctgcgattacaggcttgagccaccgtgcttggccagtccatacacttttgttgagagttatggcattggtcttctggcaagggaagacttaatttaactggtaaacttatagactattccaaaaacatattcaaaccttttaagcagtgaaaatgaaatttatttataaatgttcaaatggtagattatggttattacatatgagttttcaaaaatgttgagtctttctggaaagatttattcttcagtatctgtgcaaagtttgaagtaatttgtctttgccatttggtttgtattttgttacataaatacatactcaagtctggagatggtttcaggcaacatccagtagcctaagaccattttaaggtagctggtgatctttttctgttttgtggggaccttttttgtaatgaacattttttttaaattcagaatttagattaatcggttgtcaagagaggagagaaagcgataaaacagtttaggaatagtaaa

SEQ ID NO: 149628 - DNA, 548 bp, Homo sapiens
acttatgaaacatatgaatgccatccattcacccatccatccgtctatctctgcatccatctgtccacctaaccacccgttgttcatccacccgaccacccatccatctacccaatcacccaaccacccatccatccatccatccaccctcccaacctccatccatttatccatccatccacctaatcacccaaccacccattcatctgtccatttatccaatcattcattcattgatgcgttcattcatccattcatccaaccagtcacccaaccacccattcatcatccatccatccatccatccatccaattacccatccattcatctatccaaccaaccacccaaccacccatcctacagccatccacctacatttatcaatctacccatctacccatatccatccatctgccgtatcactaaattgcccatccattgactcagtcacccaaccacccatccacatttgtctagtccatctgtccatccacccagtcacccaaccacctatccatacacccagtcacccaactgtccatcgcca

SEQ ID NO: 149629 - DNA, 175 bp, Homo sapiens
ggattccgaaatggtgtaaaacacgaatgagcagtgcccggcatgctgcgagggctcagtaacaccagccattgcagtgccctccctctctttacccgatggcaggtgggaggtgctggatttgtgaggaagaaggcctcacggccttgcctgctcccacactggcacagcatca

SEQ ID NO: 149630 - DNA, 252 bp, Homo sapiens
aggcagtcaaagagagtaatgggtgacgtctagtgatttgctttgacgtctagtgattctgatcattcccagggctcagccagagagagacctgtttcacccacttgcccacacattaggttggtcttttccagccagccagagaaagagattctctatctggaaataccatcagaaatggtcttgaaccccattcccaatttttacagctcttaaattgttgtcactccagtctgaaagctggaaggcagc

SEQ ID NO: 149631 - DNA, 634 bp, Homo sapiens
agcaagctaccctgctgtgagcagccctacatgcagatgaactgaagcttccagccaacaggcatgaaataactgaggcctgctcagaatgacatgagtgtgtttgaaagtggatctctggccccagttaagccatgagatgactgcaaccacaagagaggccctgggccagaaccacagctaagtcactcctggatttctgaccctcataaactgtgagacaataattgttgttttaagcagctaagtttcaggatactttgttatacaacaataaataaatagtactctctgagagtgattttaaggcatggccctatcaaaggagtagccttactttaacacctaatccagtggatctcagaggtattaatatctaccatttgtgattgtcttatattacccaaaagacttaagcttttaatgggaaggaagattatatgaacttttttgatgtcctaaaacagcacagtgccaagtgcatgtaagtactctataaatatttcctgaattgattttttaaactacattttttaaactagaattcatgggactgaatcaaactgcattttaacagagcatactattgcatgttcgttcatcttgatgcagttagaaattattccaggtactg

SEQ ID NO: 149632 - DNA, 443 bp, Homo sapiens
tgactttgtccctcatgacggtaggctcagttcacttcctcacatcagccctcactggaactagagatctgctagtcagcccccttcctccatgtaaaaactctttgacaattgggaccttggcaggactgtctgttagggtaataatgacaggaaaatcctcatacggtggaccaggtcatgttctcagtgctctgtgtttaattccatttcacagcaacccttatcaagtaggcattactatcatccccactttacaggtgagaaaactgaggaacagagagattaagtaacttgtcaagggtcacgtaagtactgaatgacagagaagggtttcaccctgaggcattctggctctaggatccccttaaccactgccttcagctgactctctcaggttcacaatattctccttaggacctattttctagctccttcttcaa

SEQ ID NO: 149633 - DNA, 450 bp, Homo sapiens
gaaaaattttagctttaaaactaagaatttttgaaggaaagaagcatttccctgaaagtttagaagtgagacacaaatgtcatttcaatagtaaggaataataataatagtagtgctggcgccccactttgcacatgaggaaactgagatataaagagaggctaagtaatctgcacgaagtcacacagctactgaatggtagagtcaagatttcaggctagttctagaatccatgtgctttaccattttgctatatcaatggtgtcaaaaaaaaaaaaggtcagatttaacatgcaaatttcaggtcacttttggagccagtttaacttgattaacttatagtaagtagttaatgttacttttaaattggtacacgttaactcgaaggctatttctttgaaatctctagaatcttctggtaggcaaagactgtcaccaagctccagcttt

SEQ ID NO: 149634 - DNA, 363 bp, Homo sapiens
gctgtgctcaagtgatccttacaccttagcctccgtagtagctaagactgcaggctgggacaattttcttaaaaaaatattttggggccaggcgcagtggctcatgcctgtaatcccaacactttgggaggccaaggtgggcggatcacctgaggtcaggaattcgcaaccagcctgaccaacatggagaaaccgtctctagtaaaaatacaaaactagcagggcgtggtggcacatccctgtaatcccagctacttgggaggctgacgcaggagaattgcttgaacgcggcaggtggaggttgcggtgagccgagatcgtgccattgcactccagcctggacaacaagagtgaaactctgtc

SEQ ID NO: 149635 - DNA, 810 bp, Homo sapiens
agcacagatttaatgacaaaggcattgagtcaacacgtgtgtggttaattaatctggtcaccctccgctggagagagcagtcctatgaatgatcaaaagccagtcttaggaccacatgtgtaaacaagctctttagataaactcccttacattcctttttacctactctgagctgttaactcaaggtaagagaattaggctgctttcagccataaccctatccagaggcttttgcaaaaccttccggccttccaagaaggtttgcttttttcctgtaattttataatttctcccaccaccctgaccaagcccctacagcaaacccttacagcaaagcagacaagagacatgccaagtttataggattacagaccaagagataatgtttgacttttagggtttgattctgtgccctgcccccaacttcttaggctgtataaggggtttgctaacctttggcaaatacattaagcattttttatatgcaagctacaaggggttgtgagatgcatcaataggttcctttctttgaagaaactgatagccttgatggatacatagatcattataaagatagcaagataattggaaataagtggtatttaaattttgtctttcatatataaactcttaattgaaattcatatggtgtcactcattttcactgtgttttgatacttttgtgttcccaattgaacttggtttgtattatgttgttattcttttgatttctcatgcatttcctgtattttcacccattttaaataagatgtggtctcatagaaaatagaattgctgagttttagtgag

SEQ ID NO: 149636 - DNA, 636 bp, Homo sapiens
agggttctttggtccaagcaacttattagttaggtgacattgaaaaagaagcaatatatatagatataatgttatttatatttctgatttatctactcctactagactttaagtttcctaaattgttacattcgaatgttatttgatgattacatataagtagttgtttatatgttggttagcattctaagtcaaacatttacagatttattaaattatggaatacaaatagaatataatgtcataaaagcatcaatgattaaattgcagaaaatatttagtgacagaattgtgtatgacatgtgttatgcatagaataaatagaccctaagagttgttatgcatagaataaatagactataagaagttctctggtattcctgtcctttaggaaatggaactggagactggacgctgttccagtgactagagttctgctcctgtgcctggagcctggtgccttcccgcctgtattctaagatttctgggactgaaagtccatccacatgtttgtgtttctctctattgattactactggattcacacgtaccatgtaccactattttgttggaatatcacagaaccccccacccccatccttataacactctctacattgaaacaaagagataaat

SEQ ID NO: 149637 - DNA, 359 bp, Homo sapiens
ctcagcctcccaaagtgctgggattacagcattatgccttcttaagtctaatatcaagccatatttaattatgattgtcttactgtaaatacgcgggattaattggaaaactggattcttgcttgtatgacaacccaggtatgtaatgtggaaatgagcaaacatatttgtgaactattaccatattctgtgcagttattaaaattgaatttatggagttctgacagtatacgcttaaaactccagagatagatctgttctctcatacctgatgcaaggaaaatgaacattcacgtttacaaattcagcatgataattttgtgcctttaggtagggcttacacacacaccacaattcta

SEQ ID NO: 149638 - DNA, 211 bp, Homo sapiens
tccacttctccaaataaagttttcagctgctctctgcagacctatctggaagtgactttcccctctagatagatgctcacctccaatctgtaacagacttagaactgatcattgatcaatccagtattataaactaatgctttcagggtagggcatagggaaccatgtagcaatttacaagtcaaattcctttcagtagctggcaatcttt

SEQ ID NO: 149639 - DNA, 277 bp, Homo sapiens
tctgcacagggttggtccaggcccgagcctgtttctccagtacgtcatgagaccaaccaaactgagggtcgggaggagacagggagaacacccatctgaccctctcacactcagaaaaccctttgcaaaaccagctgggttttttagtttatcattcaaagttataggataggaaagttatatcttgaatacagcactgggtttaagaacatctttgaaacaacattaaaagaaaagggtagaggagctaagagtaaaattcacatgtgattcctta

SEQ ID NO: 149640 - DNA, 396 bp, Homo sapiens
tgctcttcccccagatatctgtggccactcgcttcagtctttgcttagatgtcaccttcccatgaagaccttctctggccctcattctctggtgcccccattgttggggcactgtctgcctccttccttggttcctttttctctgttgcaccccaggctagctggtatgcatttgcctggttttgtctgtcttccacccactgccagagtataagccccttgaaggcagggatttctgtcttctctgtttattgcttgtgttcccagagccttcagcagtgcctggcacctggtgggggcttcataaaaggtttctgaatggatcaaggctctgagatgtcctcagtcctgacctggccagctcccaacctggggctcatggctgcctgcctggca

SEQ ID NO: 149641 - DNA, 344 bp, Homo sapiens
ttttgtctctgggctctgaagattgaagtttattaattgctgagaaggaaataagtgagtatatttctttttaaaaatttaacaacaccatcagtggtgcatatttatttaaggacatttggttataattaagcaacatggctgccttaagattattttagggccaggtgtggtggccatgcctgtaatcccagcactttgggagactgaggcaggaagatcacttgaggccaggagttcaagaccagcctggggaacagagcaagacctttatctctacaaaaaaaaaaaattaaaaattagccaagcatagtcagcacacctatagtcaagctacttgggag

SEQ ID NO: 149642 - DNA, 141 bp, Homo sapiens
gagcctcacttccctgttactccatcaacctctgcctgttacacacgcacatcaaatctacccactcccggccgggcacggtggctcacacctgtaatcccagcgctttgggaggccgaggcggatggatcactggaggtc

SEQ ID NO: 149643 - DNA, 550 bp, Homo sapiens
tgctgcttcgttcagtgctggagtaggttacaaagtgtggtcctgctgaacggctggagaatgaactagatgtcctctcaggatgactcccggccctataatcccatgatgtgcttataatggaatttggctgtccttataattagaaatgtagcttgctggtcacacatctggatcagataaatctgcacaaagagcatttcaccagaagcagaaatgccaagcatccagcagctgtgtcgttacatcagccttgcaaataacaaggaatactatttgtccatagaaagtaaatgactgggtcaggcaggaataaagctaagtttattcacattatttggggacaggaaaaaatgtttatgaaaacatatattggtcagacctccacattaatgaatgagactgatgaggaaaataattcatatacacaaaagaattcaaatgccaaaactatatccttatttcctgccaccttaatgatgagtttctttttactgaacttttataaatgtaataggctcccctgacttgcatctcaacatatcacaca

SEQ ID NO: 149644 - DNA, 335 bp, Homo sapiens
aagcaggccagtcatgagggtgcatgcctgcagtcctagctactcaggaggctgaggtgggaggctctcttgagtccaggagtttgaggctgcagtgagctataatcgtgccactgctctccagcctgggtgacaggaaaaccctgcctctaaaaaaagcgggaggggaagtggacttgaacttcttgagaatttggagtcagtaaataacttgatggagacagcaaggtagaagaaaaggttaaaacaatattttttttcctggtaagtttccctgaagttcagcccctacagatctgggggttcttggggcaccttgagtaagccaagcaaag

SEQ ID NO: 149645 - DNA, 192 bp, Homo sapiens
taagatttattttatagttacactattgtatttattgaaggtagcttggctgatactgttccaaagtcacttgccactttcctctctgcataattaacatttattctcctcattatttgtcaatgaattcccttctgtttatttatagtttctttatgattctgcatatcagaagataacaagcacttatca

SEQ ID NO: 149646 - DNA, 471 bp, Homo sapiens
agaggagacaataaataagtcaaatacataactcgtttagtagtgataaatgctaaggagaaaaataaagtataaataaactggtatatgatccctatcacactaacagcttttttttagggcaaagtctgatgattagcttagtgatttcacgctttttaatctctgggatctttagtttatcccacagtttttagttctatcttgaaagtaacaaagcaactgaacattaccctgagaagggattggggatgaggtactaggagttttggtcaagtgaaaataaaatcagtttcctcactgctaagttgtgttacatgtgacaatttaaaaatggaatctaatagccattctaccaatgcaagaaatattttaggctgagaggtttaaaaacccaactttatttaggcttctgccaaatatttgtatgaacagattatttgtatctgtttatttgagggtttggttcaa

SEQ ID NO: 149647 - DNA, 525 bp, Homo sapiens
  misc_feature (9)..(9): n is a, c, g, or t
  misc_feature (19)..(19): n is a, c, g, or t
tagctgttncctgagtgtnaaaggccacacttcccagaatacataccatggcaatgccaaaatatgaccatgcttgttaatatttaggccaaggcattaaatgtttataacataacacaaatacttgtaatctaaatttgaatgaatgtcttcaattttcagtaaaataagaccctattaaagccctaccattaatatatattcattcataaacatactgagtacctaatgaatgttaaacactgtagaatctctaaggaaagaatactcggtcactttataagctatgtggtagtcaagaaaaatcctttctactcattgatacgttaaatgatcaaaaaatccaaagctaaaaaatgatcagagaacaatgaaaaaattttagtggctttatgcttccaattccattttcttctggcctcttttctgaagcttgcctaaatcatcccaggaatgctaaaattgggtgttatttaggcataaccaaaatgaaataacaaagtaagtaccccaaataaaactagg

SEQ ID NO: 149648 - DNA, 537 bp, Homo sapiens
tacgccatggctgactctagaggatacacttcctctccacacttcccagaatacataccatggcaatgccaaaatatgaccatgcttgttaatatttaggccaaggcattaaatgtttataacataacacaaatacttgtaatctaaatttgaatgaatgtcttcaattttcagtaaaataagaccctattaaagccctaccattaatatatattcattcataaacatactgagtacctaatgaatgttaaacactgtagaatctctaaggaaagaatactcggtcactttataagctatgtggtagtcaagaaaaatcctttctactcattgatacgttaaatgatcaaaaaatccaaagctaaaaaatgatcagagaacaatgaaaaaattttagtggctttatgcttccaattccattttcttctggcctcttttctgaagcttgcctaaatcatcccaggaatgctaaaattgggtgttatttaggcataaccaaaatgaaataacaaagtaagtaccccaaataaaactagg

SEQ ID NO: 149649 - DNA, 440 bp, Homo sapiens
tctcattcattccatacacaaccttcgttcaagattaacattattattcacatgttatggataaggacactgaggcccagaaatataaagtaactcactcaaacttgcacatatagaaaggaggtttcaacccagatccggaagccacttctacacaacaggacgccccagtgcagtttatccttttacccctgtaaaggacacatcactccagaagaaaattcacactctgcccagtggaatttgaagatcctgaactctgcactttcccagaagtaggaggcgggacagtgagggtgacaactcgtcttggtgtgtctgaaactttccgggttttagcactaaattcctgtgttccaggaaacccctcagtcccaggtgaacagaaacagttgacctccctaagtgaatgcagccatagccagagaccctgaaaactc

SEQ ID NO: 149650 - DNA, 208 bp, Homo sapiens
ctcccaatctgccaagaaactctctcaactgagttaaagatgtttaaaagtcaggaaaacaatcaccaccttataaaagcagaactgccaagttcataattggaaatatcattctataataccactaatatacccacatgaacttttcccccaactccaaaacacccagcagaggaggtggaataagcacaaacaccacctccacatt

SEQ ID NO: 149651 - DNA, 401 bp, Homo sapiens
aatcttccgacagtcaagagggaattgtcaaaacaagatatccgtaacagagttcctgactgtcttttcaaagacacttgaatttctgccagactccagacagattcacattcccaggggtaacacacagcacaatgaagggatatttcttagcaaatattgacgtgccagagaattggcattaaattattggcttgacaactcctaacctgctgctcttggtggctgatatgaaggattatctatttacaattgaattctgcccttgacttgtggcagttgctgagctgagcttatttcagggaagggaaatgaataacaccttaagaacacagatggggcctacaaactattcagcactttctgtgcaggaagcgacaatagcggcagagtttttacac

SEQ ID NO: 149652 - DNA, 295 bp, Homo sapiens
cgatgtcatttggtggcttgctgactgtggcatcgattcagggcctggacacagctctgttcagggagcatgcaagccagatggcataaccaagacagtggtgataatgtgtctgcgtgagtgtgggggtcccgggatgtgcacagggcacagctggagctaaagtcatgctggatcccagggtgatcaccactggagcctccagcactgctgggtttgggtgacctggcaaaaatgtggggcccgatggggtcttctgactaaaaggggtctaatggtcccactatagccatct

SEQ ID NO: 149653 - DNA, 110 bp, Homo sapiens
gggtcactggagcgaggttctagagccagcaaccatgaacacaaaattcaagtggccgtggatttgtccaagcaggggcagcaagatgaagcatgtgtttacaaactgtg

SEQ ID NO: 149654 - DNA, 793 bp, Homo sapiens
tggcttgaacccaggaattcaagagcagcctgaccaacatggcgaaaccttgtctctactaaaaatacaaaaattagctgggcgtggtggcgggtgcttgtaattccagctacttcggaggctgaggcaggagaattgcttgaacccgtgaggtggaggttgcagtgagccaagatcacaccactgtactccagcctgggcgacagaatgagactttgtctcagaaaataataataataataaaaattaattaattaaaaagagccagacatgatggctcacacctgtgatcctagctactaggaaggctgaggtgggaggatcacttgaggacaggagttggaggctgcagtgagctgtaatcgtgccgctgcaccccagcttgggaggtagagcaggaccctgtctctaaataaatgaagtgagttcacctgttctttttaaacatgggtactagaagattttaatttgtgcgcatggtttacattccattgcttgtgcacagcaatgggttcctgtgtgcattgcgcttagttgtctgttactccaggatctggttctgagtcaaggcatttgtgaaaatagcttactgtcgaaatttcctctgaagattccttgaatcacccaataaagtgcaatgtacttgcttgtttaaattgttagaaattttttattgtgtagaaacaaggtcttgctctgtcacccaggctggagtacattgtcacgatcatggctcactgcagtctcgacctcctgggctcagcctcctgagtaactagaactacaggcatga

SEQ ID NO: 149655 - DNA, 246 bp, Homo sapiens
caacctgggcaacagagtgagactccatctcagaaaaaaaagaagggagatggaaaatggcacttgctggtgagacagtcagagtgggtcaaggcagtgggaagccaggagatggggaaagttatgagctaagagagttctcaggacaccctagtggccgtcctctttggtttcttccagcctatcaatcataatctgctccccaggatgaacacatcctggggagaattttaaggtttcaagaaa

SEQ ID NO: 149656 - DNA, 604 bp, Homo sapiens
cacttctcaagctccagtggcaagaactcagacactgggtcacacccaactgcatgggatcctgggaaatgtagtctcatgtgtgctcaggaagaggagaacaaggattttggtcagcaacacagtacctgccacagacttcatgcctatttttaaatcaccatatgtacccttcttcccacatatagaacacacttatgctcctttcctggggatgcattaaagtcttatgttatatcagcttaaagttcagggcttctgagtgatagacagttctgtttaccacttccaaatgtagtccctcgtggtctgggaataaatgaaaacaaaaaacacaagatatatatatcttcacttcaaagtataaagtggatgattaggggcaggctgactggcaacaataaactcctcccatttagaaagaaaacaggaggaatacaatggtagattggccatagcagtgacaaaccttccttgataggctatgtggagtcgcctgccctggatttacagggaagttcctgattagtccctgtgtctggactctgggagaaactcccttatccatcattttctgaggatcctggctttaccctctggatgt

SEQ ID NO: 149657 - DNA, 400 bp, Homo sapiens
gcaagagggccctctctagccataacacagggcaagtggacactgcccagaagacgctcccagtcggagcaagaggtctacaaacaattcccctcataacctatatcagcctttcgaagcctcagatctggccatgtcttttctagtctcatgcttctcttaataaaacaaaatgaaaagtacagagtaccatgtaactcagaggctaattgttactagctttcacctctagaagactatgaatttgtcttactcaacaatgtttattaggctctgggcttcttcttaccctagggattcatacccaatcaagaactaggcatgtttgttacaactccaagaaagattgaccaagctgcagtgttccctggcatgggccaagctcaaagctcctcaaaag

SEQ ID NO: 149658 - DNA, 355 bp, Homo sapiens
agtacgtagcactgagaaagcaatgtggcaataacgtttcaaccatcccaaacttttctgaccctttggtacccatcccacttctttaactttatcccaagaaaataatatataagatgcaccagccaggaatgatggatcacgcctgtaatctgaacactctgggaggccgaggcgggcgcatcacgaggtcaggagtttaagactagcttggccaacatagtgaaaccccatctctactaaaaatacaaaaattagctgggtgtggtggcatctgcctgtagtcccagctactcgggaggctgaggcaggagaatcgtttgaacccgggaggtggaggttgcagtgagccaag

SEQ ID NO: 149659 - DNA, 154 bp, Homo sapiens
tcatccacccaagaggacacccctagggcctcatccacccaagaggacacccccagggcctcatctacacagtggaacacccccagagcttcctctccctcacgaagcacccaactggataaccccagaacctcttctacccagcaggacaacc

SEQ ID NO: 149660 - DNA, 184 bp, Homo sapiens
tatggaagtgcaccagatcttactttgcttaggtgagagagatgggtagaggagcttaagaaaacaaagttctaatttagactagactggacattttaaaatttataaaggtatttaaagctatgggtttcatacaagatgtcacccagaaataacagtgagacatccacaaaagcagtagagg

SEQ ID NO: 149661 - DNA, 399 bp, Homo sapiens
aaaataatgtatgttacttagatcccaggtaaaaggaaaatactactacctggtcaaatacgctacccgaaaatagatgtctcagtataattttgacaaatatggatgcatttcttctagcatttctcccgcaaattcttctagcatttacttctattaaaacacaatctcggtgccaatttgaatgtgcttggagactgctgcacacttcaacagaatgatgggaatctccaagaaaataggaattgtatttattgcattgatgatggtagtggtgaatacttccaaaaccattcctgggggaaggaggacaagatgaagtgtttctctggattaaggagtgaaggtctttgaatatgcatgataaaaccacaaccaagtcattttgatgtaggaaaa

SEQ ID NO: 149662 - DNA, 393 bp, Homo sapiens
tttctgattgttatcttctcctggaaagtgataaatgaagctatctttgtttcagtgaataatagaatatgaaatcctgtaaagccacataggttattagatgaatatcacagagcttattatgcactatggcttaatgttagattatagatgtgaccaaatggtaattaacagagctggagctgtaattaaatactattatgctgctctgtgatctctccttagatttctgttgcaaagtaaatggaaaatgaatagttcaaacccataggtggatttcgtcgcttctccccatccctgaacatctcttttaattaactaagtaattaaataaagtcatcttcatacaacagagatgccaaactctgcctagtaactctaatcagtaagggt

SEQ ID NO: 149663 - DNA, 500 bp, Homo sapiens
aatatcagctcggtaccgattgaatcaacgccgctgactgcatccaagcgccgtactgcatccaacgccgccagcactgaggtagacagaggcctcctctcaccaggttaatgaggaggcccctcggtgtcctgaaacttggcaggttttgggttgtgagtttttggtggtggaaattcacagtgtttcagtcactaagatcagggtttttacaggatgccaggcactgagaccctcagaccctttggagagcctggtggagctcagagctggggcccagcctctcctgcacctgcatgtggaggccatccagggctggcggtcaggggcttgatggccttggaagctgggggcccaccttccccacactgtgccagggcagtgtttgtcaccctgtgataaaggaggggatccagcccccctgacgttgtgcagctgtgtagtgacttcccacagtaaagagtcaaacttcttcactccagtgagcggttgctgccacc

SEQ ID NO: 149664 - DNA, 488 bp, Homo sapiens
caacgatggtcctcagctattactagaaaccaaaactcagagttgttgaattagaattaaaatatataccaaaccccctaccttggagcatttataccataaagtagatgagaccagaatccatgcctgataaggtcaatctaaaataagaatgagctgatatttgcctttaaaaaattctagacttgaaacccaaaggacttaacagcagttctgttccatcaacctcctaggtctcaaagagatacattagaaattctacgaatatttaattcaaagatcattttaaaaatattttttaggccaggcgtgacggctcatgcctattcccagcactttgggaggccgaggcgggcgaatctcttgagcccagaagtttgagaccagcctgggcaaaatggtgaaaccccatctctatgaaaaaatacaaaaattagctgggagtggaggcacgcaccagtactcccagctcctggggaggctgaggt

SEQ ID NO: 149665 - DNA, 146 bp, Homo sapiens
attcctatcaatatacaagcatactgttacttttttcatcataaaaatatcttccctcaattgctctttcttgctctctttctgtagaaccccttaaagcattgtctaaatgcacttgtcctaatttctttctcatgttctctctt

SEQ ID NO: 149666 - DNA, 229 bp, Homo sapiens
gtcatatggtcatgcatctaaaagctaaggtatattaaatcactctgatttttgaacaatctagtctagtaaatgtttagccttacagactgaaagtcatttttatcatatctaactaattattcatttctaattacatttcaatagatattatactaatgggtaaaaaggcatttcattgtgttattatttgtaatagtaaaaaactgtaaacgattattaataatat

SEQ ID NO: 149667 - DNA, 310 bp, Homo sapiens
ttttttttctttttttgagacagggtctcaccctgtcacccaggctagagtgcagtgacacaatgatagcttattgtaacctcaaactcccgggctcaagggatcctcctgcttcagcctcccaagtagctaggattacaggtgaagagaaatgaagctaacatgttgaaatgagtggccccaaggattaccagaaaagaagttaatgttcagaaagagaaaataaaagttctctgtattttattcccctcagagataacaaaagttgacattttgttgcaaaaaaaaaatattgggctcgttggcctca

SEQ ID NO: 149668 - DNA, 521 bp, Homo sapiens
ccagaagcatgtattatagatactatttgatattgaatctttattaaaaattgttttaatggttaatagatattgtgaactgccactgtatgttcagttggttaccttttgccctcatttattctactccaacaaccggcctaggttctgttcttcaaacctacaaggcatgctcctatctcagtaacctttacaattgctgttctttccatctggaatgctttctccacatatctgcataactgacttcctatctgccttcagatctttgtgcaaatgtcatcttagggaagtattttctgatcgccctagttataattgcaacttaaatctcctacttcttgtccctcttttctacttaattttctccttagcaactatcactatctggcaggccctatatttcactgcctcattgtcttcctcccctttcctagaatattagtttcatgagagtaggaactgtatccacctagttgcctactcaatacattatacctaagacagtacctggagtaaag

SEQ ID NO: 149669 - DNA, 384 bp, Homo sapiens
aggaagagacctggtgggaggtgactggatcatggggacggttcccccttgttgatctcatgacagcgaatgagttctcaggagatctgatggttttataaatgtttgacagttcctcctacacacacacttgctctctttcgcttgctgccaggtaagacggacctacttccccttccaccatgattctgtttcctgaggcctccccagccacgtggaactgtgagtcaattaagcctcctttataaattacccagtctcgggaagtttttttgtttgtttgtttgtttttgagacagagtctcggtctgtcacccaggctgtagtgcagtggtacaatctcagctcactgcaacctccacctcccaggttcaagcaattctc

SEQ ID NO: 149670 - DNA, 163 bp, Homo sapiens
ctgtgggggccagggacggcccggatgccaaggggaaccgcaggggagaatgggtctgaagaggaaacaggagctgttaaagtggggatgcctgtcagacaaattcttcactcgttgaaagctaacaggttgaccaacggaaccacctatggtgctgccagcc

SEQ ID NO: 149671 - DNA, 247 bp, Homo sapiens
tgagatgtcattctgcaaagtgataggtaattgaatgtaagccccagatatcaagggaaagcctgagaattatggacaatttgaacttatttagattttagccaagcggttggcatattaaatttgcattttaataaattaggtttggtctcagtatggagaatacactagggaaggaaacactggaggcagggcagctggccatttacggaaaagaggcggggatgagggaggcctagattaaatg

SEQ ID NO: 149672 - DNA, 525 bp, Homo sapiens
cgagctcggtaccagttacaacagctctagaactacaggcatgtgcctccatgcacagctaattttttttaactgttttgtagagatgggatctcaccttctttcccaggctggtctcaaactagtgatcctcctgccctagcttcccaaaatgttggactgcagttgtgagccaacacgcccggctgtgcatgtcttttatagcatgtattcattttttcatgtattcattcatagggtgttgttaagtgcatatcctgtgccagacactgttctaggtacttgtgaacagcagggaacagaacaagcttctgccttcatggagcttaaattctggggttgcagggaatgtataggagatggatttttaacaaataaatatggagtgagtcagattgtgatcaattctacagagagaaataaagcaggctgcagagatagcaagtgtgtggttgtcagtgtggggagttgttcgccgtggtgcacgggtggccagggatggctccacggataaggtgccatttg

SEQ ID NO: 149673 - DNA, 569 bp, Homo sapiens
ccccctcaactgcttaatcccttccactatgccctgaaactcatgtgtcaccagcagaacaccctctagttcctcaacctcttctcagaatgttttctggagcctgttctgatgaaaacctggctgtccctgacggatgctgcctcactggagtcttgctggtggtgcctgttttctctcataggccccagcgctgggccagaccattctccctcctccagaaacctctagctttgactcccatgtgatcagaccacaccgcccctactccttcctgttcttgtcatctaccaacccaggtcactggccctcagctcctggctcactgtcactgcaacactcctcctcgctcctgattcttggtgattacatctatatcaacgatccttccaaaacaatgaccttttgatcctctgccctctcctccagcgactctggtcttcatccaatttcaaagcactccctcctctggtcgcattccaccctgcctttaacccaagaacacttggtattagggcaccatgtcttggtcacggctgctacgtgtatctgatgtagttaaccatggc

SEQ ID NO: 149674 - DNA, 233 bp, Homo sapiens
caaggagaaaatattctcttttccaagaacagttcagccctgtagaagataggggcaagcttcttctacaatctgatttcatctccatggaataccacagcatctcagttatttgatgaagcatatccccatactaagggggcaaaatttgctccattccaatgaaatataacctttaaaatttccagccagttttcaaattcttctcctttagtctcagtccccaactcgta

SEQ ID NO: 149675 - DNA, 138 bp, Homo sapiens
atagcaaaacaactgtacagcttaaatacagtgaagatccaaaaattacaaccagaactttgcaactgttagatctgctaatcaaagcaaaatgccgtctgttttgtgcatacatacaataataagaataaggaaatg

SEQ ID NO: 149676 - DNA, 319 bp, Homo sapiens
cggagttactatatgtaaggtgctggctggtgtctggcttactggaactgcttaacaaaagttcgctttccttctaatgttcatctgtatttttagaacagctgggaaagtacacatatacacacctaacctcactctggtgaatgggagtgcctgttctatacagacacgatctttgtatttccaaataggttaatgactgaagggctctggaaaggggataagaggccggcttccttccccagatcgcactccaacacccagaggactgctatttctcaggtggcagctatgaggaaagaaagaaaatggtgccctg

SEQ ID NO: 149677 - DNA, 434 bp, Homo sapiens
cttgtgaatgacttcttcttggtggcttgtcttgtgcccgtctcttcatatttgagactttctgtcgcatccaccagtgtatcagcattaacatgttggcagataaattgaacactgaaaggtggattgtaaatttgattagaaatgcaagactggatgccaagattgattctaaattaggtcatgtggttatggaccctatcagcaagtgattgaaaagaccaaaagcctttcctttagaagccagatgttggccatgaatattgagaagaaacttaatcgctcctaactgggcaactcaagattctggcttctactgaagaaccataaagaaaagatgaaaaaaaaactatcaaagaaagatgaaataatagacttacattttggaaacaacatattacgtatagattttgaagaattggaataaaaattga

SEQ ID NO: 149678 - DNA, 783 bp, Homo sapiens
gtcaatgaacagagattgtcagactagatttttttaaaaagtcaagatccaactatattttgcctataagagacacattttagactcaaagacacaaatcagttgatagccaaaagatgagaaaagagagattaagcattcaatcattttaataattcaaaatgaattaatgtaagagctgagaccataaaacttttagaagtttatggcccacttcttggtatatatccaaaggaaataaaactagtatctcaaagagttatctgcatccccatgttcattgcagcattatttacaatggcaaaacatggaaacaacataagtgttcactgatggatgaatggattttaaaaaatggtagattcaaatgaaatattattcagccataagaaacaaggaaattatttcatttgcgacaatatggatgaatctggaggacattatactgagtaaaataaggccagacacagaaagataaaaactgtatgatctcacttttatgtggaatctaaaaaagttgaactcacagaagcagagaacataatggtggccgctgggagctgggggttggggtaaattaggagatgttggttaaaatgtatacactctcactcagaaaatgaataggttctggggatctgatgtacagcatggtgactttagttaataatactgtattgtttgataagagagtagattttaagcctcctcacctctcctcaaacacacactcaaaaaaacgtaactatgggtgatgaggatgtgtttatttgattgtggtaa

SEQ ID NO: 149679 - DNA, 189 bp, Homo sapiens
gtatgctgctcctataaaaagtaaggacacttccttccattgggagtttataaatcataatctcattagcttataaataaaatcatagggaagctacgtgctacatgagggacagataagggtggccaagggaaactttgaggaagtataactaaattaatacacagggatcagggttgaagtatttta

SEQ ID NO: 149680 - DNA, 248 bp, Homo sapiens
tggcaaaagagctttatttacacactggcacaaggctcgtggggtgtcagctgaagaagtaggtggaacgcttcacctgctccaggtcgaaggcccctggcttgggcaccgcctgcagtgtctccttcagctggctggcctaaaagatcttctggggctcagagcagaaccgcttgaccaggaacctggacaggtcctgcaggatgggctcgctgtgcaagcggacaaactgctcccggcacacctgg

SEQ ID NO: 149681 - DNA, 497 bp, Homo sapiens
ctatcgagctcggtaccagtttcgacggagactctcgtatttggccctggacttgcctcttttgcgtaacatttattctgttttatttgccaaatacgagagtctaagctgttcactgagggggcagtgagacgtggggctgctggtcctaggagctcttccatgacacctagtgttacctgggagccccaagccccagtcccccatccctcaggaaatccagttggaacccctactttgcagggccatctttggcctgaagccaccaggaaagctgtcccactgactgacccctcttaaggaagctgcagactgctgggcccattttcagatagaggaacggagagctgcggcagcccaggagccctgccaggcttccttctgggtgcagccacctgtgggtggggcgcggcctcgtctgagaccaaggcagggcccatgccttactcagctgtccttgctgagagtctccgtagcatcttcctgatggtctttct

SEQ ID NO: 149682 - DNA, 531 bp, Homo sapiens
acttatctatcatttttatggttattttgtacacatttaaatctctaatccatctgtaatttacttgggggctcagagtaagatgagtaatttacttttatggagtttcttccctccataaatgcctagccagattttcctaatgacatcttttctgcagagatttaagatacttttattatgaagtaacctctgacactgtacttctaggatctgttagtggttattaactctcattatcattgtcatgtttagctatgtgttactggaagcctgataatggaatgacggctgttttactaggtctgagagatagggaaggaaacccaagtttttcctactgtctcctctcacttgacacaacacttctgacaccatatgtaatcccaggccccaggctgttccctcacataccaagcagttttccctggacaccagctcggtgtgctgtgaagtcaattccattctgacaccatctacctggagttagcgtgagctcccacaggttgagggcttagtcccacaagactg

SEQ ID NO: 149683 - DNA, 202 bp, Homo sapiens
gtgctggggttataggtgagagccactgtgcccgacttcttttattttttcaaaagagtaataaatttaaatatgcttgcttcaagattcaaagggtacaaaggggtatacagtgaaaagtcttcctcccactcttgttcccagctacctagttccccttcacataagcaaccaacttgtgtatctttacagagacactttt

SEQ ID NO: 149684 - DNA, 290 bp, Homo sapiens
cttcctgagccccccagcctgggccccttcccagaaagccagtccccaaatcatttctgtggagcactttggagctgcagtgtcaccaggttgcaactcagttttcacatggcaccgtgccaatgctcttgaaggcccagggatagccagagagaggccagtgaccaaaacctgggacatcattccctccagtgaagggaatccaggtgagggcgcaggcgccctagcacaagcacgtatggacactgagggacggggcctgcagaggggcggggccagcgtttgacccg

SEQ ID NO: 149685 - DNA, 261 bp, Homo sapiens
catggttccagtcagagcttcttgaaagtagtcccactctgttcaaaagcctcccatgccccctgctagcctcaggctaagagcccttctccttcgcacagcctttggacctgtctatttttatggtctggaaacttcaggaacactgatagctgagcatctggcacatattatgcactcaaaaaccatgtatttctttctccttccctttgggacccgtaaaccagggactggacatttttgcaagagacaggagctgtg

SEQ ID NO: 149686 - DNA, 551 bp, Homo sapiens
tgtgttacgctccttaatttgtccctgcacaagaaataagcatatggatccgtgaatgtacccttcctcctctgctgcattctgaaaggaaagtcagaagctcgtcaaacttagaacttgaagctaagctaagacaccctcggcaatgcaggggaaaagtaggaatgagaacaaaatgaaaaatcctgaagaaaccactctgggggaagaagtcaacaaagaaattataccactatgaggctcatgaagcccgtgcaggccaaaaaccttgttcctaaaagctccccatgtgtggctgctaatgcacaggaaatgtgattagctgcctgagaaaggcctagaattactcccattctgactagattactggataattagattggtagcgctcttccctgactgtggctgtcagattaaatctggctggttctctttagataactgtcatgccccaaaataacaaacagagactgacacagcgaggagccttttaaaaagtgttccaagaatcaaagtgcctattttttcttaataataaaacatgaacaatg

SEQ ID NO: 149687 - DNA, 855 bp, Homo sapiens
tagggatgtgaaccacaggaccctccctgttctcaaggtatagggatgaggttagagaatacctgtgcacttctctgtcccttcctggaagaagagagaagagtatctaaaggagggtgagaatgggggcaggtggggcaatttatccaactccctgcccaagaggtcagagacttcagatcgcaccttactttcctccttcttaactcttccccttggctactagggctccaggtggggtcctctggcctagagggaagaaaaggcttagggtttggcagttggagctgaagactattccctccctctctctacccagcctctctgggtgtacctgggagcccatgtcctccaaagctcaggctgtggtagggtgccaagcacaagctccctgtagtaactccaagagggggacaggtctctggggatgtccttcacaggacaggcaagggccctggctggccacccacagccgggaccccaggagatccagcaggtactgtagctggaacacagcagttcccatagatggtccctcctcaaacccaatcacagacagctccaacctggagcagcctagagtctcagcaggacacacagtagggacaaagtgacctggtatctatgggtaagggcatgagtccaagtccccactcccaagatttcttatctgtgtcctggaacaaaccccttcagttctctgggcctcagtttcctcatctgtaaatagggctctggataatcccaaccgtaaggcctgacactatcccatgctgtacttatgtgcaagctagaaaaagacactcagctgggcacagtggctcatgcctgtaatcccagctctttgagaggcca

SEQ ID NO: 149688 - DNA, 174 bp, Homo sapiens
gaattgtgaattaaggaagggaagagatggttggagaggaggtgggagaaggcagagataattgaaggagcaaaagcatctggagaagcaaagccactgaaagatgaacagggctctgaaagaaatgcttgattgctatctttccaaatgactgcagttcccagtgacatcatt

SEQ ID NO: 149689 - DNA, 430 bp, Homo sapiens
aaaaaggataactggctaccccatactttcatacattgaccatacttcactgaagaattctttatcataaccatgtagaaacttgtgttgttccaaaagcttaggctctttttaaagggactttgttttcaccatcagcttcattcagtcattaaaaaaataatgcactaagttcctgttacctgctgggactggtcttaagtggtagagaggggattgcaaagatgaataacacacagtccctgtccttggggaggttaggtccagtgggaagtagcaggggatatttcaggtgttagaggagtgaatcagttgttacacagaaacagaagaggcaaggactgcatctgcttgggtagtagtttgccacatgtatgaggacttcgcacgagaatagctcacttcctcagatgtaataacacagccctgt

SEQ ID NO: 149690 - DNA, 305 bp, Homo sapiens
acaggaatgagacaccgtgcctggcctgttcataactttaatcttcctttttacctcaaacagggaattgaaatgaacaatgtaatcaaccacaaaaggggcatgtttcatctcttgtcttttaacaacatggctacttcacttaaaaaaaactttcttatgtagtttattctttattctaaagattcattatattttagaaagtatgatataaaacatttaatattcctgagactggtctagagccacaaaaaggttatattttaatgcctgaattaaaatgcgctgtgtatcgctggtgtatt

SEQ ID NO: 149691 - DNA, 553 bp, Homo sapiens
gtctattgagatgatcatgtgatatttgttctttattctgttgatatgatgacatattaattgattttcttttcttttcttcttatttttgagatggagtcttgctctgttacccaggctggagtgcagtggctccatctcggcccactgcagcctctgcctcccaggttcaagtgattctcctgcctcagcctcccgagtagctgagactacaggtgtgcgccaccatgccccactgatttttgtatttttagtagagacagggtttcaccatgttagccagcctggactcctgacctcaggtgatccaccttcctgacctcccaaagtgctggcattacaggcgtgaggcaccgtgcccagccttattaattgattttcaaatattaaaccaacctcacatccctgggataaattcctttaacacacttaaattaatactttgattaaatcaaattctctatattgttatgacttggaaaaatgctgttgacagctgagttatatagtatattatgaacactttttctttcctgcataatatatttttttt

SEQ ID NO: 149692 - DNA, 758 bp, Homo sapiens
ctttttttttttgtaaggggggacttgtcattctttctctgattacctcagtggaatgaatagttgcttgtttttttcttaccaaataataaaagcaaaggctagctttttatactcagagttttggaatcacatctaaaggctttgatatgttgaattctgacttttgtcagtgtttaaatccatataggcacgctcctttccatctttaattaatatctataatatgcaaggggtaaggtcaaaaagcaataagggggaaaggccattaacataacacaaaaatcttctagcctaaagtactatattgtctggctctttagtaaagcccaacctaaaaagcacatctcttaaccatagaaaacggcaaaagaatggatgctctggcagttaaacactctctcacaaactgaatcatttccaaataccaggtgttccagtttcactgtgttttgatattgtcagaaaggctagccacttttttttgctccatttaagcattcattgcctttatttttaacataattaactcgattataaatttatgtgatttaatctttaataatggccaagtttaacaactggttaacaaatttcctgaaaatttagcaatctgctcttatgagccgacagttttccttttccatttccagacctgagtgttctattccacccttttggaggttctagtcccacatgactcagtgttggtcttgttcctgtatctgtttctagtctagaaccttcacagtacttga

SEQ ID NO: 149693 - DNA, 342 bp, Homo sapiens
caacctctgccttctgggttcaagtgattctcctgcctcagcctcctaagtagctgggactacaggtgcccaccaccacacctagctaatttttgtatttttagcagagatggggtttcgccgtgttggccaggctagtctcgaactcctgacctcaagtgatccacccgcctcagcctcctcaagtgctgggattacaggcatgagccactgcgcctggtctgggtctgtctatctaattgtgaagtgcagataatggacactggggaagacttggggaagaacgcccataggaagcccaccaagtggtaagggtggggttaggagtaggaggccagtggg

SEQ ID NO: 149694 - DNA, 602 bp, Homo sapiens
caccgggtgaaatgggcagagtggcgcttacccgggatggcggtgaagcgggaccgggaggtcatcgtgacaaagggtggcatgaggtacctggccttgacgccctccccggctagacggtccagattgggggtgtccacatcctgatcctagtcccagcggaagccctggaaggagatcagcagcagctgtgagtgctcttcctccctgggacggggtggctactcagtaggacaggcggcagcagctggagggccccgaaccctgtcatcccatgagcacctgtcatgcactcctcacagagatcgtgggcttctccctctttaatccgttgttgaacaacgtccacattaataattcagcccagctctgttgtgggacaaacaacccggagtgtagcaaggtgccgcatatttgcaggacaggatgaaagcgttctggagatggatgggggacatggctgtacaatgtggtggatgcacttaacaccactgaatttttcctttgaaaatggctaaaataatagattttgtatgtattttaccacaataaaaaaattaaactggcctggcgtggtggcttacacctgtaatcccagcact

SEQ ID NO: 149695 - DNA, 340 bp, Homo sapiens
gtagtgtctgggagggtagcagtgagtgtggtgaagagggatcaattttgcaacatattggcaaagatgtgcaactgaatatgagtgtgagggaaagaaaggagtgaaggatgactcttaggtttttagtttgaacaactgggcaggtgttgctgccactgacaaagatgcagaagactaagggagaaacagtctgtgagatgaacttgagaaaccaagagttccagtttgggcatgaccagtttgagatgattagacatcaaatggagacatttatatatacattcatgcaagatgcacgcacatataacataaagaatgatgatgtcactgatgctat

SEQ ID NO: 149696 - DNA, 269 bp, Homo sapiens
tagtgtttccctgacctgcatgaagcagttttaatcttgtgtatcctgcaggagctaaggtcctactatcatcactcactgcagactcagagcccagcacatctgagacttcagccttacacatggattttaggtttcagttctgtttctggtccccagagtcctctcttgtttctcagtttatttatattgtttttgttggctatttatatattattattgtgtgtttcgagtggaggagatgcattatgtttctaatttactgtaga

SEQ ID NO: 149697 - DNA, 498 bp, Homo sapiens
ctcagaaacactgggcatttgcaggaaatgaatgtatgctgttgctggaatatcctctgtctgtctgaagtagtcctgcttttgggcttgccttttctctgtcttcaacattacaaattactcttcgtgcaaacagcactataattcagataaaagttttagaacttgaaatgcagatttgtatttcaagtaaataatgttctagttctaagtatgtatcattttacatgaatatccagactcctgtctaatataataactggattcttttcaaggttattgttcaccagggaaagtcacctctcttacatttttaccattcttgcaggtgtgtagcctggacatatacacatgtctgcttatttgcaacatctcttcccagagaaacaatgaagtacacttaacttcgttcatatatagaagttaaagaggattgaagattataggaaatgtaacaatgtgaatagattgcggtgtttggggtacgagctcgaatcg

SEQ ID NO: 149698 - DNA, 406 bp, Homo sapiens
gattataaaggatactagagaaatatggagtcatcgggtgtgactgttgtataaatatccagaatgcttcctagacgtgtttgtctactatgtgtaggagcaagctaatccaacctctatatcattttgaattaatactgcgtactgctgaaataattgttatgtatccccatatttttgtcctgtcccttttctgcccctttgagcaatcttgaacaaattggctgtggttttcttagttggttggaattagtatcatttacaaatttgaataattctagtctgtactctattcctccgaattatttataatacagctatatggctaagactcagagaaccccaatactttcattctttatctagagaggtgtttagaccacgtcttcaaaaaaaggtacccctc

SEQ ID NO: 149699 - DNA, 1035 bp, Homo sapiens
aaataaggtggatggatgggtggatagagggaaggacaggtggctagagctgagataaggcaactagagtcaactgttcattgtggaatccgcatggtgggtgattgatgttcactgcacagttctttcaagaacacaacatctggggacaactgtaggttccagggctgcagcacagccttcctgcattggaatgtctgggggtgggaccctagaatgattctggggcccagccctcccctactcagtgacaagcaaacttctgctctctcactcacagagtatcaccaggtcatgtgaaagtcgatgcatcttggcctctggtgcccctttttctccacttcacgcaggcccagggctgggctcaagggagcatgggtagaatagggtaaagtcacacctcagtgcctgatgactgacactctctagccctctgcaccagtagtgatttctgctgtccacggcacactgccatggcgtgaacagaatgtttgtgccctctcctcccaaattcatatgttccactgtatgtggttaactataatttattgtatagtctcaaaaaactagaatactctggattgctgggattacaggcatgagccattgcacccggcccccagtggcttttcaacaagggccaacaaggtcattccatgggaaaataatcatttaataaataatgctagaacaataagaaaaagaagaaagttcaacctctctgtctatgtatagaatggaccaaaggccgaaatataagagctaaaactgtaaaactcgtaaaagaaaacagaagggtaaatgttcacaaccttgggtttggtgatggatctttagagatgacagcaaaagcacaagcaataaaagaaaaaaataaattggactttataaaaagtaaaaacttttgtgcatcaaaggacattatccaaaaagtgaagacaattcacagaatgggaaaaaatatttgctagtcatatatctgatgagggtctagtatctagaatatataaagaacacttgcaactcaacaacaac

SEQ ID NO: 149700 - DNA, 625 bp, Homo sapiens
gaatactctggggaattttttttttggaaatacaggttttatgaaaacacacacatacacgcacacaaattttgaactgtatttaatgaaatgcctgccaaagtatgcaaaggggcagtggatggatgtctcttacttactttggatgcaacttactttgaaatgcaacaagtgctgggattacaggcatgagccattgcacccggcccccagtggcttttcaacaagggccaacaaggtcattccatgggaaaataatcatttaataaataatgctagaacaataagaaaaagaagaaagttcaacctctctgtctatgtatagaatggaccaaaggccgaaatataagagctaaaactgtaaaactcgtaaaagaaaacagaagggtaaatgttcacaaccttgggtttggtgatggatctttagagatgacagcaaaagcacaagcaataaaagaaaaaaataaattggactttataaaaagtaaaaacttttgtgcatcaaaggacattatccaaaaagtgaagacaattcacagaatgggaaaaaatatttgctagtcatatatctgatgagggtctagtatctagaatatataaagaacacttgcaactcaacaacaac

SEQ ID NO: 149701 - DNA, 788 bp, Homo sapiens
caaatggtaaaaaactttgtcgctaccttagttcaccaaaatgcttcagcacaagcatactatataaatcactatcgatctattgcacaaaaagacataagtagcaaaaataagagtgagaacttcccctaataaaaagtgagagtctcaaatgggggaaatgagggaagagagagaccctctcatattgttttatattgttttatactcagtacctgttttaagaaaaaaacaacaagaaagtaaaaccaaagacaggcagcccagcaccaggcccgaaaccaggcctgggctgcctggcctaaaccagatttcatttgtagattgcattgttcatgcttggctaaagcagaacagtattatggtgcaacaggcactaaaaagaactataggaagatgtgagtttggaggagtacatgggagcctcatcatatagtaacttgtgaaccacagggaaaccttcacgttttactgagtgagataggtagttgaaaattagttaaaaatcaactcataacttagaaaccgatgttattcatagattccagacattgtatagaagaacattgtgaaactccctgccctgttctgtttctctctgaccaccggtgcatgcagtccctatcatgtaccacctgcttgctcaaatcaatcacgaccctttcatgtgaaatctttagtgttgtgagcccttaaaaggaacagaaattgtgcattcggggagctcagattttgaggcagtagcttgccgatgctcccagatgaataaagtccttccttctccaact

SEQ ID NO: 149702 - DNA, 500 bp, Homo sapiens
caatttctcagatggtttctactctgtataaggatatgagagtaatgtctccctacacttagtgaatggttgacagtcccaacaccccacccctttcttaaatatgtgcttcctgaataactagactcttgtgcaagctaatttctttcatcttttagttcttgtaatgctatttgaatttagtgggacctcttggaagtagtctgtccttgtgtgagaggtggcccaccatcaccatggatgagagctgatggagaaaggataactgagtccaaagaactgtggaacttccctcagggctggaaggtccctgctccttgctaactgcccagggccccttccataggttagaatgtgggacaacccacccatagctgacttaacatgtatcaggagttcatgccttctttatactgaatggtaacccattgtatggatataatttgtttatcatctgcctgttaatgaatattacactgagggagagaaaccagaccaaa

SEQ ID NO: 149703 - DNA, 396 bp, Homo sapiens
aaataattgttcaatactttggggcaaacctacagcactgtttggggctgccttcaagtaactactcaggtgtcccagcccaccccatggactaagaatatcaacagctgtactcactaggcatacctgttgggaagctttgcatcagaggaccacgctagtaatagaagttgttggaccagccaacttttgagggttccttgcacgtttagagactatacccaatctgtggaaaagctcccttgcaaaatatgttccatgagttagaaaagaactcagtgaaaaaagatagatttgccccaactttattggaaaaagaattccctgttcatttgcccttgatcaagtatcatcatcttcttagaacaataaaattataatcccagaaatggaatt

SEQ ID NO: 149704 - DNA, 405 bp, Homo sapiens
cgataaagtaaaatgctataaaacaaagtattcttgcatttgtttgtttttaattcataggtttaacatttaaagtccttttaatcaggagtgtgcgtttgttgataccatggaaatttaattcaccaagatttatttatgacttaaaggtttcttttgaataattatacatatccatttacataaaatctgtctttttttggaaaaatatgattctatgtaagaaggataacaatatattctagagcaatttagtgttgacagatacagcataccagctgaaatataatttattctagatttttggataatattttccttaggaaaccatcttttgaacattgagcttaaggtaggtagggattgatgtcacattgatattttaaaaatgtaaatgatgaaatt

SEQ ID NO: 149705 - DNA, 1163 bp, Homo sapiens
gaaaattgtgaagtcaccactttaactgagtcaaaattttgtttgaataagctgatgaaaatagacatgtaccctagaagtagatactctaaaattatacagacatgaatgtcttttttaaaaggttgtcattattgacctaatattgagtaatctttctgcgttattccaaattgaaatttgtttgctcttcattgtaacttttatgtaaaagtcctttaaaaggggattcaattataaggctatttgactatagggcagatttttataagtaaacattcccccaattccacttatgctaactgtctcatgacagtaaagtttactcctttttagaaaccctttctcagtattttaatttctgtcattgaatcatttaaataataaccttttgtttttatagcaaagaaatcatctgacttttctgtgtgatgtttcttggcaaaataagcacttgatgtatggtcatgtacataatggatattcattaattttgtgattagtgctgagttttctaaactactatcttaagctcttaggcaccctattatggatctaattcaaaccaatatgtaggaaatggagaaagtaggacttcagtttgcgcttcccaataactttaaatatatccaccttttccaagtgtttaagccctaaaacatctatctttatttttttacctggcatttttgttagaaaatagattacgttttaaagtaacattaaaaaaattcttcagtaagataattgcttttaataagtatatttttcttgctcttggctctatacatttttgcataatattttagtcttgaaaagcttttcattttcttaactctggaaaataatagtttggaactaaattagtttgagaaatctgaatcatctctctttaaatctgttcagttagtctcatgtattctcaggggaaaatgtctttattttactaagcggaagtagtagtcatattgaggcagaaatttgtagcccaaacaaggtaggtcttcgctgaaactaatttgaactattcctatttgaagcaaattgaacactattataaatctagactggctaattagatggaaactttgatggttaggttctttaagaggcatacaatccgttatgagaatgtttatgtttatgttttaatttttatcaaa

SEQ ID NO: 149706 - DNA, 1008 bp, Homo sapiens
cagagacacacagaagacacagagaaaaggtggccatctacgagccaccttctacaagagaggcctcagaatgaacccaaccctgctgacaccttgatcttggacttctagccaccagaatggtgaggacataaattcctgttgcttaagccacccagtctgtggtattcgttacagcagtcacagaaaaatagtacacaggccttgagaaacagacgtgaacactgctccaatccctggagtaacagggattcctgtgagctgcctgactgcaggcagcactgtcagcatccccatcccccaggatcgcctgggacctccctcttatcacatcgctccacctcagctccttggcagccaggcctccagcgggaggcagagggcatcctcaagctgggcaattggaggagcatttaatgaaggggctctttacaaaggtgtgggcagggttttgggaggtcagagaggaatgatgcagcccttctgcaacctcgcctcaccccaggcctgcaggcatgcggagggagtgcccgctggaacccagggccaggacagggcctgtgcagaggagtccaccttcagcaagacggaccaccaatactctgcgacttagagaaggagactgaggaataaatgcccagaccgtactccgctcctgccctcctggtttcctgccagagtctccccttgtctgaagccaacctgaagacaccccttgaggaccccttcactgtactgggaccatggggggctgagcctctgggatcagtcacctccctaacctcctgcatgaggaacaacttgacgaacacacatttcaacctgtaacagggtggacaagcagaacccttcttcagaagcacatttatgaagttcccgcagtaactggctcagagagaaatgctgctgtaacagctgagagaaaactgataaccctgaaaataaagtgtccatggaaatctcatatattgcctattgtttaaaaacaatgtctcacataaaagaggt

SEQ ID NO: 149707 - DNA, 273 bp, Homo sapiens
gaaaatttcctaatggtagcttagaagttgctgaagtttatgcataaagaattaagggataaagatatttagaagagcttagtcccatataatgtattcagaccagagccatttctgaaatgagtaaggttccaagatctcagtattactgggcagagacttccactatcagatctatttctatgcttgagcccagaagtttagagattgcagtgagctatgatagcgccactgtactccagcctgggagacctacagcaaaaccctgtcgcc

SEQ ID NO: 149708 - DNA, 199 bp, Homo sapiens
ccttctctggctccctactgccccaagacaaaacctacatgccttatcttggccttcaagcctttcacactcagaccctgcccactgtccagcctcttctccttctgttctccccatacgccaacccatggccaatgggccacaggccactcgagtcaggcagtgccacaaacagccttcgttctccctcacccttccc

SEQ ID NO: 149709 - DNA, 338 bp, Homo sapiens
aattggtcgtgtgaggtcaggcccagtggctggggcaaaagttggtatttagcccataggtcttgactgagccttggtaatggaaagccggcagcaggaagactgtcccttctcgcacctgctgcatggcacagagaagctgtgacaacatgcttcccaccctttatagattcaggaggtgggggtggtgctcttggagcatttctctaaggatgaaatgagagagtagaaagtgccgtgctagctctggtcagtactgcccacaacccattccccctgcagggacccttccttgtgcatgtcagtggagcttcctggagcaaacagatttaaagact

SEQ ID NO: 149710 - DNA, 352 bp, Homo sapiens
gagacagagtgtccttgctcagaaaactgtgaagcaggggtcttgttagttacaaagccagtcctagttgcatgtccaagggggtagattttcatcaccctactaaatgtggtatgtcactgctgaagccttttcctgttttagtaatatcttaggcactattgtcttttgtcttccagagtaacatatctgggcccacctttcttgcacactgtgattatgtgctaagaaaagggtggagttgggaggacaatttcacttgaacaggtttctgttcttctgaggtcagggtggggaggatgtccaggtgacttttatggacacattgcaagacagtaagccgcggatggac

SEQ ID NO: 149711 - DNA, 292 bp, Homo sapiens
ttaaatttgtcagttgtaattaaggaatataagtttgctttgagatcttatatgcagtaaaactctgtagttcgtacgttgctgtatgcttgtatttaaataattcctttcaagaaactatataaattgcatataaataattgcatgagactgtatttagttatgtcttttcattttgtgttcttataggtatattaatataactgtaaattttaagcctctcattaggtagaacattagaagtatttatttccttaattatttttagtggtgtttttataaatgcatcaat

SEQ ID NO: 149712 - DNA, 411 bp, Homo sapiens
ctccctcagcctcctgagtagctgggactacaggcgtgtgccaccaagcccagctaatttttgtattttagtagagacagggtttcaccatgttggccaggatggtctcgatctcttgacctcgtgatccacccacctcggcctcccaaagtgctgggattacaggcatgagcccaccatgcccaacccaagaatttacatttctaacaagttcccaggtaatgcttatgctgctggcctagaaaccacacttgaagaaaccactccttcagaaaatagttcttgtctcccaagaggagaaggaatgcgaaagaggattttaaagaaagcttccaaattgtggccaactctgatagaagatcatagacacttgaaactcagtgctgaagaggatgctgtagtcatgcccag

SEQ ID NO: 149713 - DNA, 561 bp, Homo sapiens
agacaagggtgccaaaatcattcaatggagaaaggtcagacttttcaacaaatggtggtgagaaaactagatatccatatgcaaaagaatgaagttggacttttaaccttatatcatatataaaaattaactcaaaatgaatcaagaacctaaatgtaagagcataaactctaaaactcttagaggaagacatgggggaaatcttcatgacattggacttggcaataattccttggatatatcaccagaagcacaggcaacaaaagaaaaaataaataagttggacttcatcaaaattaaaaacttttgcctatcaaaagtcaccaccatgcccaacccaagaatttacatttctaacaagttcccaggtaatgcttatgctgctggcctagaaaccacacttgaagaaaccactccttcagaaaatagttcttgtctcccaagaggagaaggaatgcgaaagaggattttaaagaaagcttccaaattgtggccaactctgatagaagatcatagacacttgaaactcagtgctgaagaggatgctgtagtcatgcccag

SEQ ID NO: 149714 - DNA, 565 bp, Homo sapiens
ttcagttgtccagttgacatctacacttggatatctaataggtctaataattgaatatccccaaaacagagctgttgaaatccacccccagcaaacccatttcttttgcaatcttcactgtctcaatagatgggtactccattttccagttgtttagttccgaaaccgtgatgtcatccctgactcccctctcatattccatagccagtctttgggtaaacccatcatctctactttcaaaattcatctagaaacaatgacttctcgttacttccattgctacaccctagttcaggccactgtcacctttccccttgattatcccagtagcctattagatatccttgcttccagcattgttcccctacagtgtgtcctcaaaatagtagtcagatggttattccaagagataagtcagattttgtcacttctctgtgcagaaccttccagtggctggtcatttcacttgggttaaaaatgcctacagcaatttgtagggaaggccctatggaatcttgccacctcttctcatctagcttttcctgtctccctaaacttttgccag

SEQ ID NO: 149715 - DNA, 412 bp, Homo sapiens
ggaggtcgaggctgcagtgagccgtgattgtgccactgctctcaggctggcaacagagtgagaccctgtctcaaaaagaaaagaaaagaaattatcctggagagtcgcctgcattgccctggactttgtgagcatgagaagtaccctgtgatatgtgaagccatggagagttaaggttattgtctgtatgcagacttacattcctgccacagaacccagcccattctgactacaaggcagagtttctgaactggagttagagagggagggagggctggattcagggatctggctggtgtgatcctagtttgacaggctcagggtcatctggtcaacccctgcctggcacccacagcccctgggccatcccctcctctctgtgtgccagacaaggtaggctgtcgtatggggt

SEQ ID NO: 149716 - DNA, 175 bp, Homo sapiens
ttcctaggcttctctggccatctaccctagagcccaccatggggcccggagcccctcctctgggtcccctgatattccatgttagctctcgcctggcgtcctcaccttcaggtgggagttcatctgtctgcctgtctgcctcccctgttagctgggcctctcaattttccatccc

SEQ ID NO: 149717 - DNA, 235 bp, Homo sapiens
tccaaactatctttgtaatgctttctgtagctctactaccttcctgcctgcaaaatgggcagcaaaccactccctgtcttaccgtagcatgtcaccaagcgtggatttgcaatcccaaaaatgatgctaggtggatacatggacataggattaagtaaccttcccttttaattctctttcaatcctgattatgccaaggactcagtctctggttgctgctaatgtgtcttttata

SEQ ID NO: 149718 - DNA, 326 bp, Homo sapiens
cacagtcctctgggtcttctcccatcacagctgtcacactctggcctgtgctttccaaggtcactctggtttgtcactgcctagtaccatgtctgtctccctcactgtattataagctccatgaaggcaggacctcagcctgacagggctggactcagaggaggcaaaaagttactatcaacaaaaatgagtgaatgaatggcaagcatgacaaagatactaacagctaaggctcattaagaggcttccacacactagcttctacgaaggctttgcatggatgaaataaccctcacacaattccattttacaaatggggaaactga

SEQ ID NO: 149719 - DNA, 150 bp, Homo sapiens
actatgctattatcaactgttgacaacatacagtcaagcccaaggttctagagagaggaggaaggcattttgatttggtgggaagagttgagggagggagagcaaccagtagtactaaagagagagtaggtgtggatgctcagaaatggc

SEQ ID NO: 149720 - DNA, 428 bp, Homo sapiens
aagcagtgggtagaaaatggtgactttcccccatgttcctggttgtaaggacctgagaagaaaacagagtctggaagctctgtgttgaagggaatgaagtggtacaagtggctgctctgtccatgagctgagtgtgccacagggcccggtgtgcacatgtgcacacctcttcccggccaggttcgggggcccatgtttggctggtacaatctcaatggcttcttttcttttcttttcttttcttctttttcttttctcttgcttgcttgcttgcttgcttgcttgcttgcttgctttttgagacagaatctcgctctgttgcccaggctggagtgcagtgacgagatctcagctcactgcaacttctgcttcctggattcaagtgattctcctgcctcagcctcctgagtagctaggattacaggtgc

SEQ ID NO: 149721 - DNA, 437 bp, Homo sapiens
tggccagtgtatttctccagcctaacccagcctgctgtctcacgggcatccttgctcaaggcatggtattaatatctccaatagattgtatcccctaacattctaatacctttaaacaagctgctgttttagatgctatctttctctactctagaccatctaggaattgaacccatatcttagtctacctgtgcactccgctttcatctaaaatgtctttcttgacacttctcacagggaggaattaaatactcctatcctatattccatgacactccaggcatattttttcagagaatgtatcacattataattgcaactgttgattacttgtctttgtttcttgtaggagatttgtagcttagtccctagaataaagtaggcatctactgttgaattagaccatttttacactgctggaaataaaaaatacatat

SEQ ID NO: 149722 - DNA, 357 bp, Homo sapiens
gattacaggcatgagccactgtgcctggctgtcaatagttgtatttttaaatattggtactgctgaagatctgtttctggtgactgatgttttaatgagatggatgattgccaatgatgtatttttagtatttataggcatccctattttttatttttgataagttgaatctcattggtggttataaccttttaaaaatcttttatttcctttaataactggttacgttttatgtttgattcggtgtgttcttgtaagtctgagggacagctcttatctaacagtgttgagtcatcttaagttgaaactacatctaggctagtttcaatttgctgtcttcctgccagtgaaaaataa

SEQ ID NO: 149723 - DNA, 513 bp, Homo sapiens
actgagacactctctcacaaaaagatgttttatattctttgtttttgcttaagtcttcaaaagctgatgtgtatcttacatttatagcatgttcaaattcaaactggccacatgtcaattagctagagacgaatttatcttggacagcgcagatctagactttgtcactaccagagagcacacccactatctcaatttccagcatcccagtccaggactaccatcacctatctttttagctcattccaatcagtatctgtgatcctcagaaagtctcttaccctataggacctccaatccattgactcaaccatccttccactctcctttaaaataactacattacctggcttggatttcttacaccctcaactctcttggcccttccccagtagtactgcaaccctagtaaagcaccttcctgctttacaccagtactataacaaccctacttgaagagtctcactttaaattcatggccaccaatttcaggaagaccagcaatcccaatac

SEQ ID NO: 149724 - DNA, 355 bp, Homo sapiens
catttttgttggagtaattatgaaagaccacagtcattttcagtaacaaggtaactccgggtaaagacagaactctctgaaactttggatttgctggagtcttccttcctcagttgcctttgctaatatgagcccgggataaaggcccagagaccagatattttgggaggctactatcttgcctgaatatcccggatctcccagtgccttcattggggcctaatggacataatccagcacatctgagagagcactgctggggggccagttttgcattaattgagatttggggtctggagtcagaagctctggagtataggctcgagagggacaggtgcagcctttgaagctgacc

SEQ ID NO: 149725 - DNA, 479 bp, Homo sapiens
aatggtgcctcccaaccatacacaggtgaagtcaaaaacaatcgactactagaatggaaagactacaagaacccttaaacagaaagattaacatcattttggggcaaggaggtacatttttttaaaagattactcaactagatggctccactgaaggaatccacatcacctgacttcatattctagtatctagacttcaaggaaaataagttcacttttctgactcttggtttctttaacagtaaaatgaaacgtacagactttcgttcattctaatgccctttcaaactctaaatgacctaaccttgacaggagccatgacagtaaaaaaaaggcaaggtacgaaagtgttgagcttgcccaggtttggaggtttgccccatcatttaagccaaataaatcaagcttgaattgcagattttcccatcatacagagctgagagagggactcaaatcatactactaggaagtggaaattc

SEQ ID NO: 149726 - DNA, 374 bp, Homo sapiens
gacaagcagactcccaagctggaacagagagaagggctttgagggagggcagaatgtcaggtaccgaaagcaggaatccgtgaagaaacccaaaccggtttccatttacaagccctaacactgggacaatgagaatccgtttcacatggtagagcagtcagccaggtacaccacgctgctgttcccccaaggggaaaccagaggtaggctctgttaccagtggatttcgagttgactcggggatccctcctcgccaccggaatgggggaaccaggaagttgtggagcagctgcgatccccgaaactcaattcgcaatctacgcaacacccacccctttctggaactcagaggttctcgcccagtgatcgcaggc

SEQ ID NO: 149727 - DNA, 735 bp, Homo sapiens
agcacacccgagcctgagacaacagctctgctaagtgcccttgagagggcacggtggggtcagcaccaaagtcagaccactaaagagaaaaagagagaaagacaggattgcagaggagaaatgagaatggcagaaaaaataattttttaagccaaaaggaatcagagaagagcagaagtgcctctaggataaagcgtagcaggcagttagggaaaaagggctgttaactaccttgaagctctgactacattagaaagcctcgcaagacagtcgttgcttgcacgggcaggtagagaacttttcctgtccattgttcttctgaattataaatcactgacctctttatgatttctaaagggaaaatgacttcaagcttcttagagttcccctaaggcattctctatattcaatataatatgggaagccctgggtttgtctttgtatgtttcatctgcagtgacctgaaatcttcataaccctcttcctttctccacttatcaactaaggggtggttggcaataaggatgggtgggagagaaaaaaaaacagaatttgaggaggagagcatttaaaccatcagactgtgtgttctgtgacatcaaagactggcaacattctaaaggaaaagcagctgtgaagtcataattatgttcacttcccactggcaactggcaagccctttatttttgtgcattcggaactcaccaagaataaataaagtccattccctccttg

SEQ ID NO: 149728 - DNA, 221 bp, Homo sapiens
acaggtttccgagtgtatactcgctaccttgaataagagcctatctggccgttaggatacagtacaaaaaaagtatgactcttccttttttctctccttttactttaggaaaagcagctgtgaagtcataattatgttcacttcccactggcaactggcaagccctttatttttgtgcattcggaactcaccaagaataaataaagtccattccctccttg

SEQ ID NO: 149729 - DNA, 210 bp, Homo sapiens
tgctgggattatagtcatgagccactgtgtctggccagaagtaaattttatctgtacatattattaaaatgaattttcaaataaatactataggaatacacttattctttgttttcttccaagtcttaatgccataatatgctgttgaggttttggtaaagtgttttccacatcactcacatcagaatcacctgaggagtttgtcaaaat

SEQ ID NO: 149730 - DNA, 339 bp, Homo sapiens
acaaatatttattgaatgcttattatgtgctaggtaccattttatgcattggagatataaagtcaacaaatacctttgccttcatggagcttatatgttagtggagagagacagacaataaataacatataaacagtttcatgtccatttaatagcttcatgtcagacaataaacagcttcttgtcagtttaagtgacatatttctgtacaatgagtattaaatgattgttttcaaaaaaggtaaaattatgactgttatacaggtataagatgaacacattttaatgattttatttaactttctttttttaaaaaaattttttatgtttttagagaca

SEQ ID NO: 149731 - DNA, 594 bp, Homo sapiens
ccgtgatgtcctgccatggataagtatgtgggtttacatacacatccacacatatctgtatttctgtatgtgtgtgtatatatgtatacacagaaagtggaagtggattaggttccaattatttccagtcaaatttatatcgtatataagttaatatcaagggaaatgaaaagtcagttctagcattacttttagtaatgaaataattcacttgggattatgctaatgatatgtagatattaatacacataatttggctgcctaatattgatttaagttgctcattcaaattctctttattacaaaaaaataaccattttgttttacagtgcttgtcctcagagacagtgagatccagtaaaccatacttatttggtaaataatactatttttgctgattttcatatacacagagagcactattctctttcagtaggtaccctttgagttgttaatttctggttggggtcctggttagctctagccaaatatcctctctggatctgcctcatgatcaatgcctagggttgaaggtactcccggtgaccagggcacagaagtttttgttctctgtgatgttaatatgccctaggg

SEQ ID NO: 149732 - DNA, 750 bp, Homo sapiens
ccacttagccttgtccttcctgctagtgggtgagcgagagagaggggccccctggctaagagacttggcaggggtgatgacaagatgctcagcaggatagagccatcagactgtggctgtcatcgggaaagacagagacgtttctgcttacaactttgaggcttccaaacttttcctggtacgagagagtgtttcttccaccttaaactacatgatggaaagatatgtgagaatagaaaaaaaaaagcgtgtgttgctatggaactgcaaatccctgatagaagtcttcctctgaaccacatcctgcatcgacgagaccacccagctagtcttagagcaagatggagtggccctctcaaatgctatcatttgctgttacctacattcctccaggccctatgtagcagcccctatcatagccatcaccctcaggatttgaatcaattccccagttagcacactaggggaaaacaaaggcctcatttgaagtctctcctgactgtattccttaggaagctgtcccacaatgcctcggtgagggctggcaggcgagctgactagcccctgccggacaactgtcaggttggttgaaggatattagagggaagttgatcatgtgtcaacgcttctcagcgcccactcacatcagggaagtgatacagctgtcactgtggccgacgaggcggctggcagaacaggccacgttcaccaacccagctgtccaattagatgcaagggcctgaccctcag

SEQ ID NO: 149733 - DNA, 305 bp, Homo sapiens
ccccagcgtctcctgaaggtggtcaggagtgtcattggcaggaaagtaggttaatgtgtgtcctgcaatcaggtttatgaacgcgtttgactcctaccattttgagagtctctcccaaagaattctgcatactgtagaaggactcattttattaggtgtctaggatttgattgatcacacatttttatgggaaaagtgctatgttattacgaacaggaggctgagcaaatcccattttaaaaagcagttatttttaagtcacaagagaaatgctgaattaatgaatgtaattatttggaggtgct

SEQ ID NO: 149734 - DNA, 248 bp, Homo sapiens
tcgccacactgacttccacaatggttgaactagtttacagtcccaccaacagtgtaagagtgttcctatttctccacatcctctccagcacctgttgtttcctgacttttgaggatttttaaattaaaagatgattgagtataaatctggtttttaaatgctgctctttgcaatggaaataactaatatttgtgaaccaaaagcctgatttagaattcttttcattgctttatactgtaaaccaagaa

SEQ ID NO: 149735 - DNA, 387 bp, Homo sapiens
ctagtccatgctttcaaggagtttatgctcagaaaaaatgggatgaacaataactacattaagaagaagaaatggatgtgggcactaggagggataaattgtttctgaagcatagaagaggggaaaatgacttcagtttggacccaggaagctgttactagaacaatcccatttgaataggactttgaagggccattgtgtagcatcggacagacatcttggggacaatattctaaacttgcaaaagggaaatgggagaagggcaaaacacaggaaagtattcgaggaatgccatgagtacctgtagattacaaggagggagagtaggaaattggagccagatcttccagggctttgaatgccaagctgaggagccatcatggggaa

SEQ ID NO: 149736 - DNA, 237 bp, Homo sapiens
cggggatttatggccaagtgatctcccttaaccataaatcccacaaatgtccaagtcagggcaagaatcctggagactggtactaggagtggttgaggtgggtggttctcaaagttcaattcctattgcaagttcctacaagaaaattggatgccagatgtcaaataagaatgcagttttattcccatacgtacgtagtggcgtttctttgattccttaaaccaatttccctgccag

SEQ ID NO: 149737 - DNA, 343 bp, Homo sapiens
attatttcagaagctgtcaaactcttgatggccaatacagaatgtctaaaattcaaatttttactcaaaactcaaattttgtcattggcaacaaacactaagttttcttccttgaaataatagactcactctgttcttcttcaaaaaatgtcaaacattctctcaagtgaaaatggtgtgcacaaaagtaacagctaagccaggtgcagtggctcatgcccataattccagcactttgggaggccaaggcgggcagatcacttgaggtcaagagttcaagactggcctggccaacatggcaaaaccccatctctactaaattacaaaacttagctggacttgg

SEQ ID NO: 149738 - DNA, 216 bp, Homo sapiens
  misc_feature (22)..(22): n is a, c, g, or t
tacatctgagtgagagtagctntggctgtagtctgattgatgagatttttgctgctaagtagatatgtaacatgtctcacatttgcttggaaattaagaactcttacatccagataatcccctacccctctctttacatatgtgaattttctcatttttcaaagttctcctcagtcactacttcctatgtgaaggtagagcttatcaatcaaggct

SEQ ID NO: 149739 - DNA, 620 bp, Homo sapiens
tcaggctctcgctgaagagcaatgtgaccagcctggactgtcacatcagccagtatgctaccatctgccaacagctccaggctgaggtagccgctctgaggaagaagctccaagtgtatgaggggggaggccagcccccaccacaggacctcccaggatctcccaagtcgggaccaccaccagaacagtgagttccactgcccattcccgcccccaccctgcagctcagccaggatggggagccaggccctcttctccagtttctggaggactaggactccttgcttctgctccaatccctagggttaagggtttgcacccagtgcctgcccagcaactgactgtcacctagagtgctgtgtccaatgagtaaatggcaccccagcccgtaagagcagggcctactattcgagagaaggtgaacttaggggtgtgtgtcattgtctctcaaaccagaaaatccctgactcctcctaccctcagctactgcccatttgtcacctaagcatctgtcccttatggactctatacgacctgggtgccacagagatcccacccgctccctgctctcccacctggcccacatcctgcctctcaaaccctcctttcccgcttagcct

SEQ ID NO: 149740 - DNA, 382 bp, Homo sapiens
tggatggactgggtatctgtcttggctagaaatgcacctggagtccctttagactcctttgcaattcacacctgcacgccccatgcatggcaaagcccagggcatgtggatgtggagtgcggggagctggagcgatccctttggctttctctaccagctggatagatcagagccttcaatgcccatttgattcaggaagtctggggtggagcctgagctgctcacctttagcccctgggaagtgctggtgatgctggtcgcgtgacagcagcgcagtgagacatgagagtctggagtagctgaggggcgagcgctctctgatcttggctcctggcctcacagatcacagggaatgacaccgatgagtagagccttgcacttc

SEQ ID NO: 149741 - DNA, 184 bp, Homo sapiens
ggtggggagtccccaaagctttcagctcacccacctgggcttggggggacactcttcccttgctcctgcctcccggtgccttctgtttccctgtctggcatgcctctctacgcccccactcctccacctgctcagctctccaaggacctggtatgtgtgcctcctccatgcagccctccaggct

SEQ ID NO: 149742 - DNA, 319 bp, Homo sapiens
agccaggcatggtggcgcgcacctgtactcccagcttctcaggagactgaggcaggagaagtgcttgaacccagaagactgaggttgcaatgagctgagatcacgccactgcactccagcctgggtcacagactgatgagaccctatctcaaaaaaaaaaaaaagtaataaaagaaaaatgcaaaacagtttggaaatatctgatacagggaaacaacagggtgattaaaaatgccaatcagacatctaaattggggcctagattatcagacggagtgactggagtcccaaattaatataatcagtgaagaaatattat

SEQ ID NO: 149743 - DNA, 338 bp, Homo sapiens
gcaggaactttccattctctttaccaccttctaaatttcctctccaaggaggctcagctgcgtgaccttggcacacctttacctggaaaggcaattcattcagatgcacatttataatttcctattgaaatatgccttatttttcctcagtctactcccaaaagcataagattatttaaaaaaaattatcagaaagctttatagtttacagtatggaagaaataaaattgagaaatgggtaatatttaatggcaaatattatttacataaatcatttacataaaaataaaactattcaggccaggcatagcggctcacacctgtaatcccagcacttt

SEQ ID NO: 149744 - DNA, 710 bp, Homo sapiens
  misc_feature (53)..(53): n is a, c, g, or t
tacaggtaccgtttgatacaaaaaatggaccctccttcacttcaggagctcangagatccagatggcagccggtcctcactgggctgtgcctgtccatgtgcctggtcacggtgctggggaacctgctcatcatcctggccgtcagccctgactcccacctccacatccccatgtacttcttcctctccaacctgtccctgcctgacatcggtttcacctccaccacggtccccaagatgattgtggacatccagtctcacagcagagtcatctcctacgcaggctgcctgactcagatgtctctctttgccatttttggaggcatggaagagagacatgctcctgagtgtgatagcctatgagcggtttgtagccatctgtcaccctctatatcattcagccatcatgaacccatgtttctgtggctttctagttttgttgtcttttttttttctcagtcttttagacgcccagctgcacaacttgattgccttacaaaggacctgcttcaaggatgtggaaattcctaatttcttctgtgacccttctcaactccccatcttgcatattgtggcaccttcaccaataacataatcatgtatttccctgccgccatatttggttttcttcccatctcggggacccttttctcttaccatgacaagggtctcgctccattccaagaaaaaaatccgcctccgttggccca

SEQ ID NO: 149745 - DNA, 708 bp, Homo sapiens
  misc_feature (53)..(53): n is a, c, g, or t
tacaggtaccgtttgatacaaaaaatggaccctccttcacttcaggagctcangagatccagatggcagccggtcctcactgggctgtgcctgtccatgtgcctggtcacggtgctggggaacctgctcatcatcctggccgtcagccctgactcccacctccacatccccatgtacttcttcctctccaacctgtccctgcctgacatcggtttcacctccaccacggtccccaagatgattgtggacatccagtctcacagcagagtcatctcctacgcaggctgcctgactcagatgtctctctttgccatttttggaggcatggaagagagacatgctcctgagtgtgatagcctatgagcggtttgtagccatctgtcaccctctatatcattcagccatcatgaacccatgtttctgtggctttctagttttgttgtcttttttttttctcagtcttttagacgcccagctgcacaacttgattgccttacaaaggacctgcttcaaggatgtggaaattcctaatttcttctgtgacccttctcaactccccatcttgcatattgtggcaccttcaccaataacataatcatgtatttccctgccgccatatttggttttcttcccatctcggggacccttttctcttacaataaaattgttttctccattcaaaaaaaaaaatcggccctttggccttaa

SEQ ID NO: 149746 - DNA, 849 bp, Homo sapiens
ggtttagatgtttcttaagtcccttgtgacacattgctgatgtccttctatgagaaaatagtgtattttttagcaagaatgtgggaacagatctttctcttgacttcagggtcttagatgagggaatagacttatctgattcaagcagtctgtccttctaggggaaataactaaatcataccaagtgatgtaaagacccagtcttaaaatcccaaaagaaattccttacagttagtggcagttctcatctattgcatcgtccggggcactaggctattctttactgctggttgacttaccaccattttctctagacacatagattccgtctcaaaggggcaatcattttctcccttcccagcagtgacaggtgtgcagcctttgtttattcagcccttctcctccaaagagcaccttccctagtctatagcatcacagagaggaccagaagaaagaacagctcttgtgtgtcaattgatgtataaacaagcaagaagaggaataacaaatgctgcaccttcaatattactgcttaaaataatagccatgtaagaaatttagtaaacacagttagaatttgatgtgccttgattgttgagtattcacaaactcaagcctaagggtcaggaaacaaaatactgaacaggcccattaaggcaaatgtcatctttaaatacctatttaactctctgggagtttgtacaaataaggtgtgaagactaaatatatgaagcatgctgaaattcatgttttccttgctgtttgtaaaagggctagaaatcccagcaactctcttaaaaatcagacacctggtataccaagctctggatttaaaaatccctaacattt

SEQ ID NO: 149747 - DNA, 144 bp, Homo sapiens
ggagaccatgttggaggctgagcagtagtccagaaggaagatgagcacagcacagcagagacaggttggagaggcggtgacagggcccccttagggagggctcagcaggtgggcttgtcgggccctggtaccacctgagtatgg

SEQ ID NO: 149748 - DNA, 550 bp, Homo sapiens
aaagcctggaatgctgtctaagctgtgtcatatggaacacaggaagcaacttagtggcagggcagcccttgggcattatgctgtagtgagctgtgctgggtcaacaagggctggggctcagacttagctagatccacagccctctgagtcacagggcagaccaacacaaaacactagagggatttgttttttattttttcagaaaaatgttataagagaaattgatgtttaatagttagatgggctgctatgttcctaaaagggccaatggccagctatttcaaagacagacagaatatgaactcttgacctagttgtgtgacacacctagcaggtttatcagtgaatgttaaggcaaagttgcaatgtctcattagaattcgtatcgattctaattaacctataaccaagttcctaaaaagtgtcacgaagtgtgctgggtgtgggagataccaaagcttttctgcttcaagaggctgagtcccactaggatactgttgtatcatcagggttgagagtaatgccctcagtaaacagctattgaataaat

SEQ ID NO: 149749 - DNA, 389 bp, Homo sapiens
ggggactctggggctggcagggctgatgctttgggcagccgcagcagtgacagctgaattggacgtgtcctggggaaacggggagtgccgggcccaaggggagcaggtgtgtctggagaggtggtcagtttcaagtagagagagaaggaaaccacacagaaggccagctgaaaaagagacgttgcagggaactgccagagctggggacgtaaaatgttgctgctgcttgagagggtggagggcaagctctgcggaggttttcttttggaagggaatggggcggtggctggattctaccctggcatgtgagtatcatgccgagcctctcttcctggtcagtgtggaaggacctcggagcagctggacccagctaatgtgatctgcagaac

SEQ ID NO: 149750 - DNA, 474 bp, Homo sapiens
tcttccatctgtccgtccacccatccatccatccaacaattgagacagggtcttgttctgtcatccaggctggagtgcagtggcagtcatagctcactgcagtctccaactcctgagctcaagtgatcctcccaccttagcttgtggaactacagaaaggcacacagccaccatgcctggctaattaaaaacaattttttttttttgtagagacggggcctttctatgtttcccatgctggtctcaaactcctggcctcaagcaatcctctcaccttaatctcccaaaatgctgggattacaggtgtgagccaccaggcctggcctgtaacttgttactttaaacctaagacactaaaaaggatactttttatttagtacatatttttctatcctacttttcaacaaacagaactacagaaatgccatgtagactatattggcattatataaacaattaaattttaaaattaaa

SEQ ID NO: 149751 - DNA, 402 bp, Homo sapiens
ggctagctttttaaagcctcacaagacaactttcaaacctgattagtatgtatgctgtaaaatcagatacattatatttagcttgaagtgcagagcatcgtgggtgcaaagaaagaaagatagggggagggattaaaaaaaaaagaacatctgtaaagcctttcagagggatctgcacagcatatggcagagtaagagtttgctcaagttctctttatgtaattaactgactatgtgtcacctccccatcgtggagctccgacgtcgctcagctatgggatgtgatgactccgtaccagggaggggctcatgcttttctgtgatgacactgaagagctcagcacttccatagacagggtcttccctgagttaaagatcttaactcctagcttgcatgctttc

SEQ ID NO: 149752 - DNA, 541 bp, Homo sapiens
agagagtgagagagaacacacatgtgagagagagagtgagagagagaataaaaagtcttttcagtcttcatcaaccaccatctgactggcgtgaatttcaacacagtttataagggaataggcattaagagtttggaggatagaaccatccttgaaacagtacataagtaaaaagctcatatgattctatagagtcttctgaactgtctttgctcactggagttgtacctaacagtgacctcgaggctgttccacaggtcccaccacagacatcctgatactcagacaaaaaaagctggctatagactgctgcattagcttttctcactagtggaagttcttccactgccatttatgccgtttattagtggaaagtaattttttaaaagagccctttcttttaaagtgtattgaagcggtataaaagtatggaatcatgtcctttgcaacaacatggatgtagctggaggctattatcctaagtaaattaatgcagaaacagaaagccaaagattgcctgttctcacttataagtgagagc

SEQ ID NO: 149753 - DNA, 371 bp, Homo sapiens
atattaaagtgaaatattcaggtcctcagagtattagaagaaagtgaagacaagagacttcgaaagacgcgaaagaagatatgtgcaaaagataatagacaattgacttaaatttggaatatatacataacactcccacatactttttaaataaaattcatctggcaaaaaaaatgcatgaaaatgtgtttcacctctttaatatcaagatatgcaaaataataacataataacataacactataaacactaaagaatttcaagttttaaaagtaagaaaataccaatgtgttagattaaattattagttccaatactttatttctctataacaaaattatgtatgcatatccttgttgtggtcccctggt

SEQ ID NO: 149754 - DNA, 207 bp, Homo sapiens
tctaaaactgtggcatgcattagagatgtgactctagataagggagaggtttctttggaaataaatcgtgtgtcttaattatgtagaatgtctaaagacaagttaagagtaatgttgagggaaaatgatgattgtttaataaggaaagagaaagtaagagagaacctaattttttttttttttttttttgagacagagtctcactct

SEQ ID NO: 149755 - DNA, 146 bp, Homo sapiens
cctataggggggagggggcttccgctgactaaaaatatatttcccctcctcccaacttccgcccagaggttgagaagaaactgggtgaaattatgaattcaaggaacagtgacaacgaggaacagccacgtggctgacaaagtgtg

SEQ ID NO: 149756 - DNA, 500 bp, Homo sapiens
ggaagagccaccacgctggcctgtttagacttttctatcttccacgtgttaaactgtctatttttctcttattaaccacaagtttgggattcttcagaggccaaactactgttctcccaggctttgagaaaaaacttttcgtgtcatttagctacatagttttgctgaacttctccttcaacaacaggaaagcatatgttggtagctgggcaagccctactctgagcataatcttaagggactggcaagaattccctggagaaccccgagaacttgctgaccatgctggagaattccccggagaaccccgagaacttgctgaccaagctggaggattccccggagaaccccgagaacttgctgaccatgctggaggattccccggagaaccccgagaacttgctgaccaagctggaggattccccggagaaccccgagaacttgctgaccatgctggaggattccccggagaaccccgagaacttgctgaccaagctgga

SEQ ID NO: 149757 - DNA, 404 bp, Homo sapiens
acgagtgtgggcctcccctaagctcatctcacgagtgtgcgcctcccccaagctcatctcactagtgtgcccctcccccaagctcatctcacaagtgagtgtgctgctcccctaagctcatctcacaagtgagtgtgctgctcccgtaagctcatctcacaagtgtgccactcccccaagctcatctcatgagtgtgccactcccctaagctcatctcacgagtgtgcttcttcccctaagctcatctcagaagtgtgccccttccccgaagcttatctcacgagtgcgcccttcccaagctcatgagtgtgcccctccacttaagctcatgtcacaagtgagtgtgcagcttccctaagttcatctcacaagcgagtgtgcagctccccctcagcttatctca

SEQ ID NO: 149758 - DNA, 195 bp, Homo sapiens
atcactctatctccagcctagagcagaggcaggcaataaagtgggctcaaagaattgttatcagatgaactaatggtggctcgtgcctataatcccagcactttgggaggccgaggcaggtggatcatctgagttcaggagttcgagaccagcctggccaacatggtaaaaccctgtctctcctaaaaatgaaag

SEQ ID NO: 149759 - DNA, 253 bp, Homo sapiens
ctagacgtggaggaggactgggtggctcccgttacctaggcccggaggcaggcagaggtgagtggggaagaggtcagtgggggcggtgagttatgtccagtttggggtgactatgaataaagccttcatagaatgaggagtctgtcttattaagctttcttttaagaaaagaaattcaaataaaacatttgggaattggttgatattcagccagaagaatttatcgtggctcccgtattaagatgatggcata

SEQ ID NO: 149760 - DNA, 424 bp, Homo sapiens
tgagaaagcacaccctgaacaaatgattgaataacctttttgggcctggtatatttcttgatgctttatatatatttgtttacttttctgcacaacagtcttgcaggatactactattattcccattttatgaatggggaaagttatttgctggccaggcacggcggctcgcgcctgtagtcccagcactttgggaggccaaggcaggtgaatcacgatggtcttgaactccggagctcaagcgatctgcccacctcccgaaatgttgggactagaggtgtgagccaccacgccaggccaatttgaactatatttgaaaaagagggttccattgtttaaaaataagtcttggaaactatagtattgtagctgttctctaacagcaccaattatgacaggaaccaggaactatgaagtggggaca

SEQ ID NO: 149761 - DNA, 258 bp, Homo sapiens
ttgagacagtctcgctctgtggtccagctggaatgcagtggcgggagctcggctcacttcaacctccacctcccgagttcaagcaaatctcctgcctcagcctcatgagtagctgggattacaggcatccaccaccacagacggctaattttttctttgtatacttttatttaattcggcttaggttacttgtttattagtagtagttttgcatctatgggattgttgtataaaataaatggtttaaatatgtaggat

SEQ ID NO: 149762 - DNA, 540 bp, Homo sapiens
  misc_feature (337)..(337): n is a, c, g, or t
  misc_feature (498)..(498): n is a, c, g, or t
attctctagacctcaccctatgttatttttcaacaaggatttaaatttactagctgacattttcttgtattttcaatgaattactcatttattgtcagtctgacaaacttgtcttgctctccattgtatccccagaatctggaatattatctgacacacaacagggatccaaacaacacttggcaaataaattaataaagtaataaggcataatgagtcatttctacgatctctcgtctccgcacacaaagagaaaaacccacaggccctgtagggctggaccctacactgtctcaaaaaacaacacaaaacaaaaaataaagcaattatatttatngtaatttatccagcatctaattggactgtaatgggacagtctggtaacagcatctaataatactggaagcaaaggtccttccctccctttttcattttctacttaactatgtgccctgaatggcaactgtgacagcataggagagacgggcagctccaggnccactccttaacaggtacatcctaagcattcaccctcatctc

SEQ ID NO: 149763 - DNA, 236 bp, Homo sapiens
tcttaggtgacttttaacaaacattaagcaagggtgagctcaaagcacagaatttaaagtggcaagtaagtgcttcattactggaatataagttatctgtgattacaaataaactgtacagagttataaaaattgcattatgtttctagacacaagaatttgagatctatgttatttaaaatagtggttacttttaaaactgggtagtataaaaaatccttactaatgttcttagt

SEQ ID NO: 149764 - DNA, 594 bp, Homo sapiens
gctgagcctcagtttcccaacctgtcaaatactgggctaaatcagaggtatgaaaacaattgccccacaggcatgttttgtctgcactgtaaagcacaacaaaactttgaattaggtgcaacaataatcagaaagttttacataaaaatctagagttctggctacctttgaaaaaggtggggaagatccaggaaccctgagctcacattatccataggacgatctcacagagctgagtggcagccatctcctttggttggcacctagtcagttttacaattcactgcagaccccactgctctctactgtcttgcccagatgtttcaacccatttgtgttacccacgtggcccctggggatatatgaaactgactcctgggctgagtgttccaacggtcacctctgctcctactgtccatgacttgtctgatattcacatgccaacagatgctgcctgccatcccctggggcagtcagtggagggctgaccagcttgagggtgggtcctgcagggctgccttccactgtactgctaagggagaggccctgcctctgccaggattccaatcccccagtcagaacaaagatgacagc

SEQ ID NO: 149765 - DNA, 400 bp, Homo sapiens
gacatcctgctaatgctgtactaaatggctgtcactaaatggtgtactaaatggctgtactaaatggtgtactaaatggctgtactaaatggtgttactaaatggctgttacctaaatggctattatctaaatggctgctggatttggcgatcacgagttgccatttaggacctaaatggctgtcagaaccaaacaggtttctgattctgcagaaacactaaaagttcatcccacagggcaaacatctcaatagaaacgttcaccttcatagctattgctcctcatcaggcggcaactccttgtttctgatcagtttccatgttaccacacaataaagagaataatctagtatttaccacattaagctagttataatcccattcttattacagcactaaa

SEQ ID NO: 149766 - DNA, 172 bp, Homo sapiens
cacccgcacaggtggtggtcctctccacgtctaagtgccccacgctgtcctaaggtgtcctgtgtgcattggggcgggcccaccatcaggccctttaaaggaaaggaggaacgctgttattagtccctgatcctggctaattacacatcccagaaccaaagctcaaggaagc

SEQ ID NO: 149767 - DNA, 373 bp, Homo sapiens
agcctgggcaacaagagcgaaactccatctcaaaaaaaacaaaaacaaaaacaaaaatactaggcatgcaaagaagcatgaacataagctcataatgaagtgaaaaattagtccatcaaaactgacccaggaatggcacaatgacaatcagtagacaaggacattaaagcaggtattatgactgtattccatatgttcagaaagctagagagaaaaacatggaagatacaaaacaccaagttgaacctctagagatgaaaactgcaatatctgatgaaaaacgctgaatgggattaacagcagattggacatctcagaaaaagatatgaaagaattggaagacagcaacttaaacaggaaaaagactgaagaa

SEQ ID NO: 149768 - DNA, 296 bp, Homo sapiens
agcatggatactgagtaggcaaggtagcagaggctgccacaggataaagaacatttaaagtttttgctaagttctacaagtcaaaaaccatcaacttaaacctcaaactgtctactaacttcagtttttttcccttcaagaaatagttctaagttcccgatcgtttgccatcaaacttactcttcacaattgacttatgttacccatatttccccaaaaggattgatcacacactctattataaaaaaactactttagcaacaacctcaaagagcatttgaaaagaggacataaag

SEQ ID NO: 149769 - DNA, 369 bp, Homo sapiens
atggatgaatgtgaatttttgtttttctgcatttaaggggatcaattttttcatgttgatgtgatgagttacattaacagacttctaacatgaaaccatccctcaattcctgacttcccacggctccgagcagctcacggcaagacgtgcagacgtgaggttttcggactaaacgcaggaggccccgacgtactcaggggaagacggcccccgtggctcatgaaaagccgccatcattggcaggaaatacaaacgccctggcgttcttaggaaaagctgcacagggaggtctgggacccaagacagacgactgagatcacaaacttcttcctcacgccttgggataagaagaacctggaaacttcccag

SEQ ID NO: 149770 - DNA, 616 bp, Homo sapiens
ctccctactgcctcctccaccctgtatgggggtgtgtgttcaggagaggagggtctccctttcccatttctgcagttggggcactcacagtatttagggtgtctcccgggtcctgcaggagcggtctatttccttcagagggtctatcctaatgcctttgaagatacattctcaagatgaaggtggtgatttgttcagataatctcacctgagaaagaattagagaagagagaaaaaatggttgattcttagataagtgtgtcccaggtcaaaactgttcacattttcttctacaatgtcatgtatttagaattgcaatcatttacatttctacttctgatgcttttgcctaacaagattattttaactaccttttcccttttcttctcatgatagtgaaaggatctctttaaaataattctccccgatttatcagagccttaactctctccatccagccttcttacatatcacaaataatactcacttgaatttataccctgaagtataaagcgttgagctcaacgctttatagttctaatacatcgtgttcatctgggatgtattagaagtacaagtagtagcttttcaaagctttaaatttgtagaactcatc

SEQ ID NO: 149771 - DNA, 202 bp, Homo sapiens
aaggtggggctggggcctagctggaagaacaactacacatttgctgtcaggggtccccttgctacctgtgcttccctcaaagccaggagttatcgtgtcttagggtaaaactgagcattgctggcagaaagcagttctctgggacagtagctgctttggggaactgcagaagagtctaaagagcaggtttcacaccagcacc

SEQ ID NO: 149772 - DNA, 563 bp, Homo sapiens
gtctcctttgcttttaggcaaagggaatgcttcttcagatttttttttttccccagaagttcaaaataacttgctcatagtcttcccaaaataattttcaaacattctaacaccaaagaaagatactcccaattgagctcagccatcagcctcctactattttttaatgtgctgtttaaccttgtgaatgtgagaatattttgaatgcactgggaaggaatactcaggaacaatatgtaatgtgctttctagttttgcacaaaggcattcattttgatttagtaacaacctcatacttacatagcatatccttctgcagaaatgcttcacagccatgactgcttgaattcttgtcatgttgcttgtaaatgagctcctgtttttagatggagaaatggaggcagagtctcacaattacatgtgagaatagcaagtagaaccttatgattacttctgagtcttttttttttttttttttttgagatggagtttcacttttgtcacccaggctggagtgcagtacagtggccagtggcatgatctcagcccactgcaacctccgc

SEQ ID NO: 149773 - DNA, 455 bp, Homo sapiens
tctccttttagttacccagattcattatctatattaacaaactgcccttccccaaacttacccccacttcctgtactctgcttctcagtaaatgaagatctacccatctggaaacttggaagtcttcctcccttgacttctcaccattaccccttgattagattattacagtaggctcttaactggctcactgcttccatccatgcactcctaggcactcttctgtaatcaatagtatgttgctaaatatttaataaatgttctctagggagggggaaaagccctgatttgtagtgtttccccaccttctatgatgtaaatactactaccaagtctagtttcaagctatcaatatgacatcactgattatggagttggaaagagatgtgcagtttcacactattttagtatttccaccatacagatacaacagacaaccttaagagtaaaggtaa

SEQ ID NO: 149774 - DNA, 146 bp, Homo sapiens
gcgccactgcactccatcctgggtgacagagcgagactccatctcaaaaaaaagttcagatttctgggcttcactctcaaagattttgcataagtaaattggggtggagcctggaagtgttttctaaaagcactccatgtggcggc

SEQ ID NO: 149775 - DNA, 211 bp, Homo sapiens
gggatacacaatcgaactgtcagttactgcttggtcagccctgagaacccattccctgggctcatctgatgattctgcaatagttaaaactcaactactaggcatggtctaagagaaccaaatttcaggaagcattttcttcaagcttccttggattatcagcctgttataaaactcatgtggaaagaaacttttatctgtctctctatcc

SEQ ID NO: 149776 - DNA, 356 bp, Homo sapiens
tcatttgatattttcacacctattgcaaaggagccattaacaacttggctttatgaataaaaggaaatgaatgtatcagtcagaatgcattcgtttgtgtcttgggaacaaacaatttcaaacttcagtggcctgactgtgaaagtttttatgtgttggtcataccacctgcctctccctgaatggcaggggccctggccattctggtgttcggaaatctggactgacagaagaatcacctttctgtgcttccattaatgctttcatagtgagaaacaaacttggctatcataactttctcctagcagtgaaattctgcttctatttctggtcaaattaagtcccattgctatctc

SEQ ID NO: 149777 - DNA, 320 bp, Homo sapiens
aatgatggcctgagagggaagtggattctgttgacaccagcagaatgtgtggaattgggattttgaaagtgtatttacccagtggcatgtggtcccaagcgggatctgccctctatgagctccagactggactcgtcctgcccctgtggtctgtcccttcctaggttcccacggttctctctttccccacaatgtagctttgctttggactagtttttgggacaagatgttgcttgtgaggtgggtctgactgcaggagccaagcagcaccaccccaacaaatcctccaatcagtccacccaccatgcccaacaccaatc

SEQ ID NO: 149778 - DNA, 278 bp, Homo sapiens
acagccaacagggggagcagtgcgagcgtgaaggcagacagtggcctggcccagtctgatgggagagacccaccgaccctgtggggctggtccctacatctggcgctctgacgtggggctctccctcgctgtgtgaagttgcaccctgagtgcgggatcagcggaggagttcaacgagagattcctgaggattgcagtctataaacttggtgcaggcggctgaccccgcagctcaacaagatcaagaggctgataatcaagcccctcagcccgaaact

SEQ ID NO: 149779 - DNA, 270 bp, Homo sapiens
aaaaaatgagataaactgagggttacgggagacaagatctgaggcaggaggaagactactggaaggaagcaggagtgaggcactgggcaaggggccctgggcggaggcagttctcaggagcagcaggtggtaatcgagagaagggctgacctcggaggcctacacaatttagcagaaggccagactgcccccagggagctcagggtgacagtgtcgtgcaggccctcagaagcactggagggggtaggggtggctggcattagggttaac

SEQ ID NO: 149780 - DNA, 380 bp, Homo sapiens
cacccacccgaacctgcaccaatgggggagctcagttccccagaggaaaactacaatgcaattgccagcagtgggaggggctgttgggctggccatccttctgtgggtggtcacttttccttatggagtctcacctgttaactgagcatctcagtgggccaggcacccagcaggcaagagtatcctctagttgtcagagtccgggtggcagaaaaccaacctaaactcacttaagctcaccgtggagtgtattggttcatttggccagaaagtcccaaagtagggccagctccagggtttcctgctgtgtgccacgattctccagctcttgcctggccttcaacctgttgactctttccctccccctgaattaggcttct

SEQ ID NO: 149781 - DNA, 400 bp, Homo sapiens
tcggccctggttcagtcggctcatagagacagggtttcattgtgttagccaggatggtctcgatctcctgacctcgtgatccaccctcctcggcctcccaaagtgctgggattacgggcgtgagccactgcgcctagcctgtataactcttaatatctgctatcaggttataagcaccttgagacagaaaacttgtttctccccggcaatgtctttcataaattaacccctcaatgaaaccagaagccaagaaacaagaaattatactaagggtttcttcatagatgtttggggctgcaaaagatactaaaatatccgtttaataagtccaatcatgcaactctcattttctctcctgcccctgcccattttaaaaataaacattcctaggcccaggaaa

SEQ ID NO: 149782 - DNA, 300 bp, Homo sapiens
gtgagcatgaatgtgcctgagcccacttgctcgctgtcccttccattttggaaacagaaaattggccaacctttgccctagccagcctcagcattttggaggcagtttggttttgagctaagatgggtgcgtctgcagtcccaggccacgttcctgtcagactccgcttctgagtgacagctggcaagccctgacttgggggccacgctgcggagaacaaaacatgtgcagacagtctagggcaccaaggtggcctcattcatgccccctggcattgggagctcctccctcatacacaca

SEQ ID NO: 149783 - DNA, 412 bp, Homo sapiens
gccaaattcatctcccttttctgtgaacttcatcctggtttggactcagaggaatccctgaggcttcagaccagttcctgggagttcttgggagtgctggggagtccactgcctcctggtgccttcccaggacccagataccccaggagtccccacactgtcgttccagcccaaatctggaggcagctcctcaaagcactggtatggttttgtacccacttttccccaagagccttgtgcgatcccatatctccaggtgactctaaggcttctaggagccattcttgggctgagatctagctcgtctcccatttgatcctgtttctcctcataactggcccctaatcctctagttcttaatcacagagtccttgaggaaagaaacagaatcctgcctgtgcagagatttaca

SEQ ID NO: 149784 - DNA, 164 bp, Homo sapiens
cttcaacagcaacacctttattactagcaaaaccctgcagaggaggaaaccagcttactgccagcaccaactgcctctcacaggctggggtgatcatgggactgggaaggaggggtctgggctgtagagcttgctgcccggcaggatatggcaaggatgttcct

SEQ ID NO: 149785 - DNA, 559 bp, Homo sapiens
tgagcatggaatgtttgtgtcatctctgatttctttgagtagtattttgtaattcttgttatagagatctttcacctctctggttagctgtattcctgtattttattctttttgtggctattgtgaatgggattgtgttcttgattgggctcttggcttgattgttgttggtatataggaatgttagttatttttgcgcattgattttgtgtcttgggacttggctgaagttgtttatcagcttaaggagatttgggctgagactatggggttttctagatacagcgtcatgtctgcacacagggataggttgacttcctctcttcatatttgaatgccttttatttcttgcctgattgctctggccaggacttaagtactatgttgaataggagtgatgagatagggcatccttgcctggttccggttttcaagaagagtgcttctaccttttgcccattcagtatgatgttggctgtgggtttgttatagcttatccctttattatattcgtgtttctgttggaaacagatgcatcatttcaacttttagcatcttt

SEQ ID NO: 149786 - DNA, 689 bp, Homo sapiens
ctggagaaaaagaggccatgaatctgaccttggtggcctcagcctggggtggggtggcgaagcccaggggtctgagtgtggactcggagccactggtcctactcacatcctggtcccactgcttcctggctgggtgaccgtgagcaaatcagctcacctccctgtgcatcagtttcccccctgtaaaatgggggtggcaccgcagacctcatggggatgtggtgagagtaaaccagataacacaggcacaagatccagcatggcccttccaatgccagctcttctttcctcctgctcagcccatcccccagcaaactgcgagctctttgtggaggggggctgtctgcttggtgtctgtgtccccagcaccgggctcagggccagcacccaggctctattgtgtgcttgggggtgggagacacagaagtgaacaaaacagacagcaatctctccctgccctcctggagctggcactccagtggtggtcacaatcaacaacatttaaacaccgatgaagtgagctgtggagaaacctgagaaacgggcttgtgtcgagggcggtaaatgttcagtcaggtggtcggggaaggccttgtcaagtgacatttgggcaaagccatgaaggaggtagggaagaggccagaggaacggtctcagatgcaaaggcccagaggcaggaaggggcaggc

SEQ ID NO: 149787 - DNA, 537 bp, Homo sapiens
gagatgttgcacttaagagaagaaaaaccaccaaagaaacaaataaagttgatctaacatacaaactaaacaaaactagctaactttcctttgaagaataacaaaagtattataatttgtgaataatcacatatacactaaaactaaggaatatctgaaagggaacaaaatgaatcactcagtaaatatataaatctaaccagacaatgctggtgtccaaacaggtgctcaataaatatgagacgaatggatggacagataaaacttaagagatattgcctatagttcttacttctaatggcactttaaaaggatcggtctatatctgttgcattttcagtgagatgtattataatgtatgcttattgttaatttttcgtaaaaagaattgtttatataattttcatgttttctgaacttttgccctgaagtattcctaatagagaaagagaacaaacacatatataacaccattaccctgcctcattccatggaggggcataggggactgtcaggcttcagtatgcatatcgagaa

SEQ ID NO: 149788 - DNA, 550 bp, Homo sapiens
tggatgtaaagaactattaggttaatattctcacacatgaggattttcataccagaagatgccccatgccccacaccttggggatgctgatttagtaggcctgcaccttggggaggctattttagtacacctgctgggtctaaggtggagcacggacatgtgccttgtgaaaacccaccacttgctggaaaacacagtgctctggatgccgacagatcctgaaaacttgcttcagatcatccactctgggaagataaattgggcctgggctgcgtgctgcgcgagctggctgaaccagacacttggaaacatggtatttgaggcaaattagacataaaaagtaaggtctctctctttcgaagatggaatgtcaggattgtgctgcagtagggaggtaactcctcacactccctgtttggtacatttggggatatctgtgctgataacggggctaatgcgctcagcaaaatgggcctttcaggagctgctgagctgaaaagacaatcagaagcatcctcattccgatgtcacgcaggttcccaacagctgt

SEQ ID NO: 149789 - DNA, 181 bp, Homo sapiens
ctgggtcagatagggttaaaaccattcatttaaccagctccccgctgtaatagtaggagattctgaaaagcttagagtcaacagtctcggactcatgcagactccagggctgaaagcttttcatccttgagatgtcagttgggactgtggaaaaaacattagactttagttgtttcttttt

SEQ ID NO: 149790 - DNA, 480 bp, Homo sapiens
aaatcttaaattcccattcatttggaaacttaaaaactatttctaaataatttataggccataaacaaaatcaaaatggaaatttaaaaatccttggaattgataaaatgaaatatatcacaaaacttacgagatgtagggaaagtggggcttcaagggaaatctatagcactaatgcttatattagaaaagaaggaagcctaaaaattaatgattaaacattccatctaagaagttagagccgggtacagtggctcacacctgtaatcccagcactttggaaggccaaggccagaggattacttaagcccaagagtttgagaccagcctgggcaacatggtgaaaccccatctgtacaaaaaatacaaaaattaactgggcatgagggcatttgcctgtggtcctagctacttaggaggctgaggtcagattacctgagcccagggaagttgtgagccatgctttcaacactgtactcc

SEQ ID NO: 149791 - DNA, 187 bp, Homo sapiens
cttgttgtgaaatgtgcattgtagtttgtcatgtgtaaaatgggagggctttgtggtttcttacgatctaagtgtaagagcaagctgttacttctccctgtataggcaatagaactcacttttgtttagcatttgccaaaagtattggatttctttggaatctttactttgctacttttagcgttga

SEQ ID NO: 149792 - DNA, 283 bp, Homo sapiens
aatggcgggaaccctcctgaaatccagatgtcaggcgagagccaaacttacaagcaggccttgtaaatgacagcagtcaaacctgcttcgttaactcctctgcacactcgcccacaccctggcttccgtccttgtcctgtgacattttcctgttgtcccctcctacccaaagctgtagacacacctggaccttgtccatcaacctcaactgcaaccacctccaaatcacagacttagacaccccgccctttgaccttccagctgtcttgctcaagaaatagct

SEQ ID NO: 149793 - DNA, 283 bp, Homo sapiens
ccgggcccggggcccggggaggcactcaccctgcttcatggatggagtggaggacgggccttgtaaatgacagcagtcaaacctgcttcgttaactcctctgcacactcgcccacaccctggcttccgtccttgtcctgtgacattttcctgttgtcccctcctacccaaagctgtagacacacctggaccttgtccatcaacctcaactgcaaccacctccaaatcacagacttagacaccccgccctttgaccttccagctgtcttgctcaagaaatagct

SEQ ID NO: 149794 - DNA, 327 bp, Homo sapiens
ccatcatttggtgttctcagtgttttaaattttagccattctaataaaggttgtgttagtctttaatttttaaatttgtaattccccagtgacaaaatatgcatgttttcatatgtttatatgccatctatatattttatataatcatgtcttatgcagcaaagacaattttatttcttccttctaaatcgatatactttttatttcctctgtcttgttgcttatctaggactttaaggatgttgttgaatagtagtggtgagagaagacattcttaccctgtttctggtcttgtgtagaaagcatctagtttctcactgttaagta

SEQ ID NO: 149795 - DNA, 371 bp, Homo sapiens
ttcaccctcaaaagtgtcccagtctggatgataaattgattcattaagcctaagagtcccagaagcaggcctaacgtaccacagaatctcagaaaatttcaggagttgatggcaccatgcctcttaaaatcagggtgaacagaagacctggttgagagtatgtctgagtagcaatcaggtcccctgagccctcttctactactctctgcatccaggtaactgcccctccccaaccagcagaagcctggagtgtttaccctttggagggtcctaccagagagactctggataggtagacattagatagagacacagatgagagtgcgatggtaaaaacaggaggataagtgaaagtctacacactgaatggt

SEQ ID NO: 149796 - DNA, 349 bp, Homo sapiens
tgatcaccccttgctgacaagagccggtgtgaacagcactgcagcccagatgtgctccggacagggtgctgaagtcacttgagaccacagtgtcagcgtggttattgctgtgatactttctcttctgcagggggatggagaaggaaggaaaaggagcaggcaaactttcagctttgcccttctatgacatataccactcacgacatgaatgatcagaactgtcatgacctagattcctgataaacacaggcaggaaatgggaaattcgtgagaatgtcaattcccactttaatttcaccaaagctgcctgggagggggtgggaggaattaattctctgagctgcatgtc

SEQ ID NO: 149797 - DNA, 405 bp, Homo sapiens
cggctccctgaattctctcctcctgcaagtcctgcagctcccgaccttgtctctggacacagtacctctgaggcccttaagaagatggaatgaactcagtgttgaaggtgttgatgctgttattacgtattaatgcctcacctgcacaggccatgcgtgttctcaggcaggagctccctggagcttcacacggacagtctatagagaacgttcatcaccacctgacccttgagaagactaagactcagagacgggaggtaacttgctcaaccccctgtccctgcctcgggaaaggggcagtggctgtgggggttggggttggatcctgcagccaagggtcatcgatatcggttgaggactttgtcctgtggcagcagtgagtgttgtgggggtatcatacacatc

SEQ ID NO: 149798 - DNA, 780 bp, Homo sapiens
ctgagtttgattttctcaattatttaatgatagtttagcaaacatatagctcttcttttgtgtaagtttgtgattctcatgaaggagcactctgaagatactattgagcctcccaggttctctacaattcagctatccaaaggctctgtagacccattcctcaggacactgtcacactgttttttttgtattaagattcatctcaaatccatttgtaattgaatttcattcggatcagagcctggaaggctcttcctcatgacttcataaatctccaggcctcgctatactctcactatactcaatttctacaaatgctgagcagtcacactgagtcagataaatgacttcagtaggtctctggtttatatccacttcaaagcagttaaatctttctcgtacccagtgcctttcccagactctggcagctcccattgatttcctatgttcatctgcccaatgctcaacagagacccaagcaaatatgaactctatgtgggcactcctttctctatgctccattggtcatccagtttttgtctagctccattttccttacctctagtccttacttctttatcaagtgtatgtggtttttcacgtaaattcagttttggaaggagaatatttatttagagttccttgttagtgaggacatatttgtggttttccttggtctgagccgagtctgaccctttgggaagctttctacaaagagtgaaagtcttaggatgaccctcctttgcccacttggagtatctctacataaaggattcctca

SEQ ID NO: 149799 - DNA, 316 bp, Homo sapiens
aattacgcacagtcaaatgacagacatttcatagccaggtgagttttcagaaaaattaaattagaaaacacatgaagaaatcccttgcatattcgaaaggtggcattagcattttttctttcaaattaatgccatctccatttccctcagatattttccatgtgaatgagtatttacatcttaagctactgttttttaatttataaaagaagaaaaccaaagtagtattgcatgtggagagaaactaaattggtaaaccaataaataccaactaaaataaaaaagaaatggtttacatccattaccttggtaaaaa

SEQ ID NO: 149800 - DNA, 335 bp, Homo sapiens
caacatggtgaagaaaccctgtctctactaaaaatacaaaaattagccgggtgtcatggtaaacaactgtagtcccagctactcaggaggctgagacaggagaatcgcttgaactcaggaggcaggggttgcagcgagctgagattgtgccactgcactccagcctgggcgacagagcaagactcggtcttaaaaaaaaaaccaccatcacccagttcagcaagtgtctatgaagcaaacacaagccagtttggggccctgcttacctttcttcatttttggcctctgagtatttcttcataacttgctagctcactaacatatttttaatggtt

SEQ ID NO: 149801 - DNA, 231 bp, Homo sapiens
gcacttcttcatggcaacaaatagggtgtatttcaggattgctggagtgtgcagtacagtagggaggaggaactggagagaagtctgaagagagagggagggctacctcactgatttcacataccacactacaaagtagaggctctatccagtaggctctatccagtagggcttccatgtcttgactggctgtaccagaattatttggattgcttattaaaaatacagatt

SEQ ID NO: 149802 - DNA, 284 bp, Homo sapiens
gagatcactcatgtccagttacagaaaggctgaaattcatttggagtttgaagagtgctgtggagccacctccatccaaggggaggtgtttccctgtacccgagccagttgagaggtactttaaggaaacgcatcagatagcttgacaggtgaccctagggtttgtggagcttaagaactagtatgagatgctaaaattagaccagcccaaggtagaggagggaaggagaagtgtgtgtgtgtgtgtgtgtgtgtgtgtgtgtgtgtgtgtgtgtaagagaatg

SEQ ID NO: 149803 - DNA, 283 bp, Homo sapiens
gcaccatattttcgggtatgagttctgagccccacaatggccataagcacttaaccacagacctagtgacgtatgtataaaatatacactagattccaaagacttagtatacaaaagaacataaaatatcttatttgtaattgtttaaaactgattacatgttaaaatgataatattttaaatataatgggttaggttggtaaaataaaatatattattaaagttaattttaactgtttctctttaccttttttaatgcagctataattagaaaaccacaaat

SEQ ID NO: 149804 - DNA, 378 bp, Homo sapiens
tcaggtgcatactccttttgtgtgatgttctgctttaacttatcttttcatccaacatcttctagtctagatcccatcagcgaggaaggcttctaatatgactagcccagaagttacactgcactcgacagcagtgaggactggctattcccaagttctgctctaaactacatgccttgctaagctgctgacacaaagtctagagtatttgagttataatttgtggataattatcatagaagtatcaaacccaagaaatgcccaaatttctgaggctttagcaaagcacttcctgtccacttgctcatttgcagcatctacttgaaagccagaatgatcagtcatcaaaatattgtgtttttaacacaatataaaaat

SEQ ID NO: 149805 - DNA, 394 bp, Homo sapiens
tctttaagtttcttaccgggatcattccattctctaaatcatcttcatttcttctacatctttagggttgcctacatctttagggttaggaaactcaaacagctacctgaggtagaaacttccagatttgctttacagacagtagctaagtttcctgcaaaaagaagaggaaagtttagtgttcctgttttaagctgtgttaattgatggctacaactggtatagtgtgagatagaagactacatacagtctagtctgttccaggctcaaaaatatgtgtggataaacacaaattctcctgaagatccaaaagaaggatgaggggagaagcctacaggaagagaatgagtatttaggtttcatcttataccaactgcctgtgtgcgtttcggca

SEQ ID NO: 149806 - DNA, 141 bp, Homo sapiens
atccaggacctgagcagaaggcacgacgtcctttctgaccaaacctcagaagtcacactgaggctctcaccttctccttcaggttacaccatgtgagagtcaatcacgtggggatgtgagctccaggacacaggggagagg

SEQ ID NO: 149807 - DNA, 186 bp, Homo sapiens
aatgtgcattctgctatcgttggatgaagcagtctacagatgtaaattattcccagctgactgatgtgatggtgctgttaaactcaactgcatcctgctggatctgtccatttacgatagagggtgctggatctccaactgcagacagtgaactcatctatttccccttgtagttctatcagtttt

SEQ ID NO: 149808 - DNA, 248 bp, Homo sapiens
aggagcgcctctgcctggccaccccgtctgggaagtgaggagcgcctctgcctggccaccccgtctgggatgtgaggagcgcctctgcccggctgcccatcgtctgggatgtgaggagcgcctctgcccggccgccccgtctgggaagtgaggagcgcctctgcctggctgctgtgcaatcttccaagtgtgaagtgacagcctttctgcaggtgtacccaacagctccgaagagacagtgaccatcg

SEQ ID NO: 149809 - DNA, 442 bp, Homo sapiens
tgtctctagaactctggcttgtcatcagtagggcttccctccaccaccacccccaatctcccacattctcaatgtcgagatgaagttttccctcaaatgattaactgcacatggtaagagtatgtcatccagtggtgacagagctcatactgaacagagctactgtccatcttcaggtttcagtctagaaacctctgagactagcacttgcagttgcatttattaatactatgcctcattccaaaagacgtccaaagcagtttgcagagaaacagactacaaaaacagtgataataccagggcaaaagagaatagaaaacgtgaagctaaaggtatgataaagaaaatcatggactttaattcatgaaataaaattcatatgtcctatatagatgagattgatctagatttgacacagcttcctagcagccaaagaaaagtg

SEQ ID NO: 149810 - DNA, 234 bp, Homo sapiens
aatgaccttggacaaatctcttacccttgctgtactttttatttattgatgtaaaaagggttggacagggactgggggatagtggttatcctgataccaagactatattacctagatgttttatcaaaatactggtccttgttacttcaccaagttgttttattaaatgacagggtttagaaatgtactttaatctgtaaacagctacacagatacatacaaactgaatatttt

SEQ ID NO: 149811 - DNA, 451 bp, Homo sapiens
tgctatgctggcctgggctaatctcaaactcctgggctcaagcgatctgcctgcttcagcctcccaaagtgctgggattacagccatgcaccacctcgagttcaaaattcttcattattttccattactcttggaatgaaagtcaaactttttacccagggccagagccggtcccacctaccttggtaaccacacctcccgtgctctctgcctccctcactaagctccagacacactggcttttcagttcctcaaactgcccaggcattttcctcgtcaggtgttctccctagagcctgacttgtcccgaaagctcatcttgtctcagtctttctgtatgagtggctccttttctttcttcagatctgggcacaaatgtcacttcccagaggggctgccctatcactcgcacatggttttgtttccttcgtagctttcagcattggaggtg

SEQ ID NO: 149812 - DNA, 708 bp, Homo sapiens
ctttgtggatttttttttctggaatatttttgatgcgagattagttaaatttacggatgtggaacccacagatacagagggctgactgtacatctttttcaatccccatgctcctttagtatgttattctcacatctattataacatttaccatacttatctgcctttaaataaattatgtaaataactctccttgtcctttagattttgagcttctcatcagaagccaccaattatttatttctccatacgcctcgtagactttacaccttgtagaaactcactaaatggaatgatgctttaggtacctgtgcaggcagagatttttatgttttattcactgatctatcccaagggcctgcttggcacataatagactttcattaagtatttgttgttgactgagttccttgttactgttccctttggaggagaaaaagaaacatgagttttagcagtcttcaatgtaccttgatgatgacaaaatagtttatccattagtgaacagtaagcagttcctgatgacttatatgcagaacatactagaatttctctgactgagattcagaacttcccttgcctggagcattgtttttgtagatacaatggttacactggtgaccctcacattttgagaggggtagtcttttggatctcctggaaattatggttcctttcaccagctaatttctagtggccagtagtcat

SEQ ID NO: 149813 - DNA, 395 bp, Homo sapiens
gcaggtaacagaactcagaacagtacctggcacatagtaagctctcagtataacagactgtgatgattattatcgtagtcatgcccatgaatggggtgaagatgtacccaggcttccttttggagttcaacattccatgcctctgttgcattttagcagcctctcccggcagcccgtggcattctcatcctgttccttcaacatcctccttcccacacacactgctcgctcgctcctctcctttgggtattcacaactgaatcttcactccctggtgacttggggacttgtcagaaacaccagctgagctccaatcaccagaggaaaagaggccaggagacaaagacagggaaggccagactcaccgttctccccagatcctgcctccagcccca

SEQ ID NO: 149814 - DNA, 777 bp, Homo sapiens
aaaaactagaaaaactgagtagtttttttttcattgtagaaattttatttagaaaatttttttttcctgtagaaagaactccagggctaggtggatgcaatatttaataaagaaatattaccaaatatttaataaagaaataatgccaatgttacatgaatatttttagagaattgggaagacataacactttccaacttgttttatatggtggtacctccatgatagtaaaaccatacaaggatattaaaagaaatgaaattacagactaatatactacataataattctaaacaaaaatgtttgcaaatataatccaacaatatactccaaagaaaaatacatcgtgactaagtgcagtaatttcaagaatgtatggtttaaaattagaaaaccaaacaatgaaattaaccacattaactgaataaaagaaaaaaatatggttatttcaatagctgtgggaaaagcacttgttcacatttgaaactatttgtaataataacaaactaggaatagaagagaactgatgtaaatatcttaatatatacacaaaaactactctcaacattataaataatcatgacatattaaacagtttcattctaacacgaggaacaaggtacacatgtccagctcaacactttattcatcattaaaataatactgtgcagtaaaattaacaaggaaaattttaaaaagaacacaaaagaaaactacaaatccttatccctgatcaacacagatgtaaaaatactcaacaaaattctagcaaactga

SEQ ID NO: 149815 - DNA, 299 bp, Homo sapiens
ctccagcaggggagtgcagagcacttgcacagtctgctaaaatgttacaaatcaaacacgcttagaatgtccccaggaagaccagcaaggcaggtagacacttgaaacaggccaaacagctgtcgcctgggccagagtgctgtggtgagatcctggctcactgcaacctccacctcccagactcaagcaatcctcccacttcagcctcctgagtagctgggactgtaggcacacaccaccgcacccagctaattttctgtatttttgtagagacgggattttgccatgttacccaggct

SEQ ID NO: 149816 - DNA, 230 bp, Homo sapiens
gagtaagagatcctaagaggattataagccaaaaagttcagttccttcctacgacttttgcttcagttgttcttgagaactacttcccaaacctgacacatggataactgccaagcacacaaaatcaaatccatttccacatcctctttgcagaaaaagataacccagtaagggaaaagttctgcttaactttctagaggtcttgcccactaggctaggaaacaaatgtg

SEQ ID NO: 149817 - DNA, 188 bp, Homo sapiens
attgatcaacatgggtatgtaggaggagaagcagtttgtgggattgtttgagagaatgggatatgattttatttgaagtcccaagcctggggtatgatgaatgtgggctttcgagtgagagttgggttcagtcctagttctactacctactagggatgtgatcttaggtaggtcacttctctctctgg

SEQ ID NO: 149818 - DNA, 573 bp, Homo sapiens
ttaaagatcatcagcaaaaacagaaaatggcatatgcataggatggcactgtggctttatcagtaatagcaaaagactagaaataacccaaaaggattatcaatggctataaagagatgagaaacatctctatacaccagtatgcagcaatctctagcatatattgttcagtgaataaaacaaggtacagaatagtatatgtagctgatatctgttctgtaacagcagtgtgtatgtgtgtatatacatatgaatgaatatatgtatttgcttaatctttacaaaatatgaaacagtgaaaggatagatttctctgaatatatcttgttcataatttgactttggagatgttttatatattcaaaaaacagcagcaaataaaacagaaaaaaatacaataaattgaacacaaacaacttagtctaattgtgtatcaaactggtgacgaaactgccaggggaaataataacaataattacaggccggacatagtggctcacacctgtaatcccagcactttgggaggccaaagtgggtggatcacttgagcccaggagtttgagaccatcctgg

SEQ ID NO: 149819 - DNA, 110 bp, Homo sapiens
atctttttgtataatccagtctctttgctaacacccactcttgagagctgaaacctcaaaattcattatgggtgaattcaacagccacttggaacctaatggacccccag

SEQ ID NO: 149820 - DNA, 394 bp, Homo sapiens
ccaatacacacgatctgtgaagtagaaccaaataacaacactcaataacaatactattaacagcaataataaaaatagcaacaactaatatgtcccagacactaatctaagtgatttgagtgtagtaacttattcaccacttacaacaattccatgaggaagaacattataatttctttcttctaaaggaggagaacataaaactggaaataatacttaactatgacatcagattctctcagctattcattgcaactataagataaagtacctaaaattgtcttcaaatacaatttactatgtaaatgctattactatttttttctaattccagtcaagttctccattcttttccttgcaaagccagagaacatgtcaacaacaaaaccagacc

SEQ ID NO: 149821 - DNA, 568 bp, Homo sapiens
acctgtgagaacagatttgtgttgtaagtcactaagttcgtggtcatctgttacagcagccataggaaactaacacgacagccctggaaagaggaaattatcgtgggcaccattttgcagaccagacctgggagagagcgtcacttgtctgtggggctgggctggcaggcatggtgcttgggctcaaagcctcaggccaggggctctgtttgccctttctctatggccctctctgtgcatctaggatggtgctctgctgactggccggtattcccctgcccttcccttgcgtcttcctgtcctttcacccagcacctctttactgagtgactgcgatgggggctgacatgctctgccaggccatgttatttttatgtgcctgtgtgtgtgtttggctctagggccagatcataatggcctgaatgtacccagcacttcttacatgctgcgctctgagagctttccctccccagtgccattcatccttgcaacactctcacaggacaggcgctgatacaatctgcattctagagatgtgggaactggcacagagaggacatgacatcag

SEQ ID NO: 149822 - DNA, 418 bp, Homo sapiens
acctgtgagaacagatttgtgttgtaagtcactaagttcgtggtcatctgttacagcagccataggaaactaacacgacagccctggaaagaggaaattatcgtgggcaccattttgcagaccagacctgggagagagcgtcacttgtctgtggggctgggctggcaggcatggtgcttgggctcaaagcctcaggccaggggctctgtttgccctttctctatggccctctctgtgcatctaggatggtgctctgctgactggccggtattcccctgcccttcccttgcgtcttcctgtcctttcagatatggtttaaagaactttgtcacattttaggcaatggctttacttcagtgcatggtagagggaatagctggtgtggaagtctgcatctttttatcatggtcatgtattg

SEQ ID NO: 149823 - DNA, 255 bp, Homo sapiens
caagacaaattctgacgggtgaagaagcaggaaatgagatcactggttgtagaaaaagcagtttgtccaggacattgctataggccattatccacaatcgcaattacaagtgaattctgaccataccctgatgtttgtttgatcagcacaatattgcaaatcctgacttggaatatctgatacgcagaatttaaattacatgctgacgccctgtccaccaaggggcggagaatggaatatctgactcttctattt

SEQ ID NO: 149824 - DNA, 509 bp, Homo sapiens
  misc_feature (469)..(469): n is a, c, g, or t
  misc_feature (471)..(471): n is a, c, g, or t
gagtttatgttatattatacttatattacaccagcattaggtaattttgcttgaacattcttttctaatgccctccaagcaagtatttacccgtgctttttgaattttagaaggattcgacatcaaacttcccagtttcagttgcttaatttcatcacataccagtttatctttttgaacattagtacacaaactgactcaagtatacttgcctccctcctcattttttattatttctcaaagagctattatttctcaaaagtgtttcttaaaatatacttgtaggttctcttttcctggagaaagagctctgaattcaaaagatctgtctttaagtcctgggtctgcttcttaactcatccaggtctttaggtaagtcaggtacagttgctgttttcattgtttattaagtggaggtagatcatcataaaggtcttcatcctcatcattgtcacattgagtatggctngnagcaaaaatcctactcgtattcaaaaggtagagcaaat

SEQ ID NO: 149825 - DNA, 337 bp, Homo sapiens
  misc_feature (297)..(297): n is a, c, g, or t
  misc_feature (299)..(299): n is a, c, g, or t
ttgttgtagattggatggtggtgtgtatggggtggggggtcggccgcatcattttttattatttctcaaagagctattatttctcaaaagtgtttcttaaaatatacttgtaggttctcttttcctggagaaagagctctgaattcaaaagatctgtctttaagtcctgggtctgcttcttaactcatccaggtctttaggtaagtcaggtacagttgctgttttcattgtttattaagtggaggtagatcatcataaaggtcttcatcctcatcattgtcacattgagtatggctngnagcaaaaatcctactcgtattcaaaaggtagagcaaat

SEQ ID NO: 149826 - DNA, 351 bp, Homo sapiens
  misc_feature (311)..(311): n is a, c, g, or t
  misc_feature (313)..(313): n is a, c, g, or t
attggtgcgttctctgatagtgtggtaatggatagtgaggtgagaggtttcggccgcatccgtcattttttattatttctcaaagagctattatttctcaaaagtgtttcttaaaatatacttgtaggttctcttttcctggagaaagagctctgaattcaaaagatctgtctttaagtcctgggtctgcttcttaactcatccaggtctttaggtaagtcaggtacagttgctgttttcattgtttattaagtggaggtagatcatcataaaggtcttcatcctcatcattgtcacattgagtatggctngnagcaaaaatcctactcgtattcaaaaggtagagcaaat

SEQ ID NO: 149827 - DNA, 758 bp, Homo sapiens
attaaacaaaaagcgtttacaaatcttattaaaaggctatggtgaatatccaacaaaatacagaatgttcatttggcgctctctgctacaactgcctgaaaatcatactgcgtttagtaccctcatagataaggggactcatgtggcatttctcaaccttcagaagaaataccccatcaaaagtaggaagctactcagagtattacagagtcaattggtgtcaacactggtttgaatattttcctaatcctcctatcaatattcttagcatgatagaaaatgttttggcatttcatgacaaggaactgctgcaacacttcatagatcatgatataacctcccagctatatgcatggcctcttcttgaaactgtgttctcagaagtgctgacaagagaggagtggctgaaattgttcgataatatcttttccaaccatccttccttccttctaatgactgttgtagcctacaacatatgttctagaacacctctgctcagctgtaatcttaaagatgactttgagtttttttttcaccatcggaataacctggatataaatgttgtgattagacaagtttatcatctcatggagaccacgcctactgacattcatccagacagcatgcttaatgttttcgttgcactgacaaaagggcagtatccagtatttaatcaatatccaaagtttattgtggactatcaaacacaggaacgagaaagaataaggaatgatgaattggattacttaagagagagg

SEQ ID NO: 149828 - DNA, 1167 bp, Homo sapiens
cacaccttgtgcttccatagaattgtcggcctctgcaacaggaaagagcagctctggggaagtcgctggtgctgacaacctttgctcacacccctactgggtccccgtctgcatcctccaacaccctcatcctgcttcctttacatagagttcattctcaaggaatcttttggcctgatagtgaggcctcctgcaaggagaaggaaagtcagtgtctgaatctgtttgggcggctataacaaacaccacagaccagaaaggaacctgcagaactccaggaaccaaaattgctgctgtaaaattggaggttgactaggaaaatgccttttcctatcaagtcacgtgtgctggggcatgagccactgcacccagccttttaaaaaactttttggccaggttgttttataggctcatgcctataatccctgttctttaggaggctgatgcaggtagatcctttgagcccaggagtttgagaccagcctgtgcaacatagtgaaaccccgtctctacaaaaatatacaaaaattagtcaagcatggtggcatgcacctgtgatcccagctactgaggaggctgaagtgggaggagctcttgaacccgggaggtcgaagctgcagcatgctgagatcacgccactgcactccagcctgggcaacagagcaagactctatcttgaaaacaaaaacaaaaacaactttcaaatccagctcttttggcatggcaaggcacagactgagagattattatttattataatttcatggctgttttgctcaggggtgattttcaatttgaacatcaaatttggcatgaacaccaaccaaaagcagccaatactatctatggtgtttgggtgcgctggctgatggcagccccaggactttcagcgggaatttccttttgtgctaatgccttgctgtcaacagcaggtgaaacgatgctggtgaagaagccaagtgtcaggtgtgcctggcatgtcctgagaatctgattcctgggggtggtgcctccctggctgcgagggcccagggcaggcctgctgctgttctctccctcctggtgcaggagaacgcagatgccgagaagttggaatctgaagatggatcatccataatataaaaaatgacactccaaatcggtttcaaataaaaggatatttcatga

SEQ ID NO: 149829 - DNA, 458 bp, Homo sapiens
agaggatccacaattagctggggcacaggattcttcaccttcttgcctctttgatcctccacagccacagggtgatttcacccaactcagagactgccataagctcgcaaagccactgcattcagagcacacatgttcaggctgggaactcaggctagagggcaaaggtgagtggcaagcaaggtaaagtgcccagtggggaagccagagggctggatttgaatcccagctctgccctcctggcctccctgaagcctcagtttcctcacctataaaaagggggcaaagaatgcctctatccaccactggcagctgagaggattaaatgagacaacgtagccgaaccccaggcattctccccttaagaaccttgtttggggaatggccagaaatcccagatgtacacagctgctcattatataacccttcccagcacctcatgtatcatcattattaaa

SEQ ID NO: 149830 - DNA, 435 bp, Homo sapiens
agcgctgcattttctcccctctccctccctccttctctctttcttttcttctattctccattcctgttttctcccccaccccactccccaaagctctgcgttgagaaccagatgctgtctggtgggttagggccagaggaggaaaagctgcccgccgtgggctgcacccataccctcttcattccaatgacatgaggggaggggaaaggacagaggtagactgtcctcccctacctcctcctaatacaaatggaattcctggaactggaaaacaaagaatacccccataaaaataagacagtacttctggtgcggtgtaataaaggggaaagtaaccctcaatgtcaggaaactccgcacctcccagctcatatttgtgtggaggaaaagttaaatattaatttggactcaactgaatgtggacacaaacaatgg

SEQ ID NO: 149831 - DNA, 417 bp, Homo sapiens
ggaagaggtgctcggtgctgagtaaaacacgacgaatgaaggggaaaatcaaacacaggcttggagaggcccaacgtttccacgcccaccgcaggtgactgtgaatagggtcacaacagcactggtcttggggacaggaggggagggtgcaggctggtctcaaagcactcagcaagccctcaacaaacagctgcccgaaccccacagctgccaccaccaccggcgtggagtctgcagaccaggcctcctgacctcccagggcagctctgggtcagcaggactcaaggcaccccttgtgcccaggccgctttcatcctcaggcccaaggcagcttctcacctccttgcccgccagcctggtgcctctaattgtctgggacccagggcacctgggcccagcctccccacccgtgtgcag

SEQ ID NO: 149832 - DNA, 366 bp, Homo sapiens
caggctggagtgcagtggcgcgatctaaaatgattttttttaaggtaaagatagaggcttgtccaaaggtagtgagttatctcaattgattgttcagtcagttacagattgaactccttgttctactctttacctacttctcactattgcacttgattagtctttctttcttcctttctttccttctcttctcttctttcttctctcctctcctctttgagaccgggtcttactcggtcccccaggctagagtgcagcggtacaatctcagctcactacagcttcaactgcctgggctcaagcaatactcccacctcagcttcctgagtagcttggtctacaaacatatgccaccacgcctggcta

SEQ ID NO: 149833 - DNA, 469 bp, Homo sapiens
gtctcgaactcccaacctcaggtggtctacccacctcggcttcccaaagtgctgggattacaggcgtgagccatggtgcccggccgtctctgtctcttaatttctctctttctttcctttctttctgtctcccttccttccttcctttcttttcttttccctccttccctcctttctttctctttctctctccttccttccttccttccttttttccttctttccgcgggaacctggggcaagtagaagatacaacatgagaagggggaggcctccagggaggccatctagacaactgaaagagagacggcaaagtggactggtggccggaggagtgctggagggttctggagagaaggaggctgattccagatgtttaagatgtggggtcagcaggaccctgggtgaccagtgaaatgtggagaaggtggcagccaggtcaattagagacagatgtgggggaaagcca

SEQ ID NO: 149834 - DNA, 371 bp, Homo sapiens
cataaaactgagtttgaacacttccttaaggaaaaagaatatgatctcatcagtttcagtagggttatataaagtactttgcatcaagtgcagactttcttatgtcatagaaaaagtcttaagaaagtaagctgagaactataatggcaagataaacaaagaaactgagagaggacatagatggatggtagaatgattaatgctgtatctactcagtacaggtgtttggtacttaagcaagtggttagaaaacaaattgaacatttattcttcctgacaaagggattaagaaatgtggttgattatacctttataaatgaagctttgagtaaactactgtcttgattgatttctttggtatttgctaacac

SEQ ID NO: 149835 - DNA, 315 bp, Homo sapiens
aaaaaagatggcacaaatagaagacaaatagcaagatgatagatttacatctaagcatatgaaaaaaaaatcacattaagtgaaaatgacctcaagaccccagtgaaaaggcagagattgtcaaactggataaaagagcaagacccaagtttatgtactgcttaaaagaaatgtactttaaacataaagatacaaattggttataaacaaaagcatcagaaaaatatagagagacaagattgttctaaaatttatatataaaacaatggaatgaaaatagccaagatacattattaaaaagtcaaaaaataatag

SEQ ID NO: 149836 - DNA, 387 bp, Homo sapiens
ccactgatttgcttgagatgggttaggcacagtcagctttaacttgaaaaactggaaatccatgataaccctgatagtgatacattaccataaacaataaagcaagatgaaatattatgaaataggaaacaagagacagcaaagacttcatttaattctaagctaaaaacagaattacaggggtatgccacttggaaacagtctcagcctcaaattagagagaaagcagatgaggagcacacacgctgaaaacccagacaacaggcatgagcagagcagcgccgagctttcccaccgcaaacaggcatgagcagagcagtgccgagctttcccaccgcgcaggaaccccagcaggaccgcttacgtgaaatttaacttacacccctt

SEQ ID NO: 149837 - DNA, 669 bp, Homo sapiens
tcattgcatgatgacgtgaactcaacataaaatgtggggagtgggagtttcttctgagaacagttcctgtgatgtctggcaataggagcgttgactggaacatgtggatataccttttccaccatgaaacatttgaaaaactccaaagtttggactcaggcaagtgcaagtccaaaatgtgtgttacagtccactctggttttggaggtagttgtggagtgccccacagacctctagggagtaaaacatactggattttactccagtggaccacttggagctcctgagccagctgagaagcctgttcatccccagcagaggcaaagccagtttgggaggcctcaggattgtcatttctcctgttcacagcatggctctgggcagcgccactcagtgccatcaaggaaccatgcacctgaagtttggaacccagctgagtatgcaatacagaggaggagaagactgcagtggggttttgtaaggtgctcccagcacagcgtgcatccgttccttaactctgtaaagcaaatgtggaaaccactcacagttttctagcttccttaccctttattcaactcccctaagtgctgaggcctaattgctgacccatctggcctctggcctgatttccagtggatatctggccagtggtggctaggtccagcattt

SEQ ID NO: 149838 - DNA, 271 bp, Homo sapiens
tgagtttttcttgcttgcttctgttcctgtgtgggagcacagaactggctgggccggattacctatctaggtggcatcagctggtgcattggaaggtctgcaaaatatctggagcactgattttaggtgttacaactgtgatgttatacctgggagcaatttgaggaggttcagattcatgcagctggaggctgtgtggctcctaaaccgtaatttctaatcttggagctaatttgttagtcctacaaaggctgactggttccccaggcaa

SEQ ID NO: 149839 - DNA, 474 bp, Homo sapiens
catgaggtgcagtgacggaataggagctgtgggcgctggggcagttggctatttaaggtttccgtagaagatgaggcttgaccccatgcttgagggatgcactgcgtaaccgaagatccctcccatgagttcttgcactggcagctgtctagagctggcttcagacactttctactcagatgcccacagccacagaggggaggcctgccactccctgtccaccctgcagcctggccctgcccaggccattccttctgtgttctcctcccttctccactcctgggtcacccgatgcttcctgtcctccacatgacacctcatatgtgtcctcccccttctccttcccctgtcagagagtagggtaatattgtacctgtgtccctccagtgacactgatttcttcatagtctgatgcagagggctgctactgaagtagctaagagcaccaactctggagctgcacagaccactctg

SEQ ID NO: 149840 - DNA, 436 bp, Homo sapiens
  misc_feature (174)..(174): n is a, c, g, or t
  misc_feature (179)..(179): n is a, c, g, or t
  misc_feature (184)..(184): n is a, c, g, or t
  misc_feature (190)..(190): n is a, c, g, or t
  misc_feature (196)..(197): n is a, c, g, or t
  misc_feature (205)..(206): n is a, c, g, or t
  misc_feature (208)..(208): n is a, c, g, or t
  misc_feature (213)..(213): n is a, c, g, or t
  misc_feature (216)..(216): n is a, c, g, or t
  misc_feature (226)..(226): n is a, c, g, or t
  misc_feature (228)..(228): n is a, c, g, or t
  misc_feature (230)..(230): n is a, c, g, or t
  misc_feature (238)..(240): n is a, c, g, or t
  misc_feature (247)..(248): n is a, c, g, or t
  misc_feature (250)..(250): n is a, c, g, or t
  misc_feature (261)..(263): n is a, c, g, or t
  misc_feature (266)..(268): n is a, c, g, or t
  misc_feature (273)..(274): n is a, c, g, or t
  misc_feature (276)..(276): n is a, c, g, or t
  misc_feature (280)..(280): n is a, c, g, or t
  misc_feature (292)..(292): n is a, c, g, or t
  misc_feature (296)..(297): n is a, c, g, or t
  misc_feature (299)..(299): n is a, c, g, or t
  misc_feature (301)..(301): n is a, c, g, or t
  misc_feature (303)..(305): n is a, c, g, or t
  misc_feature (309)..(309): n is a, c, g, or t
  misc_feature (320)..(322): n is a, c, g, or t
  misc_feature (329)..(330): n is a, c, g, or t
  misc_feature (332)..(332): n is a, c, g, or t
  misc_feature (336)..(336): n is a, c, g, or t
  misc_feature (340)..(340): n is a, c, g, or t
  misc_feature (350)..(350): n is a, c, g, or t
  misc_feature (355)..(355): n is a, c, g, or t
  misc_feature (360)..(360): n is a, c, g, or t
  misc_feature (386)..(386): n is a, c, g, or t
  misc_feature (389)..(389): n is a, c, g, or t
  misc_feature (395)..(395): n is a, c, g, or t
  misc_feature (399)..(399): n is a, c, g, or t
  misc_feature (410)..(411): n is a, c, g, or t
  misc_feature (413)..(413): n is a, c, g, or t
gacccaggaccagtcttaatgatactgaaatagtttgtccaagaaaaaaaattcccatcgtggatgtttattcaattaagagtaaaatgtcttcatagaccatgatcatatttatagtttaaaaattaagtgcactccaagttcttttgtcttttttttttttttttttttttnggaangggantttttntttttnncccagggnngngaaanggntttttttttngncncctccccnnncgggggnngnacatttttttnnnccnnnccccnngngggngggaaattatgncacnncncncnnncccnggaaatttttnnnttttttnngngggncggntttccccggnttggntaggnggggccaaattcccggattttggggnccncccccnttgntttccaagggnntnggaatttaggctggggccccccc

SEQ ID NO: 149841 - DNA, 258 bp, Homo sapiens
ctttgtgaatcttggcttcaaggaccaggtgtacctgtatctcaggtgggaagattgaggctggagcaatgcctttataggaccatcagagaactcttctgtgaacagatttctgttgtgcatgatgtaccttttacatcatgcagggcattgtagcagatataggagttatgctttatttggtccccagcttcaggtgactaacagtccaatcagaatccatgcacacagagatcagcatgacacaacatgagaaaa

SEQ ID NO: 149842 - DNA, 144 bp, Homo sapiens
tgcacattggaacaggttacaaagactggtgtgaaaattcccccatgtcccttaacatgataccaaatcccacttgcttgaaataacttggagtggtctcacctaaggacaaaggtaaaaaagcaaaatgaaacaaaacaagtt

SEQ ID NO: 149843 - DNA, 415 bp, Homo sapiens
cctggtatttgccgccaggctggtctttccctgaactctgttttcatgccacttctcttcagactttctcctcactctggcagccttagccagaccatcaatgccatagatttgtagtcaacttggccaaacagccattttttagttatcctgggttcagctataccccatcccaatggcctccagtcaggagacagttagcaatcccttcccatgcttacacttgacctagggaatcctgtgcctccaggtatattaaggactcatatcccataatcaggtggggaaaaaaataattaaaagaaaccctatccgtgacagtttgcccactggccttcaggatcagtgctctcccaattctgtgaatgacccccatgtttaaaagtttttgtcatacccttacctattaaatcca

SEQ ID NO: 149844 - DNA, 189 bp, Homo sapiens
caacaacagtatcagctaactcctagtgtttataaaccctaggttctaagaaatgtgtatgtattcactcatgaagtattggtaacgatcctccaagatgggtgacactttttttttttttttttttttttttttttttttttttttttttttttttttttttttttttttttttttttttttttttta

SEQ ID NO: 149845 - DNA, 792 bp, Homo sapiens
ggacgcgtgggctgagagactcaagagaggcggcaggagagtggagaatgaggggtggagggcagaggagaaactgcgtcagggatgtgtccgccaccttcatcctccagacgggacttgggagcggctgcaggaaaccctgagagattcctctttagggaagtcatccagccctggggtccccttatgccgggagcagtgaggacagaagaatgaccatctatcttgctgaaagctctgtgagggaggaacggaagaacggagggagctacgaccttgaccatcccctgagtgtccatggcctctgtgctccggatgatgccggggctgccagggaccacagagccacccactgggaggctgggggttggcctggctcaggggcgttcgtcagccatagacacccacagcatgtggtgggcagggctgggaggtgacacaggaactgaaaaacctgagaagctccagccactccgcagggtaagtgccacctggggtaaaatgattagctggttccagcccctccgcagggtaagtggcacctggggtaaaatgactgcctggagctggcagctgctttctctgctctccccagggccctgcagggaagcgtggaaaggcggcacagggctggacccagaggagctctcagatgctggactggactgtttcaggggtcatctagcccattccccgcctccaggcgaggatttgcttgagcctggaaagatgaaggatcctcccagtgccgtcaagccccggattccacctccctgtaggtggactgccagc

SEQ ID NO: 149846 - DNA, 798 bp, Homo sapiens
aaataaaataacatactgctagttaggtctgtcaaaataactgtgtgtatgtataaaaaaatgtaactgattgtctcaatttcatctccacaacgttaggataatcatcatcatcgcatcaaagggttactgtaagaattaaatgagctaatatgtatgaagcactttgacttgtgccttgcacagagtaaatattatacaagaagtagctatatttatttatatttttctaaaactatgtttatgctactaaatagttatctggagtttacctgggaattgcatattcttttcaggattcacgttttttggcacacttagattatgggagcagttttaaaaaatatttttggttatgaaatccaatttcttatccatgtaagcactgaaacaattcctctttatgtgcgaacactcagtgatacttcacataccattaagcttctattctcagcacagctagctcagagtggcactgtttaatcactttatactaaataacatgtaggttacaattagccacccagtgggctcatttgcttatatataaatggagtcttgtaatcaaaatctggagatgagtcctcctttgtaaggaacctgatgtggtctttgtaccaattagtcacttttgagaaaacctagttcttgctctttgatgaattttccttaaatatggggtgtgggaaaagaagagtaggatatttaaaatcttgtcttgccttggtagggaaagacattatggtagggtgccttgttttattaagtttcctccagtaaatattcaaaaaaactaat

SEQ ID NO: 149847 - DNA, 371 bp, Homo sapiens
agaattgcttaaacccgggaggcagaggtagtagtgagccgagatcgcaccactgcactccagccgggatgacagagtgagactctgtctcaaaagaaaaacgtggaaatgtaaaagaggtatggcagaacataagaacattcatacttattttggttttcctggattcagacattaaatcgactattcaatgcccaaagacatcctagtttagtgctgcagcactatggaacacaaagaagtgtgttttctctgctcttcatccacatcactataaccctcttcccagttttatctctattctagaaaaatgttctcagtggcagcttacaaaaaaaaaaatccctcctctatgtcagtttccggggtac

SEQ ID NO: 149848 - DNA, 572 bp, Homo sapiens
atctccaaccctctcctcatgttcctcacattgcacatgtttctgttccttgaacatatgcttttccctgcctcagggcctttgcactggctgttgcctcttattggcgaggtctctcctcaggcttcaagcagctgatcgcttctcatccttctggcctccactcaaataccatgtcctcagagaggcctttcctgaccgtgctctccaacattgccttcctaccccatgcacatctcctacccattctcctgttctgtttccatgacctgtatcactgttgaaatgatcttctttgtttacttctttgttgcctgtctctcccactggaatattgcctccttacagcagcctccttatctgtcttatttatgtcttcagtggctaaaacaatgcctggcacatggtaggtgctcaaacaataattgttcacgtacttggattcctggatctaaacttctaggtgtgcacacatgggttgacccgagcatgagagctggaactagactgccttggtctgttacttgctagctctgggacactgtgctagttattaaaccttgctggacctt

SEQ ID NO: 149849 - DNA, 294 bp, Homo sapiens
tatgtttgttcttgtttcatttgtgggtatcttaattcaccccttgagctcacatgacagataggctggctttgccacaagattgaccattgtgcgattctgtttcaccttaaagggttattatccttttcccataaattttcacagcattaatccatcaatttttgatttggtattcaggaagcgaatgtagaccatgatgtattatttattcagcatagattccagacagccagttccttagaaatccatgtcataataccatattattagtttgggaataaagaggggagt

SEQ ID NO: 149850 - DNA, 272 bp, Homo sapiens
ccacattttcttaatccagtctatcattgttggacatttgggttggttccaagtttcttttaaaaaaaaaaaaagaagacttttattttggtattttaaaatcttatgtttgcccagcacattagatataaatatgtgtgtcttgaacatttatgtttttgagggtttggagaatgcatttgtatttggatgtaatgtgtatagatacagtgtgtggtctctgtggttatcagagtgcttatgtgattctgtgagtatcagtgaaaaagtgg

SEQ ID NO: 149851 - DNA, 327 bp, Homo sapiens
cctcctatttccttttcgaaagtagcagtttggtttattctcgtttgctaagtaattgtttgaaatatttttcagcctctcctgctccctcacaaaaattcacctgtcattttaatgataacagcatgttaaaaacttggaagtctttatcccaatataagaattatcttgaaacaaaaatctaaattacttttaaaaattctcttaactctgcatttagtctcctattatctagatctctgagtccaggataactccagttatccccagttggatcatgtgtgatttatctgagaaagcatccacaacccacagctagtggaaacc

SEQ ID NO: 149852 - DNA, 284 bp, Homo sapiens
cctctcgtcctaacacccctgggtctccctgctctgcttgaagcagcctcgtccctgcttgtcacggagtcagtttctttctcatcctgtaagtcccagcttaatcagcagcttcgcagagaggcctccctcgtcacccacctaaagcaggtctccacgttctcctattggtctccacgttctcctatcggtctcctcctgagaatttaacacaacttgcaattactctgttacctgctcagtgcgtctccgaaacagtctgcagttctgttaggtgagcgcca

SEQ ID NO: 149853 - DNA, 938 bp, Homo sapiens
gcaggaaaaagcttccactgcacaactggaagaaaccactgccttgggaattttctgtcctgcaaccctcagctacccccttctggaatgctgccaccatgactgctagagacacttcgtggaagcccacaggacgtgtcaccttttctcatgggctcattttgtgggccaggcacaagcttctgttcattccacctatggggtttgtaggtcaactctctgcagcacctgtttaatctctagaagaaatgctgataaaacttggaaatgtcgtagcttaggtatcttcattttgattgaaacaaattttgcaaaaattatgaccgtgagagaaatatgacatagaaaaattacgacagggaaagaaatctcacctaactcattccatcttgcttctaacctccaagctgcttttgttcaatcctggacatagaccaacctaaccatgggagaaatttaatttatagtttaactctgaatcaaggatgagtgtccctttctaaaacagaccccctccttgtcctgatactgaaaccacctttgtaagacccaggaaagaccacgaaattgagattataggaagggtctgaattctgctaagatgtaggcatagttaaataataacctgccattgttccatagcttgctttcttataatccctaatcactcaggattcatgaagccacaggtcataagatttgtgacttccccaattgctcatataaataacatcactactgtagaatctcagaggggccttttgagatgttttccagacttttgcattgtgacaactaactccacttgaacccatgactcatgactcaaccagtcctgtggtccccacccaaaggctgactcagcagacgaggactgttttccacacccctatgattgtatctccaaccaataaacagcacccattgcttagcctctc

SEQ ID NO: 149854 - DNA, 252 bp, Homo sapiens
tctaaaaattaaaaaagaatatagaatcaatttttattatccatactgagcatacttctgttcacccatgttcatttaaaaatcacttgctgtttgccactagtacgtgtgtaatgagagactcatccttaaacactctcatatatactcttccccggttcagtatttctcttggaagccttaggccaagaggcataatcaacccatagattacatatattttttaaagttcagccagaccagtaagtgaaa

SEQ ID NO: 149855 - DNA, 171 bp, Homo sapiens
atactggggtagctacagaaaggccccattcagcactatttttcacacttaccctgcgtttcttggtctaatgcaagttgtagtggttatttgatttaggtgttgctcttcttaatttggaggaagaaaattaactttcgctacagtgattttaaaacggcttctgtagaa

SEQ ID NO: 149856 - DNA, 489 bp, Homo sapiens
gtccagtgccaagacagtgaaaggcagagggccatggcaaagtctgagggctggaggcagatggacagatgatggacgaatgggcaccggtgaggccaaccagaggaggctaccggagctacagggagagcctttcaggcatctctgaaaggggacatcaggcgaggctgaaagcaggaggcacaggatcaccaggtcctgctccacacccaggagggcaggtggcagccccagcccagctcggagggcccaggaggaatcggccagaagacactgtcatggagatcctgaggcagcaatgggaagcaggaggagtgaaagaacagtggcctttgcctacttggatccaagagttgtggcagtcgaatgacagatccttccgctccgcaccccaggggacagcatgacagatccttccgctccgcaccccaggggacagaatgacagatccttccgcctcacaccccaggggacagcatgacagatcct

SEQ ID NO: 149857 - DNA, 1077 bp, Homo sapiens
  misc_feature (1077)..(1077): n is a, c, g, or t
gtatcatttaagagatgtttatcacttaaatggtacatatacatcatttaaaggatatatcatcatcgttaaatgagcatttagtttttttacatgtgttataattactcatatttttgtttgtaaatttactatcttactttgtgttttctacatatcccaccttttctgtttcctttcttctactttcttgacttctggattgattattattaaaactttattattagcaataataataaacacaatatattttatattctaaaaaaaaagaaaaaaacaaacacacaacaaacaaaagaaaacaaacaaaacaaaacaaacagcagccgcgcccacaaagacaatcaacacacggggagacgcccgacacgtgacgcccatcaccccacagcggggggggcggggcgccatcacaacaaatctcgccgcgggggcacccacacactccgccgcacccccacccgttatatatatcaacgacggcgcgccatggatacaacgcggcagccacaaatcaacaaccacgacacgccgagcgcagccgtcacaaaatcaacctagcgcgaaggagcaccaaaaacaccaccaatctcaaacaattactatgagagaggaccaccacatatcagataatgaggacgactacaagacgacacaaacagccaaccacacacaaaagaatacatcacgtcgagggtaaaaaatcaatcccaccagaggtgacgtcgcaccaacacactcctcatcacacctctgcgccagctgcaaaaaaacatatcgaacggcactaactctatcacaaacaatactttacaccagcgaggaggatgaatgaaaagagagcgcgaacctgaccagcaccacatcacgcgctggatcccaaatagtccacatccgctgtaagcatgacgtcagctacagatctcatcagcacacacaagcacgatgcgacgactgacgctccataaacacgccacaatcacacacagcacatcaccctgacatctaacgacgcgactaaacacctccccacctcgaactaccgctaactcgctcatcgacgactcacctacn

SEQ ID NO: 149858 - DNA, 143 bp, Homo sapiens
tgtgtatgtggaaagcgggtgaggggagctggggacaccggggtggtgagctgaggcggggacccgggcctggagagcagggtggggagccgcaggcggccggcaggggtgcggtgcctcgcgggctcaataaatgggcccca

SEQ ID NO: 149859 - DNA, 579 bp, Homo sapiens
tccacaggccaagtcagtctgagctaccaccattggtgcctggagagtagatgggtcagtcgtgtcctcttaaaggagagtcaaaaaatcagaaagcttatctgaatttcctgatcttttactatcggcgtctaattcaacctctttttgaaactgcgtaggaaaaaacaaaacaaaatccaaaactaaaaactacatctgcaggcaggatacattccttaggccaccagtttgcagtatcaacattaaatgagtcaaatgaaatgcctgagaagcctactaaactctggcatttttagtaaagctactgatggaaaattttctctttgctatgcaagcaatttagccgacagcaccaagactgttgttaaactcatcaattttaattcatggtcagaccttagtaccagacctataacttagttttgcagtggaaaggggcagagacacagcagttgccctcagagtccgcctattggtaatctcagagttacatgctgagcaaacatgatttactccaatttttcagcaccctctgtggtgcgatcattcacgcccatagtcacatcagtcacaaga

SEQ ID NO: 149860 - DNA, 383 bp, Homo sapiens
gggcgtaggctcctcagctccctgcttggagatggggagtgcaagggaaggcgtgggcggtgagtgggtgtgtagacacacttcaccgaattcactacgaaaatgggaccactttccttggggtcctacgtgctccctttcctcactggtcgtcaggggctgacttatttgttccctgaatccctcacatgggaaggaaggagacatgttgggttggggaggaagccctgtgaacttgaacctggggttctggtccagtcttagagttagtaggtcacttgggtgttttcacccctaaatctcagggacgctcagtaggaaggccctctagctgcacagcccagagtggtgccgccagctgggggcaggtgtcagaggcctgt

SEQ ID NO: 149861 - DNA, 338 bp, Homo sapiens
cgaagtactggcagatcaatgtctggtgagggcattctttctgattcgcaggtcatcttctccccgtattctcatacagcagacagagcaagctctagtctttctctcttctcattgtagggcctgaactgtcatgacctcctctaaacctcattacctcctaaatatcccagcttaacatatggatgttggtgtgggggggacacaaacatatagttcataaaattaacatcctgatgatatacttgctatttcctagcaatactctgtcttttacaaccttatgctattggtttcaattttccaatagtttcccttgagtatagtgcacagtcagc

SEQ ID NO: 149862 - DNA, 370 bp, Homo sapiens
tgttcttcccttctctgataaattcctttcttccactgagatttgcttattcattcaataaacacttactggccttcagcaatataccaggcagtgtgctgggccacagagggaaaataaaggctccaaatgcccagaagtcactgccctgggtttccttcacatacctcatcatatctccttttcaaaacactttttgctctatcagatctcttcgttgccatttgcctctgatcggtcctttcattctcccagaacccacgcatttgactcaggatcttcctctagatccccccaaaactgacaacaccgtgggtgcctcgacattcctaaggacagccttggcctcatgtgttccttaagtgtctac

SEQ ID NO: 149863 - DNA, 240 bp, Homo sapiens
ccgagggacatattgccagatgacattatatagaggaagtattcctataccttttgtatcattagagagtttggctgaaatgaacactgggtggtaaaacaaaggactgctctgaaaacttgtactagattacctcagagtcagctgaggtgaagtattgtattgcactttctgaatctactttgctgctgaatcctacattttgtaggggctgcttgagtagtaagtggttcaccgtgt

SEQ ID NO: 149864 - DNA, 331 bp, Homo sapiens
cccgacttctacacttttcctttcttttaagaatttaagccccaaagaaaatcaatctggaattaagggaaatcaaaaaaatatttttaactatttaactgaaaaacactatggttaaaagcaaaccaccttctttatcagatacttttgttttttaaaatttaaatattttgacttattttaggttcaggggtacatgcacaggtttgttatacaggtcaactcatgactaaggggtttgatgtatggattatttcattacccgggtagtaagcatagtacttggcaggtttttgtttttttttcctgagcctctccctcctcctcccac

SEQ ID NO: 149865 - DNA, 628 bp, Homo sapiens
agtggatatactgtaataattaaccattctatttttttttacttttagatggtttccaatttttgatactgtaagacttgcttaatatctatacataattatattttgcttatgagcattttttaaaaacctataaaacttgtcatgaatttcagattatttcctaaccctgaattccacacttggatcactgtgcttctgtctctccttaggtgaattagccacttttgtagttaattatttcagcattgacttctcatatgagcttcaatctcataaatccagttgcttgataagcatctccaagcttgattcgccataagtactcagacctaacatcttcattatttagggcattatcatctgtcccaatgtggtcttcctgttgtattccccaaatcaattaatatcacctagtcacccaagcaagaaacacaggagccattctatgctgcttccccttcatccttcccaaaagtaatcaccagcttttgctaattttagctgcagtttctcaaatctgcctctcctcccacccttacagacaccctggtagttcagacgctcatcatttctcctgtaacctgtgcagcagttgatctgtagctgatcctagctgatctctgtt

SEQ ID NO: 149866 - DNA, 756 bp, Homo sapiens
tttagagcaaagggaatagcctctataaaaacatatacagataaaaatattttatttacatatttttcattgcacattacaaaagtgtctttatattctgggccaggtgtggtggttcccacctgtaatcccagcactttgggaggccaaggtgggtggatcacttgaggtcaggagttcgagaccagcctggccaacatggtgaaaccctctgtctactaaaaatacaaaaaattagccgggcgtggtggtgtgcacctgtaatcacagctacttgggaggctggggcaggagaatcacttggacccgggaggcagaggttgcagtgagctgacattgtgccactacactccagcctgggccacagagcgagactccgtctcaaataaataaatatttctttatattatttattacatgcaactcctacaactcaatggttggttttattttcctcattttacctgtgacacagataaaagaaggcccaagttgaccccaaatgctctaccactccttcacatgtcatcccacagctgaggcgcaagctgacatcacacccccaagtaaactctgactaaactgctaagacacctaactaaaaccattagtccttccctgttgaaggaatgcaagtcataacatagctcccataccagtccaaggcttcccttggtttgtctggggacatctattgtttaaacatgtatttccagggatagattgctcctgggtcaatttcaggatggggtatat

SEQ ID NO: 149867 - DNA, 949 bp, Homo sapiens
  misc_feature (14)..(14): n is a, c, g, or t
  misc_feature (28)..(28): n is a, c, g, or t
  misc_feature (34)..(34): n is a, c, g, or t
  misc_feature (75)..(75): n is a, c, g, or t
cgactggggacggnagatggaatagtgngaaggnatcggacctactagtacaaatgaaccaggatttaaatttcngttaccatggccgggcacagtggctcacacctgtaatcccagcactttgggaggccaaggggcaaagatcacttgaggccagcagttcgagactagcctgaacaacacagtgagactcccatatcgacattagttaaaaaataatttttaaaacataaaaaattacaaaaatgtgttctgaagcaattagcaaagaattgattcattttgctggaggaatcagcaattggaatgaattctatttgccttgagcatatagggataaacctgcctaacactggtgagcagagcaatggcctgagaccagaagtcctagaattcctcccagccctctatccaaaagaaagacagagtcctgggctccaagatgatggcacaatcaggaactggcccagagtaatccattacccttctctccaaggcttccttcctctgcttcctaggctttgtcacaatttcctccatttaacccgtggggggatggaacacctgtttacccatctgaaatgcaggatgataggagatcacctgccctctgctcctccctccttccctgtcaggactgagtcaataccgatgttcaacttctggtgattagaagtcaggatgttcaggtggtgggaggttaggtgagggacacgtgattgtcatgacgggcatttgggatgaaagtcagaaccataaacacatattcattatgactctccttctgccgggtctttcatctggggaatctcaaagccctggacaaatggtaattaattttcacaacagcttccacaagaggatgcagtggtgtctgccaaaggccagggggtattttcccagtattcttccctcaacctttcctgctcactcccagcccctgccagcc

SEQ ID NO: 149868 - DNA, 393 bp, Homo sapiens
ctgggatgtaggggctgcccctagttgtttggtacctggtctggggtgattagggcaggggatagtggtcctgagtgtaagatcccaataagaggagttgttgggtggtgtgggcgtcacctgctgttccattggcctttagccagggcctgagagctgggtcaagataacataatttaaaaaacgatattatacccaccagactatttcttcctggtagaaagcaccacagatccatatggacttggatggatctgtggacagattccatgtttgagaagtagccataacctgcggccttcccctttctacaatgcagactccatcctcagttcaacagaagtttcacaggtatctttacaggtgtttcctgagtcagccgatcaggtgaat

SEQ ID NO: 149869 - DNA, 558 bp, Homo sapiens
gacaggaaacaaaaatgtcaagggagactatgtattattaagatgataaatgaaatgatgtccaagctgagcaattaaagtgtgaagtagaaggacacagggtgagaaactgatgcttctcctcagcctctataaaaaagatactgaataaagataattgagaggcattaggggactagactgagaaaggattggaaatctgttcactgagagtacagaaatgaggaagcttggaaggcagaagattttggtcaaagacgtctggcttgaagctatttcagctctttggattatctgtggtggaggccatcacgtctttggagtggaggtaccatgaaactagtgtctgcaaaacatcatctaaatgaaagcaaaattcctgagaaggatggcactataatttttaaaagaaaagctatgagttaagcattcatatcaaggtagatgtttggagtgtattgcttgtgtgtgaaaaggcagagatgaccagaataagagttagaggtatgctgcgttttcttcttggttgatgagtaggatggcctggacaaagaagtg

SEQ ID NO: 149870 - DNA, 906 bp, Homo sapiens
tatgttatcaataatttattatctactatgaatcagacagtagaccaagtgtaaacatttttaaaactcaatagtgacttgcagttgtttatagtttcacgacatgacatagatttgcaaacaagtacaaaattataaccaagattgtatgatatgtgttgtaagagcaatatatattattatagtacagaagatttcaaaaattactttctttgaacgttgagattcaggaacaatgaaacatgtaaaaatactccatagttagaaaaacccaggaagcctgtttctaaatttaaagtatgccatgaaagaggggattattttctgaaatttgcacataagaacaaaatacagtcacacgtagctgagaattgttacttaatgttaatctagtttgataaagatttatattcccttatgaaaacagatggtaaagattatatattttgatataaaatgggtaaatatggcatgatggaaagaacacattacaggagaactttgatctatggaggcgctagaaacaattaaagatacgaaagcagcaagtatcacaagtcccagatggagtccctgtgaatttgactaagtggcccaagactctttgacaatttctctagcagatggtttttaatcttggattgagggctcaagtgttacctggatccatgaaaagggctctttgggagtaaggacaggaaggggtacggacttggactggcctttggttgaagggggttggagtgggtctttagccacttcagcgctgggttgttggccctaatggagggttattgaccggggttgttgtccgggccgtggtaactgtaaattaaatgggtttaagggggaactagttgtataaacattcggggcgttggcgaaaacgttgacggcgttttccag

SEQ ID NO: 149871 - DNA, 412 bp, Homo sapiens
cttcttttcctggggaaggggagtagtatttccaaggggtgtggattctaaggattgcttttgcggagacagcatgagcaaaatggggcgtgctgttccagggcgggtgctggagaggcggtggcgtgggtatatttagcccatggttcacacgacacacttggaaataaacagagccattttctcagcaggcggctgctctggataaataaacaggattgcagagcagccctggtctggaaaagcagagataagcctattttgtgactccacctgggtgtacttgggagcaacaaaatcaaacctcctgtaagaatatttttgtctgccaagacccgcagaggctagctaggatggagagggagacagggaagcatagccacggccctagtgccctcctttccccagatcc

SEQ ID NO: 149872 - DNA, 502 bp, Homo sapiens
ttttagcatttatataatatctcaagcattgaaagtggtatgtaataagctctggtgcaaaatgttaagtgttccttgtacctgtacatgtgccaagtagataaggcactgtgtgccaggtcactaaagtcatccactatgtggatgcctacattcctgtttgctgttataatgatcctttgggttttctcaagcttaataagtctattcccagaaatacatcactcagtttggggaataactgggtgtgccctgaatgaattaatgagttaattaatttagcatgataattcataaataatggcttctaccacacttatttcattttaaatttcagaaatactcagagaaagggaaaatcatctttatgctgtaccaaaaaatgtaataaagttatgttgtatattgtaccattggaataataattactccagtatgaacacagaacttcaaatataatctgattttttctaactctgttaactaagactttggaggaaac

SEQ ID NO: 149873 - DNA, 319 bp, Homo sapiens
accagccatagggttaaatgggatggggagaaaacaatcaagtgaagtaaatgctgtctatcaggatgttgagaggtagccctgataaagtgtcacatccatagccttgatctgagctaatttcagaccctgaactcagttggagtggagggcagtaccccaggaaaggacactgcaactccaggacccaaataaatgataatgatttcccaagttctcctcctaggaaacgtctggagccatttactagatatccatatactagggaaatacaaacacccaaatatttcaaggacccttggaatcaggatccaagttg

SEQ ID NO: 149874 - DNA, 861 bp, Homo sapiens
ctagggctaggtttcagaaggattggcttctagttcctccaataattagctattggccttaaacaggtgagttacattcttgtgcctgtatcttggattcttcaaggaaagatggtgtaattaaatttaggcaaattaaatgccagaatgaaaagacttctcagatagtatgcaatgctagttagtactcagagttctttgtctggttttgttctttttattacatgttacaaagtcatctcctaatttattccaaaaaaggttaatattaggagatagctaacattctaacatgtattactacttactatttatagaataaaaatattctcttatctgcccaataagagaagcaagaaacaggaagaactgcaaaaccagataaagacaatacaagaaaggaaaactataggctaatattgttgatgaatgtaggtatgaatgtagatacttaataaaatattaaatattagtgtatgaggtctagtaggatattaaagaaaataaaatgatacatcataagcaagtttatctcaggaatgtccatattagacacagaaaatctattgtaattcactaatgtaataatacaatggaaaaaggatatctcagttaatgtggaaaaatatttgaagtttattacaatttttagaaacatcttagcaaacaaggaatagaacggaacttccttaatgtgttaaaagtaatatactaagacctagggaaaccactttacttactggagaaatttcagatgcatttcatttaaaaactaggattaagaccagcatgcctaatctcatcactgtgttctgtcaaataccagagatcataaccaatgatgtaagaagaaaaaaagaa

SEQ ID NO: 149875 - DNA, 248 bp, Homo sapiens
tgtgggaagagcccaatttcatttctggcaaaatcctctacaggaccatccatgcccataaagagaattactttccagttattttaaccaaggtcaggtaacacatggacttgagtcctagatcatgttgcatgagtaaaaataggaactgcttacattgttggacttaagagactaggcagctctctaccccattaaatctagaaaatatatgctttcctatgcaaaatctttataaatattaatta

SEQ ID NO: 149876 - DNA, 310 bp, Homo sapiens
agctagtggagacagaggaggagcaggtgagggacccaggtatgactggctccacagactgggaatgacaaacttggaccactcagcatgacccaaggcctcccaaagctatgcacactgtgtacatgaattttaaaacatgtcctacccagcgtggggcatttgtcttgttctagttcagagaatagaacatgtgctatatagtccaagaccattcgcaatctgtttcaccagccatattgaagaacattctgcccagatcttggcatatggcaatttgctttatagcacaactgctggacgttttaac

SEQ ID NO: 149877 - DNA, 316 bp, Homo sapiens
tattttaatgcttagctgactgttgtcaaagtcatcctaatatttatcttttggttttgtcatgactggtgtgtcatttgtttttgtgcaggagatcttgttggataattctgtgttggtaggtccctgacccttgattcctaactttttttgagttttgcggtgctgtttctttgtgtcattttttggttgtagatgtttgtttcctctgcatctctttttttaagcgaaccattaatgctaagtccagtatgtgtagcatgtttcgtggtgtttatttgataccagtataagcaaatccttcctaaccttctcc

SEQ ID NO: 149878 - DNA, 176 bp, Homo sapiens
tttgttttgggtagtgtaaccacttctttgttttctgtagattttttctggatggccagaaaggtgtcccacacaccctcaagaccctaggccctctctgcagagctggggcttcagtacatttatttttgttttagtgacatgcaactcccttattctcttagacaccctattaa

SEQ ID NO: 149879 - DNA, 753 bp, Homo sapiens
ctttatacacagacagatctcacattcatgttaactggtttattcttgaagcataacatttcatcaaggtgtatacctgtatgtgaatatttaacaatttagaaactgaaacagatgcagatgaagaatgacctacttgaaaatttaccagccaagcctgtaagctgtgtagagtaatgtcaacacaaaggaaatatcaattcaagtggattccaatgtgcaatcacagtcattagtatggattggtgtcaaactttcaagcatttgccttgtttattgaacaacctaataattcaaaatggtaatgggaagagggtggagtaggaaaataaggatagactctgaaaccaaggtccttagggcttctatatgaatttcagaattactgtcaaataaatatttattggtgtcctttctcttgtatgtagacaataagtacacatacagatagctgtctaaaaattaagtgttaagctggaattagatattgaaattgagtaccaatattatctttagtcaatttcccttaggatactattttgtgaagagaaaatattattcatgtgcatattaattaaagcttttaaaatgatcactgaaaatgtatcctctgacctgcagagtatatccagtgtatgttcttaagtcctggtgctagatgcaaattaaagatgagtaatgcaaattgaaatttccatgaaatgaatcattctacataatgagctttacaaattccacattttatgcaatacc

SEQ ID NO: 149880 - DNA, 283 bp, Homo sapiens
  misc_feature (34)..(34): n is a, c, g, or t
catcttagtttatataaagagggagagaaaaggngcttttgttcttttgtttattaaggaattgatgaaaataaaaacaacgtatctcacagcatgtttgataatatttccatacgtatgtgataatggatcaacgtttcctagagatgaaataaaaagttctaatttggacaaaagcaaacaaggaaaattataccgtagaaaagcccggctgacggaagtgaggccctgtctcagggagaaacatcggagacgtttaaaagcagggagtgaaacagaggat

SEQ ID NO: 149881 - DNA, 494 bp, Homo sapiens
ctttctgtttttatttccaattatttcccagagggagaggccactatactccgtgtactgcccacaaaagccaccaaccactcaggtgtggtttgcagaccacaccctaagtgagaaaggaaaagccactctggcttatttgacaaaaagcagaaatgctcaccttgtgacaaggaggacactaatggcgtgggactcagtgggttcatgaagatgccaaacacaaatctgcactacagcaaatttgcctatacgaagtccgagagcagagtatgtggctccacacaaactaccttttaacccaagaatcctggaattccactcctggctttaaaccaaggtgtcagctgggaaagccacccttccgcccttgtaagctgaaggaaaagggctttttgtgtgttgctcgttgtttttatcctatcctggcaccaaaatgaaccactttttgagaagacaccagtgcccactacagaggaaataacagaatgatc

SEQ ID NO: 149882 - DNA, 407 bp, Homo sapiens
ccctgtcttcttgccagctttgcctccactcctcccacacctgccaggtcctccttccctctcccatgacctgggtggcagaccagtgtcctgactctaccctaggcccatttcttgtcctcctcaaggccacagccttttcctaggtggtctcagctgagttcacctgcatggcctcggctgggtggctcaggcccctctgtgtaagggggaggcgggcctctgcccaggcttggggagacaaggaatgagacaaggaatcccaagtcgtgcctgccgcaaatctccagcttctgtgaagccctcccctgaaatcagcctcggctgccctcccgcatctgcaagctcatatccgaagcagcttgcctgagacccatgcaggactgtctgggtcagctggtgcttca

SEQ ID NO: 149883 - DNA, 280 bp, Homo sapiens
tcgagtctggaccggtgttatcgatgcacctgggtttgtctgcagttccaagatggccttactttattgtatggtcagtacagttgtatctagtcctcatcaggttaggcctggaactccccaacccctgctacaaacagcaaatcagggttctctgtgagtttaacattatttccaaacaaagttctcaaggctattttttaataaccaccaataattatcaaaacaagtttagaaatgaatctagactttgattttgacagttgttcctcacaagtca

SEQ ID NO: 149884 - DNA, 505 bp, Homo sapiens
ggaggacaaaaagagttgggcatgctgaaggtcagtggtctgaagataaaattatcccttgattctcacccctgtgttcccattactgaatgttagctccttgaggcagagaccttcgtttcattcccactaaattctttgaacctagaacagtgcctggcacagtgagagtgcccattaaatatttgtggaatgcctgagtgatccagtgatcttgggctgggcaggatactaattgtcttggacatggtttggagttggattagatcaaggaaatagccagcctggatgcttctaggagccggtcaggtgaggaaggggagaggcaggcagggtgagtacatttacttcctttgtatgtgtatggtggggataaggggtggatgcaacctagagagcctccaggaggtgcaggcaggcaaggatccattcattccacaatgtctgctgtgttccagtccattggtacccttcaaggatatgggctcagggaggccacattcat

SEQ ID NO: 149885 - DNA, 183 bp, Homo sapiens
taatgctttcctcagagaatttgtaaccaaaaaactgttctcataagactctgggattgaatttacatgggaaattaccatgggaaaccataacaaaatttatacaaaattaccatataatagaattaaaattccattatagtgaaatggaagtgagaaatagagtgaaaaatttccaaaaca

SEQ ID NO: 149886 - DNA, 757 bp, Homo sapiens
gtgaggaaagtgaggctcaaaaggtaaggccatttgtcacatagatggtaaataatggggctgagatttaaactccaattgttccggcttctagccttaagcccttttccatgcaacctttcatatcatcactgctggccatagaaaataactttaaactttgaaaacagctcttcatagccttgtccgaaagcaaagcagcttcctatgcatggaggtacaatagtccttcctctgactacacctccaagtcaagctttctctcctaccctcagccatcattcattctgagacacggaatcacacacttgagctgggagattttcgcagcacttaaggcatcaggggagaagcgagggtgacaataagatcttcaaattccttgacctcaaagaatgtagactttgccagtctttctatgcacaggccatggacttataaataactgaaaaatgggctgctgtgcctgatcctaaatcctaatgtgaccttgggacatagcttttgccttatcccaagaattctgaggcaggtggtagaagatgcagtggaggcagatgacagtcagtttcttgtggaactattgagaatttctgagacataaggacttttgctttggtcatctattcagttgatcagacttatcaaaaagagaaaggagatcctcctagaagttaggagaggggtttgtttcagtagagatcaggagattatgttttcctgaaaattggtgtcatgctacacataaaactggcac

SEQ ID NO: 149887 - DNA, 243 bp, Homo sapiens
cattgccagccccataagcccactggctcccagaagcggccccattgtgaggtgcgagtgactcagggtgcctggtatcatccctataaccagctccagctccagaggccttagcaccagggcatcttgtcccatccccctcacccactttgcttcctgccctcagagaccctggtcccatggctcctggacccccagagccatcttcatagcctccttctccaaaggcccccagggcctctg

SEQ ID NO: 149888 - DNA, 278 bp, Homo sapiens
agtctgtgtctgggtcgtgatcccgtgctgtcaccgtgagtctgtctgggtcgtgatcccgtgctgtcaccgtgagtctgtgtctgggtcgtgatcccgtgctgtcaccgtgagtctgtgtctgggtcgtgatcccgtgctgtcaccgtgagtctgtgtctgggtcgtgatcccgtgctgtcaccgtgagtctgtgtctgggttgtgatccagtgttgtcactgtgagtctttgtctgggttatgatccagtgctgtcactgtgagtttgctgctcag

SEQ ID NO: 149889 - DNA, 596 bp, Homo sapiens
agtcgcggagagcagaacccggcagcttcaggggctgcctgcgggagggtgttccctgctgtacgtgtgtgttcgtcatgggtgtgtgtgtgtgtgtgttgggggggtgcgtctgtgtgtgtgtctgtgtgtgtgcacgcgcagtgcctgtctgtgtgccgacttctgtctctctctcacgtctctctctctctctctctctctctctctctgtctcccttctcgctctttccgtggccctctctttctgtctctgtccgtctgtgtgtgcgtgcgcctcgggacacatgtgccctgtgcgccggagggtgggtttcttgcacgtcggcctttcttctggtcagcctctccccgcgtctctgcctgggtcgtgtggccggttggcagtcgtcgtcccggcggttccagtttgggggtctgtgaaggcctgggcaacgtgggcatcggcgtcggacccgcaggggttttcatcccctccccatccggagcagcctctttgctaggctggatccagacgagcgctccccaaccaaggacaacggcctcccaggcgctcatcgtccacccgcaggagggtgcccgcagagcttcaagaa

SEQ ID NO: 149890 - DNA, 553 bp, Homo sapiens
aggccgggattcgcggagggtccagcagcaggaagaaaccccaggaggaagaaacctcagacagatcgccggcgaggcagcgcgggatccagcctcaggcgtgcgcggacggtgtgcggattctgtctctctctcacgtctctctctctctctctctctctctctctctgtctcccttctcgctctttccgtggccctctctttctgtctctgtccgtctgtgtgtgcgtgcgcctcgggacacatgtgccctgtgcgccggagggtgggtttcttgcacgtcggcctttcttctggtcagcctctccccgcgtctctgcctgggtcgtgtggccggttggcagtcgtcgtcccggcggttccagtttgggggtctgtgaaggcctgggcaacgtgggcatcggcgtcggacccgcaggggttttcatcccctccccatccggagcagcctctttgctaggctggatccagacgagcgctccccaaccaaggacaacggcctcccaggcgctcatcgtccacccgcaggagggtgcccgcagagcttcaagaa

SEQ ID NO: 149891 - DNA, 565 bp, Homo sapiens
cccgcatctctctctccctttttctctcacgctccctcctttttccctccgtctttctctctccctccctttctctgcctcttcctccctctttgcctctctctctctctctctctgagcagctgttacctaataggctgttaatgatgatacagtaagtggaaggcagagtcctgggggagccgccatgatctgtgtaattggtctcgaaggagacagaagtatctaatatttacacaccagtattagtcctttgggaaccttatcttggctagaaccaagcagggaggggggtgctggctggagccatctccccccattgataccagctcagaaggtctttagttaatgggaactgcttcctccctttgggtgaagataccagggtccaggctgaggtcctgggaggtgtggagtcagtgctgagagtggttgattggaccagcctgcatgggccctgggcactgggcacccccgtggagttagtgctcaactggcaggtggagtcctggagcttccggggcgttatatgactagagtcccccaagagtgaggaacttggggc

SEQ ID NO: 149892 - DNA, 423 bp, Homo sapiens
gaccctaaagattgggatagagctatttagataaattgcaatgaacacccaaattccactcagtagaaacctacgctgtcagagtaaactcaccttcccttactgaagaacctgtagacttatggaagaatgctgactctcaagtgccaccccatcaactcttttgcttctaaacctataactgaactcaaaccttaagaaaaatacaaagtctaatcctggaggatatactatacacacaaaagaattttaatattttgacaatttgtgttagtgaaaactagaagaatatctttgggaattgattgtaagagtgttagaacaaggagaaagaaatacactgttggattcagctaggtttatttatatgagtgcactaacaagtaattttggattccatatattattttgaattgttaggaa

SEQ ID NO: 149893 - DNA, 465 bp, Homo sapiens
tactgtgctgctcactgtttaacttcttaccttctctttccctgtccttccgtgttggacagggaaacatttatcaaagttcaagaccatcaaagtggaaaagaatcctaaagatcatctggtctacctgcatcttttagacaaggaaactgaggcctgttggaggtagtgactagtgtaagttctcacagctagtgagtagccagacagaaccagacccacgatctccacatttctgacccggtgttcttcccacttctgcctccttgactagagtcccatgagatccactgagatctaccgtacatgttgattatgtacaaaggagcggaatgcaataaagtatacatgttcacagtcggatacaactttatcatctcataaatgtgacaaatctgaaatacagtagttactctaaatgtaaaaaatattcacaaagcttactgccatggaatttagaagagc

SEQ ID NO: 149894 - DNA, 390 bp, Homo sapiens
tgtcatgggccctgttcgttctgctgtgaggctgactcagggccaggtgccgtgcaggtacacagtaggagttgaactctgatcaagggcttgttttgtgtttatcttccttgctttgcaagttccttgagggtgggtctccccgaatcttgattataaacctgcaagagccttacaaaatgtcctgctttttgtggggtctccagaaaggcttgtgattggcagagggggcaggagagcagtgaccaggaagaaaaaaggctgtggccactggatggcaaaggagggctgtgcagggaggtatgtgtgacatgtggtctctggaggccaagctcacccctcctgcctcagtagcaagatgtgtgtagctgtcaggctctaggcaagaca

SEQ ID NO: 149895 - DNA, 556 bp, Homo sapiens
cgtcatagctgactcttgagggtaaaataaagccaaagcgaacgacttacaatctttataggtgtttcgtgattagtaatttgggtttcaaggggcttccttatgtggagaggggacagaaaagaggaaattaaggtaacaacacaactattcagtaagcaaattaagtgtttccatgagtgaatgagaagcgaaaatgagtgtttatgcacttgttaaccattaaacatgagagcaagattccccaaaagcaagactgtctgcacagaaggctcagtaacatcaaaaagctgggagtcctcactggacaatctagccaggtatctctctttgagatttacgaactagcagggagctgggcaccttggcagtgagagcgaagtcctgttctgcgggcacagggggaggagaccaggggtccagcaggaagccagcagcacatgcagggccccgcaagcctctgaccactcctctatgctcccttcccctcagttcagaggcacagcaataggaattcccagaacagctcccgctgagtaacagcagccagaattcc

SEQ ID NO: 149896 - DNA, 443 bp, Homo sapiens
gagagatctggagtcagagggggaagtcaccgactcccaatccagtgctgctgcccagggacagtctcaccatgccacgctgtcctaaactagcctgtggccctcgccccaactacacgcccatggcctgtcactgtaccatgttcatgccaggcacagctaagtcagggtggcaggagccacgccaaaggcttctccagcttgagggcatcatctctccacacccctcagttattgacagaaactggcacacgcactgccagaccacgctgtccctaggaggaggcagacagaggtggacgcagcccacaggcttggctggaacggcgggttccagaggtgcccgctggccgcccacagtgaagtctggtaggggtggcactctccccacaggttacccattggaccagagctcatccacccagagcccatttccatgacaa

SEQ ID NO: 149897 - DNA, 149 bp, Homo sapiens
tatccacacacagcccaaacacataaagtctcagctccccaaagaccaagttagcagaaagcgaatgaagccacctcctccggtggccaaaaacctcatcatagagttgtccttttttctcctttataagactgcatttgccctactgc

SEQ ID NO: 149898 - DNA, 286 bp, Homo sapiens
tgggagcccaggcaatggttgcctggataccagtcgtgtgactgttggaaatgatctgggagggccgggagggccggagcaggcatttaagagtcagacaaagagaaagcgggatgctaacaccagagcagacaggtctggcaggcgtgcctctgccaccagacagttcctttttgctcttgtcaggaaggtgccaagtgactgctggctgaccgtccctagaccccacttcagctgtgtcaccagtttccccaggcatctgtcatcccaggtattctcaagcagg

SEQ ID NO: 149899 - DNA, 342 bp, Homo sapiens
  misc_feature (43)..(43): n is a, c, g, or t
  misc_feature (47)..(47): n is a, c, g, or t
catctggggttctggagggaagcgctgtctaggcacacggcanggcnttagtaacagcatgctacactgctcgaggtacagtatgtcccatcgccctgtgcaccgtagagacctcagtcatctcaaggaagaatacatttgcttctccttagaggcgttcgaactagaagctatgcgttacctctgattattaatcttggttgtatcaaaaggttcaatctgaaccctttctttctgtgtttctctacatattcccttagggaaattacccactgaccactaatatattacagagctttaccatttagaccatgttttcaattgatccttgctttaataaaa

SEQ ID NO: 149900 - DNA, 626 bp, Homo sapiens
cttgtaccggtgtttatcgatgcacacctctgtgtggggtgtggcaggcaaacaaaatggatcttgaattcagtagataatatgaacttacagttcacttgcagctagtccagtgctgtcaattaagggctcccaatcattggtaactcggaagataggaagacaagctgttttgggctgacagttagtgtcttagacaaaccaaagaataggctgaaacccatgttgctttgtagtaaccatagtaatagcattaagttactactcagaggtacaagtgagatttgtgaaaaatgtctccaaaataatgagttatttcgtctaccccgcttttcagtacaggacatacatttccgcctactcctttttttggtctgtttataacccgaggataagagcctttggttacttgagggtgtgattgaagcagcttgcttctctttaccctctgtgtgcacgtctctgagtttgtgggaatgagggataaaagaggaagtgtaatgatctccctcacccctaccccttactgctcaggcatttggtgtttttttactatgtttccacagttccaacaacaaatatcattaagagggccagtctctcccaggcagtgtggctgaaaataa

SEQ ID NO: 149901 - DNA, 739 bp, Homo sapiens
  misc_feature (48)..(48): n is a, c, g, or t
ccaacgagatctactattttataaatataaaacaacgcaagcccttgngaacataccaggaaagccaatagaagccacagaccccttgaaggaggtggattgccactgcaggctccattggacagccaaggaacttctagctccacagtgagagcctatcaaactagtaagtcacgagtgaccatgagccctggcttcagctcccagtggaacagcagccaaccagcctggaatacatactcctttccaagagccagcctgcactaccagtcccatgccagctatacctactgtactggacaccctgcttctagctccacagtgagagcctatcaaactagtaagtcacgagtgaccatgagccctggcttcagctcccagtggagcagcagccaaccagcctggaatacatactcctttccaagagccagcctgcactaccagtcccatgccagctatacctactgtactggacaccctgctgtgaaagaaatccaagagtgaacaagaccaagtcttgctcttatggaacttctattctagggaatggggaagttggttattatataaaaagaatataaatacaaagaagcaaacaagagagaaaattataccacagtgttatatgctaagcaaaataaattctacacagagacttaaaataaatataatttaccgcagaacacaaacacaatcatggcctccgttggtctcagcggcggagcctctgtttccgttg

SEQ ID NO: 149902 - DNA, 668 bp, Homo sapiens
  misc_feature (48)..(48): n is a, c, g, or t
ccaacgagatctactattttataaatataaaacaacgcaagcccttgngaacataccaggaaagccaatagaagccacagaccccttgaaggaggtggattgccactgcaggctccattggacagccaaggaacttctagctccacagtgagagcctatcaaactagtaagtcacgagtgaccatgagccctggcttcagctcccagtggaacagcagccaaccagcctggaatacatactcctttccaagagccagcctgcactaccagtcccatgccagctatacctactgtactggacaccctgcttctagctccacagtgagagcctatcaaactagtaagtcacgagtgaccatgagccctggcttcagctcccagtggagcagcagccaaccagcctggaatacatactcctttccaagagccagcctgcactaccagtcccatgccagctatacctactgtactggacaccctgctgtgaaagaaatccaagagtgaacaagaccaagtcttgctcttatggaacttctattctagggaatggggaagttggttattatataaaaagaatataaatacaaagaagcaaacaagagagaaaattataccacagtgttatatgctaagcaaaataaattctacacagagacttaaaataaata

SEQ ID NO: 149903 - DNA, 488 bp, Homo sapiens
atttagtacatggagtgaaatgaaaagaagctcaacgcaggtggaaggtgatgctccgtgtctcccggctctccaggcagtagtcattccttggcccctcagatcctccattttgggtgcaatggtgtggctgtactttgtggagaaacaaatttgggcagctgagttcagggcttcacgtggaggagcgagaagggggccacccaatgcagctttccctggaagcgtgtggactggggcacagttgttgcaggatgattggctgccaccataagtgggcaaaatcatgggcagatcatcctgcttccttaattgaatcttggaatgcattcagaatcttcaacccaggggtctggcactcaaggcgtttgtgacctggcactgactcagtacgctctagccaaattgggcactcatggctcccagatgctgtgccaagctttcacctgcttatctttgcttgcactgttcctgccacctggagggac

SEQ ID NO: 149904 - DNA, 365 bp, Homo sapiens
tatttagaaaaaaaaagttactctgactgcatgagagagaatacacaaaaggcaggtggtaggaccaagctcaggagtccagacacattcttaagcatttaatcataacaagggagaaaagcctttgcttactgtgatagcaaaattgaagagaatccatctctccataatcaaagctgctcttttaattaaattcagaagaattcaaatgctcatgcttaagagatacctgtatcagtggctaaagatgataaaattagattagcaaggcaagactgagaaaccaagatagcccagttttcttcatatatgtaggaatagaagggattgacccaaataaaataaaataaaataaaataaagagg

SEQ ID NO: 149905 - DNA, 153 bp, Homo sapiens
attagaggatccgggcgattctcctcctcctaaagatgataaaattagattagcaaggcaagactgagaaaccaagatagcccagttttcttcatatatgtaggaatagaagggattgacccaaataaaataaaataaaataaaataaagagg

SEQ ID NO: 149906 - DNA, 219 bp, Homo sapiens
tggattttaatctaggaactttatgtagatgatcaggtatcaaatagacttgttgaatatttgcattggttcccctagaatttgggtcacattgatatttctaaaattaaagatgtatgtgtttgtgcattagggctggcctatctaggactgccaaattctgtgggaattcttttttccatgacaagaccaatgtttggatttttctaagcatttcag

SEQ ID NO: 149907 - DNA, 726 bp, Homo sapiens
ctgctccacgctaatttatttccaatgaatgtgatctagtttataattcagtttagaacagtcaaacaatctccaggaactttgtaggcatggtctttgcagttttcaatatttgcttttcctaccagcacatgacattttttgaacaaagggagaataacttaactccagagagaatttacccaggagataaaggaaaaggagaagcccagtgtagggcagaagtgttctctcttttgtgtaggccactgttgtacctacaggccccaaaacgcagaatcaagatcactgagcacaaaaatggcaaaggtcacattcagaagtgaggagctattttccagcagtagggccattccaggacacaggaaattttggttagacgctattatgactgacagaactctgcagtactaaggctgcaatgaggcaaaaaggtggcttttgcatctctctaaaagtgatcctgagcttttgcccaaatattttcttataaagagtcctgaagcttcctgtggagatgaatatctgtgtcaagccatttctgcagatgtttcttcacagataatctattggctgaactttcattggtgatcttttgatgggtgactcagataaattactttcattaagccttccgtaatgcatggtaattcttttccaagtttcctgaggagtagtcagtcctaaattcccctaaagtcagagcgtcactctccatggtaaggc

SEQ ID NO: 149908 - DNA, 448 bp, Homo sapiens
taactttaaaaataatggcagaaatttttccaaaattaatgaaaactataaaaccacatatccaagaagtccagtgaatcccaaacaagttaagtatgaataaaatacactggtgcacatcataatcaaatattaaatgctgctatagaaaaatgacacatcatatacaaaggaaaaagataatgttgatagatttcttattagaacaatgaaagccaaaagacaatggaacaaaatcgttatattgctgaaagaaaaacaaaatctctcaacataggaatctgtgtttaattaaactactcttcaaaaatgacaaaacctgacataattcttcatgagcagtctacaagaaatgataaagttcttcaggttaaagaaaattataccagatgaaaatttggatcaacacaaaggaacgaaaaactagaagtggtaaatgtgtgagtaa

SEQ ID NO: 149909 - DNA, 246 bp, Homo sapiens
gaaggatttcactttctcattctaaagctgatggggacaagatgagataaccagacattctgtaaattcatgttttaaaatattaatggtatgtctagctctgcaatatttggattgtagtatagcagtacataatttgaattttaaataatacgaaacatgagaaatttttctttcaaaaaaatatttccattcaacaaaaaactatatctacttgtctacaatctaactagtatgccatgcttg

SEQ ID NO: 149910 - DNA, 829 bp, Homo sapiens
gtcaaaataatctatatatattaacaaatgtcatgcatctcattcctgccccagcccccaatatataagtctgaaattgtccttcgtataattgatatgataaaactgaggtttttttagagtgggatgttttcataaaaagatttgtttctgttagtctgtgaaactctaagatgcctaatagattatagaatcctgtcataatagtgtgttattatacaaccttagcataatagaaagggttaaacctaaagttgatacctttttttctaaatttaactctgctccttaaaggcagataaatctctttacttctctggtcttgttttcctactctataaaagggagataaattgtaatattctaaaatcaggaggaaaaaccctacatatatttagctaagcaatagaagaattagagaattggacaaggcaacctctcagttagttgctgtgcattctgagttactatgatttttttatctcctttcacttcaagttattaagcattcactcactgaacttttatggccattcactgagcaaggcactgatgttgtaaagatgattattcctaccttcatggagcatgcagtctgctatgaagagtatcagtgatataatgttggtgatgttataaaaagatatcaagatctctgggagaatagatgacagggcctttattatgcatgaaaggcagagagttagacacatcctctgagaagaagtgaccctaaaaggggagtggagtttgccaagcagacaaagcaagggaaggtgttacacatcctgcaaaataaaaaggtagtggtaaaatcattaaaaaaaaa

SEQ ID NO: 149911 - DNA, 293 bp, Homo sapiens
ctcctcatccattccctgagtctcggcacatcactgacctccctcccaggatgaggagaaatcctgggtagaggtggttggtagcagcccttgtgcttaccacgcttgctggtcttaggatgagctatccatcattttgggcacaatgctccctttgtccaacaatttgctcctgtctcaatcattctccctctcttattccctgatctctccttttaaaatcacagtggtcatagtcactcacttgcaaataataagaaaagatggctccttcataaaggcactaaataagg

SEQ ID NO: 149912 - DNA, 567 bp, Homo sapiens
agcacttactacattttactctatggcatagctatttggaaatgtcggtctttccatagattgagattagataaatgaatgatgaaatcaacagatagcacataaagcaccttctaaaaagaagaaagaaatagattcaaaatctcaatgctaaaaattctgtaatatttaaaagactactaactgattaaggcctgcattatatgaatgccttatatcacagggataaaccaaggtaagtcttcatatgattccttaaatctttcactttatcaatagcttttctaagaagtcatgtaccaaactttgggatcacttcatttatcacaacacaaattcaaaactgaactgagtactaaacaaaactgtccagacaatttgttattatcccctaaccaagtctaccacaacccgtgattctgctaaggtggaacaacttcagtgaggaaaaggaaatacgtcaagaagtataattcaaatgaatgatatccctggttttaaggctctaggaatgtaagagtctccaacttagtaaacacaaacaacaggcatctaaaacctgtctta

SEQ ID NO: 149913 - DNA, 233 bp, Homo sapiens
gcccacttgtccatgaaaaggcaacagcccaggcacaatgccaccccgcccccaatggagagcaactctgggtctcacctttgggggagagggtccctgggtacctcttttacctccctctccccctccccaagcacaggcctgcttgagaagagcagctgctttccctgccctgtctggtcttgagggaaccaagccccagcctgccatggcccagagagacgcaggtgtct

SEQ ID NO: 149914 - DNA, 409 bp, Homo sapiens
catgaactctggccatagaggaccactagctacaacctgaaacacagtgggcatttgcacactgtcttctcttttactacctttgcctgcagtgacctcttccacctccaaatagttttctttctcattctttgaggtctttcaaaacaattatcacccctttaactcaatgccccaagcataattacttcttcatctgctggccttattacctcactctgtattacatactttattacatacatgcagagtgaggttaataaggtaatgaggtaataagtcacactgcattacacatggttttttattttctttctctctttacaggattcacctgtgaatcctctaaaatcatgaaaaacgaatatgtgcatgtacacatttttatcacattcttagaaacctctaa

SEQ ID NO: 149915 - DNA, 391 bp, Homo sapiens
aggaagaaatagggcagagccagccctcaaacacggtgagggaagaggctgcagatttgctctgggcagaacacagtgtgctggaccacacacttgctgcacagcgaccccactccacaagcaacagggactggagctgcaacttcctctgggggctgaaccccaaatcaccctgcgggcccagcagggcctctggggatggggaccacctgctgcttggcatcaccagtggggtagttactgtgagctctgcaaaggaacgggaggtcctcatcgtacggggtggaacaggacaaatcagcttccgggaccagggcagcttggctgagagcctagaggtgacttgcatgaagaacggtggaatatggccggaaggaacgcgctcacctac

SEQ ID NO: 149916 - DNA, 325 bp, Homo sapiens
cattgttccctttttgtttttatgcttttaatacatatgtatacatccatgaaccctagaatattatatcatttataatagggcgacatgcatccagctaatctaaacatagtatatgtccttaaggaatatggaaaaaagaagggaagccaagaacacatccttcttttccttcaatggaaattaccaactgatcctccaagagactcctgtactggactaagaggggaatctcaagcttacagtattcttagcaggaaatctgacatacatctcagatagaacatccattatacaaattggcctataatttagggagcacaca

SEQ ID NO: 149917 - DNA, 674 bp, Homo sapiens
gacggagtctcgctgtgtcgcccaggtaggagtgcagtggagcgatcttggcttactgcaacctccgtcttccgagttcaagcaattatcctgcctcagcctcccaagcagctgggactacaggcgtgcgccatcatgcccagctaatgtttgtatttttagtagagatgaggtttcactggccaggctggtcttgaactcctgacctcagatgatctgcccaccttggcctcccaaagtgctaggattacatgcgtgagccaccactcccagctatggggtaaatcttttataaaaacaaacaccttattccaaaggcagaagaaatcatttttatattatcattttatattatctggccaatgctatataatatccaggtccttccatttgcaaagagaattagagttacctggggaggtcagagaagcctctccacctgcctcctgacatcctggacaaggacagaaggagctgaagtccaagagcttcctttggcttttcacctttcctgtcattctgccttctccccatccattccttaaagattcatgcttactctctcccacaggactggctccaggtgtcacagacacctgtctggctctccaaatgtggtttggggacctacacctagccccctaatgccagtactgagatgacttctggcagag

SEQ ID NO: 149918 - DNA, 648 bp, Homo sapiens
agtttgttaggagttcacccctccacacaagtactggaagtcctctgaagtgatttttaattttggaggttgtgttatactttttctcttatcagttagaactttattatgatatagcaaattataaaaaccattatgctatcatattcataaatgaaagagagaactcaaaactaaattttcaaatatctggccatgaagactaactgcttgctacacgggattaacaaaacaatgagaaaatgtctagtaataattataaaatataaaacctttgttaaaatctgatttgaagcttatgtcaaagggccacctcatacagaatcttgaagacattaaataaccccaaatagagatccacagtaaacttatgtggtagtaaattttactatactagacaaatctacagtgagattttctgtattttaaatattttctgtatttctgtattttccaaactgaatggtttatttagttaataagtgataccctaacttatttaccatttccagaaaataaccaagtacagaatacttactgataagctgcaatgctcaaatccaaatattcaacagaaaaaaatttacctagcactacagtgaccaacaagtcaaaatcatttgtgacaggttctattgaatatatagt

SEQ ID NO: 149919 - DNA, 379 bp, Homo sapiens
ctttttatgctggtgtctatttcccattaaatcaaaagttatgtcaatttcaaattaatgagaagtaagtataaagatggaaacttcccctcaatattactatttttatgcttttggagcataatatttagcactgctcaaatctggttgtaaataatttctttcattgatgagatgaactgtctttactttttctcctgttactatatttactgtttcccttttgtttgatgtcattggaaaatgaaattgccagatggtttgcaaagagaagtgagcaacaactctttttttaaaaaaaagtttctttatatacaaataagtaagcaagcaagcaaaaaagtatgtttgcttaaaaaaaagaaagaaaaaaaaattt

SEQ ID NO: 149920 - DNA, 424 bp, Homo sapiens
tgggttcacgctattctcctgcctcagcctcccgagtagctgggactacaggcgcctgccaccacacccggctaattttttgtattttttagtagagacggggtttcaccatgttagccaggttggtctctatctcctgacctcgtgtggcttactcttttactctcttaatcgtgtcttttgatgaatagttatttattttaatgaagtccagtttattgaccattcctttaatggtttgaggtatttgtgccctacttaagacatttttactcattccaagatcatgaaagtattcttatgtcttctttgtgaagctttattattttgccttttatatttaggcctaaaatccatctcaagttagtttttttaaacatttagaaccatttattgaaaagttcattttttaccattgaattgt

SEQ ID NO: 149921 - DNA, 341 bp, Homo sapiens
gaacagggtaataactgaaatgagctgacgctgaggcatccttcgtttatcttggtgcctgggtgcctcttcgccatttctccttgctggaggagagaggctgaggtgtggcttctagtcccactcttgcctgaagttgctcttttaggtcccacttccacaggcaggcagggagtggactagtgtgttacagaagctgggtgggtgacattcagaaccccagtgtggctttggaaacatccacggagtcctggctaggtgggcagggagcagagtccaagtgcttgtggctctgtccatttctctcctcattgtccttttacctgtaggtgtgcctgcac

SEQ ID NO: 149922 - DNA, 442 bp, Homo sapiens
tgtacatgtccctggaagggtatttggatgtctgttcattatgaagatggtgctcggtgtgtctgtagaggctatggagatgaggggacgagtagaagtcagccaggaagctaggcatgtgggaatgggggagggcccttttctctaagagtttatccttgccctcctgaatttcttgcttcaggacgtaggagtcagcaagggggttaaggtgatgcttggagaagctgcagcggtggggatctgatcgactcagtttctcatgcttaaagatgtcattgatggtctttctctcttccgagggcttgcttctgaaactctggacgtgctgaatcactgatggccggctgaccgccatatggtcagtgctttggccatggtgggtctgggacaaactggaacacaagtcatccctagcaatcagtttctttttgctgatcaa

SEQ ID NO: 149923 - DNA, 299 bp, Homo sapiens
atccgagtggttcttgtaccatctctgaactgcttgcttcaagattggcgatgcccgtcggggttaaggtgatgcttggagaagctgcagcggtggggatctgatcgactcagtttctcatgcttaaagatgtcattgatggtctttctctcttccgagggcttgcttctgaaactctggacgtgctgaatcactgatggccggctgaccgccatatggtcagtgctttggccatggtgggtctgggacaaactggaacacaagtcatccctagcaatcagtttctttttgctgatcaa

SEQ ID NO: 149924 - DNA, 1127 bp, Homo sapiens
gggtttgggctggcatctagccctctggcctggaatcctgtcttctcctgcaacaccaaaaccgggtttgtttgaaataggtagatgacaaacagtggaaggtgggtaataagcctgaggaaataaaatactagaaacagcctgcaaactcattaacagctcctgagggaggcctctaagatcactgtattgagcataagagaatgtggagccccgtctaaactccagaagggtctaggaggctgcaggaagcctgggtgctcagcgtggggtacccagtggcctggctgtcttatgctggcccgattgtcccagcctggagatgagctccatgtcctgtgcgtggatgagcgctgcactatgtgtggatgaggatggctctgcacaccagcatgtgttagattccagtggcttcaacttgtcctgagtactatctgcatgtacatattcacacagaagaagtcagggctttgcctttaaatataaaaaggtgacatgataacaatattaatgtgagccttctagatttttatttcagcagtccccagggagggtcaacttcacattagcccacaaggagcacagagataacacagtgctgacttagtggacgctttcatcagacagtgtggtgagccagtgcccttgccaggaggccccacccactctgcaaagtcaagtggagttgtgagactcctccaagggcacagtaataacagaggtagctcgcccatacagaatgtgtcccctgatctttatgatttccttccatttcacagtcacattctatgggtcactcttactgttacccccattttacaggcaaggaaattgacacgaagaagttgagtagctagtaagtggcaaagtcagagtttcagctccatcagccgactccacagccatgggcagattatacagggctgatgtttcactttgtcttgtctaacctagaagtgacctaatgtcacaactaaaaagcacatggaaagtctcacagtcatggaataaccatgtaatttgtacatttaggtaacccctatgaacctccacctccttatctaaaaatgcagactatagtacctgccattcacagccactgtgcagttttgaagtagtaggcttta

SEQ ID NO: 149925 - DNA, 366 bp, Homo sapiens
  misc_feature (1)..(1): n is a, c, g, or t
nctaggaggcatattctggataccttacctttctagtttgcaggactgtgtccagagttggttccttccggtgggttcgtggtctccctgacttcaagaatgcagctgtggaccttcctgtcgcaggtggcgtgatttgatttgtctgaaggcaatgaaaggatacacagatacaccgaagcctcccaaaagaatcctggttccaagactcaagaagatggattaatgtttttccattaattgttggaatttatgccattttttactatatgccatcaattttaaagcacttctgaaaagacataacaatctaaatgagatggcattttaaattcataaaaatatagtattttcctcaacttttat

SEQ ID NO: 149926 - DNA, 530 bp, Homo sapiens
cggcctgcagagctccaccgctgaggccaacgaggccacgactttattcagtaacaagtttaaattttcagtgaatatactgtcaagctaaataacagagagagattctccaaagataataagtgtattcaagagtaagcattgtagtgtggaacacacatgccgagtaaactatgggcacattcaaagaggcaagggaagacagcaatttttaaagctaaaatggggagggttacataagttgttttgaaacaattatccttgcttacagggatcaataataagggtggcatcagtccaaggttaggcaggcaactgctgggcagatgtccttgcagaagtttttttttgcataaggttgcagtggcctttgtacaaggttgtggttttggtatagtcttttgtaacagttcttgttttcaggcgattgagcattaagaacccttccttcatggcctttcccagctccattttgtcacaagtgactctatttttatcctgacaactttcacagtattcaatgagggttt

SEQ ID NO: 149927 - DNA, 479 bp, Homo sapiens
caggatgactcatgcctgtaattccagcactttgggagcccaaggctggtggatcacttcaggccaggagttcaagaccagcctggctaacacagtgaaaccccgtctctactaaaaatacaaaaattagccaggtgtggtggggcatgcctgtaatcccagctactcaggaggctgaggcaggaaaattgcttgaaccaggaggtggaggttgtagtgagccaaggtcacgccactgccctcctgcctgggcaacagagcgagattcttatctccataaaatgaaacaaagcaaaacaaagggagagagaatggaggttgcctgttactgcatcataatcttgtttatgctgactgatgcattagaggtactaatggcatgagaggaacaatttcctgagacacagtttactgaccatgaatttcctcaaaaccccagagagcaggcttctcaggaggagactcagtgtggaatccct

SEQ ID NO: 149928 - DNA, 491 bp, Homo sapiens
agcatgatggggttctggtgagggctctctttctggctgtcttgctgtgcctcacataatggagagtgagcaagctctttagggtctcttctgataagggcactactcttatgagggtgagggccccaccctcctgaacttcatctaactctaatcttttcccaaaggcctcatttcaaatatcacactagggggttagcgtttcaacatacggattttgttacagtctttagtggagacaagcaggattaattaatttatggaaagcatgcagcagtgtgcctctaacataaaaaatgtcttatttaacctgtcatcatcatcatcattttgacttggcctaaaatttcgcatatgggctagtggagaaaaattagaactaatttggtgattttgctcttcattgatggaaagtatgtgataacattcattaagaagggcaatgtaggaagaaagagacagttgtaggcatgctgtggagagatgcttcc

SEQ ID NO: 149929 - DNA, 524 bp, Homo sapiens
caggagtcttgctctgttgcccagtctggagtgcaatgctgtgatctcggctcactacaacctctgcctcccaggttcaagcaattctcctgcttcagcctcccgagtagctgggattacagacacccaccaccacaccctgctaattattgtatttttagtagagacagggtttcaccatgttggtcaggctggtctcgaactcctgacctcaggtgatccacctgcctcagcttcccagggattacagatgtaagccactgcacccagcccaaatggtgtcattttaaaaaaaggagaggacacacagacacacaggcaagaaggccatatgatgatggggacagaggcaggagtcctgaaactgccagccaaggaaagctaagcatggctgggagccatgggaggctctgaagaggcaaggaaggattctctccttgagcctactgagggaccagggctctaccaaaccctgattttggacttctggccttcagaatggcaagagaataaatttctgttgt

SEQ ID NO: 149930 - DNA, 495 bp, Homo sapiens
agtcacaaagcctcaattaataggcacaaggaatgtgtatttaccagttgtgtatctggagctaaggaggccatcagtaccatgaagcctcattaaacaacgcattctgaattaatcagccgccaacacagtatgcctataacaatgacgggagtgactttgtgaggataaccccactactaaaattaagttttgattaaagttttttggttaagaggcaatcataaaaagaataaaagacgggaaaagattctgcaaaggagctatcctactggcctgaatgacaggcacagaatgctgtgaaatttattcactatcttatacttccgttgttactattagcatagtgagaggcagcatagggtgagtattaaaagtacagactcgggccgggcacggtggttcacgcttgtaatcccagcactttgggaggcggaggctggtagatcctctgaggtcaggagtttgagaccagcctggccaacatggcgaaac

SEQ ID NO: 149931 - DNA, 436 bp, Homo sapiens
ccttggcagacaccactcttcactgccatcattgtcaacagtctcgctgccaactttggaaggtgtctttgtatctggccctgttgggttcattacaaagggaatcctcctatgaacttgtgtatacccttagaaagcacctgtcttcaaggagcttaaaatctcactggggagacatgacataaaacttaacatgctcatccagtagcaatctgcctcccacctcacctgtcaaccaaaactggtcttctaaagctaagagtatcctctcttgtttaccaaattcatctcctaacttcacactgtcttggctacacacctctgtaggtctttgccctactgagcatgatctacatgaaactcaggaaaatttaaaggctttgactcagacagacttaggtctgtcttagctctgactctttctagccgtgtgacc

SEQ ID NO: 149932 - DNA, 835 bp, Homo sapiens
cccgaggtcgccacttggctgagctgtcccccacagggacttcaggtccctggttcctccatccccaatctgcttccttccattcccgccagaaccagggtattttccaagggcaggtttcacatccacttggggcagggatcttaagccacagtaagactaatttccaggtcccaggtctcctgggaaaccccaaaagactgagccctgccgagtgagaacattctctgaagctctgataatcaaaacagcgtggcacctcacaagcctcagcagcccagaggcggaccacatgtataaaataacgccatgtgtagtatttaacaaaggaggctccccaatccagggagggaaggattctttcacaaaaggcatgaaaacagttgcttccatgtttggaagcagttttgttttgttttttgtttgtttttttgatacatggtcttgctctgtggcccaggctggagtgcagtggcatgatcacagctcactgcagccttggcctcatgggctcaggcaatccccctgcctcggcctcccgagtagctgggattatagatgtgcaccaccacgcccagctaattttttaattttttatagagatggcgtcttgtggccaggcacagtggctcacacctgtaatcccagcactttgggaggccgaggtaggagggtcacttgaggtcaggagtttgagaccagcctggccaacatggtgaaactccatctctactaaaaatacaaaagttagctgggtatggtagtgttcgggcccaggtatagggggtcagcccagagctgtgggtgaaaggacaggcccatggtcccacctgtg

SEQ ID NO: 149933 - DNA, 485 bp, Homo sapiens
ggtgctatacccagtgtggaggtgactgaggttaagtcttgccttcagggacttcacagccattgcaagacaaacagttacaatgcagagtgcaaggacaatgatggaagtagagagtgagatggaaacttagggaggaggcctttgactaggcctgaggtagccagagaaaacttttggaaggaagtgatgctgagctggatttttaaggatgaattggaattatctgacataaaacaaaaggtgatactgtctcaatatttctgaatacattttacctcctttttccaatctattttaagagtaaaaaaaatgtcttcaggagaagacaagatattaatgaataaatgtcccttctgattactctgacttataaatggattttcagtatgtttggtttgctaacaggaggacattcccaaattgtattaaacaaaggaaagatatagcaaaaaacagttacacactggatgtttagtcatcaa

SEQ ID NO: 149934 - DNA, 228 bp, Homo sapiens
acctacaaagctaaaatatgctgttgcctcattttcaacaatttttaaaaattagtaggtttttgggaggctgaggcgggtggataacgaggtcaggagtttgagaccagcttgaccaacggtaaagccccgtttctactaaaaatacaaaaattagctgggcgtggtggcacgtgcctgtaatcctagatactcaggaggctgaggcaggagaatcatttgaaccca

SEQ ID NO: 149935 - DNA, 299 bp, Homo sapiens
aatgtaaacacttgctaaagttgagtatcgtttctcatgtgagttctattatagccttctgtgtttataaacatgtcttgagcatgagggagaaatgtggtaacctttgagtccccaagaaaatgttcatttgttttctctgtgggctgaaattaagataactcagcatccttctctgagcatcccatatccctcttgcttttcctagcaggcctgggatgatgcccagtttgccatttcctaattgttccatcctcttccagtagagtctgttatcttttgaaaaagtacagttcata

SEQ ID NO: 149936 - DNA, 424 bp, Homo sapiens
tccactggcttttcgaatcaaaatctgcaggctaggtccatctatatcaggacatgactaataacgggatatttatgaatgtggactacatgggcacgagggggaaaaaatcagtgacctgaaggctttttgctaaggatctttgggatgaaactaaagaaaaatcatagtatcttcaaactaggaagatcattttgtctaacttcctcattttgttgaagagtaaaccccagagtttaaataaactgggcccaagttcacagagacagtactaaatctgcttctaaggagaacctcccttagtcctagtacctgagtgaagttgtcactggatgctctgtgaagccagctaatggtctcaaccactcttatgaatttaacatatcaaaaataggtactttttttccttttcttttttttttct

SEQ ID NO: 149937 - DNA, 557 bp, Homo sapiens
gaacaagcaagcataaagctttgagtgcctgcatggatggagtgaaaggaagcaagccttgggcatttattaagcacctgctctgtggcaggctgtgttctttcacacatgctgtgtctaaacccctgacatttgccaggcatgggttctttgcaggatttacggttaccttatgaagcaggtgttctttcaccttacggaaaaggcagcagaagcctggggagtttttaattggtccagtggtgggaattggagggcgaagcatgtcttgaattcagcttctgacccacgcctcctggcccacagcttaagttacataatgtttctttatgttgatgtgcaatataaatctccaatcgcacggctgggaagtgcttttgactggctttgttgcttcagctgtcctaaaggaatggctttcataaacacagagagggaattggattttcgctttgcgatcattcatattacagaagtggggaaggtcattgccacaggaatcccattaatccctgaagctgtgggtcctcaatgagttggcctgccttaggacagca

SEQ ID NO: 149938 - DNA, 135 bp, Homo sapiens
agaagggatggaagaagatgggtaagtcacttagaaggccccacatggtagctctcttggggccatggatttagtatacagcagtcagaggaagaagggcaacacagttagctgcacagtctccgtgttctgatg

SEQ ID NO: 149939 - DNA, 176 bp, Homo sapiens
gggaacagtacagggtgagggagacagggacaagagagggaccaagatcatttagaactctccctttttactttatctctttctttttaaaacatttttatttgtagagacagggtctcgctccatcactcaggctggagtgcagtgatcacagatgactgcagcctcgaactcta

SEQ ID NO: 149940 - DNA, 219 bp, Homo sapiens
cccagactctgttcttaatgacgacgttatgctgcctcttgtttacaaggagagcagtaagaaaatgaaccagaaaggagtatagaaaattcacctgtgacttccagtccacacacaccaaccttactctcatgtagcgtgtgctacaaattctaactcatagtaaggctattccatattaatcataatatcaagtaatgcctatatctgctttaaaaa

SEQ ID NO: 149941 - DNA, 490 bp, Homo sapiens
agatctcaacctcctggggtcaagtaatccttccggttcagcctcccaagcagctgggaccacagatgcatgccaccacaccgggcctttaaaagtttttttgtagagctgggttttgctatgttgcccaggctggtcttgaactcccaggctcatgtgatcctcctaccacagccccgagtcgcctggaattacaggcacacgccactgtgactgactcccaaaagactccttatttaaggaccgctgacaatctacagaggaaaatgaataaaggacaaatactccttccatcctccattggaattcccagataccaagaaaacaaaacacagtagagagatcttgaaagaaaatgcaaagcttcgctgaaggctcccagttcagagtggttcacaagtccaacacacagacaagtaaacgaggcacattagcaatgtattcgttttgaagaaagcacttaacatgaaacttgcttatgaaatcctcc

SEQ ID NO: 149942 - DNA, 135 bp, Homo sapiens
aaacaagtcaaaacatttttaaaaagaaagatgtaattctttgctcaaacccaagccactataattttaaaaaacattccaaatggaaaacattcattgatttattaaaaataaagactaggctttccccccacc

SEQ ID NO: 149943 - DNA, 122 bp, Homo sapiens
ggatgaggtctagggtgtgaccttgagaggatgggtcgcacagtcactgaggaagaggaggtcaacgaaccagaggctggaagggtcgcatctggctatggagatgactgtaagctatcaca

SEQ ID NO: 149944 - DNA, 217 bp, Homo sapiens
cttggaggcgtgactggctccttgaatattgagaatattgagaagggtaagagcaacagtaggagagtcctaggcccatgaaaggaattaggagcctatggggcacctgggcattggttcctgggtggcaggtgtggatcagggtcagatccctgtatagctattggaaacagaagtccggttcccaaattgatagaattaccacagagggcggtag

SEQ ID NO: 149945 - DNA, 566 bp, Homo sapiens
cagtgtgtttaaatgcagaggaacactagtctgtgtgcccgtgtacacacagccttactagagtttaaagaaattgcttgtaactttcctttctgattagttatgatcaataagatggttttggttttaaatataggcaatggtcacaaagctggacttttcacagctgtgtcagaccaaactaaatatttcttgaaaacataatttacagggcatttgtataaccttgcttataagtatcttacaaattttgcactttagctatataaattgtactctttaataggcattagtaggatggtgggggttcttttggttatatgttaagccaccaaacctcttggctggaaaagatgtagcaataccatttaaagaagtttgcacgagttgtatacagatttcagagaattccatcctattctaaaacttcatggaaatgaatttggaatctcacagggaagtaaacagctccagtctttttttcactgataatcacatgtgacagatgtgtttacgtagaggaacaggaaccttaaaaaaaagttttttactttcacatgattcaa

SEQ ID NO: 149946 - DNA, 396 bp, Homo sapiens
cctctgtcattccaaggcttttttcatcaggtgacaggcctgtggttgtcattccttcagccactgttgcaggtcattgactaaggtcaccgtagatttcaaggtccttgtgtccttgtggaagacagcagggggctgaggcatggctgggactcactgtggctcttggcaggacgtgccttctttctggcacggttcaggtcagggtctctccatgcttggtaacatgcccaggaggcccacctgggttccatgcttttctttccattttcactcacgtaaccagcatcccttgtgaaagaggaaactcaggcccagagagattggcagttcaggaccaccgtgactgtagtcgtattttgaagtcaaaccagctccagcccacatgtctagctc

SEQ ID NO: 149947 - DNA, 292 bp, Homo sapiens
aataaaacagcctggtaccaacctaacgggatgtggacacatctccaaagcctagctagtcttacccaactatattccctatttatcctcaaatgaaagaaaattccctgtctgtatttttagtaatcagacttattcctctctagaatatattactcctccattttgtgttgaaactgttcagattagcctttcccaatgtaaccacacaaaatcctcctctgcatatacccattcttaattctataatccagatagattttcctgaactaggtatttcccaattctatat

SEQ ID NO: 149948 - DNA, 402 bp, Homo sapiens
gccaggggctcttccctcacctctgacggatccagtaggtggtcccagattctcactctgacccacccactatgacttcaaagctgctgtgcacagttaccactgctgggcagaccttccagaatcttccagaacatcccatgattcagagggaagacaccctggatgagggagtcctccatttttccgagcaaatgcacgtgttctacacacaactccaggtcattctccagtggtacctgagccctccatagggcccctgtgagggatcctgggtggggacttctgtgactgtgacagctggcctctgggccaccttttccagaaacagcattcctgattctcccttgggaaaccatcacctccacattcagggtggcgtctgccagcctggcccagccc

SEQ ID NO: 149949 - DNA, 307 bp, Homo sapiens
tcccacggggctgggttcatagaaaagggactccgtgtctatagtggccttctacagacgaggcaaagtggggattaggaagagactaagggctgggcctcaccagaagccacaatccccgtgttatctctttgggaccctgggaccctgggacccctgacgagtcaccttagctctctgatcctcacactgcttacatgtaaagtgggctgtggcagggacccagtgggacagtccctggtgcatgattatgctcctgggagagacttcaacacccacgacccacccactgctgtagctcatattc

SEQ ID NO: 149950 - DNA, 499 bp, Homo sapiens
gaggtgatctagaggatcccagttcgacggagactctctaacccttatctgtaaaatggggaataataatattatctctctcataaggtttttatatggattaaataaggtaatgcatgtaaggtacttagtacaatgactgtcactaaatgaaaatgggaaaaaaataagcttaaaaagtaggatagactatctacttctaactaaggataaaccaatgacaaaagttctgaattaatattaaacattaaagcattaattaaattgtaggttctttaagtatatgtgtccagtccctgactctccatcccctaaaagagaaaacagcattggtgaggggatggagagtcagggacgggatagatatacggagagaatctacgctgtaatatacggtaaagcgaatgatatgaggtcagggggccggaccgagctcaacctattctcagactttgattggctaacaaacccggttagctggcgtggagccggtcgtgga

SEQ ID NO: 149951 - DNA, 801 bp, Homo sapiens
cttattatcctttccagtcccacttatctgaagagccagattctcaaagcacaagtaaccctagaggggagtatcaatgggaaagctatggattccttgccacatccccgttacagaactatgcttgttaagaacagaatctcaagaaaacatatcaagaggttgaatgaagacatttctctcttctgtattcctgatctcctggggttacaagagcacaggtttaggcaaacatagccgatttctctctaaggtgtctcttcacttcttgatgcactggagatccttgtggaataatacattagtgataatgagtgttgggtgctcacaaatcacccacaattcattggctgaaggcatcttaaacgtggactttttggcttttattgtctttagctgcttcttttaacatactttagtttgagtgtacagatttggggttttcaaacttgtttttaattaaggcatggtttatttttattgcttgagataaaatgcagtctgagggtcacaaatgtaatttacaaaataaagtgcatctgggcagaccataagaaaaaaaaagaacagaaagcctaaataaagagtgggccaggattcttaagtttatttagtaacttcttggagaataaaaatcccagcacctgcattataaaaaagcacaccttataagtgtccttctcttcgaaacacctaagtgaactacactgaattatgaactaactaatggtttgtaaaaattcgccttgagcaagctattgaagatactaaataaacgaggctgagacagagtctgaggaa

SEQ ID NO: 149952 - DNA, 1089 bp, Homo sapiens
aatttattgggtctatctttgaccacgtgataccacttacctgattctatgtactgattaatgtatctaacagttttatagtgaaagtactttttaaaaaagtatttgaatggtcatttctatttttccccctttgctgtacaagttaatttttactcatcttttgctgtacaaattaactttcatcaatacaaataagaggctagttttaagtcaatttatttgtcatgagcccaggaacaattaaattctataaagtaatgtattaaaatagtacactttaaaaattattttccttctttttttctctttaaattttaagaccatcataataaattatcattacaaagtcaaacatactatatactactatcagtcaatggggaaaaaataagtcatatgttttatggtaaaatgctgtaatagattgggattgtcaaatttgcttgaaaaaaatcacagcagtttttagtttttcttatttgtagattacacgttactcagaaaataagtatcaaagtgctaaaagtaataggtgtaattgctgttatttgtcaaaatcagtttacatttttgtgggaaatacagaatcacaaatatttctttctggcattatgtcctgagttaaattctagaaaatttagcaccttttatactcatatagctgtgacaataactttaaatatgtgaacattaggaaattcaaagcttatatattcttagaagctaattttgaccacgtgcgcaaattatttttcttttttagtagaatggtgcattttttgcctttgtatttgaaatttagctaaattacaatagctatcagaactacaattgaccttagtaatttcaaaaccatagttataagggttttaagttgatttttaaaaatcttaagatatgatagggatttcaaaactatgtgtgtgtatctctgatagggaggggttggggcacagactaataagtgtgccaaaaatctgtgaatccaaatgtgtaacaagtgttgtctgaataaatgtccacaaatccatgctattattggttaacaaaaaataaattcactttgaaatgttgctgaatttggga

SEQ ID NO: 149953 - DNA, 272 bp, Homo sapiens
cagagtctccctgtgttgaccaggctggtcttgaactcctaagctcaagtgattcttctaccttggcctcccaaagtgctgggatgacagatgtgagccactgcacttggcatcatggagtcttgatttgtagacattgcattaaaacttattttggtaagggctgggtgtggtggctcacgcctgtcatcccagtgctttgggaggccaaggcgggcggatcacaaggtcaggagttcgagaccagcctgaccaacgtggtgaaaccccgt

SEQ ID NO: 149954 - DNA, 507 bp, Homo sapiens
tcagccctcagagcacttcatcatgtctggacccgtgaatggggtggcagtgccagggagtgggttctcccagtgtctggctccaacagctggtttactgtgatgattctatttgtgttccctgtgttctgtttggcttggcagcagggaaggaagagggcaacaggttcactccagtttgtactgggttgttcctgcagccacacccgggcattaaagcaggcggcttgcaccctggatgcctttacctgggggcccttggtgtgcaaaagcaaagcgtgggaagtatttccttttcatgggccagccaggtgtggctggcatttcacctattcctgtattactaacgtcatccagattcaggtcaaagggcaggtttcctagactcccatcacgctgagatccgggatcaggggatggttgatcaagtccatttgggctggattacctgagttcctactactcatggacacttaactcctgcttctaaaacaaaatctgtccagg

SEQ ID NO: 149955 - DNA, 152 bp, Homo sapiens
ttgttcccctcaatgcccttggtgcctctaaggtctgacttgggtatcagaggacaatgatatcctctggggcctgcgttatgggtccagggcctcaggaaccgggcttcacaggggctgggagaagcagtgaagaccttccatgctagacc

SEQ ID NO: 149956 - DNA, 733 bp, Homo sapiens
agcctgggcagcatagcaagatcctagctttacaaaaacaaacaataacaacaaacaaaatggtaattcataggcatgagttaaccacatatggggtggggatgccctagcctcacaatggccctatgagggctttggactctgaaagcgaagtcaggtgcggtgttgtgtgtacctgtggtcccagctgctcaggatgctgaggctgaggcaggaggccaagactgcagtgagccatgatcctagcactgcactccagcctgggctggagtaagaccttgtctcaaggaggggtggggcttgaaagcgggccctgggccccacctcctcacatccccagtccctgatagcaccatcatgtgggcgatgcctgtgtaaccccaagctgtatcataaagctggacaacaaagacagctccctggggtccactgtaatggaccaaggtctgtgcgtccttcctttccacatccccctaaagttgacaacagtagtacatggcacgatggatgttgtcttggcagggagcttataactcagcttaggccagatccaggagggcaggtcagtccttgaggatgggcagcagggaccgaggagggcccttggcgtcccccaaccttcgtttttctcaccccggggataaggctcagaggcggtgccagggaaaggcccactttgggcctactcacagcagcgatattgccactttccagaggtggtgaactgattccc

SEQ ID NO: 149957 - DNA, 262 bp, Homo sapiens
tgttgggattataggtgtgagccaccatgcctggctttttaattttttgatgcctatttttttttcctgcagtaagcaacaaatattttatagaattatttgggcagtgggattatttttcttcgaattttctgttttaaacattttaatgatactttctttctctgacattttgttttgaaaatgttcagatccatcaaagaatggaagggaaagtacgataaacacttgtttagtcgtcaccgagactcaccagtggtta

SEQ ID NO: 149958 - DNA, 4313 bp, Homo sapiens
  misc_feature (1880)..(1880): n is a, c, g, or t
  misc_feature (1943)..(1943): n is a, c, g, or t
tccggatgctgagacaggagaatctcttgaacctggagggtggaagttgtagtgagccgagatcatgccactgcactccagcctgggtgacagaacaagactctgtctcaagaaaaaaaaaaagaaaaaaaaaagccaggtttggtggtgcacacctgtagtcccagctactctggaggctgaaatgggaggatcacttgagcccaggagtttgaggctgcagtgagctattattgcactactgcattccagcctgggtgacatatcaagacctgtttgggagaaaaaaaaaaaaaagaaaatgcagacagaatgtgggactgggcaccaacaacatctctacaagaggtgaacaagacggtcctggtctttgccctcacgcagcacacggaccagggtggtagaccagagtgtgccctcagtgttatttccactaataacgacgtttcctcctctgtccttcgcagaaccaaatctgtttcttccatgtctgagtttgaaagtttgctcgactgttccccttaccttgctggcggagatgcccggggcaagaagctgcctaacaaccctgcctttggctttgtgagctccgagccaggggatccagagaaagacaccaaggagaagcctgggctctcgtcgagggactgcaaccacctgggtgccctggcctgccaggaccccccagggaggcagatgcagcgcagctacacggctcctgacaagacgggcatccgagtctactatagtcccccggtggcccggcgcctcggagtccctgtggttcatgacaaagagggcaagatcattatcgagcccggcttcctcttcaccacagccaagcccaaagagtcggccgaggctgatgggctggctgagagctcctatggtcggtggctctgcaacttctcacggcagcgcctggacggaggctcagcgggcagcccctcggcggccgggcctggcttcccagcggccctgcatgactttgagatgtcaggcaacatgagtgatgacatgaaggagatcaccaactgtgtgcgccaggccatgcgctccggctcactggagaggaaagtgaagagcacatccagccagacggtgggcctggccagtgtgggcacacagaccatccgcacggtcagcgtgggcctgcagaccgacccaccccgcagcagcctccatggcaaggcctggtcaccccgcagctcttcgctcgtgtctgtgcgcagcaagcagatctcctcctccctggacaaggtccattcgcgcatcgagcggccctgctgctcccccaagtatggctcaccaaagctccagaggcggtctgtgtccaagctggacagcagcaaggaccgcagcctgtggaacctgcaccagggcaagcagaacggctcggcctgggcccgctccaccaccacgcgggacagccctgtattgagaaacatcaacgatggactctccagcctcttcagtgtggtggagcactcagggagcacggagtctgtctggaaactaggcatgtctgagacgcgggccaagcccgagcctcccaagtacggcattgtgcaggaattcttccgtaatgtgtgtggccgggcaccgagccccacctcatcagcaggagaggagggcaccaagaagccagagcccctctccccagccagctaccatcagccagagggtgtggccaggatcctgaacaagaaggcagccaagttgggcagcagtgaggaggtcagactcaccatgctcccccaggtggggaaggatggtgtcctccgggacggagatggagccgtggtccttcccaatgaggtaggtgggtgggatctgtcctttctcttagtaggtggagttagtatataaggtccaagctnttttggtttttaagttcagagatatgggccgaggtgggtggatcgcctgagatcgggagttcnagaccggtctggccaacatggtgaaaccccatctctactagaagtacagagattggccgggcgtggtggcatgcgcctgttgtcccagctgctctggaggctgaggcaggagaatcacttgaacccagtaggcggaagttgcagtgagctgaaattgtgctattgcactccagcctgggtgacagactaagactccgtctcaccaaaaaaaaaaaattatctatctgtctgtctgtctgtctgtctgtctgtctgtctgtctgtctatctatctatctatctatctatatatctatatatataaaataaaaattcagggatatggccatgtgttccaggaagttcttatgctggtctaggatagagttggaaggtcccagacctggaacaacacagacctgatggtcacatggtctgaattccaagagactagtgagcatggcttaactagcagcttttgctccacccaccagagactgccagcatcccctccagggaaggggccttactgctctcctgccacccagtggtgtgctagagccagcttgtttggcttgcaggagccaattgtcagcatctctgtgggtttttttttttttattgtttttgtttttgttttgagagaagtctcgttcttgtcccccaggcttgagtgcaatgactcaatctcggctcactgtaacctccgcctcctgggttcaaacaattctgtctctgcctcccaagtagctgggattaaggcacctgccaccatgcccggctaatttttgtattttttagtggagacggggtttcaccatgttggccaggctggtctcgaactcccgacctcaagtgatccgcccaccttggcctcccaaagtgttaggattacaggcgtgagccaccgcgcctggccacatctctgtgtttaacatcaccttggtaccttgagattggccacagtgggaggatttacagcataaaaattggtaaacactacaaatcggggctcctcctatcactcctggaaaactaattgttaaacattagcgggcataccacttctccaccccatcaagacttcacacctaagtgctcacatttcctctgagaatctttcacaccccactcctgctatcagtttcttataagttaattagtaaaccttatttgaatgttagtgagcattatttgaatgtgttagaatgtgcataagttaactttgcagaaagggaaggaaatgtatttgaaggatggcatgttttataaaacccaagagtaggaacctgacaacctcagcagcttctccctgtcttcctctcctctctttaagcttcaccctctctgatatcatattcctcctttttctctgtttctctctctgttgcatttgcacaaggactgggtgggctgtcccagctctgactttacaacatcttccagttcaagcccctaggagagactgacacaaatccctgtctcccaattccacatttctgaaagaaggaaactctgattggtgcagctagaggcgagtgtaccccttggtccagtctatggctgggagtggtaccatgtggtctgctgtggggcacagagacatgagaagggctgtgtgtggaatgggctgtgatagactcaaacattctacttttctattattgtacgtttaggtggtttctagtttgtccctactgcaaataatgctgtggtgaacatcttggtgcaaaatcatttttttacatttcagactatttccttaggtataagttgcagaaatgagattaaaggataatagaatataaatgtggccgggcgcggtggctcatgcctgtaatcccagcactttgggaggccgaggcgggtggatcacaaggtcaggagtttgagatcagcctggccaatatggtgaaaccctgtctgtactaaaaatacaaaaattagccgggcatagtggtggtcacctgtagtcctagctactcaggaggctgaggcaggagaatcgcgtgaacccaggaggcggaggctgcagtgagctgagatggtaccactgcactccagcctgggtgacagagtgagactccatctccacacaaaaaaaaaaatataaatgttttaaagttatttgataaatactgccaaattgtttttcaaaagtgtgccatatctacagcttccagcagtgtgtggcgagtgcgttacttttctatactctcactcagctggctgacatttaaaaacatcttttaaatatttattccttttttggccaggtgcaatggctcatgtctctaatcccagcactttgggagactgaggtgggcagatcacttgagctgggagttcaagaccagtctgagcaacatggtgagagctcatctctacatt

SEQ ID NO: 149959 - DNA, 3530 bp, Homo sapiens
  misc_feature (1880)..(1880): n is a, c, g, or t
  misc_feature (1943)..(1943): n is a, c, g, or t
  misc_feature (2920)..(2920): n is a, c, g, or t
  misc_feature (3040)..(3040): n is a, c, g, or t
tccggatgctgagacaggagaatctcttgaacctggagggtggaagttgtagtgagccgagatcatgccactgcactccagcctgggtgacagaacaagactctgtctcaagaaaaaaaaaaagaaaaaaaaaagccaggtttggtggtgcacacctgtagtcccagctactctggaggctgaaatgggaggatcacttgagcccaggagtttgaggctgcagtgagctattattgcactactgcattccagcctgggtgacatatcaagacctgtttgggagaaaaaaaaaaaaaagaaaatgcagacagaatgtgggactgggcaccaacaacatctctacaagaggtgaacaagacggtcctggtctttgccctcacgcagcacacggaccagggtggtagaccagagtgtgccctcagtgttatttccactaataacgacgtttcctcctctgtccttcgcagaaccaaatctgtttcttccatgtctgagtttgaaagtttgctcgactgttccccttaccttgctggcggagatgcccggggcaagaagctgcctaacaaccctgcctttggctttgtgagctccgagccaggggatccagagaaagacaccaaggagaagcctgggctctcgtcgagggactgcaaccacctgggtgccctggcctgccaggaccccccagggaggcagatgcagcgcagctacacggctcctgacaagacgggcatccgagtctactatagtcccccggtggcccggcgcctcggagtccctgtggttcatgacaaagagggcaagatcattatcgagcccggcttcctcttcaccacagccaagcccaaagagtcggccgaggctgatgggctggctgagagctcctatggtcggtggctctgcaacttctcacggcagcgcctggacggaggctcagcgggcagcccctcggcggccgggcctggcttcccagcggccctgcatgactttgagatgtcaggcaacatgagtgatgacatgaaggagatcaccaactgtgtgcgccaggccatgcgctccggctcactggagaggaaagtgaagagcacatccagccagacggtgggcctggccagtgtgggcacacagaccatccgcacggtcagcgtgggcctgcagaccgacccaccccgcagcagcctccatggcaaggcctggtcaccccgcagctcttcgctcgtgtctgtgcgcagcaagcagatctcctcctccctggacaaggtccattcgcgcatcgagcggccctgctgctcccccaagtatggctcaccaaagctccagaggcggtctgtgtccaagctggacagcagcaaggaccgcagcctgtggaacctgcaccagggcaagcagaacggctcggcctgggcccgctccaccaccacgcgggacagccctgtattgagaaacatcaacgatggactctccagcctcttcagtgtggtggagcactcagggagcacggagtctgtctggaaactaggcatgtctgagacgcgggccaagcccgagcctcccaagtacggcattgtgcaggaattcttccgtaatgtgtgtggccgggcaccgagccccacctcatcagcaggagaggagggcaccaagaagccagagcccctctccccagccagctaccatcagccagagggtgtggccaggatcctgaacaagaaggcagccaagttgggcagcagtgaggaggtcagactcaccatgctcccccaggtggggaaggatggtgtcctccgggacggagatggagccgtggtccttcccaatgaggtaggtgggtgggatctgtcctttctcttagtaggtggagttagtatataaggtccaagctnttttggtttttaagttcagagatatgggccgaggtgggtggatcgcctgagatcgggagttcnagaccatgttggccaggctggtctcgaactcccgacctcaagtgatccgcccaccttggcctcccaaagtgttaggattacaggcgtgagccaccgcgcctggccacatctctgtgtttaacatcaccttggtaccttgagattggccacagtgggaggatttacagcataaaaattggtaaacactacaaatcggggctcctcctatcactcctggaaaactaattgttaaacattagcgggcataccacttctccaccccatcaagacttcacacctaagtgctcacatttcctctgagaatctttcacaccccactcctgctatcagtttcttataagttaattagtaaaccttatttgaatgttagtgagcattatttgaatgtgttagaatgtgcataagttaactttgcagaaagggaaggaaatgtatttgaaggatggcatgttttataaaacccaagagtaggaacctgacaacctcagcagcttctccctgtcttcctctcctctctttaagcttcaccctctctgatatcatattcctcctttttctctgtttctctctctgttgcatttgcacaaggactgggtgggctgtcccagctctgactttacaacatcttccagttcaagcccctaggagagactgacacaaatccctgtctcccaattccacatttctgaaagaaggaaactctgattggtgcagctagaggcgagtgtaccccttggtccagtctatggctgggagtggtaccatgtggtctgctgtggggcacagagacatgagaagggctgtgtgtggaatgggctgtgatagactcaaacattctacttttctattattgtacgtttaggtggtttctagtttgtccctactgcaaataatgctgtggtgaacatcttggtgcaaaatcatttttttacatttcagactatttccttaggtataagttgcagaaatgagccacngtgcctggcagcagcacttttgatcattatttctgtttattggtaatagtaaaaaattagaaactacccagatgtacataaaaagtgaattggggccaggcacagtggctcacacctgcnatcccaccactttggaaggccgaggcgggcagatcactagaggtcaggagtttgagcctgaccaacatgctaaaatcccctctctactaaaaatacaaaaattagctaggcatggtggcacacgcttgtaatcttagctacttgggaggctgaggcacaagaatcacttgaatccgtgaggtggaggttgtagtgagtcaagatcgtgccactgcactccagcctggggaacagagcaagattctgtctaaaaaataaaaaaataaaaaaagcgaattgggtatataaatcagttatttctatctagtgaaatggtacagagacactaaaaaagaaggcgatcagccaggcatggtggctcatgcctttgggaggcatgagcacccaaaggtgctaattccagcagtttgggaggctgaggcaggaggatcgcttgagcccaggagttcaagaccagcctgagcaacatagtgagaccctgtctcaaacg

SEQ ID NO: 149960 - DNA, 250 bp, Homo sapiens
aaaccaggcaaatagaaatagaaaatcagaaagaggtgacagagaagggtagacagagtcaaaccagactgaaccactgtggcagatgggggaactcagagagataaatggagatgaattagagtcatgtcagaagtacatagtggaggccgggtgcagtgactcccgcccgtaatcccagcactttgggagacgacgagaggggaatcccaggagttcaaaacttgcttagccaacgtggcaaaacccc

SEQ ID NO: 149961 - DNA, 281 bp, Homo sapiens
ggatggccaggcctgcaggtggcatgcactcaacaagtgggccgtgggtgcacatggacaggcggccagcgtgcaaatgcccctgccgtctctgcagtcaccagacgtggcagaagcctctccctcggcctctgtcccctcgtcatagtcaccgtcctcaatgctcccctctgtaagcatgccagtttcctttcccaacctggggaaatctaggtcacttctttcttacttttttcattttaattttctattataaatgatgcctcctttctgggctgatg

SEQ ID NO: 149962 - DNA, 176 bp, Homo sapiens
agaaacaccaaaaagtatactttggaaatttgaagaagtgggagacctggctggaggggtgagggaaggtagcatggcagaggcaccacttgagctgggtcttccttgggaagagatgtaggatttgtacagacaagtgacggagaaggagatgactccgggaagcaatacgcagc

SEQ ID NO: 149963 - DNA, 471 bp, Homo sapiens
tttagagaccagatgaaacactacccaaaagtttctgacaaatttaagaggatatataggccaaaaattaagatggtaatgagaaagtttaccttgctatatacaggggatcttgagatgaaagtgtaggaaggaacatgggaggttttttaaattttgaatattggaagggctaacatatggaagagggcatatctgttcactctggagggcagaactcaacctacaggtagatgtgatggtgatgccaacttgaattctgtaataagaagaaaactccttgcagtctcagctacttaggagactgaggcaagatcactagagcgcaggagattgaagctgcagtgagccatgatcacaccactacactccagtctgggcaacagagtaagaccctgttgctaaaataagttttaaaaaataaaataaggctgggcacggtggttcacgcctataataccagcgctttgg

SEQ ID NO: 149964 - DNA, 707 bp, Homo sapiens
tgaaaaggagaaaagaagtttttatttcttagggttacagcctgccaggtggccaacctgcaggttggcctctagtcaagaccaaagacaggcaccatgaaggaggaggggttggggtaggacatacatattcaacaggttacaggaggagttacgaatattcatcaaggggtcttgccacatgggcattgaacaaacgtgcatgtaacatatgatccatgttcactttagggtggagacaacattcaaatgcattgcaatcaggccgtacatgtcaaaaggtcttttcaggacatgaagtcctgacagtgtgcagcctctggaatcattccacagtcaatggtcttcttatatgaaaaaaagctactgaaatcagtctcttgtccagtcaaagctggagtcatggcttgtggaacagggggtcacttaatcagggtccagcagtggatgagctgcaaattctttcactagtgcttatctccaggccagtgcttatttagctgctagagaaagacaaaaaaaaaaaaaaaagctatggcagtgagaacaagcttattcttcaagggtaggtaagtgacttaaacctcgcctgccatgggtttaggttctgtttataatttgatatcgtattgtcagagagtctgttctgccattcttataatctgtattttaacatctatgctggtcagttgtgtctaaaccccaaa

SEQ ID NO: 149965 - DNA, 791 bp, Homo sapiens
gctcatttgaggaagaggagagagggcctcccaggcagaagggacatgagcaaaggcctggagccatgaacaggcctgatgtgtccagaaaacggaggggaggatggtcccggggtggggtgggcgggcgcagctggaaggctggcgagatggatggaggcccggcagcgggaggcctcgcccaccctatctgggagcccacctagcctgggagcctgggactcatctcctgggctctgaggggcccacaagaggtgttagtagcatctgagtgacatttggtcactttctctgggttcttatttctacttttttctaagtttaggagaaaagcacacatcctgtttgtcaggttctccagcactttggtctttccttcagaaatatcatggtagaagattggaactgcaattctgccggtgacattagagatccctaaacagagcctttcagaggagaagtgaagcctgtgtctgcttcttcctctcccacagctgagcctgttctcctcgccatcaggagaggaaattctcataataagatgatattgttggattaaaacaggtcgaaaagaaacaaaatcaatattttgcaatttgttttattatacagagctcctggactttgcttacagacattttggctcacttccagccccttgtgacaaatgactatttcagggagagttaagatgtctctcacaagctggaggaaatctccagaacgaattttagatgataaaagtagctgggcttgacgatttttgctcaggttaaaaaaaaaaaaaaaag

SEQ ID NO: 149966 - DNA, 608 bp, Homo sapiens
tttcaaatggcctgtcctagcatataaaattaaatttcactgtcaagtgatgactccctagatagactcagcagacttcccagggtttcctgattgagcgactgtaggtgtacaaagttaaaatccttcattatatatcaccagattttacattcccttattagtcttccacccaagggaattctcctctgtggcatactttagtgttttgtttcttttttctaagtgcctgagaatcaaaagatcttcattcttattctaggccaaccacattctaactgtggatacaggcatgtttaacctctgcagatactagcctcttcacctacaaagtagttaggcaatgtttagggttgccagatcaaatacaggaagcccagtgaaatctgaatttcagatgaacaaaatttttatagtataaatattttctgtatttctatctgagaaatttggcaatgctagctgaatgaattctcaggcccctcaatctcagcatggtcttacttcagaagatacaactaacaataacaatcacaatagttgaattatttaagatttactctgagccaggcactattatcagtgccccaacatatattatctaagtt

SEQ ID NO: 149967 - DNA, 187 bp, Homo sapiens
tcgccaccaaatacttttggatatagtgattgtttcagaattgccatgtcaaacaaggcaagctagtcaaagccaatccaatgacactcaaatctgggtgttttgtttttttttttttttttttgctttgattaaaaggaatgagaaattatctccttccactggatttgtggagaaaatgaaaatc

SEQ ID NO: 149968 - DNA, 124 bp, Homo sapiens
gacccccatcaacattctgacctcatctaccactttccctctcatttacctgactctagccacattggtctccttgctgctctttaaacaagtcaagcatccttctgcttcaagacctttgcat

SEQ ID NO: 149969 - DNA, 287 bp, Homo sapiens
tgaagtcagaaggttaaatacctcagcatactctactcctccaaccaggtccaaggatcaggccaaaactccctgatgtggtaaacagcctggcgctccttaccagttatgcaacccaccatcctacttccccacattcaagcaatattttagttcatgcacccagccatgctcagctgtttgtcattatctgagcaaccatggtctctgtcatccctatacctttacctactcttctctatgcccaacatgtggaattccccttcagctgtaagttggtcatcact

SEQ ID NO: 149970 - DNA, 174 bp, Homo sapiens
tgtggtcctggctacttcagaggctgaggcaggagtattgcttgagcctgggagtttgaggctgcggtgagctatgatgatgccactgtaccccagcctgagcaacagagcaaggccctgactctaataaataaatacatacatacataaaagataaaaacagttccctccact

SEQ ID NO: 149971 - DNA, 361 bp, Homo sapiens
gaaattaaattgtttgttaatgctacacaaatttgatagtcttcaaaaatccttctttactataagacaagtaatcattttaagtaaaaaaaagtaaagaaataggacttatcaataataatatttctgaaagtttataaacattgattcacatccaacaaaaccattgcagagaagcccataccttaatctagacagcataataaataataaatgtcctaaaaatttgtatatcaatttttggactagcaaataatctgaaatacatttctagaaacaagaaactcttttagctactcctctcacactggctaaaatgcttagatcacaggatgggcatggtggctcttgcctgtaatcc

SEQ ID NO: 149972 - DNA, 251 bp, Homo sapiens
tagctgttagtctccatcttcctcccatccatctgtgtctactcagaccttgagctccttgagggcagtggcttagtcatctttcagtccctgcagcaccagcacagtgcctgtcatgcactgtcacttagtcagtacttagttaaaggaactgaatagtttgtgcaacattccctgtctttgtctgtgttacggccctggcctcccagaattgtgggtgattcaggggaaatgagagccacatgtttctg

SEQ ID NO: 149973 - DNA, 525 bp, Homo sapiens
aacatctgcctaataaaagtctccataatcaaagttatgagacatttctacgtgctgggtggagatatttgctgtgttgtcagacatattcctactggattctttttttcatcctgagactttcttttacatgatcactaccaatcttctgtcaatctttcgacactgttctcctttctgaaaatgcatataggtggtgagcacacgtgtgtgcttttactattctttaaacatgtcatactcatatacttttatgtgtatgatttattgtgtaagaagaaggcacatgactggctgataaacaaggaccagctttatcaataaacaagaaaatgcaaattaaaacaaccaaatatgattccaaactcagcagattagcaaaatttgataatcctcacaataccaaaggcctagaggaactgtccatcttatagccttctattgggagtgtatatagttactgccactttggagggtaatttggtagtttccaatgaaaacaaaaattgtatgctatgtgatttg

SEQ ID NO: 149974 - DNA, 456 bp, Homo sapiens
tcagaaaaacagtgcaaagtactgaaaatttgatcccataaataaaatagtcagtagaagatttggaagataaggtcaaggaaatctacctggaagaggaaaaaaaataaaggtatggaaaatcagagagaaaatagaaaagcagaagatccatctaggaggcccagcaaaaggaatagggagtagaagaaatggaggagagtccattatcaaagaaataatacaaaatcacttcctaggactgaatgacctgcatctgcagagtttacgagcccattgtgcacccaatacaatgaatgaaaaaaggcccacgctaatttcatagtgatgtatatgaaggtaaaatcttaaaatttaggccaggcatagtggcttacgcctgtaatcctagcagtttgggaggccaaggcaagcggaacacttgaggtcaggagttcaaaaccagcctggccaaca

SEQ ID NO: 149975 - DNA, 611 bp, Homo sapiens
cgagaatccttttattaatatattcaggacctgcggcactttattttgaatacccattgtgacagccaatttttacctttgggggattgggagctatttaagttaaaaacaccgtgtgactctgctatgaatggaaagtttgtgtcccccaaaatgcttacgttgaaaccctaatccccaagtgatggtattaggaggtgggacctttgagagctaattaggtcatgagcttagagccctcattatgtgatcagtgcccttattagaagtgacagaagagtgcttttgatcctatcccacccaccatgaccctgccaacacacgtgaggctacagtgagaagctggctgtctgcaaaccaggaagaacctgaccatactggcaccttgatctcagacttcaacctctagaactgtaagaaatagatttctgtcatttaagctacccagtctacggttttttatgacagctcaagctgactaaggtcctaaaagcaacaatgtgtgtatgtgttttaaacaccagttgtgaagatgattcctgggatgttgcaacagcagacatgttcataccatatgactacaatttctccaagtgacttagttgttacgt

SEQ ID NO: 149976 - DNA, 260 bp, Homo sapiens
tttcccctctgcccctgagcacctgctgttacaagcaggtcagagggcctccaatgtcagcatctgcgactgtcccccgtgtcccatgttcccgaggccctcaccacctgtgctccagctcagacccaggagcacggcaggtggaggaacatcagcaggggagactgatgttccagactcttctaccccctgttcacctcttcatctatgcggggaaagtaacagcttccacccacctcgcccaacaaggaggctaagtg

SEQ ID NO: 149977 - DNA, 106 bp, Homo sapiens
ttgtgaaacgttaatagtgtaattttcttcttacatagagtgagattcattctatctaatctattgaatctacctaccttatctatttatctatctatgacaaggt

SEQ ID NO: 149978 - DNA, 199 bp, Homo sapiens
ggacctgggggcggggactgggtacatggagctgggtgagaggggttgggttttgactccaaatactgccagagaacatagaaaagcacttgaggttcccagagcagtgggatggacatagtacattaatttagaaatcagaaaccctaaatcagtacattaatttagggtgtggtggctcacaccagtaatcccagca

SEQ ID NO: 149979 - DNA, 263 bp, Homo sapiens
taaatgttggcaacaggctccagatcatccaacacaagtttaagctctcaacagcactcaaattaagtctaaataaggccaggagctttcatgaaatgcaatcaccggacaacactgaacatgggggatttctcaagcacatatcagcattcaagtctagaataggaagtataggaccttaatcaaaactgaaagcacagataatttgggtcagaataaaattacattctctagctggattcccaccaaaacaccactctcat

SEQ ID NO: 149980 - DNA, 412 bp, Homo sapiens
gagatacctggccagaagaggtccaccgcaactgctggcctgacacttgctctgacccaccgcaactgctggcctgagtctactggggcctgagggaattgtcgtgtgatgacatcacatttattgggcatctgctttgtccctggcactaggctcaaactcaggacagccagcccacatccagtgtttcctgcaggcctggcaccactcccaatgtcaacttgtctcatcctcacaacagtctttgaggtagcatcagtcattatcctgtgcacagaggagtccacggccaccatggcaaaatcacttgcacgaggtcacacaccggaattggaacctggttgtctgagtagacattgtccctgaactacactgggtgtctgggtccactccgttttggagatgagacctc

SEQ ID NO: 149981 - DNA, 203 bp, Homo sapiens
ctgggtggcagagtgaggctctgtctcaaaaaaacaaagcactgagcaaaatacgtgaaagaatagttttcaagactttggatatgaagcagtaaagaatggtgattcctgagaaataggaatcaaccgaagtatccctgtggttgtttcagcttactgcctagagagattttccagactacgtaaaacagaaaaggggaacc

SEQ ID NO: 149982 - DNA, 710 bp, Homo sapiens
attgaagaagtgaatttagttgaattgaaagaggctaccacacaggttaaaagctgctccaaaagagaggacctttacaataatattcttaggaatatagtattttgcagctctcatattagtccactgtaggctacttacctctttctttcattctgtcctctcctctttcatgaagagtcaggtaaaattaatgtaggtgctcctagctctagtgaccaattactaatatttcctcccaactgaatgtggcatattaacactgagagcaaagaacttagtgtctacaaaataaagttagggctagataaagtcgaatgatggccagccaccactaagagtatatgcctccttctagtggcatgctcagtttccatttaatagagggtgatattgaacatacagtgaccacggattgatcatatacaaacatctgaccaggttgaactctcaatttaacatctcaattttaaatttttacaagttgagtttgacaatattttttgttcaccctgtattgtataaaattattttcagaatttattgtctattatcaaaactaaaagtatcctttgactttgaggaaaataggaaccgttagccaccatcttcagaataatgtaaaggctgattgataatcatccatcttgtttttttcctgctgtctggattccaggggtgtgtgtgtgtgtgtgtgtgtgtgtgtgtgt

SEQ ID NO: 149983 - DNA, 114 bp, Homo sapiens
tccgtttgcccacaaagtcaggaatgtaacctgcccaaccctgccccaggcctcctgacactgaatgccctttagctcactcttcactccgttcattcactcaacaggagttgg

SEQ ID NO: 149984 - DNA, 515 bp, Homo sapiens
tctgtaggcctcactgcatgggggagatcctggggccctcagggcagcctcccaaccccttttgctctattgcttccgtaaccctaaggtacacagctgtagggttatgtatgagtttgctggattgaaaataccatatgcagccttagggtcatgtaggagtttgcccggactgccaaaacaaagtaccacaaaccaggttgctcattgtagcagaaattcacctctcatagtctgggggccagaagtctgagaccagggtgtgggcagggccatgctccctccatacaagggtccttcccggcctcttccagctctcggtggccccaggcttctggggctcacggccgaatcactccagtctctgtctctgtcctcacgtggcctccgcccagtgtgctctcttaaaagtccacttaacatgggattcaggcccacctggataatctggcatgatctcatcttggaatcttacatctgcaaagatactttttctttctttcttttttttgaga

SEQ ID NO: 149985 - DNA, 107 bp, Homo sapiens
aacctagggaatgtccgtgttccgggcccattccctgccactatttttagtggtgattgggaggaaggaggacatttcctggactccccttcagaggctggaaaaca

SEQ ID NO: 149986 - DNA, 215 bp, Homo sapiens
tcttgccaggactctggacctatgggataaagggtgcctcctaactttgatcgaggttgaggcacagctagggattccaactgcctacagaataggagcctttccacagtaggaaatatgtgctcaagcaggagagctagagaaccaacaaccatgagacgacaggaagatcctaagggcaggggtttctttttttttttttttggagatagagt

SEQ ID NO: 149987 - DNA, 1293 bp, Homo sapiens
cctgcccggccctcgtcctcaggcttccccgcgcccccaaaccagcggtgccccgcgccccctctcctctcgcgagaacatccccctagccagccagagccgggagcgggggcagtcgctcccgggcgggaagttctgggtttccccctcgcccgcgtggcccttggcgggcacccgaggcccgggagcggaggctcctcgcccagccgcttcctcggcgcatccgcccacccgccctggccgcggacgcgcgcgccgccaggccccgggcgtctcctccagtccgccgcggccccttggggagatgggcccggcgcgagggctcgcacctggaagcccacgaagtgggcggtgcccaatgaggtagggaccggagagcgcggagcagtccagaagccgaccccaccccctgcacctcggggaagagggaacccgggtcagcccgtagcaagaatcattcctgactataccaggagaccacggcagaccaaaaacacctctctgaacagccttccgcaccgctcgctgcaagcattcgtccacacacggtacacagattgcgggcggatcgtaattcactcttgaaatcacaccctttttagggatattcgttttcaatgactttgggaaagccacgaggtactacatttactacgaagagaccgtttctttattttggaagtcagtgactcctgagactgcattggggacaacttttttgcacaatgaccatattttaccatgcagcgcacttcagaaaattataaaagtttacaagttttatcgcttctggaaacacctgggcagcatccctattatcccgccacgtggctctagccttgttgatgtacctgttactttctcccactgcaacatttttgttaatgtctgtggcttctttctgcagaagagttcctcctcctgacatgcacttcattctctgcttttctatgtcttgacaactctcttatggtagtcattttcttatactgtagccccctggtatttatgtactgtgtggtattaatatttatacttccaggttcacatcttttatgaactgtgcatctgttgggattgtggacaggagtaggaaaccaaataaaagggttttttaaaaaagtcagttttctccgtttgtaagggaaacttgtttccctgaccaccctggagcaaaatttgccattttaagataacacagtccgtctgagagaaagtcctgcaccatgcctttccccttttcccatatttcccagcatgctatgagctgatgaataaacagactttgtccta

SEQ ID NO: 149988 - DNA, 244 bp, Homo sapiens
cagtgctccccatctttactcgcctggagactttactggacaaaagtctggcatgagaggggctgtctgctgttgcatccagacgacaaatattccttgtggaggaggagggtgaggacccattagaatccctaattgagaaaagcatcacgtctcttgggcaggaaggagtggctctgtgtgtgctaagatgctgttcctgattccccatgctcagaagctcattttctgacgattcctgatc

SEQ ID NO: 149989 - DNA, 828 bp, Homo sapiens
ggaagattgcttgagcccaggacttcaagacaagcctgggcaacagagtgagaccccatctctattaaaaaataggccgggcatggtggctcacactggtaatcccagcactttgggaggccgaggcaggtggatcatgtgaggtcaggagttcgagaccagcctggccgacatggtgaaaccctgtctttactaaaaatacaaaattagccaggcgtggtggtgggcgcctgtaatcccagctactcaggaggctgaagcaggaggatcgcttgaacccaggaggcagaggctgcagtgagccgagatcatgccattgcactcctgcctgggtgacggagcaagactctctaaaaaataataaggtaaaaggagtacctgtggatgaaagcagcagctaacagctctgtgattcagctagacctagatattgtgcccattccttcccctcagtccattttctgtagcccctttaaaaaccaaaaaacaactttgaagtcactttgggtttaaaataaatagtggtaatttgtataatcaataaagagttcactctgctcttactgaggggacttgtctgaaagctggcttagcggtgtccaggccagagaacatcctgtgtggactcttaacaatgaaacaggagccgcaatggacaaggtgttctgatctccaaacccagctcagggattgaagctaactaccgccactccttcctctctcgaagaacaaagagccagtacccagggctctgcccacccccgagaaggggtgcctgatttcttatgtctagggtggctcctctgtgcagatcagacaggactgaga

SEQ ID NO: 149990 - DNA, 318 bp, Homo sapiens
cacccactaactcccgttagtaaggacaggctggagaaaagaaatgataaatcctgccttactggtttttggttgtgagggaatggtaggataaacaaaggggtaaatgaacctggatatggggcctttggggtcatctacaactcttctattacccctctatagaatctgtctccaagttactttttttgtttaagcattttttttttgtatccatccttttatctcctctcttacaagtatgccctccttacattatacctggactattacaaatgtccccagttcactgctgtcttccagtttccttccactcac

SEQ ID NO: 149991 - DNA, 535 bp, Homo sapiens
cactggcccatttggtgcctccctcactgcgaatgctggactccacacgctgtctcccccgagagcctgatccagcagggtgtagacccctctgtgcccacgagatgatttataacttgggggtagtgggacaaggtatgaccatgcctgagcctgatagcctgaaagatgtctcaggagtgtttctagatatgcgtgtttcatatagtgtttcatagcgaggctggtggagaggagaggagcctgccttacaggagttggaaataactggttatcatgaccaggttgtctccagagggagaagatgggccagtgggcatctgagcgctcagcgatggagaaacctccttctgcctgtctcttctgagaagtcagggtgatgggcagggagtgtcttaaatctctgcttggccctttaaaacaggcagggccccagactgtactaaagaggaaaatcttgattgatttttatacagtgtcaacttgagaagaaagtaaaaggacattgttaaaaagcaaattcttgtgatttcag

SEQ ID NO: 149992 - DNA, 308 bp, Homo sapiens
ggacaggccaggaggtgtttgctctgacttacatgtttaaagaaaaaaaacaaaaaacaaaaaaacaaaactaattaacctagccccagggttctaagtctttgtactaaacgggtaataaaatcaaaccactctgcaggttctaggtcaggtttaaatggctaccaattcatgaaactgtaactggggattcaggcctgaggaatactaatcacttgtcgcagagtgaaacaggcccaacagaggagacgctcatatcagaaggtgagaaaaaggtgctgcaaatggtcattcctgagactttcaat

SEQ ID NO: 149993 - DNA, 507 bp, Homo sapiens
ggatgtttagtggcaaccatgcttctatccaccaggagacattagcatctccttagctataacagccaaaaatgtctccagacactgccagatgctctctgggacggacagagggaaggagggagagagagggagggaggcaggaatggagggagggaagagtgaagttgtcccccaactgagaaccactgctttagatagagctttctaaacttccaatggcttctgagtgtgacatgagtcccaagactagccctcttttttttccatccttccctccttcacctcactccctccttccttccttcttttccctacagtaagagctttgaatattgatacaaaatccaaagctccaagaaaaagacataggatactgaggcccagggaagtaatagatgtacaagcctggtgcacatcactgacaacccaggggaaaacagccagcaacatcaggttctcaagataggtcctgtctctggaaactcaatttcaggaaggcctgct

SEQ ID NO: 149994 - DNA, 122 bp, Homo sapiens
gtgctctagagtgttcccctgagacgaccttagatggaatgggtgttctaatttgaagaattccttaaaaggattagaataaatagggagaaacaggagactagaacttcagtgccaaatac

SEQ ID NO: 149995 - DNA, 285 bp, Homo sapiens
ataaaaagtgaaaaggccagactcatcttaatgcagaacaacttcagctccaaagctcctccgggttcagctgggacttctgttgcaattgcattaaagagagagggagtgagagagggagagagagggagagagacagagagagagaaaagagaaaagagaggagagaggaaagaggggaaaggggagaggagagaggagagagacagagagagacagagagaaaagagaggagagaggagagaggagaaaaggggagaggagagaggagagagacagagagag

SEQ ID NO: 149996 - DNA, 472 bp, Homo sapiens
cctgttagccatctgtatgtcttcttctgaaaaatgcctattaatgtcttttgctcatttttcaatccagttattagatttttttgctcttgagctatttaagttccttattatcccactcacttgaagtgcttcagagaccctgggagagagggcagcaatgttgtgtgttctttctctgcacagtctctttcccacatgctaacatctccgggctctttgttctcccagagctggctgaacttgttacaagaggttggagactgtatcaaagtgaacactgtataactttatttcctttccagagtagcaatatcacttccgcaagcagaagtttggaaacatctcataatcctgaattctgccatgctatgctctaacctgaggaaaagatgggcacctccctagtagtgctcagagcccaggagctaacaatggcagccacatctgtgcccgccctttctggccacca

SEQ ID NO: 149997 - DNA, 244 bp, Homo sapiens
acgattgtgttaatttctgggagaagtacaggcagctctgagtgcataaaacagatgtcctgatgtagtttggaaactggggaaagtttccatggggaagtgacctttgaggtggacggtgaaggattaacaggagttactaggtgaagctcacgggaacaatattccgggcagaaggaacagatgtgaataccttgaggaagaaaggaacagggccgcttttgggaacccagaagccaggaac

SEQ ID NO: 149998 - DNA, 169 bp, Homo sapiens
tttccccctttgaggtcacagaagaaaccagtgcacctcccttatttgaagaacagcatgagcctccacgggtttccggggggatgcgtgcagcctgcacaaggaagggcgttcaggaggacccgaagatgtgcccttctgaccctcaacctttgcacactcttaactg

SEQ ID NO: 149999 - DNA, 391 bp, Homo sapiens
tgttatactccgtataaagcagcaaaccccatttacagcctttagtagtttattttaggatgctcagaaaacattaaaaattgatatagccctgtttgggtcaaaaactgtacataaccagatcgaggtccaagagactatgatgtatttcttggcttctctcaagatctctgggtcccctaaagcagatttgactttccaggaggttcaactatatagaacaattcttgaatcattttgagtaatttggaatcagactactttacaagttcctacagtacagaccctgtcctcatctaagaggttgaaggttcatggactgcgttaacacttttgtcaaggttacatctaacaggactatatccgttggctataaaatgccaagaactga

SEQ ID NO: 150000 - DNA, 534 bp, Homo sapiens
  misc_feature (498)..(499): n is a, c, g, or t
  misc_feature (501)..(501): n is a, c, g, or t
  misc_feature (503)..(503): n is a, c, g, or t
aggacacctgtcccagttgtccggcaaggctcttcaagactgcagaggaatgacagaatacagagatgcaatcaccaggaacatttgggagcacactgccagcacattcacaggtcaaaatgcagatcttcgtgaagaccctgactggcaagaccatcacccttgaagtggagcccagtgacaccatcgaaaatgtgaaggccaatatccaggataaggaaggcatcctccccgaccagcagaggctcatctttgcaggcatgcagctagaagatggctgtactctttctgactacaacatccagaaagagttgaccctgtacctggtccagcgtctgagatgtggctgttagttcttcagtcttgcatttgcagtgctcagtgatggcattacactgcactatagccatctgcccccacttaagtttagaaattacaagtttcagtaatagttgaacctgttcaaaatgttaataaagggttatgcgcccaggctcnncncncctcctttttttttctccccccactcccccc

SEQ ID NO: 150001 - DNA, 540 bp, Homo sapiens
  misc_feature (504)..(505): n is a, c, g, or t
  misc_feature (507)..(507): n is a, c, g, or t
  misc_feature (509)..(509): n is a, c, g, or t
tgcctacttaagccaagcagtattctaggcagtgagaatacagcaatgaaccagtcatgcaaaaattcctgacttcatggaacttaaatctccagtgaggagacacagagaagaaacaagtcaaaatgcagatcttcgtgaagaccctgactggcaagaccatcacccttgaagtggagcccagtgacaccatcgaaaatgtgaaggccaatatccaggataaggaaggcatcctccccgaccagcagaggctcatctttgcaggcatgcagctagaagatggctgtactctttctgactacaacatccagaaagagttgaccctgtacctggtccagcgtctgagatgtggctgttagttcttcagtcttgcatttgcagtgctcagtgatggcattacactgcactatagccatctgcccccacttaagtttagaaattacaagtttcagtaatagttgaacctgttcaaaatgttaataaagggttatgcgcccaggctcnncncncctcctttttttttctccccccactcccccc

SEQ ID NO: 150002 - DNA, 540 bp, Homo sapiens
aggacacctgtcccagttgtccggcaaggctcttcaagactgcagaggaatgacagaatacagagatgcaatcaccaggaacatttgggagcacactgccagcacattcacaggtcaaaatgcagatcttcgtgaagaccctgactggcaagaccatcacccttgaagtggagcccagtgacaccatcgaaaatgtgaaggccaatatccaggataaggaaggcatcctccccgaccagcagaggctcatctttgcaggcatgcagctagaagatggctgtactctttctgactacaacatccagaaagagttgaccctgtacctggtccagcgtctgagatgtggctgttagttcttcagtcttgcatttgcagtgctcagtgatggcattacactgcactatagccatctgcccccacttaagtttagaaattacaagtttcagtaatagttgaacctgttcaaaatgttaataaaggcagatgcggccgaaactactcgcttttatatttaccaaactaacttataacctacatcta

SEQ ID NO: 150003 - DNA, 188 bp, Homo sapiens
gtgagatgatgtcatttacagaaatagggatcacaggaggaaggcattaaatgaagatggaaatttccaatttctttgtactaagtctaaaatgttcacagaatattctgaaggcattggctggaaagcagctatataactagaacttggaagacagggtgtagtacaggttgagtaaacagccacat

SEQ ID NO: 150004 - DNA, 277 bp, Homo sapiens
atgcattgtactgacctatctccttccatccataaacttactcttactgaactttacttgaaagtgattcatagcctttactgggggctctattacaaatgctcctagcaagcttattgttgtgtctatcgcaagaatatgaagttttctaccactttgcagaatggcccctttactaagcccttcaggagatatttctgcctgtctttaagccaactctggatccatttttatggtacagaaggcttacacctaaatttgaagccccactgtgcca

SEQ ID NO: 150005 - DNA, 478 bp, Homo sapiens
atatatgatctctggttgttttgtgatcccaggatctactgagatgtatagcataagaagttatacacatcctggattttgtaagtttcccagcttctccattgttcttgagtatcatttttcagggcaatcataaaaatgggcagggcatgaagcattgcacttctaaaacttgcaaatctgaaacctggatttccaaacatatcagagaaagaagaaaaacaggtcctcactgccctataggacaaaccagaacacgacggccaggattcagctcctaaccaatcaaatagaggattcaaaaatacccaatcaagaggaggattgaaaaacagactcttctgaatggacaaaggagaatatgggagggaacaacatgggaatataagtcagactagcaacgacaccctcttccgggtccccttccaccacgtggaagctttacttttggtttgctcaataaaccaagatgctgcac

SEQ ID NO: 150006 - DNA, 401 bp, Homo sapiens
atatatgatctctggttgttttgtgatcccaggatctactgagatgtatagcataagaagttatacacatcctggattttgggtgataaaagtacttcttccatgaaattgctgggggttaagtgagataacaaaagaagaaaaacaggtcctcactgccctataggacaaaccagaacacgacggccaggattcagctcctaaccaatcaaatagaggattcaaaaatacccaatcaagaggaggattgaaaaacagactcttctgaatggacaaaggagaatatgggagggaacaacatgggaatataagtcagactagcaacgacaccctcttccgggtccccttccaccacgtggaagctttacttttggtttgctcaataaaccaagatgctgcac

SEQ ID NO: 150007 - DNA, 320 bp, Homo sapiens
aggaccccttgaaggcatcggctagtatgctaaacgctgcctagtatgagtcggatttaatatggagttagtttattttgctcttgtgttgggatgtgatagggagctgagtgcttgccctagttacctcttcacattataaatagtaatattcattagaaaatgtttattatgacctgaaattttatttgttcttcgtacaaataggaaagtaatatttgttatataaagttgaaaaacagttgtttgggaagctgtagcttttaggctgggtagattatttatatactttttacatttgtctttttactttcccccca

SEQ ID NO: 150008 - DNA, 132 bp, Homo sapiens
ggactgaggctgccttcagaagttcccttgcagatgatcgaaagcttctgttcttcacattttggggtcacggactcgtttgagcatctgatgagtcttgtgaagaatggatgcctcagcacacaacccacg

SEQ ID NO: 150009 - DNA, 319 bp, Homo sapiens
tattggataaaatacataatctttctgggccttgatttcctttgtctgtaaagtgagtgggttcagagtggatggttacttgccctttgcttcttttgtgtttgtttttgagacagggtctcgctctgtcgcccaggttggagtgcagcggtgcaatcttggctcactgcagcctcctggattcaagcaattctccctcctcagcctcctgagtagctgggattacaggaatgcgctgccacatctagctaatttttatatttttagtagagaaagggtttaccatgttggccaggctggtcttgaactcctcacctca

SEQ ID NO: 150010 - DNA, 133 bp, Homo sapiens
tttctttgtgaacttctaacacctgtttgaccctcctattactcagagaacttcacctcttatttcactaagaaaaatgaaataataagagaattacgtcttcccacttttcagtttgctaattattcagtct

SEQ ID NO: 150011 - DNA, 312 bp, Homo sapiens
catgagggaggggtgtccacaagggcagggtgtcctccaggggaagctgccctccagggaaagacaatcataaggggaaagtgtccataaggggaaggcatccaagaagggtgggcgtccttgaggggagagtgttcttgagggcaaagcgttcttgagggaacgtcatcctcgagggaaaagcatcctccaggggaaggtggcatccatgagggaaaggtgttcatggaggagggcgtcctcgaggatagggtaccctctagggaaagacatccttcagaaaggcatctatgaggggatgatgtcctccag

SEQ ID NO: 150012 - DNA, 399 bp, Homo sapiens
gaaagccacatatttacactgaatatgggctaaaacagcatttgtattttctttgacaaagctcatatttaatgaagtatgtttatgttgctctgagaacctaagttcattttcatcaattatttgtttgggtctctatcaaagtggacaatatgaaaggtgtctgcctagcccagaaaccattgttcctcctaggaaactgcccccacaatgtcctctcccaccttggtggctccctggaagccacatttgtacctcatgatcccactccctggtcaggacccagcctggccaaccaattctgtcctgagaatctgtctttgagactgagaaatgacgtgttcattactgcaggggaccatgggactgcctcatcctgccatttgatttgaattaagt

SEQ ID NO: 150013 - DNA, 333 bp, Homo sapiens
ctgagttacctttgggccaagccaaggagtttttattttattccatatagatgacagtcactgcagaaatttgaactgatatgcatatatcatgaggtttttttgttttagaaatattattctgtcagtcataagtgaagggactggggacattgggactggaggcaaagagatcttatctctttgcaatagtttgaaagctattgcaatatttgaagagaagattgataaatgcttgaaccagcacagtggcagtacagatggagggagctgactacaataaaatcatcaggacttgttgattgacatgatataggaagtgagggacaggga

SEQ ID NO: 150014 - DNA, 357 bp, Homo sapiens
tggccacatcagggggcacgcagcaagacggcaccctccgctcccaccagccctgcccttctggatgttgctaggtccaggtgtgacccgtgtccagccgggggcctgactgctgactggctgctggaggctgactgcctccctgtgtgccctcaggagacaggccaaggctggagtgccgggggacgtgtggcagtgacatcggatgaaccattgtaagatgaacaattcagtggcgtgtagcgcattcacagtgtggtgcagccatcatcgctgtctacttccaaaccgcttcattcccccaagaggagaccccatgtgcattattcccccaagaggagaccctatgtgcattat

SEQ ID NO: 150015 - DNA, 411 bp, Homo sapiens
cactgagcaaatgtccacgttactcctaatgtttaatcttggggcaaaacatggataaaaatacaaaatgttaactatgtgtatcggtctattggaaccttcctttaagaatgtacactatggaagctggtttgtcttccctgtacattgcaaaggaccttctttgatgtcatctatgcatgagtgttcattaaggattaatcgatgaggatgaacatttcaggctggccctgagttctcatcattccatttcagcatcgagagactgctcattctaatcccagctggttagtgatgtatgcaaatacccagtaaaaaggaaatgactacaaattcctaaactcactctggaatgatcaaggattagactgttcagctctgagagttaaaagtcagcaaactaaataccag

SEQ ID NO: 150016 - DNA, 599 bp, Homo sapiens
caagtgatcctcccacctcagcagctgagactacaggcatgtgtcaccacgcccagctaattttttgtattttcagtagagcctctttccttggctcccaaatggttacctttttgctgtgtccccacgtgattgtccctgagtctgtgtgtctgtcctcttctgataaagacaccagtcctattggattagagctcatccatatgaccttgttttatcttagtcacctttaaaggccctttctccaaacacagtcacattctttcaccatgttggccaggctgatctcaaattcctgacctcgagtgatctatccgccttggcctcctgaagcgctgggattacaggcatgagccaccatgcctggcccatccatttgtctttgtatcacatagctcagtgcccacaatatgcaggtactcaacaaatagtggtcagaatcaacgtacttggatttctggggcctcgcagcccatgggagtggcagtgtaagggcccgagttagaggtgggcagcctccctcctgccgcctctcctcaccattgctttgagtcccattgctctcagcacagctgagtgtcctggtggctgccatcact

SEQ ID NO: 150017 - DNA, 593 bp, Homo sapiens
cctgctagatcaaacctgttgttggactttctagtgaatctctaaactcaggtattttacttttcagctctacactttgtttctattttgcacttttaatcacttctttgataatctcattatcttcatgcattgttttctttttctgtttagttttctatattcttctttagctgactgagcatctttaagctaggtgttttagccaggcacagtgacacgtgcatgtgactccagctactttgaaagctaaggcaagagggctactgtattaatccattatcatgctgataataaggacataaacaagactatgtaatttatcatgaaaaaagttttaatggcctctcagtttcacatggttagggaggtctcaccattattggaacaagcaagagaccgttcaggggaacctccacttataaaaccatcagatcacatgagacttatttgttatcatgagaacagcatgggaagatcccacccccatgattcaattacctcccacagggtccctcccaggacatgtggggattattacaatttaagatgagatttgattggggacacagagccaaaccctgtcaattact

SEQ ID NO: 150018 - DNA, 303 bp, Homo sapiens
tcattagatcagtaaacatttaagcatatatgtaccaagccatagttttgctagaccctcctcaacgtttctttcaataaaatcaaggtaaacaagaacattaaaaattttgatttttatagtacatgatgatgtagtaactttttactgaaatctctttaatagcaataattcatatcttgaataaattctgttccttaggttgattcaatgagatgaaaaggatgtctaatttttatcttctcaaggtaagttctccagtctaataacagaatagctattctaaggctaatgtattttcac

SEQ ID NO: 150019 - DNA, 1225 bp, Homo sapiens
cagtgcccactttgttcatctctgctcactgggggagccaggacacggatccaggttttctgactccaggtctcaggcttgctccatagcgccacctgctggtgacggcaatcggtaggcacccaaatcaagactcagatttcctcatctcagaagttgtccacttcttctccgacctccacggtaactcggaaccacaccgtggagttatccctgtgtcctctttctcggaagttccacatccaacccctcagcaggtctcagcggcactctcaccacctcctctgctctgttcctgtttctcttggatggccgaatgtttcctaaggagtgtctgctgcttcacgcttgccccctggagtggcatctaaaaggtgaggataccctacaactaacaggcatgatgccatcaagacatcttgagcctggctacctcccgtggcctgtattttgtccacaggaaactcgcgcagtctcactacagcaaattgaggtggtatggggtgcctgctgctgcctctctcttcacctttccacagagggctgccccagcctgactcccacttccagagtttctccagccaggagaatcctgaaatctctgtaaataagcaatccaggagccagagaatcatgggatctcatataaacaaatcatcaaggaaaaacacagccagagtctccatttggtaaacctccgtgactggggatccccggccacccagaaagcagtattgcctgccatgcatgtcatcactgatttttactgctgcagcagactccgtcagacctgcctgctgcttcagcgaattgttcagtgcacaccaccagctacctgctgtaagcattcacactcctctacctgcctggcagcatttctcagctgaacacaggccaggccagaagtgccagggatttaatgcccttagaagtagctctctaccaatgacaaatggagctggtggatacattctcagcttcctcccctctcaggtggaacagccctgagatgtgctctatgcaatctcccacaagtccccagcaggctcaagctcccattgtccaaccctggtaacctgctcattgacacccctgtcttgccttcccttcctggcctcactttctcactctcttactgttgcctcctgagatcgcatccaaaataaatgacctgcacccagaaaaaaaaaaaatcggcctcgtggcatcagcggggagctctcgg

SEQ ID NO: 150020 - DNA, 1180 bp, Homo sapiens
cagtgcccactttgttcatctctgctcactgggggagccaggacacggatccaggttttctgactccaggtaggcacccaaatcaagactcagatttcctcatctcagaagttgtccacttcttctccgacctccacggtaactcggaaccacaccgtggagttatccctgtgtcctctttctcggaagttccacatccaacccctcagcaggtctcagcggcactctcaccacctcctctgctctgttcctgtttctcttggatggccgaatgtttcctaaggagtgtctgctgcttcacgcttgccccctggagtggcatctaaaaggtgaggataccctacaactaacaggcatgatgccatcaagacatcttgagcctggctacctcccgtggcctgtattttgtccacaggaaactcgcgcagtctcactacagcaaattgaggtggtatggggtgcctgctgctgcctctctcttcacctttccacagagggctgccccagcctgactcccacttccagagtttctccagccaggagaatcctgaaatctctgtaaataagcaatccaggagccagagaatcatgggatctcatataaacaaatcatcaaggaaaaacacagccagagtctccatttggtaaacctccgtgactggggatccccggccacccagaaagcagtattgcctgccatgcatgtcatcactgatttttactgctgcagcagactccgtcagacctgcctgctgcttcagcgaattgttcagtgcacaccaccagctacctgctgtaagcattcacactcctctacctgcctggcagcatttctcagctgaacacaggccaggccagaagtgccagggatttaatgcccttagaagtagctctctaccaatgacaaatggagctggtggatacattctcagcttcctcccctctcaggtggaacagccctgagatgtgctctatgcaatctcccacaagtccccagcaggctcaagctcccattgtccaaccctggtaacctgctcattgacacccctgtcttgccttcccttcctggcctcactttctcactctcttactgttgcctcctgagatcgcatccaaaataaatgacctgcacccagaaaaaaaaaaaatcggcctcgtggcatcagcggggagctctcgg

SEQ ID NO: 150021 - DNA, 565 bp, Homo sapiens
aagtaatttgcccaaggtcacacagctggcaagtggtagagctgagattagaacccaagctttgtggcccatgttctcaccagcatactgtgcagctgtctgcagttcagcagtacaaccccatttattctgttattttttatgagtttgttacattccaaattgcaaaatatcttattatatggattcagccacctcacaggttaaatcttgtctcttgagattttttctttttttcttttttcttttttttttctttttttgagacggagtctcgctctgtcacccaggctggagtgcagtgtgcgatctcggctcactgccacttctgccttccgggttcaagcgattctcctgcctcagcctcctgagtagctgagattacagacgtccaccaccatgaccagctaattctatatatttagtagagacgaggtttcaccatgttgaccaggctagtcttgacctcctgacctcaggtgatccacccgcctcagcctccaaaagtgttgggattacaggcgtgagccatcgcgcctgacactctcttgagatttaatgtcta

SEQ ID NO: 150022 - DNA, 225 bp, Homo sapiens
taaggaaaataaacattatggaagatgttggttttgatgaaaaccagaaacaaaatgtcagaggcaaaatggtcactgctctaggcaaactgctaaaggttttgggaattaggacacggagaaaagaaaatgttcataaaactttcttggttcattgatatgctcctatgaagatggtagaaactccttgtttttccaatatatcatttcaagaagcaacaaaga

SEQ ID NO: 150023 - DNA, 311 bp, Homo sapiens
actgaaatgggaatctcataattttcatgtcagaaaatattctatattaaaaaaaaatttaaaaatatgaaaactattcttagctagcaggtagccatggttatacaaaaacaggcagcatgtgggttgtaatttgccaaaccgtgggttagaccaaggacttgagaacatcctacacaggcaagtcaggtcactcactcagaacttaccaaggatgcctaggatcccttccacaggtaagccaatttattttcctgtcaagatgagtccctttagacacaagaggcaaggaaatgctacttcccctttat

SEQ ID NO: 150024 - DNA, 541 bp, Homo sapiens
tagccacagagaaaactcagtggcttaaaatagtgtaatttgatgtagtcaataaaatatatcagtgaagccaatttttatgtaaaattttaccaaagataatttacatggaaaaaattagaaattttttttctacactctacaggaaaattttttatgagtgctataagaaaaagtaattggaataatcagtatcattctaaaaaattatggtaagatttatggacaagggtggagcaaggcaaaacttgatttttcccattgttctttcgtattctaaataaaagatactcttttgttttcttaggtttatgttctgctttggatttaaatgggaggaaggatgaaatgagacagatgtaggaacaggacccattgtgagggaaaaggaccagagtgctctttagaaagtaggggtagtttacctgtttattgttaatgttggtcctcaaagtttttgattgcttgaaatgttttggacagaagaatttggcaaattacaacttttttttcttcttaggattggcttttgtcattccca

SEQ ID NO: 150025 - DNA, 283 bp, Homo sapiens
gcctgttaaaactctttaaaaaccaatgccttggtggaggtaacatttactgtttactgtagctgtggttgttaggggttattgctaaggtcctggttttccatgacatcagcagcattccaagggaagtgtgtgtcagtgactttcagtaatgactcccttttccaaacgttcaaatcttctgccaagctgccctacacctgcacaccagctgagttgcaggaaaaggaaaagcaagatggattaagtgggatttttgtctgggctccttaatgagactaaa

SEQ ID NO: 150026 - DNA, 276 bp, Homo sapiens
gcaataggaaactaatacatgggccttctactttcaaatgtgctctatccttttctaaaatcaaggatccggcttttatcttattataaaaatcaaagcctactctgttatattaattagtgctggactggagaaaatacgattttccaataatatactctaaggtctgtcccttgggtgtttctggccctgtgctggtctatgctagcctgtttgtactcagatccacccaccagcctttccctgctctctgctattgaaacttctaaaactagg

SEQ ID NO: 150027 - DNA, 162 bp, Homo sapiens
tatggaagagcttccattagagtagtatctttagcctttctccatcttcatcactcactcatctccagggaaggaggagtgatatacctgtccaataaatttaggagaaagcattggtatgcttggatcaactccctttgctttagatttgtctacctacag

SEQ ID NO: 150028 - DNA, 329 bp, Homo sapiens
tcagagttctgtctattccttctcaaacccattatatggcacaacatcaggaagcctggagaccctgtcacatcatctcaaatagcagcatcgagaccaagtctgatccaacatgtgtagtttctagaaaattgaagtctccacaatctgatagaaactcatcttctacaatggtaaaaagagaaaggattgtaaatgccagtgtaattataacatttatgaatgaattttcttgcagaatatagagaatgtttatatggaatcagaatcagtaccttatcttcactgaacatctgaatattttaataaaatttctatttaatcaagtt

SEQ ID NO: 150029 - DNA, 341 bp, Homo sapiens
cgttcctgttctagctgcctgggagtcagaggctgtgtgccttgagggagctcctggctgagtctccctctctgtgctctgtcctgggcccagccctcaggaggtggggacagaaagagctggacagggccgggggcggtggctcacgcctgtaatcccagcactttgggaggctgaggcaggcagatcatttgaagtcgggagttcaaaaccagcctagccatcatggtgaaaccctatctctactaaaaatacaaaaattagccgggcctggtggcgggcacctgtaattccagccactcaggaggctgaggcaggagaatcacttgaacccaggaggc

SEQ ID NO: 150030 - DNA, 268 bp, Homo sapiens
cctcaccttacaacaaactggagccatcttgtgtctctgccttggaatgcccttctcctgtctgaaaaatctctactcatccatcaacatccaatttctatatgccattactaaatgaaacctttcctaataatccctggaaaagattctatactcccactgcgctgtattaatgtattaacatgtctgtcttcctcaaccagatgcttaactcaacatcttttaactctagtacctggaatgtctggcctacagattcattcaacgt

SEQ ID NO: 150031 - DNA, 277 bp, Homo sapiens
aacaaaaactacataatcatctcaacagatacagaaagatatttaacaaaatctaacaccctttcttagtaaaaacattcaataagctaggaatagcaaggaaattcctgaacttgataaagagcatctatggaaaacccacaactaacatcatacttaatggtgaaagcctgaacgttttcaaaaaagagaaaagaaggtctgctctcaccactacttttaaactttgtactggaggctctagcaatggcaatttggcaagagaaagaaataaaag

SEQ ID NO: 150032 - DNA, 291 bp, Homo sapiens
caactgtggaaagaagaaacaaggctggaggctgacgctgaacttcgaaaatgatggtaaagtggaagggatagaaacagcacggccctggtgcaaagtgaagcaaacacgtcgggcacaggagagtccaaagtaaacccacagtttcttacaaagctgcaacggcaatgcagcggagaggggagccctcccagcaattggggtgggcaccgctgggcgtcaaggtgcctgtgccgacgctataccatgtaagaaacctcactcaagacgcgtcccaggtctaaatacaca

SEQ ID NO: 150033 - DNA, 899 bp, Homo sapiens
acaggtgcgcaccaccatgcccagctaatttttgtgtttttagtaaagatggggttttgccatgttggccaggctggtctcaaactcctggcctcaagtgatccacctgcctcagcctcctaaagtgctggaattacaggcttgagccactgtgcctggtcttgctggtgatattttgaagaaacatattcttgtacattgatggtgggacaccattctcatgggggggcaattggcatacctaacaaaattagaaatggtcctagctactcagtaggctgcggcagcaggatcgcttgagtgagcccaggaggttgaggctgcagtaagccgtgatcatgccactgcactccagcctggatgacaaagcaaaacccaatctcttaaaaaaaaaagggggggttgcggggggaaatgtcctcagacccagtaattccacccctaggaatccagcttacacacacaagaaagaaaagataaatgtacaaggttagtcactgcacagtgagacagcaaaagattagaaagaacccaagtgattattgatctgggttttattcctttatagcccaaccatatgatggaatactataatgttgtaaaaatgggttaagagttctttatgaattggtgtggaaacatcgccaagatatgaaagccaaatgcagaaaaatatatgtggtatgctattatctatgtgaaaaagacattactattctctggaaggataaacacaaatttgagaatggtggatatctggggtgagaggtatccttttcactgttctttaaaagttttgatattttggtgtttgcctattcaaaaaaatggttaaaatcagttgccaccaattaaaaattaggagaatgcatataaagaactgaatttcctgttagttt

SEQ ID NO: 150034 - DNA, 481 bp, Homo sapiens
gtgatcatcccacctcagcctcttgagtaactgggactacaggtgcacaccaccacacctggctaaattttttgtatttttagtagagaaggggtttcaccatgttgcccacggctgttcttgaactcctgagctcaagcaatctacctgcctcagcctacgaaagtgctaggattacaggcatgagccactgcaactggcctgtattttgagtttgtttactatttcattggtcttgctcctgtcttttttattttctaacttctaatttctatttcctaatttctattttggtttattctctgacacatagattatttagaagtgtactgtttaattttcagtcagttgagtgttttctcattttttaaattgattatattagttatgtattgctgctgtaacaaattaccacaggtttagtggcttagaacaacacagatttattatcttaccattctagatgtcagaaattcaaact

SEQ ID NO: 150035 - DNA, 587 bp, Homo sapiens
cagagcccgcgcccgcagccacagggtggggcaaggtatcaaagaccccacccagctgagctaggagtgagggatgtgagccacccccgcttggcaccccggtggatctggtaacaaagtgagttggagcccaggttcttgtccccagattttggggcttcctggggagggaagaaccaagggactctcgttcgtccccagggttgcccatcccctcagtcccatgagaacaggaagggccagaaaaccttgactgcaagggtgcggcgcagggagaggaccacaggcttttagctagtccgggttctggaggctgtacctgctaggtcgtggaggatggggcggagccggtttccgctctcctggtagtttcagttcacaagtgggactagtgagactagactgacctacagctggacgccggaagctagctgaggcttggttgactcagtcccagatggaaagttagcactgagaagtttaacttcccattgaatcacccctgggccctgcattgccattgggcccttgtcctggaccagatgccagggatgagatgaacagaccagatccagagactgccctct

SEQ ID NO: 150036 - DNA, 202 bp, Homo sapiens
agacatccagtggtcatggtcatcccatcactcaaggccttggaggccgggccatcggaccatctgcgcagctatctaactgtaccactgctcagctcccattgcagaagggcatggagtgggtgctccattcgctcctatgactccagtggggcccccatggggcttcccccaccgacaaccctcgtcccccaccttagcc

SEQ ID NO: 150037 - DNA, 830 bp, Homo sapiens
tctgctggttgggctacactaaggtttcctaacctcagcactgctgacagtttggagctggtaagttttggttgctgagggctgtcctgtgctttgcaggatgtttagcagcatccagggcatctacccactagatgccaggggcaccctccccaaagtcatgacaataaagaatggctccagacccactgccaaatgtcccctggtggcaaaatctctcctggagctgtgaaccactggactacactcagctttggggactttggtggtcttttaccctagatcaattggttttatatttgtccattcatttagcagccattttttgcctcctccttccctgtaatgtgtcaggactaggctaggttctggggatcctggggtcacctgagcccccagagtactcccgggcagatggcccagtgtcccaggagctccagatgtgttttgttgcaactgctgtctgtgcacagaggagtgtcaaggaagagggccaggaaatgactttggctgcaccttaatagctaaggatggcaaaggatgttcttggtagaggaagcagcaagtgccaaaggtgggcatttgagaaaggacaccaggataggaaccggcctgtgcactggctgggagaggtgacgcgattgcggagggcatctgtgtcttgtgtggccttgagcccagggaaggcggtgggagccgctagaggtgtccccactggtgtgctcagtccagccatcccctgatcagcctgtcaggcctgcttctccatgttggcctctcctggatctttccagcagcaaacatgcatagaactcccctcttcacaacca

SEQ ID NO: 150038 - DNA, 383 bp, Homo sapiens
  misc_feature (38)..(38): n is a, c, g, or t
aagaggtaatcaaagcccattccagagccaaccgttcncaccccttgagagcaaacaggtggaggacagggagaaatctaaggatggcaaaggatgttcttggtagaggaagcagcaagtgccaaaggtgggcatttgagaaaggacaccaggataggaaccggcctgtgcactggctgggagaggtgacgcgattgcggagggcatctgtgtcttgtgtggccttgagcccagggaaggcggtgggagccgctagaggtgtccccactggtgtgctcagtccagccatcccctgatcagcctgtcaggcctgcttctccatgttggcctctcctggatctttccagcagcaaacatgcatagaactcccctcttcacaacca

SEQ ID NO: 150039 - DNA, 588 bp, Homo sapiens
tcccaaaggagctcagcagccccaagatcctgatgaattcaggatctgagaatttgtttcattctggtccacactggagaagaaccagcccagcctgggattttctagaaaatgcagtgaacaaattctgaagttaaattctacaacactgtcatttccacttaaggcacaataaaactaaaaatgatgaagcaggagctgacttccgagacgtagcagcctacacttctctcaagggcaaaggctcatcatgaagacacaaagggctcctaggtagcctttggcaaggggctgtgcctatgaaactgcagtccgaggcccacgcacaggggatgaaccctcagaaaccaggccctctgaaccaggaggaaaatgggaagcaccacccacctctctccatctcctccctttccaaggttccaggacctgtagggactctaaacaggacaatgtgggactgggtgtaagtgaacagagatctgaaacagaaaaggcaccctaaccacagggtaattattattagacgaacagcccaatacacatgaagactgggcatctcatcttactgcttttacggaatagaaatga

SEQ ID NO: 150040 - DNA, 563 bp, Homo sapiens
tatttactagtgaattcagacaatcaaaacagaaataccccctcaaaacaacagaaaatcattgcatttagagggtaagggattttaacctaagtgtatgttaccagaatgataaaagaggtcagctacattttattttgttttctctcaacctgggcaagtgtataccagaactttctcttttaaacgtttttcttcatactctcttgtccttttgccctctctcccagtgaagtgttaagaattcggagttcagtaaattgttgcctgattaatgagttgccatgaccaaaagaaaacttaccactttaataagtatacctttatatccaaataaacctcaagcttgaaggagctttgaagtgttcccttttcatgtgcataatttatacacattccacttgtgtatctgttgagtatagttggaaataggcacctaagagttgagaagtaaagggactgattagtactatactggagacaaagcctctgtgcatttcttctaaaaagtaccatgtttgtgctcctaagccctatgcttgctcgtgagtggcttggaatgg

SEQ ID NO: 150041 - DNA, 756 bp, Homo sapiens
  misc_feature (621)..(622): n is a, c, g, or t
  misc_feature (625)..(625): n is a, c, g, or t
  misc_feature (634)..(634): n is a, c, g, or t
  misc_feature (636)..(637): n is a, c, g, or t
  misc_feature (640)..(640): n is a, c, g, or t
  misc_feature (652)..(652): n is a, c, g, or t
  misc_feature (654)..(655): n is a, c, g, or t
  misc_feature (658)..(658): n is a, c, g, or t
  misc_feature (665)..(665): n is a, c, g, or t
  misc_feature (672)..(672): n is a, c, g, or t
  misc_feature (676)..(677): n is a, c, g, or t
ctagaacttgagaaaaaaatttaaatcttggactgccacttctggacaagattaggaaacacctagaataaaggacaaaatatggaaacaatgattctcagaaaattgagcatcagacaagaaaagacagtgatccctgagagatggaaaatgaaaaggtatttttctacttattttgaaagatgaaaatccaacatacagttttatatgtcaaagacacacaatcaccgtgactaattcagacgctgctgctatcagaaaatgtgatgagttgcagaattcagtattgaattgcatctaccagtgcctcaaaatcagcattgcatgcagaggagcccattacaatgttaaattggtctcatacctagatgagcaattatttgcctattttcacaataacgtatctgctgcattagcctctttgttaatataagtgcaacacatgtactgaatgcttgaatcctaataaataaatgagtgaataaaattccctcatttttcatacaaaaggctagaaatgaaagccaaaaggaaaccatctaaaaagtctatgaaagccaagaataaaccatcacagaatcctataataaaattttttctaattgaaaaaaaaaaaatcgnnctncttggcctnannggnggactctgcggncnnttncctttangagggtnaatnntgatcctagatgactgacccaatgccctcgaccatcggcgtgtcgagagcggttttcatttttcccatgtggcacatcg

SEQ ID NO: 150042 - DNA, 606 bp, Homo sapiens
ctagaacttgagaaaaaaatttaaatcttggactgccacttctggacaagattaggaaacacctagaataaaggacaaaatatggaaacaatgattctcagaaaattgagcatcagacaagaaaagacagtgatccctgagagatggaaaatgaaaaggtatttttctacttattttgaaagatgaaaatccaacatacagttttatatgtcaaagacacacaatcaccgtgactaattcagacgctgctgctatcagaaaatgtgatgagttgcagaattcagtattgaattgcatctaccagtgcctcaaaatcagcattgcatgcagaggagcccattacaatgttaaattggtctcatacctagatgagcaattatttgcctattttcacaataacgtatctgctgcattagcctctttgttaatataagtgcaacacatgtactgaatgcttgaatcctaataaataaatgagtgaataaaattccctcatttttcatacaaaaggctagaaatgaaagccaaaaggaaaccatctaaaaagtctatgaaagccaagaataaaccatcacagaatcctataataaaattttttctaattga

SEQ ID NO: 150043 - DNA, 578 bp, Homo sapiens
tgccagctgaggaggtggcgatatttgccagtcacttggaccagtctcccaaactatctttttccacccgtggtggtgtctttcctccttactgaatcatttaggtaattacctcaattcttcactttactttggctgtgaagacagagtcttaatgagcccagagccctggacaatcccagctccagggtgaggcagccgggtggcggctgtgggaggggaagacggtattaggatgctcacattgcataacctgcacgtccaagtggccaagctggctgccatctgcagcccgggcgagaagacgggagaggccctccaccagccaggggaacgcagtcgctttctgcagtagctcccaaagcctttaggaaaagctttgttttacccctttgtcctccagaaataatgacctttgtgtgtcaacttttgtagtatctcatttctgaacccaaagcagatggttctggtgatttcagaaggcttagtgaggggatttgaggagcctgggtgagatctcaggtgaactgacacaaagcatgatttctagtttctatagccaaggcttggggatgagg

SEQ ID NO: 150044 - DNA, 369 bp, Homo sapiens
aaattgaaggtgtggtgtggtcagtggttgcattgcatgctagcggtgcataaggcctgattcctcttttctttcctcagccatcagtaatcatccgcaaagggctctcttgtggacacttatgctgcaagagccacttcctccacggtcttatcacctcacccaggccctgtggagcagccagaaggcagggagagcttctcccttgcaggtcccctccattgctgtcagtacccagctggctccagggctctgtgatgccgccagctgggcctatgagggccccgaaccctgagtcctcactgcctttctcccaatcccaggaaggtatgctcagccagagcccaggcctcatacacactggcagtg

SEQ ID NO: 150045 - DNA, 311 bp, Homo sapiens
cctcagatgatctgcatgcctcagcctcccaaagtgctgggattacaggcatgagccaccgcacccagcccacacatttttacataacaagacatcctttagtccacacaaaggctgacgttagctgcatctgtaacacaactttttcctcaaatgtatggagttttttttaggcttccacttctatacttgcctattctcactccctgttttaatttaacatagacatgcaatgctagataatagaattgttctctaccagctggacagcggggagtctgtgcagtttctgacacttcttgttgcacatg

SEQ ID NO: 150046 - DNA, 350 bp, Homo sapiens
ctgcctcaatgggttcaggctctggtgaggagtcagacaaggacagcaactaaaagacaatgcagagcacagagcaggggcctcactgagtcctggggtgagagggtcttccaagaagagataaggccaacaggaggccccagggaggaggaggagttccataggtaagggagctcaacaggaagaagaacatgaggactcgaggacagcaaacgcaaacacctgagggtgaggagacaaaaaacacaagtgcttggggatgagggaacagtgaacacaaatgcccggggatgaggggacggtgaacacaaatgcccggggatgaggggacagtgaacacaaacgcccag

SEQ ID NO: 150047 - DNA, 282 bp, Homo sapiens
tgtcaaggatcatggattgaatcctgaaacagaggaaggacactgaaggaaagactgggaaaacctgactgaggtctggagtttagttagtgatactataccaagacgaatttcttagttttgataatttgttaacagttatgttaacattgggggtagctatgcaaggggtgtgagaatgctgttatatctttaaccttggcccatggttaaggtgtttccagtgtaaggtcactgttattccttgtagttaacatatatttggcaccacaggattcattc

SEQ ID NO: 150048 - DNA, 763 bp, Homo sapiens
cattcttttagttacttaaaaatgtacaattaacttgctttgtcttatcactcccggccagagaaaaaccctgtagacattagtcactcctcattctgtctcaaaccctctccctgaccctcagccctaggtagcaactacctagtgcgatcaatcccatatgcatagattaccatattgtggacatttcctataagcggaattgcacaataggtgagctgttatgactgacataacacgtagcacaatattttcaagattcgtccacattgtaggcttacccacagggggaaaccatttttttgggggcttttagtaacaccggtgttttctccttccttacgtccttctttccttccttccttccttccttccttcctgacttccttctttccttccctccttcctcctatttctctcttactccttctgccctctctctttcctatgccttaggtgcatcccacattctgcgtttctttggggaaatcctcgacaggtgcaggaaaattgtgttattgtaactatttaccgttatctctctttcacggctctccatcagttgtgaacatctattggtttatcccaagtcactaagcatattttcattaggtaaacctgtttttccttatacagctgtttctggagtatagggtcgcatactcataaacccagtgtaactcagaaacgcatctaatattccagtaaacccatcataacgttgaaaaatcgtaaatcaaaccatcataagtcacggtttgtc

SEQ ID NO: 150049 - DNA, 590 bp, Homo sapiens
tgtgtcgccataatcatcttccatgcagcccaagtggcgggtggtggtcccagctcccactcccctctggggctttcactgcttgcttcctggagcacatccatcccatagcacttcatcctggcagccagtgtgctagagcccatgtgcatgtccctgctcctggtggcctgcgtgtgcctggggcttgctaggtacactagtgaaactagtgggctttgggtcacggcagctctgtgcagggtgaaagggtgctcttcagacactctgggggctctgtgggagacactcccatggagacatttgggtgtggacacagcatgtccttgggcaggtggcaaaactgcttcccacgtggcaatggcgccttgtagagagctgccctgggcctgggtgtgtctgtgagcatgtgcgcgatgcttcgtagtctgccctgtttgtttgtgtctgtaggtgctgctgtggttttgtccactgcgggaaagtagtggttcttttaatgcaggagccggagcttctttttgatctgctgctatgacatctccactcacttgcttaaaacagtttcctttttgttccccctcctcccc

SEQ ID NO: 150050 - DNA, 557 bp, Homo sapiens
tgtgtcgccataatcatcttccatgcagcccaagtggcgggtggtggtcccagctcccactcccctctggggctttcactgcttgcttcctggagcacatccatcccatagcacttcatcctggcagccagtgtgctagagcccatgtgcatgtccctgctcctggtggcctgcgtgtgcctggggcttgctaggtacactagtgaaactagtgggctttgggtcacggcagctctgtgcagggtgaaagggtgctcttcagacactctgggggctctgtgggagacactcccatggagacatttgggtgtggacacagcatgtccttgggcaggtggcaaaactgcttcccacgtggcaatggcgccttgtagagagctgccctgggcctgggtgtgtctgtgagcatgtgcgcgatgcttcgtagtctgccctgtttgtttgtgtctgtaggaacccacgcggctcttcagctgtggcaggggacacgtctgcagcaggaaggcactgctggatggcagctttggctgggtgccaggccaggactctggtctcct

SEQ ID NO: 150051 - DNA, 696 bp, Homo sapiens
atacagtaagtgacttgtccaatataatacagctactataccttcttgaagttaactgaatggtaatggaaataacccttaaacaagatcaacagatagacaaaaagtagaccatgccacataatactttgattgctgttcattgatagtcatgaccaatctagttttgttgattggttagttggatttaatgagatgcaaccaggcaaacaaattgagtgtttttcagttctatagaccacttatttagagaaactgaagttggcctaaaatgtagccaatcttcaaaactcaaagatgccatgataaaagtatatgaattcatttgtttataagtatagtacttgctccaggtgactacactcaaacttagccgtgatttggcctagacttcaacgaaatcagctggtttttgttttgtttttcaaatggacatcttgagattacttggataagatttaaatcaagttaaactttatttacccaactttactgataatgaagaaattctcaagtaagactctctaggtgataaaacctgaataatttttagtctggacatatctaattcaaggagtattccttccaaagctgagtgtctcctgccaaaaccagaactggagaaaactgagggaccagatgaggaaagtgtcatgaaacctctaatgtctatacacaccaattgtaagggcccaa

SEQ ID NO: 150052 - DNA, 277 bp, Homo sapiens
ccatgatctacagacatgagtgattctacactaaataaaatagtggaggaaattgagcttattaaagccaatgcttccttcaaaattatgagtcctgagcttcctccaaaaatggaatgaaataagcactttatttgtatttaggcaatattctcgccttttcaaataacaacatgagttctttaatctgactagcagctcccgatagagatcaaaagtaggtaacagacttggatctatcatactttagacactacagcgaaaaaagcagatttga

SEQ ID NO: 150053 - DNA, 626 bp, Homo sapiens
agttcgacggagactctcacaatctggtgaaagcaaatgaggagcaaagtcaagtcttacatggtgacaggaaagagagctgtgcaggaaaattctcagttataaaattataaggtctcacaaaacttattcatcaccatgagatagatatgtggaaaattgcccccatatttcaattatctctacctggccccacccttgacacatgggaattattacaattcaaggtgagattttggtggggacacagagccaaaccatatcattctacccctggaccctcccaaatctcatgtctctttcacatttcaaaacacaatcatgtcttcccgacagtcccccaaagtcttaactcatttcagcattaactcaaaagtccacagtccaaagtctcatctgagacaaaacaagtccattctgcctatgaacctataaaatcaaaagcaagttaattacttcctagatacaatgtgggggtagaggcattgggtaaatacacccattcaaaatgggagacactggcaaaaacaaagaggctacaggccccacgcaagtctgaaattcagcaggacagtcaaatattaaagctctaaaatgatctcctttgaccccatgtctcacatcca

SEQ ID NO: 150054 - DNA, 391 bp, Homo sapiens
atatagttagttatttctgggagcaaagctgccagtatttcaatatgacttccctagtagaacttttgtgccatggagctggggagtggtagacggggatggaacctccaggttataatgtcacagactctaactgttcttactgatattcagtaaatttttaaagttaatttttaaatcgatacataataattgtacatattcctaaggtacatatgatattttgatgcctgcatacaatgtgtagtgaatcaaatcatggtaattaggatatcacctcaaacatttatcacttctttgtattggaaacattccaaatctttcttctagctattgtgaaatatacaacaaatttttgttaactatggtcaccctactgggctatcaaact

SEQ ID NO: 150055 - DNA, 654 bp, Homo sapiens
acatttctcattctctgtttattcttacttagattatgaaactataaattattcttaaaatttttgttttcaaaacttcaggggactttagaagccatccaaacacttcagtttccaaaagagaaaacaaaagtgctttgccccagtttcacacaaatcagttgcaaccagcaaccattcaaagcccaaacacctaaggccctccaagtgttaggctgtatattccttaggggcctggaatataattcacatgccttggttttacacgtatttgtagagcatgagctcattaagtggcgaagaaggaaggaaaaaagaagagagggagagaggaaggaaggaagagaggaaaggaagaaggaaggaaagaaggaaagaaaagggatggatggattgttacaatatagtttaaaatatgacaccaaaagacatctaatacattaaaggaaactgttgagctgaggtcaggatggggtaaatgaaccatttcccacttcatcccagctcagatattccactaagccttcattgtttacttgtaattgcctacacatacatacataattatgtgtgtgtatgtgcacatgtgttgtttttaaggaagagcagatgtaggatctaggaactatttgggaaacataagaaagaataagg

SEQ ID NO: 150056 - DNA, 528 bp, Homo sapiens
cccccctaggtacaacagctccatttacaatcagctccagttacaacagttccagttacaacagctccagttacaacagttccagttacaacagctccagttacaacagctataaaccaaaacacaaactcactcccaaacacttttctcttcactctctgcttgctaatgttaggatgctgtgttccatagggtatgaaagtaaataagaaggtacccctgatttccagacaatgcactgttatattagaacacctctgtgtcttctctccagcagggggaaatttacgttttttgcttaaaaagtattaattcaattcaaattcaaagaacattaaatgcttcctatgtgtcagcagttacaacagctccagttacaacagctccagttacaacagctccagttgtaactggagctgttgtaactggagctgttgtacctggagctgttgtacctggagctgttgtacctggggctgttgtacatggagcagctcttaaaggggacgattagatttctgtctacta

SEQ ID NO: 150057 - DNA, 193 bp, Homo sapiens
gaatggcatctcaggctacaggagcatgtgacccgaggaacctttgagctctctgagccacagatgaatctgggaagacaggaattcaacaaagcacaaaaataaggtaacataaccaaatgcaacagagggggaggctgtgaggcagggtccagcaggcgctctccctgttcttgtacagccatcagcagaa

SEQ ID NO: 150058 - DNA, 406 bp, Homo sapiens
caaaagaagaatttaagctcaccttttatatagcttttctgatagccacaatttctgcattaaaaatctgagggatgacaaagtccctatgcatactagttaggaatttcttagaacctctcttccatttactatactgtttcccatgttcttttgggtgtttttcatattgatggttggatatcattacaacaattacttttggctgtttttaggtcttcagctgctactgggatacctcttctatattttcaaagtaaccagtgtcatttcataattgtttattatacagcttaagatataagcaccatatacagatttcagtaaaagcaaaatttgaagctgttttcaatttaggaaacacatcgtctatttataagcaatttgatgtgtatagtttcatatc

SEQ ID NO: 150059 - DNA, 478 bp, Homo sapiens
ggtaggaatgtgatatgacaggtggagattcctgggtctcactccaacacccaggctggagtgcagtggtggtgtgattatggctcactactgccttgacttcccaggatcagatacgggctttcactgtgttacccaggctggtcttgactcctggacttaaaactatccaccagcctcagcctcccaaggtgctgggattacaggtgtgagctaccactagtggcctcttctaagaggaaatttggatatacagagagacaccagagatgtgggggcacagaggaaagacctgctaggatacagtaagaaggcagcctctgcaaacttaggacaaagtcctcaggagaaaccaaacctgctcacaccttgatcctggacttctagcctccagaactgtgaaaaaaatattctgttgtttaagctacccagtctgcggcattttgttttgccagctctaataaactaataaacaacc

SEQ ID NO: 150060 - DNA, 546 bp, Homo sapiens
ggtaggaatgtgatatgacaggtggagattcctgggtctcactccaacacccaggctggagtgcagtggtggtgtgattatggctcactactgccttgacttcccaggatcagatacgggctttcactgtgttacccaggctggtcttgactcctggacttaaaactatccaccagcctcagcctcccaaggtgctgggattacaggtgtgagctaccactagtggcctcttctaagaggaaatttggatatacagagagacaccagagatgtgggggcacagaggaaagacctgctaggatacagtaagaaggcagcctctgcaaacttaggacaaagtcctcaggagaaaccaaacctgctcacaccttgatcctggacttctagcctccagaactgtgaaaaaaatattctgttgtttaagctacccagtctgcggcattttgttttgccagctctaataaactaataaacaaccgatggtgtaaagatgtaatatggatttaaaaaccttagatagtaagatacataaaggtcgcaacggtg

SEQ ID NO: 150061 - DNA, 431 bp, Homo sapiens
tgaaaaacagtaacaaaggaagcctcagctgtccatatggtaaaggaaaccatatatcaaggaggacagaacctactgttccacctgtgttcccaaatgacctcgtggaacagaaaccctttcttagcctgaaagtcatgtgaaacaaacaaataaacaaaaacaaactcctgtgttgtctgaatctcagcattctgtgaccttctagacaaaacaacatatatcctaacatgtgcatttcattttcaggggtaacacgattagataccctaaaaacaacaggcaagaaaaatgtcgaattttacaaacaaattatctaatcttgtaactgaagattgcagttgaaattaaaataaagaaactagtacctaggggaagaaaaaagaacacagagagaaggggggtataaagagtttaaaagtgacagaaaa

SEQ ID NO: 150062 - DNA, 270 bp, Homo sapiens
ttggaatttgtttgttgtgtgtgtggctgggctaacccttgttggagtaggtttcgtgccgcttttggcttcttgggggcacacagcggaatttgctctagggatgcggcgagcatcagcggtgtagtgggctggggccgggcaactttgcagcctaatctcagtgccgctgaccgcaccgttgttcgtgatgtgagctgactgaggcatagacacgggcaggctgcagggagcttccaaactttgaaagcattctccaggaatggatgc

SEQ ID NO: 150063 - DNA, 222 bp, Homo sapiens
ggcgagccgggccccaagttatagaaaaaaaaagtataaatatatagtaagagtgtaccataaatccatccattaaaaatagattttgttttattgttataaacaatgctgtaacaaatattcttttacttacctgtgtatacatttctctaggataacattatcaaagtgggattgctgtttttttttttttttttctttttttttctaataattaactgg

SEQ ID NO: 150064 - DNA, 944 bp, Homo sapiens
ttcctcctcttcctgggtgtaaactgcgattcaaaaagccaggtgggaagccctgtagtagggactctggctttgtccctgtttcccccttttcttcctcttcacccactaaaaccctgttttactcacggttcaaattgtttggcagcctgaattttcatggccatgggacaaagaaccccgtctttagctgaattaaggaaaagttctgcaacatttttgacgtgcaacttgggggctcaagcggagaagcgaagcagagcccctggaaaactcacatatgtgtcaacaatagtccttgatgcccctgtaacaaaacttgagcaaggcctggtgatgaagagatacaagattgtcacccaaggatttgattatacctctgttgaaagttaatgcacactcaaccgaatatggcaattggtactctcaattctatattctcaacaattacagtgaagatacaagtagaatacaatcactgccacattttttgaaattctgtgtaaactgtaatattctgtcaacattaatgacatttgaagtgtcctgtcaaaacaattgcagctactttatgtataaaacatattaaataggctcatccaacttgcattctttattaagcttattttcatattttttcctatggatgaacttaaaaataattttgtttcttaattaagattctatgcatgaagatgctgaataatttaagacaattgttcattcaaatagttgctaattacaccctcctggcatagttattgtattattactacatttaggaataatatgctgtactacttggacttgaaaatgtttctgacattttaatgaacacactacttagttatattttacaagggttttcagtgaaccacagaggattaaaaaatgtcattcaagggttgtagataattaaactgactgaatataagaagcctcat

SEQ ID NO: 150065 - DNA, 278 bp, Homo sapiens
ccttggcctcccaaagtgttatgattataggcgtgagccactgtgcccagcccagttttgagactggactcctcctggagtcctattctgcctgctctcttccagagctgccacacagctcccatgcttggaggtgcctccctctactgtgtttcctgcatcccatggattctttgattttttcccctctcataggggaatacatcttccaggagtttttgagaaagggttcatgagaggtgacttttctggggtagatcatctgaaatgtctttatt

SEQ ID NO: 150066 - DNA, 849 bp, Homo sapiens
ggacgcgtgggtcgacccacgcgttcgaatgataatctcaaaaatgatcttttatttttggagatttatatagatacacacacacacacacacacacacacacacacatatattttttgagacagagtttcactctgtcccccaggctggagtgcaatggcacaatcttggctcactgcaacctccgtctcccgggttcaagcaattcctctgcctcagcctctgagtagctgggactacaggtgtgtgccaccatgcccagctaatttttgtattcttagtagagatggggtttcaccatattggccaggctcgtgtcaactcctgacctcgtgatctgcccaccgcggcctcccaaagtgctgggactttaggtgtgagccgctgcacccggtccaagtaaaattattttaacaatatactatgaagagaaaaacactggctatgaaagaatatgcatagttttaccctgtttaaaaataaagattgaaagaatacatatgcaaataagtttacttttatttttggtaacactttactgcattgtctgaatattgacaatcagtatgcattatgaagctacctggctaacattgtgtactcactgtgtgtgccaggccctgggttcaatgctctacatgcacttatatttcatttaattctctctgcaacctgagatggtatagccacctcattttacagagttgaaactgaggctcagagactgaaagttaagcctgaggttgcagtcaataagaggcagagctggaactgaaacctacctgtgtctgaccaccagttcgtgttctgacggcaggctagtctgcatcacagagtgtggagtagatg

SEQ ID NO: 150067 - DNA, 355 bp, Homo sapiens
cactccggtctgtggtattatcggccccagttcaatgctgcgtacagttctcatctaaatgccatctccagcatacagtctcactgaactcacctagtattttatctccagctctcattatatctgtgttctagatatttatgtgcatataattatcttccctagtaaactctgggcagactctgtacctaatttaacttagtattttttatatcacttacacttaacatcagagaaagttaaagctgcaagggctgaggagacacacagacctgtgataatgtctttttcaaacttctttctctgtgctctagtaaataatagtgctgaaggtaggatagaccagatctcctgg

SEQ ID NO: 150068 - DNA, 293 bp, Homo sapiens
aaccctaggacattcctttgtaaacaaacagccttttaccaaacaccaactgtcaagggacttgcctgagtacttgtccaaaggacagcgtgtccccatgtgtaggcagtggtctaatctggttcctaggagaggactgctgaggccacagcaacttaactggctagtgtgggtgaggcagaagtgtttgaagctcaaggtctgtcaaggacagctgattagagtatgtctgtccctaatacagggttagagctcagtaccaatgctggggatgaggtgagttgaagacacag

SEQ ID NO: 150069 - DNA, 416 bp, Homo sapiens
gagacagagagagagaattgagtcattctttgttccctttcctgatttaaaaaagcaagtgatgcttagaaagtcagtttaacaaagtatgggtaataaaagcatcttttaatcatttgctatttgatatggcatttttatgattttatcaggcatgaattataccatttgatatatttcttaatataattaaaaagtaaaattaagtaaacatcccgtaatttggatgctagattaaaaacttaatttctaggaaattacaaagtctgtgatgaacttcaaatgtagttgacaactacactggcagttttattatttaaacatttgaactggactttgtgggaacagttaacgtaggattgggacgtttttctttgaattatttaataattgcctcttgtccgtacttgtgacat

SEQ ID NO: 150070 - DNA, 540 bp, Homo sapiens
gatatgtttcagctgagttttgctgattgggggagattagtatatttaggtcagttaaaagatcatcataaagcggcaatgggggtgcagtagcctctggtgtaggtggaagtggtgcaggcatgtcagagtggaagtcctcctttgaaattacgttctcaatttgtgtagtatcctcaggggaaagagagctgagcgcttcctcgacctccctcagaggagaggaaagagggatcagtctccatattgtcctcctgagtctgtaaggagtctaagacagagtgaaccgaagcccagattgaccaaatggtgggtgggataaaatgtccccctttatgagcaattttgaattgtttgccaatctcaacccaatctttaagttctagagttccctcagtcggaaaccaagggcaaagaagatctacaacctcaaatagttcaattaacttttcagtagaaactttaacacctccttctttaagaagagtttttataaaatttaaataagccaaatactttgtactggcctgtcccatggtg

SEQ ID NO: 150071 - DNA, 270 bp, Homo sapiens
tcttgtaatttgacagttagatgcctcagtgcgtaagaacttaagaatccaacaatttctccttttctgacacacaacctcatgtggaaacttagttggcagtagcactgtgtccttatagtcaggataccccttgggcaaggaacttggtaactgaatgctcaatgctgaacatgcacctaattttgaggcttcactgggtgccatgaagcaagactgatttgaaaacagcacttacgggatctgactgcatacatgcagagtcagaat

SEQ ID NO: 150072 - DNA, 374 bp, Homo sapiens
agggatcagccgagaagggagggaagaggcaagagaaagtccagcccctaggaagtgggcagggaaggggctctgagggatcctccaagggccctgagaaggagcagtcccatggtgcggggagcaagaggatggcgccaggaccaaggggcagcaagtggagaacagatgaggaatgagcctcttacacctccggttgggcctatttcctaaggccaatctggttgaaactgcatggactgttttctcagaggtgctgacctctgttctggacgttttctttccaaaactttaccaagaaagtctagtgagacactctgtcttccttttctcttgtggtgtgcgggggagggcaggcagcctcaggtgggttg

SEQ ID NO: 150073 - DNA, 355 bp, Homo sapiens
agtgatccacccgcctcggcctcccaaagtgctgggattacaggcgtgagccatcgcgcccggccagaattaatgtccttataagcagagacactagagagctctctccctctttctctgtctctctggaagcacacaaaaaacggtttctcagaaaatgtagagaaaaggcagccaactacaagccaaaagaagaaaccttagaatgaaacccaccttgccagcaccttgatcttggaattcttagcctgcagaatggggataaataaatttctgttgtttaagccactcggtttatgatattttgttatggcagttcaagaagattaatatgctaccctaccttcataattgc

SEQ ID NO: 150074 - DNA, 352 bp, Homo sapiens
ttccaataagttttatgcatagaaacaagacctaggatggatatggcctacagacaatagtttgccaacccctagtatagtggaaagcctatggattttggcatcacacacaacctgtctgaagtccatctccatgttcttgctatgttttctagtatatattcaaatatatatatgaattgtatatatttagttatttatataatttatctttcccattcgcacataagatccatctgcaaaaggccttaaatacttttatttaaagtactgggtgtttgagtgcagcagtagatactaccacatgctgctgtactcagacactcagaagagggctgaatgacttaatgac

SEQ ID NO: 150075 - DNA, 161 bp, Homo sapiens
cacgagcctaggggtttgaagctgcagtgagttatgatcatatgatcatgctatatattctagcctaggtgactgaatgagaccctgtctcaaaaacaagaatttactatatttttgtctgattttatgcctaatgcaccctatttcccatagaaactgtg

SEQ ID NO: 150076 - DNA, 329 bp, Homo sapiens
gtgacctaacatggctggcgtgactggcaggctttgagaactgggcctgaacttctagcacactcagcaaacttatgtggcctcactttctccagtcagattccccgaagctcgccccagaggctgtgagatgctgtttaaataacttgtgaaccagaagtatctgagacaggtcttaatttggaatgtttattttgccaaggacgtgcccatgacacagcctcaggaggtcctgatgacatgtgcccaaggcggttggggcacagcttggtgtaatacgttttagggagacctcagatattagtcaatgggtaaggtgtaccttggtt

SEQ ID NO: 150077 - DNA, 266 bp, Homo sapiens
tgcacccagcttcttttttttaattgtgataaaatgtaagcttaatctttatattacactgtctcttatgtttgaggaaaagcttagggacatctggttctcttcatgggaaggagaaatcttatctttgcagccagggaggcagctgcaccctggtacagaaggatccagaaaggccatgctgtgagaaggcacattactgggcctttatgactcgtcataggaccgaagttggccagcaagctctaagatcctgtggagaacgt

SEQ ID NO: 150078 - DNA, 805 bp, Homo sapiens
acaaaggaggctcagaggattaagtgacctgcccgcagcaacacggagaagatgtggtggaaccagggatcaaaaatttgtcctctgtgtatatagcgcctcaactttccatcacacttgccttcctggtgacctgatatcccaggattttcacttactgctctggggacacattggttaaatccaagtggtttgcaggcactgactggcaacataactgtggtcaatagaagaatgatgtactgagtggtggtcacttagaaccatgcatctgccacccctcgaggctgggccatgaagaaggcatggctcggctggcacggtggctcacacctgtaattccagcaatttgggaggccgaggtaggctgattgcttgagcttaggagtttaagaccagcctgggcatcatggcaaaaccccatctctataaaaaatacaaacattagccaggtggtatgcacctgtgatcccagcaacagcaggaggctgaggtgggaggattgcttgaaccgggtgtcagacctcagagcctaagctaagccatcatatccccagtgacctgcttgtgtacatccagatggcctgaagcaactgaagatccacagaagtgaaaatagcattaactgatgacattccaccattgtgatttgtttctgccccaccctaactgatcaatgttcttgataatttcccccacccttaagaagtttctttataattcgccccacccttgaatgtactttgtgagatccaccctctgccccaaaaacattgctcttaactccacctcctatcccaaaacc

SEQ ID NO: 150079 - DNA, 208 bp, Homo sapiens
taacattttgttgtttgccacaacattacacctgtgacttctttctttctcctgtcctcttgatgcagcatgctgtcaaactgtatcttttgagttgttctaaattgaatcctggtcaaagggatttaacaacatctaaaacggaactagcttagattctcttccattctgtagaggttcctttgttcctgcttacctacccatgtct

SEQ ID NO: 150080 - DNA, 419 bp, Homo sapiens
caagacctcctcctcctatctctcaatcaagagaaggatgctaatttatggcccaggaagagaagaggcagtgtggccttctattaatagtagcaagccaagaagcaagagatggatattcggtgcctgggtttttccctgacagttaagttgggccttagtggaggttagcatgcacctagaagccaaggtgggctcagatcccacacacaaggtggccctggaaagtcactgcctctctctagatttgatgctccctttataaaatgaaaatgtttagttcatctcagaagccccctctgtctctgacagtgtatgactatgtggggaggcaggaaccagatgagaccaaatgccagggcattacaggaccaagccgccaatcctgatgcaaatgacaagccttggaggagtgactc

SEQ ID NO: 150081 - DNA, 325 bp, Homo sapiens
tcacaaaggatgtcgtgctacctccacaaacagccaatcaacctgactttgttgcctacaggtttgtccctggctgtctttggctaattaggctttcatgatgccttattcaaaaaagaagtacattggttcactaacatctctcacatgctacaactaataggtggaaaccaatatggagatgtcaaatgagtcggtgtccaagtttgtgtacttcaaaatgctaaagaggaaaatccatacattgtgagccttatgcagtttcacaaaagacacactaaaacaaattctgaatctcaaccaccctgtttgtggaggtagcact

SEQ ID NO: 150082 - DNA, 108 bp, Homo sapiens
tgggggtgggtgggggagaagctgaagctggtaagggctccagcccatcagagagagaggctctcctagggcgtccagggctggccatctgtgaacggggagctttct

SEQ ID NO: 150083 - DNA, 288 bp, Homo sapiens
ctccctttcctcctccctaatacattgaatagtccacattcaccagcatcaagtctcttttactaggacaatggcaacaagaaatcttcaacaagtgctggcctgacccctttcctttttctacagttccagctgagcagcaaaaactgcttgaaattcagcaatcacatttctcactgtttcagaatgacctatttcgcactagaatgaaccagtgaattcatacatataaataactatctgcagaccctgcttttcaaaacatgaacagaaataagtaaaaagaag

SEQ ID NO: 150084 - DNA, 329 bp, Homo sapiens
tgctagtcactgtgctcaacacacctgatgcctaggataaaattgttgcagtagtctcctgcctgtggggtggcctcattcccatctgacctcccggcactgaagatggcctgtatcttccacctctgtggcctaaatgcccaggcttcctcctgttctagactcaaaattcaattggttctgcttgtgtccaatgccatcaccctggagccaatccctgaggccattgaaatggggatggaagcatccatgcaggaagtgagggtgctgtgcaaagaacacacctacaacaatggccctcagactcacttcttcccttccgttccagt

SEQ ID NO: 150085 - DNA, 467 bp, Homo sapiens
caaaatgtaatgtaaagattatgttctgattggtagtgtcctgaggagatctgatagtgtcctgatattttgtccgatcaagcctcaaaaaccaggttaatgtagaagtcaacccaggggatcaataatttttcagacttatctcaggatttgaactacagtgaagctcaaggtcttcacactgtcctcagtgcactataatgctatagatctagtttgaagccagtggtatccaggaccttagccagagacttcaagggtttgaagagcagtagaaaacacagcaatgcagatacttgggttactggttgtacccagtggaatgtgtacaggattctttttgactgttagaaggaaagggagaaatagagagttggataaggagattgattgattgattgattgattgattgattttgagatggagtttcgctccagcctgggcgacagagccagactccatctca

SEQ ID NO: 150086 - DNA, 226 bp, Homo sapiens
gatttccctattctgtatgtttcatgtagatgaaatcgtagtgtgtgccctttgcttctgacttactcacttagcatgttttcagggttcatccatgttgtagcatgaatcagaacttgattcctttttaaggctgaatggtattcactgtctggatagattacattttgtttattcatgtattgatggacattttggtggtttctacctttttggttgttgtgaa

SEQ ID NO: 150087 - DNA, 347 bp, Homo sapiens
cttcagcctgaacagtgagcccaaccacactgtgctggacttgggacctatgagctgctaacgttgtagtaattaattacatagcaataggaaactcacatgacgtttaaatatgacattaaagccactcatagtcttgaggagactcttaacttttaacataatatggttattcatctgaaagaatgatccttttttattttaaagttataaagtagatgaagaaaagttggaattaaagaagtgtacccccagatattttagacataattaaatgtgtcctgtcatcgcaatgatttatagatgtattgtgaaagccattagaatgtccggagacaacttctgct

SEQ ID NO: 150088 - DNA, 278 bp, Homo sapiens
cctttctaaatgggaagatatatcctggaacttcagagatatttagaaacactcatatactgggaagttcttcctacagtctaactgaaatccctcctacgatagctgaaacccacttcttccttttctttctgtcccttgggggatattgacagttcccatccttcctcccgccaaaggttctccctttggatgctgaatactaacttcttgctgaagtcatatctacactgaaccccacgcatggtcttaggaggatttatcatgactctataaac

SEQ ID NO: 150089 - DNA, 158 bp, Homo sapiens
cacgcacttaggtgtggttcccaaaggccaactgaggaacgtaggccacaaaagacaaatcaagtgcccagagggtgggtaccagctctctcctcacatctaaggcaggactagaggatccactggtgactgtaatctctcctcaggatacgtctgtg

SEQ ID NO: 150090 - DNA, 228 bp, Homo sapiens
agtttctaaaaatatataattaaattgctgatttgtaatctttcttctttcataatgtaggcatttacagcttacatttccctcttagccctgctttcattacatcccagaagttttggtactttgtgttttctttttcattagtatggaggggttttctaatttctgtagtgactttttctttgacccactggttgtttatgttgtttaatttccacatatttgtga

SEQ ID NO: 150091 - DNA, 420 bp, Homo sapiens
ccctgatgtttctgtatcactttcaggatcattcttccctttccttgaagaacagtacatgtttgcagccaaatagctctctgggctagtcctgtagaatccaagttcagtagccttcctttattttgtcccactttgtcccttttaattcaaactggcaatgtctttgctggtataatcccattattatccctgacttgtgctgagatggctggttaagtccataagtcatatccatcttctctgtatcaaatagttgtttagccacacccttggtattctcttagaacaagctttccctttttttttttttttcttgagatggagtctcactctgtcacccaggctggagtgcagtgacacgatctcggttcactgcagcctccaccttccaggttcaagtcattctcctgccttagc

SEQ ID NO: 150092 - DNA, 446 bp, Homo sapiens
gcagagggtggggaagggccgcaggtaaggtgctgtgtcaacctgggcagttccaaaccctgcatgggaccaggggcaccgagggccccagctcccagggtagggggtcgtgccactatgcactgccttttcttcttccggtgctgctttactttctcttgctcctggagcagtgctcactggagacgctgggaccctgagcactgaccaagagtgatccctgacagcgtcagattcctatgcagaagggactgctgggtgggaaatggatcaccgacaggttctaaatgcaaacccacaggctgcaggagaggggtgaggggcgaaggagggaatcccacctctgggaaagcatcctcaggaaacctagataggtcctggaggtgaggacaatcgccaaggagggagaaggaaaaggaggaccctggttaatctgcacgccaagg

SEQ ID NO: 150093 - DNA, 275 bp, Homo sapiens
taacagcacatctgaggcaaaaccctgtaattaaactttcttaatacgtagtactaatgatcttataagagaaaaatatctattccgtgatcatcttaataaaggcttttgaaaaagtatttgataaaattaaacactaatgaccaataaaatacttaagaaatggagtagaaagatacttttttgactgctttaaaaggtgttaaggtagtaaacactactaaaaatgagccccagagcagtgttactcaaaatgttacagtttgtgaggaggt

SEQ ID NO: 150094 - DNA, 486 bp, Homo sapiens
atctgcctgcctcagcttcccaaagtgctgggattacaggcatgagccaccgtgccctgcccactgaaacttttaatttatttccatgagtggattttaactaggaagaaatattttttgctttactggcagatctagtggagtgaattgtgcaatttataagacatctatctttaacatagatactgtttttcttgtgttacattttaaagtgtattgtctgtacttttctcatattttgtgctgggggagctgagataatttcttgaatattagtgccttgtagtacaatgtaagatgctagttataagatagttgttgtttgaatcccagagtcctcaaaacaatcttttattgctaggaagccagaatggccttatgcacaggtagggttaaggaatgcattcatttgttcctttattcaacaaacattaattgcatgtctgctgcgtaccaggtattgcattaagagctgaggatatagca

SEQ ID NO: 150095 - DNA, 312 bp, Homo sapiens
aaaaactatgtctagtataattccaatttgcaaaaataatttgtgtgtttatatgtatgtgtacagaatatatgctacatattaaccttaattatctgtggtttgtggatgtagatgattttaattcccttctttgtgcttctattcttcaaaattaccacaacaagtattatttttaaaagggtggaatgagaatgccctggggtatcttataagaatgtgatgaaagtctaaatttaaattataaattaaatcatgcacatttattgtattattgttagatattagactgatctcaagctttgcctttct

SEQ ID NO: 150096 - DNA, 519 bp, Homo sapiens
ttttagggagacatgagacagcaatcagtatgtataaggtgtacattggttccatctggaaaggggacaactcgaggtgaaggcgggacaactcaaagtgcggagggggcttccagatcatagatccaccctgatttcagcgggcgttcctgggtcttgtatgcactaggtgccctcaatgcttggcaactggaatgggttagcctggaggcatttaggctgtccttctacaaccacagaagagccatcactggcagagagatccttggcgcagttaagcagagatcttctcagaagagcttttgaataaatgaagttgttcagaatggccttgttaaaatgactcacttgtcaaaaaactagatgtgttggaaggctgggttggaagacaagatgtctgagaagctgtcctgctgcatgaggagtttcattgctacacacctagtctctgggtcctgtgtttttggcctccagcttacttcgtgaacataataaaggaaaggcattttctcttgtgca

SEQ ID NO: 150097 - DNA, 512 bp, Homo sapiens
cgtaattcaactgtttatagaggaaaaatcacattgccaggacagtccctttggggcaacactcgggctgaattcgggacaactcaaacagcggagggggcttccagatcatagatatccaccctgatttcagcgggcgttcctgggtcttgtatgcactaggtgccctcaatgcttggcaactggaatgggttagcctggaggcatttaggctgtccttctacaaccacagaagagccatcactggcagagagatccttggcgcagttaagcagagatcttctcagaagagcttttgaataaatgaagttgttcagaatggccttgttaaaatgactcacttgtcaaaaaactagatgtgttggaaggctgggttggaagacaagatgtctgagaagctgtcctgctgcatgaggagtttcattgctacacacctagtctctgggtcctgtgtttttggcctccagcttacttcgtgaacataataaaggaaaggcattttctcttgtgca

SEQ ID NO: 150098 - DNA, 464 bp, Homo sapiens
  misc_feature (18)..(18): n is a, c, g, or t
ttaataaaattttttttntattttttattaggtttttttgtatgttttaaggtttgtggatactattaatccaccctgatttcagcgggcgttcctgggtcttgtatgcactaggtgccctcaatgcttggcaactggaatgggttagcctggaggcatttaggctgtccttctacaaccacagaagagccatcactggcagagagatccttggcgcagttaagcagagatcttctcagaagagcttttgaataaatgaagttgttcagaatggccttgttaaaatgactcacttgtcaaaaaactagatgtgttggaaggctgggttggaagacaagatgtctgagaagctgtcctgctgcatgaggagtttcattgctacacacctagtctctgggtcctgtgtttttggcctccagcttacttcgtgaacataataaaggaaaggcattttctcttgtgca

SEQ ID NO: 150099 - DNA, 451 bp, Homo sapiens
cccatacacatcaccatacctcccccctccactacgcggagacacagacctactaatccaccctgatttcagcgggcgttcctgggtcttgtatgcactaggtgccctcaatgcttggcaactggaatgggttagcctggaggcatttaggctgtccttctacaaccacagaagagccatcactggcagagagatccttggcgcagttaagcagagatcttctcagaagagcttttgaataaatgaagttgttcagaatggccttgttaaaatgactcacttgtcaaaaaactagatgtgttggaaggctgggttggaagacaagatgtctgagaagctgtcctgctgcatgaggagtttcattgctacacacctagtctctgggtcctgtgtttttggcctccagcttacttcgtgaacataataaaggaaaggcattttctcttgtgca

SEQ ID NO: 150100 - DNA, 454 bp, Homo sapiens
ttagatacgggtggaggtgttggtaggggccgaggtggaggggtaacccttttgactaatccaccctgatttcagcgggcgttcctgggtcttgtatgcactaggtgccctcaatgcttggcaactggaatgggttagcctggaggcatttaggctgtccttctacaaccacagaagagccatcactggcagagagatccttggcgcagttaagcagagatcttctcagaagagcttttgaataaatgaagttgttcagaatggccttgttaaaatgactcacttgtcaaaaaactagatgtgttggaaggctgggttggaagacaagatgtctgagaagctgtcctgctgcatgaggagtttcattgctacacacctagtctctgggtcctgtgtttttggcctccagcttacttcgtgaacataataaaggaaaggcattttctcttgtgca

SEQ ID NO: 150101 - DNA, 451 bp, Homo sapiens
tggaatgggaagacggtaggagcgcgggtatagcattttcagaggcgcactgataatccaccctgatttcagcgggcgttcctgggtcttgtatgcactaggtgccctcaatgcttggcaactggaatgggttagcctggaggcatttaggctgtccttctacaaccacagaagagccatcactggcagagagatccttggcgcagttaagcagagatcttctcagaagagcttttgaataaatgaagttgttcagaatggccttgttaaaatgactcacttgtcaaaaaactagatgtgttggaaggctgggttggaagacaagatgtctgagaagctgtcctgctgcatgaggagtttcattgctacacacctagtctctgggtcctgtgtttttggcctccagcttacttcgtgaacataataaaggaaaggcattttctcttgtgca

SEQ ID NO: 150102 - DNA, 450 bp, Homo sapiens
tgagaccaacaaaccacaccccgccgccgccacccctcgcggggcgccttagtgatccaccctgatttcagcgggcgttcctgggtcttgtatgcactaggtgccctcaatgcttggcaactggaatgggttagcctggaggcatttaggctgtccttctacaaccacagaagagccatcactggcagagagatccttggcgcagttaagcagagatcttctcagaagagcttttgaataaatgaagttgttcagaatggccttgttaaaatgactcacttgtcaaaaaactagatgtgttggaaggctgggttggaagacaagatgtctgagaagctgtcctgctgcatgaggagtttcattgctacacacctagtctctgggtcctgtgtttttggcctccagcttacttcgtgaacataataaaggaaaggcattttctcttgtgca

SEQ ID NO: 150103 - DNA, 454 bp, Homo sapiens
gaatataaaaaatatgagaagagaattttagtgtgtcggagaaggaagtgttctgctaatccaccctgatttcagcgggcgttcctgggtcttgtatgcactaggtgccctcaatgcttggcaactggaatgggttagcctggaggcatttaggctgtccttctacaaccacagaagagccatcactggcagagagatccttggcgcagttaagcagagatcttctcagaagagcttttgaataaatgaagttgttcagaatggccttgttaaaatgactcacttgtcaaaaaactagatgtgttggaaggctgggttggaagacaagatgtctgagaagctgtcctgctgcatgaggagtttcattgctacacacctagtctctgggtcctgtgtttttggcctccagcttacttcgtgaacataataaaggaaaggcattttctcttgtgca

SEQ ID NO: 150104 - DNA, 568 bp, Homo sapiens
ttttagggagacatgagacagcaatcagtatgtataaggtgtacattggttccatctggaaaggggacaactcgaggtgaaggcgggacaactcaaagtgcggagggggcttccagatcatagatccaccctgatttcagcgggcgttcctgggtcttgtatgcactaggtgccctcaatgcttggcaactggaatgggttagcctggaggcatttaggctgtccttctacaaccacagaagagccatcactggcagagagatccttggcgcagttaagcagagatcttctcagaagagcttttgaataaatgaagttgttcagaatggccttgttaaaatgactcacttgtcaaaaaactagatgtgttggaaggctgggttggaagacaagatgtctgagaagctgtcctgctgcatgaggagtttcattgctacacacctagtctctgggtcctgtgtttttggcctccagcttacttcgtgaacataataaaggaaaggcattttctcttgtgcaaactatataaacgaagatcatataacactactggcctccttggcctcac

SEQ ID NO: 150105 - DNA, 813 bp, Homo sapiens
  misc_feature (1)..(1): n is a, c, g, or t
  misc_feature (21)..(21): n is a, c, g, or t
  misc_feature (23)..(23): n is a, c, g, or t
naaaaaataaattaaataatnangtatgtggaggaagaaggttaaggtttctaataatccaccctgatttcagcgggcgttcctgggtcttgtatgcactaggtgccctcaatgcttggcaactggaatgggttagcctggaggcatttaggctgtccttctacaaccacagaagagccatcactggcagagagatccttggcgcagttaagcagagatcttctcagaagagcttttgaataaatgaagttgttcagaatggccttgttaaaatgactcacttgtcaaaaaactagatgtgttggaaggctgggttggaagacaagatgtctgagaagctgtcctgctgcatgaggagtttcattgctacacacctagtctctgggtcctgtgtttttggcctccagcttacttcgtgaacataataaaggaaaggcattttctcttgtgcaccaaaaacaaggcgcataggtccgcgggggcacgtaccgtcgcgctctcagttcgcgctcgcggtgtgcgccgcccttctccggcaaggctcttccctcttcctcctactgcgccggcgtcctcgcccccccaccccccgctccgggttgcgcgtctactgtcctggttcctcgggcgcccgacccgcgccccaagcgcggcgggggccctagcgatggtgccgaggcgcggtcccgcgcggtgcgccgtcccccacgctccgcgtggcgggtgctgcgtcgctgcgtcgcgtgggtggcccctcccggtcgagggacccccgcgccgcgcgccgggtttccccgcgctccggagtccgac

SEQ ID NO: 150106 - DNA, 487 bp, Homo sapiens
gaatataaaaaatatgagaagagaattttagtgtgtcggagaaggaagtgttctgctaatccaccctgatttcagcgggcgttcctgggtcttgtatgcactaggtgccctcaatgcttggcaactggaatgggttagcctggaggcatttaggctgtccttctacaaccacagaagagccatcactggcagagagatccttggcgcagttaagcagagatcttctcagaagagcttttgaataaatgaagttgttcagaatggccttgttaaaatgactcacttgtcaaaaaactagatgtgttggaaggctgggttggaagacaagatgtctgagaagctgtcctgctgcatgaggagtttcattgctacacacctagtctctgggtcctgtgtttttggcctccagcttacttcgtgaacataataaaggaaaggcattttctcttgtgcaaaaaaaacaaaacaacggcctccgcggccccac

SEQ ID NO: 150107 - DNA, 446 bp, Homo sapiens
cccgcgcgacggattcatcatgcgcgtccgcgggtgagaggccttgctagatccaccctgatttcagcgggcgttcctgggtcttgtatgcactaggtgccctcaatgcttggcaactggaatgggttagcctggaggcatttaggctgtccttctacaaccacagaagagccatcactggcagagagatccttggcgcagttaagcagagatcttctcagaagagcttttgaataaatgaagttgttcagaatggccttgttaaaatgactcacttgtcaaaaaactagatgtgttggaaggctgggttggaagacaagatgtctgagaagctgtcctgctgcatgaggagtttcattgctacacacctagtctctgggtcctgtgtttttggcctccagcttacttcgtgaacataataaaggaaaggcattttctcttgtgca

SEQ ID NO: 150108 - DNA, 458 bp, Homo sapiens
atttttgtaataaaacccccaaccaacaacgtcgcgtgaagcccccacccccaccccccataatccaccctgatttcagcgggcgttcctgggtcttgtatgcactaggtgccctcaatgcttggcaactggaatgggttagcctggaggcatttaggctgtccttctacaaccacagaagagccatcactggcagagagatccttggcgcagttaagcagagatcttctcagaagagcttttgaataaatgaagttgttcagaatggccttgttaaaatgactcacttgtcaaaaaactagatgtgttggaaggctgggttggaagacaagatgtctgagaagctgtcctgctgcatgaggagtttcattgctacacacctagtctctgggtcctgtgtttttggcctccagcttacttcgtgaacataataaaggaaaggcattttctcttgtgca

SEQ ID NO: 150109 - DNA, 452 bp, Homo sapiens
  misc_feature (54)..(54): n is a, c, g, or t
tatccgaaactaaagtaaagagaccctcaacgcacccacaccccaggcttttgntaatccaccctgatttcagcgggcgttcctgggtcttgtatgcactaggtgccctcaatgcttggcaactggaatgggttagcctggaggcatttaggctgtccttctacaaccacagaagagccatcactggcagagagatccttggcgcagttaagcagagatcttctcagaagagcttttgaataaatgaagttgttcagaatggccttgttaaaatgactcacttgtcaaaaaactagatgtgttggaaggctgggttggaagacaagatgtctgagaagctgtcctgctgcatgaggagtttcattgctacacacctagtctctgggtcctgtgtttttggcctccagcttacttcgtgaacataataaaggaaaggcattttctcttgtgca

SEQ ID NO: 150110 - DNA, 444 bp, Homo sapiens
gagaactagaaagctaagcgaatcatggagcatagcgcgagtctagtaatccaccctgatttcagcgggcgttcctgggtcttgtatgcactaggtgccctcaatgcttggcaactggaatgggttagcctggaggcatttaggctgtccttctacaaccacagaagagccatcactggcagagagatccttggcgcagttaagcagagatcttctcagaagagcttttgaataaatgaagttgttcagaatggccttgttaaaatgactcacttgtcaaaaaactagatgtgttggaaggctgggttggaagacaagatgtctgagaagctgtcctgctgcatgaggagtttcattgctacacacctagtctctgggtcctgtgtttttggcctccagcttacttcgtgaacataataaaggaaaggcattttctcttgtgca

SEQ ID NO: 150111 - DNA, 434 bp, Homo sapiens
  misc_feature (29)..(29): n is a, c, g, or t
aacatatcaacgagccggaaagaaaaagnactttaggaatccaccctgatttcagcgggcgttcctgggtcttgtatgcactaggtgccctcaatgcttggcaactggaatgggttagcctggaggcatttaggctgtccttctacaaccacagaagagccatcactggcagagagatccttggcgcagttaagcagagatcttctcagaagagcttttgaataaatgaagttgttcagaatggccttgttaaaatgactcacttgtcaaaaaactagatgtgttggaaggctgggttggaagacaagatgtctgagaagctgtcctgctgcatgaggagtttcattgctacacacctagtctctgggtcctgtgtttttggcctccagcttacttcgtgaacataataaaggaaaggcattttctcttgtgca

SEQ ID NO: 150112 - DNA, 582 bp, Homo sapiens
ttttagggagacatgagacagcaatcagtatgtataaggtgtacattggttccatctggaaaggggacaactcgaggtgaaggcgggacaactcaaagtgcggagggggcttccagatcatagatccaccctgatttcagcgggcgttcctgggtcttgtatgcactaggtgccctcaatgcttggcaactggaatgggttagcctggaggcatttaggctgtccttctacaaccacagaagagccatcactggcagagagatccttggcgcagttaagcagagatcttctcagaagagcttttgaataaatgaagttgttcagaatggccttgttaaaatgactcacttgtcaaaaaactagatgtgttggaaggctgggttggaagacaagatgtctgagaagctgtcctgctgcatgaggagtttcattgctacacacctagtctctgggtcctgtgtttttggcctccagcttacttcgtgaacataataaaggaaaggcattttctcttgtgcatgcatgctatgtgtgcatgtgtgtatgtaaaatcaaaaaagaaaatggcctcgctggcctcat

SEQ ID NO: 150113 - DNA, 883 bp, Homo sapiens
ttttagggagacatgagacagcaatcagtatgtataaggtgtacattggttccatctggaaaggggacaactcgaggtgaaggcgggacaactcaaagtgcggagggggcttccagatcatagatccaccctgatttcagcgggcgttcctgggtcttgtatgcactaggtgccctcaatgcttggcaactggaatgggttagcctggaggcatttaggctgtccttctacaaccacagaagagccatcactggcagagagatccttggcgcagttaagcagagatcttctcagaagagcttttgaataaatgaagttgttcagaatggccttgttaaaatgactcacttgtcaaaaaactagatgtgttggaaggctgggttggaagacaagatgtctgagaagctgtcctgctgcatgaggagtttcattgctacacacctagtctctgggtcctgtgtttttggcctccagcttacttcgtgaacataataaaggaaaggcattttctcttgtgcaaaaaaaaaaactaacaatggactccttggcctcatttgtggcactctgtgggccgttccctttatggagggctattccacgttcctcctttacctgctccgcttcgtccccacgcttctgctgatacttttagctctcattacgctatccgcgtcgctattggtcgacttttgcgtagcgcggcccggggctccggggaagctatgtccccgcgcgtttatgcggcggcccgcctctcgcgcttggacaggctgctcgtgtcgcgcgtctcgatgtcgagtccgcgccgtcgtgccggatcatcctcgcctagcgatggccctccccttcgctcctcggctttcgctcgctcttcgccgccccc

SEQ ID NO: 150114 - DNA, 880 bp, Homo sapiens
ttttagggagacatgagacagcaatcagtatgtataaggtgtacattggttccatctggaaaggggacaactcgaggtgaaggcgggacaactcaaagtgcggagggggcttccagatcatagatccaccctgatttcagcgggcgttcctgggtcttgtatgcactaggtgccctcaatgcttggcaactggaatgggttagcctggaggcatttaggctgtccttctacaaccacagaagagccatcactggcagagagatccttggcgcagttaagcagagatcttctcagaagagcttttgaataaatgaagttgttcagaatggccttgttaaaatgactcacttgtcaaaaaactagatgtgttggaaggctgggttggaagacaagatgtctgagaagctgtcctgctgcatgaggagtttcattgctacacacctagtctctgggtcctgtgtttttggcctccagcttacttcgtgaacataataaaggaaaggcattttctcttgtgcaccaaaaacaaggcgcataggtccgcgggggcacgtaccgtcgcgctctcagttcgcgctcgcggtgtgcgccgcccttctccggcaaggctcttccctcttcctcctactgcgccggcgtcctcgcccccccaccccccgctccgggttgcgcgtctactgtcctggttcctcgggcgcccgacccgcgccccaagcgcggcgggggccctagcgatggtgccgaggcgcggtcccgcgcggtgcgccgtcccccacgctccgcgtggcgggtgctgcgtcgctgcgtcgcgtgggtggcccctcccggtcgagggacccccgcgccgcgcgccgggtttccccgcgctccggagtccgac

SEQ ID NO: 150115 - DNA, 571 bp, Homo sapiens
ttttagggagacatgagacagcaatcagtatgtataaggtgtacattggttccatctggaaaggggacaactcgaggtgaaggcgggacaactcaaagtgcggagggggcttccagatcatagatccaccctgatttcagcgggcgttcctgggtcttgtatgcactaggtgccctcaatgcttggcaactggaatgggttagcctggaggcatttaggctgtccttctacaaccacagaagagccatcactggcagagagatccttggcgcagttaagcagagatcttctcagaagagcttttgaataaatgaagttgttcagaatggccttgttaaaatgactcacttgtcaaaaaactagatgtgttggaaggctgggttggaagacaagatgtctgagaagctgtcctgctgcatgaggagtttcattgctacacacctagtctctgggtcctgtgtttttggcctccagcttacttcgtgaacataataaaggaaaggcattttctcttgtgcagaaaatcaattacacactggaattaaaatcaaaaatggcctcgttggctcta

SEQ ID NO: 150116 - DNA, 441 bp, Homo sapiens
gtacttgcgaggtagagcatgatacaagtcttcgagtccttcgcaatccaccctgatttcagcgggcgttcctgggtcttgtatgcactaggtgccctcaatgcttggcaactggaatgggttagcctggaggcatttaggctgtccttctacaaccacagaagagccatcactggcagagagatccttggcgcagttaagcagagatcttctcagaagagcttttgaataaatgaagttgttcagaatggccttgttaaaatgactcacttgtcaaaaaactagatgtgttggaaggctgggttggaagacaagatgtctgagaagctgtcctgctgcatgaggagtttcattgctacacacctagtctctgggtcctgtgtttttggcctccagcttacttcgtgaacataataaaggaaaggcattttctcttgtgca

SEQ ID NO: 150117 - DNA, 152 bp, Homo sapiens
tcctgtggaattcttgggtgataaaagtcttgccttctaaagactacttcacttagggataactaataggcctggactggacaaatgcatacatctgtaagctcaagagccactccataatgaacagtcccacctaattgcttctttttttc

SEQ ID NO: 150118 - DNA, 579 bp, Homo sapiens
ctctatttagaaatcattgttttaagccatggactgtggcagttcctagagcaattggccagtcactgaacatctgttgcttcttccctccagctgttgggttcggatggtagcaaacagtgtgtccacaaataaacagttgacgctttagaagatttcataggactggtcaggaaatgcctttgttggtatctgcttctactggaaggaccccttctttgtaaacacatcactagctcagtatatgttttggctttaattcttggtattcttttgatcttgaagagcaaggcagagagccatctgattgtcaggagatttaagaaacaataataatcacagtgatggaaatgccgcttatttgtgtagggccatatcatttacaaagtgaattcatgtacacaagcccagagagaaaagcaagctgatgatggcaggttccatgtgccttttatggttcattagagttcttcagcatcaaatgccctcccattcattgctacactcattttactgcttgctcatttcagtcctttggtactctagtgacacaacaggtttctgtgtttgatcctgtcc

SEQ ID NO: 150119 - DNA, 467 bp, Homo sapiens
ttcattggcacaaatttccaaacatgtcagacttgaaactaaccagcaagggattgctttgctggaaagtcattctaaagtctaaattcttattctaagatccagggctgaaaggcaaagtaaattcctcgggcaacacagttttggagaagtcatagaaagatctcccaaaatgttactgagtcttttcccaactaagcttttagctattccaattaactaaaaactacacatttataagcattaaacatgctactgtttaggctaaaatctcaaccctccatttccattcagtgaagcttttatccacaacaatcactttaactcaacatggcagccttgcaagggttaccatggcagagttctttggttactttggttacctcctgagctccacactctggggaagtgtgttttatgcgggaaagagcattgagggggaaacatgcccatgggctcaaactgga

SEQ ID NO: 150120 - DNA, 657 bp, Homo sapiens
ttccatgtatcatcagtctatatatatcacaaagtcccccgaaatcaaacctcattatgataggaaacattccatgaactgtctcttgtttgatcaatattaagcagatgtctgttaaacagataatgaaagagtttttaaagttgaatatggtagtcctacctacatttttccaataataatagcaataatgctgctaatgagcataaatcataatagtaaaaataataataaaagcaagcactgtttatgaatgtctactttagcacctactacattcaaaagcattaaatgtttctgttcctcatatcaacactgaaatattatcattattacatttttaatgatgatgaaactcagacttatgcagattgttaaggccaaaatgttagaattaggattctgactagttatttctggctctaaataccatgccttggtatttctattacttcatgctacctcagtgactcctaatccatgggtaaggagagaatacagacaaaccaccaagaaaatcaaatttgtggtccatttttgttaatcatagtattccggcaaagtggcaaatgatattactggagaattagtacatatgatccctatttaaagcctaaacaacgattataataatacagagagtaggctgggcgcggt

SEQ ID NO: 150121 - DNA, 281 bp, Homo sapiens
ctttccttaacaaggagcaattgcctccctgagcacatttggttctcctatagacgttaacacaacaggagcctctatttctactgagttttaaaagggttaagtgtcagacatgatatattactgtgaaatgtcatctaaaataaatgaggctactgcccttagagaaaggatcattgttggccatcaaagaaatagcactgacattcagtcatctcactacgctttagggtgaaggatcactttaggcaaatagcaggcaacttgtaagtacttatttt

SEQ ID NO: 150122 - DNA, 194 bp, Homo sapiens
gtttgcagaactcttaagttgaagagctaggatcacagactcctaacattccattcattatacaagttatccctaccttccagatcagcttacctacctgctgtctgtgtactacacctcaccacctgggtgtctctcagacgttaccaagagacagagtaaacccatgctttctcctatccaaaccagtctct

SEQ ID NO: 150123 - DNA, 373 bp, Homo sapiens
tatttaaatagattaattctgcactaagtaggacaaagaaagattataaatgtccttacaggtgaaaacagctccagcgtgagttttggcaccacactggtagaaaacacttggtgttcagacccttttggacctgggggaattgcagagtaaggaatcttgcccacctgcccttattgtctgtggtgaggatgaaatgagatcattgcagataaatgttcttagcaccctgcagggaaagcacttgtttgctgttggctgctgctgctgtggtcttaagagataaaatagagacactgtcaacaaataagagaacgcttacccagggggaaggcacttctgtaggtttttgatgtaaacaagctgttaaagg

SEQ ID NO: 150124 - DNA, 612 bp, Homo sapiens
tcaaaaaaaaaaaaaaaaaaaaaaaaaagaaatcagatgcagatctcgttctcagggattttatagtccagtgggatgggagtggtgagcctgtagtcaaggacaaggcaggaagtgttgagttgagaaaatggagtgggagtttagagggaaaaaagcttgagaggaggtagcactggaaccagtcctcagaggaaggtggggtagtagggtgaggatgtaaggggatgaggtaggtggggtccagcaggaccatggtaggcaaagtcgtggaggcagagaagtgtgatctgacttaactagaatgtggcagtgaaaactggaaaggtaaatgtggccaagaaggccaacaagcacggagaacggcctccaggggactgccctcatggcggaactcagagcttccacataccaggctctgcatggaagcattcttgtacacccagagctgtataccgaatcatactggtatccagggctcaatgtaaaagtatgcacatgcacacgtcagtacacggaatcacatacatcaccggggtcatatgctgagccatctgccacatcgggggctatgttcagaaccacacatgtccttggggctctggagaactg

SEQ ID NO: 150125 - DNA, 868 bp, Homo sapiens
atttagcttgacaagtcatgagaattaagagtcaagacaagccatggaaattaggagtcaagacaaatgatgagaatcaggagtctaaagatattctcttacaaggaaactcttcattttgaaaatattttccaattgacacttcttttgcaagcatgagttacacctcaaaagaaatatgaattcatcaatgaaagaaactctacgttaccaaactttttttccatttcttaactagagtctggcataaattatgccctcaataaatatttgctaaatatttatttgtataaaatcttaaaataagttaaataaaagcatattcagaggatgtgttgtttctggttatgaattgagaaataatttttgtctatttatgtattattactctgcaataatcaagcataaaaaaggatattgcgtttcactttttagtactttatgtatataaactaatttatactctcattgtttaataagtacttgcaattttctaaatgtattacttatgtgctttaaataacattaatttcaatgtagagggaatttgcttgcctataatgcatttttcccaatatagaatgaaatgtattttgtcacaaggaaaatatgtggtttgaggctgacaatcatacagagtgcaaatgtatttgtggtggatcatgaaatataagcttcacacactggttatttcagaaaatcgggagtcagccaaatactttagaccataactttatgaagaagcaaatattatatgacttttgtttgcctttgaactgaaatactcacctgtaatactttctaccaaagagatatgaagtggaaaactaattgataaagtagattaaagacaatttctgaggccatt

SEQ ID NO: 150126 - DNA, 329 bp, Homo sapiens
cgggtgcgccggcctggcccgaggggttggtatttaaaagcaattcgatatatctctccttttaactcttcattttgaaaatattttccaattgacacttcttttgcaagcatgagttacacctcaaaagaaatatgaattcatcaatgaaagaaactctacgttaccaaactttttttccatttcttaactagagtctggcataaattatgccctcaataaatatttgctaaatatttatttgtataaaatcttaaaataagttaaataaaagcaacagatgcgacaggccccttttttcccgtgagtggaagtgatcttaaaagaaa

SEQ ID NO: 150127 - DNA, 276 bp, Homo sapiens
cgggtgcgccggcctggcccgaggggttggtatttaaaagcaattcgatatatctctccttttaactcttcattttgaaaatattttccaattgacacttcttttgcaagcatgagttacacctcaaaagaaatatgaattcatcaatgaaagaaactctacgttaccaaactttttttccatttcttaactagagtctggcataaattatgccctcaataaatatttgctaaatatttatttgtataaaatcttaaaataagttaaataaaagca

SEQ ID NO: 150128 - DNA, 320 bp, Homo sapiens
atttagcttgacaagtcatgagaattaagagtcaagacaagccatggaaattaggagtcaagacaaatgatgagaatcaggagtctaaagatattctcttacaaggaaactcttcattttgaaaatattttccaattgacacttcttttgcaagcatgagttacacctcaaaagaaatatgaattcatcaatgaaagaaactctacgttaccaaactttttttccatttcttaactagagtctggcataaattatgccctcaataaatatttgctaaatatttatttgtataaaatcttaaaataagttaaataaaagca

SEQ ID NO: 150129 - DNA, 370 bp, Homo sapiens
  misc_feature (323)..(323): n is a, c, g, or t
atttagcttgacaagtcatgagaattaagagtcaagacaagccatggaaattaggagtcaagacaaatgatgagaatcaggagtctaaagatattctcttacaaggaaactcttcattttgaaaatattttccaattgacacttcttttgcaagcatgagttacacctcaaaagaaatatgaattcatcaatgaaagaaactctacgttaccaaactttttttccatttcttaactagagtctggcataaattatgccctcaataaatatttgctaaatatttatttgtataaaatcttaaaataagttaaataaaagcacangatgcgcgcagaccccccttttctcaaaaaatacccggttccccaaa

SEQ ID NO: 150130 - DNA, 398 bp, Homo sapiens
  misc_feature (352)..(353): n is a, c, g, or t
  misc_feature (388)..(388): n is a, c, g, or t
atttagcttgacaagtcatgagaattaagagtcaagacaagccatggaaattaggagtcaagacaaatgatgagaatcaggagtctaaagatattctcttacaaggaaactcttcattttgaaaatattttccaattgacacttcttttgcaagcatgagttacacctcaaaagaaatatgaattcatcaatgaaagaaactctacgttaccaaactttttttccatttcttaactagagtctggcataaattatgccctcaataaatatttgctaaatatttatttgtataaaatcttaaaataagttaaataaaagcaaaaaaaaaaacagtggcctcgccgcccccaannaaggggctctgcccccgcccccctcgagagaggcngacgccataa

SEQ ID NO: 150131 - DNA, 373 bp, Homo sapiens
atttagcttgacaagtcatgagaattaagagtcaagacaagccatggaaattaggagtcaagacaaatgatgagaatcaggagtctaaagatattctcttacaaggaaactcttcattttgaaaatattttccaattgacacttcttttgcaagcatgagttacacctcaaaagaaatatgaattcatcaatgaaagaaactctacgttaccaaactttttttccatttcttaactagagtctggcataaattatgccctcaataaatatttgctaaatatttatttgtataaaatcttaaaataagttaaataaaagcagcgcgatgcggccgatcttttatgtgtgataaacgaaataaaaggtcgaccgg

SEQ ID NO: 150132 - DNA, 319 bp, Homo sapiens
taagtgatccaaatttgccactggcaatttagaaaccagagaaagaaatgcacccggtcagagaaagttgaggctacatgacagagaaaagccaagaacttgatatttcacaggaatggggtaagacttgggagacctatgactttgccttcattgcactggacagttgttctttttattaataaatgtccttggagtgacaattctgctcttcaaagataaaagcggaagctttcagagacagtcagaaagggattcgactattttaattaattcatcactctcactaggtaacagcctctcagtaaatgcctttatc

SEQ ID NO: 150133 - DNA, 414 bp, Homo sapiens
aagagggcccagaatcagtgtcctctatcccctgaactcacatgtgtgcatgcaatgtgtttatgcatgtatgtgtctatgtgcatatgggtgtatttgtcttgcttctctggcctggcctagctgctccactcacaggtgcacccaggtcctcatcactatcaccaccagggcccagggccaggattagagaatccacaggtgctccccaatctctgccctccccaccgagtgtggtcctggggatgcagacagaggaggggcgccgagcagagtagagcgggctggtaccctctctaggtggaacccaggttgtgtgtaaagttggaggtctgccaagcagtgctgaattcaacacatcttctcacattctctttccagcaacgctccagggtgccctgactcaccttccta

SEQ ID NO: 150134 - DNA, 255 bp, Homo sapiens
actgcattgtcttttagggccaatggacttggaggcatagagattttataactactgccagaacccaaatattgccagtcggcctcttctgctgctgttgctagctgtcttcttctgggggaaatgggttgggttctaaatatgaattaacacagggctgtcttcgatgaattcagcacaaaatgttctcagcaattgaacactcggagagaagtgttaggcatttagtgcagactcatagaatagcaggacagg

SEQ ID NO: 150135 - DNA, 443 bp, Homo sapiens
gaggcacaagttaaaacatcataaaatgtcatttatgggtcctgccaagattggaaaccatatattcataacagcacaacaatacagttggcaagcagaaggcagctcttaggattaatccaggactgagaggtttgcctggtggatgaagtcgcagaggctgccggtgccctcccagacctcccagacactcacctttcctgtgcatgctgacagtttcttcactggagcagctgagactctccacctcagggtttttctctagctgtgtgagcaggcctcgccctcagacaaaagggaggtgagaagctcttaaggaagaagttcccctgggagcagcccacagccagtgacccatgaatgttggtggatgaacaccctagctccggtgcctctggagggaggaccactttgagacgtgctcctccttacagttgtccaaa

SEQ ID NO: 150136 - DNA, 270 bp, Homo sapiens
gtttattgtctgttcccccaccaccccactggaatgtaagcttcctgaaggctatatatggttttctcaccactacacagaaagatgcctggcacatagcaggcattagccacaagtgtattgaataagtaaatgaatcctatttgcatttgaccattatcaagctcacagtatcttactcataataaccaaagcacatataatagccaattaaccttacaataagcaactaaaaggacagataacagcattctgtttttattaaggatg

SEQ ID NO: 150137 - DNA, 1003 bp, Homo sapiens
aaatataaaagaattaacttgtcgtggtgatgtagtcccagctgttcgggagggtgaggtgggaggattgcttgagcccagggaggttgaggctgcagtgagctgtgatcgtgccgctgcactccagcctgggtgacacagcaagaccctgtctcaataaaataatacataaataaaataataaaataaaataaaataaattactgccaaaaatccatactaaacacactctccacattttaatgactatctcagtattactgatttttccctttccctcaggcttcagtatagctctccaagacactgttgctgatccttagctttaaattcaaataatggccaggcacagtgtctcacacttgtaatctcagcactttggaagaccgaggcaggaggatcccttgaggccaggaggaggttgcagtgagccgagatcgcaccactgcactccagccttggtgacagagcgagactccatccaaaaaaaaaaaaacaaaagaagaagaagaaaagcctttactccagatgtagagcagatgagctcatccatcatgattctccgggatatttactgccaagcaagattataggtgaagtcaatgtgccaacacggaattccggtaaaaggcttctggaaccctttgaaggtagcagcccttctctggacttctttatataccccgggacataaacttctggctagaggggggtggcaaagaaactgggatgggtacgcaaacgtaaggagagccacggtaaacagaccggggatcccagtaagcgtacaaagaacacactaaaggcccgcactggggcgcaacccgcctggaccagggacggggagacacgccagttagtgatacaacccgctgtgcaacaattgagcctagacccaaaagaagaagacacggcggatcagcaggaagagacgaccgaacgcacaaagacagagacgatagaacgctgcacgcaaagcaacgcggaacacaccacctgagca

SEQ ID NO: 150138 - DNA, 533 bp, Homo sapiens
tttatatccaggagttcaaagaacttgcctgtctgatacctctcttgttcacgacagggccaggccttttgagtggctgttacctacctctaagggtatgatgatgaattttatgtgtcaatttgactgggccacaggatgtttagatatttggtcaaacattattctggatgtttttggatgggatgaacatttaaatcggtagactgagtaaagcagtttgtcttccataatgtgggtgggcctcatccaatcagtaaaggcctgaacagaacaaaacagatccttgctctgagtaagacagaattcctcttgcctggctgcatttaaactgggatattgactttttcctgcctgtggacttaaaatattggctcttcctgggtctgtaactgctagcctttggaccggaactgtaccacaggctctcctgggtctctagcttgctgacttaccctgcagatcttgggacttgggacttgtcagccttcaataagtgtgagccaattctttgtaataaatctctttacaca

SEQ ID NO: 150139 - DNA, 319 bp, Homo sapiens
tccagaccaacccaggacatgtgatggggaagaggacgtgttgcaaagaataggtggtagggcctgtctggagctaggtagaggggccagcagctgggagggtgcgctggggccacatggctgtgccctcactgcaccgtctgcacagcaggctgtggcaggtgctaggggtttgggagacctgagaagaggctgttgaaattgtcttacttgggcggcagagagctggcttgggaaacaggcggtgcggatgggaaggggaaagcaggtggcagtgtggcctctggagaactgtggcgctgacacgggctaagcagga

SEQ ID NO: 150140 - DNA, 453 bp, Homo sapiens
ttgaggacccccccgactagccgacaggagggaagatgtgaccatgacaggagcacaagaagggcagatggggacacaggtgcaggaggagaaacaggggtctacggggtacagcaggcaggggtagatgggatgcgacacacaaacccaggaacggaaatggaaggccgggagagggaggaagaaagagaggaacaggagagagagggagagagagagagaggaatgcagacagggggaaaatttgaagacacaaaaagggggccaggaaatggattaaaccgagggggaatgggctgaagggaagggggagacctgagaagaggctgttgaaattgtcttacttgggcggcagagagctggcttgggaaacaggcggtgcggatgggaaggggaaagcaggtggcagtgtggcctctggagaactgtggcgctgacacgggctaagcagga

SEQ ID NO: 150141 - DNA, 358 bp, Homo sapiens
gtggtgcaggtggggtcccctcacctgatgggccctcgaggccaggctgtaggcaggcaggagggggctgaagcagtggggtcaggcccggggagcgggggccctgccttccttcctcaacacacggggctgcccaggccccgctcctggggccgggcccacacctcacagacactggtgttggatgcttcggcttgaaggagctccaaatggactagccgcagctgcccctgggtccacctggcccaggcaataccacagaatcaccaaggctcatctagccatgggcccaaacccaaggccctaagaggcaccccgggtgcctcagtcacagtcccaggcagctcaggtcccaggc

SEQ ID NO: 150142 - DNA, 146 bp, Homo sapiens
aacacagcggtcaatgcaaaaggaaaatatagatattatatacctatataggaaaatatatgtgatatataagtgaaaacagcatactactaaattatatgtagttctcggcatgtgcaaaaactagaatgtaattatgtaactat

SEQ ID NO: 150143 - DNA, 361 bp, Homo sapiens
atcagctcggtccatggtgagcagaggccatacaataaataagttaatatatttgattacaaatcaagacacaaagaaatctcagtcctgataggcttaggcaaatactgaagtcctgtcttagactttttttgagacagagtcttgctctgtcacccagactggaatgcagtggcacgatctcagctcactgcaacctctgcctccctggttcaagcgattcttctgcctcagcctctggagtagctgggattacaggcacccgccaccacacctagctaatttttgtatttttagtagagatggtgtttcaccatgttagccaggctgatctcaaactcctgaccttgtgatccgccca

SEQ ID NO: 150144 - DNA, 425 bp, Homo sapiens
cccagtctggtctcaaactcctgggctcaaacaattctcatgcctctcagtctcccaaatttctgggattataagtatgagccaccataccaattcaaaacgcatttttgatgtacataagcattcccatattctagatcagatacctttctttactggtctcctttagccaaagaaaataaatctataccctaatatttacaggacattgatgctttcttatgcattatctgagagataaaaggcgaaatcttctggttttgtaagtgtgtccaagttcaactagactcatatctgttaatgacagcaaagcaggaggggggagtgttttggggagaaacaactcatcttttaaaaatattcttactcattgtgtattggatattgtgttactcatattatatgaaatttaggactagaataat

SEQ ID NO: 150145 - DNA, 439 bp, Homo sapiens
tgcttgaaacattttagtgatttcctaccatcttcaggaaaatttccaaaatccttaagatgttgtacaaggacctacataatctagaaactccaaatccctccagcttcatccagatagcacacataaagtaccattctctttttcacatcaaggccttcatgcattctgttctctttacctggagtgcctcatttatttactttctgttcctcttaaacatttctctgaagactcctactctaattaccccagaccactgaggcgggatcccctatcacatacttccataacattctatacttatgcacacaatccccataattcttactacttgtaaatgtgcttagcttgttcattaaagtataagctaaaataagagcaggggctgagtccttgttcaccattgtgttttaagcacatggcattatacttggca

SEQ ID NO: 150146 - DNA, 376 bp, Homo sapiens
cagcttctccagcctcctgcccttcccacttccagtcctgcacctgctgtcctcactgatgcacctgcccttttccttccgtcctttatgtggcacacccttaagggagacatcttcctgtctgtgttttgcaccctcttaaaactacattcctttcccttcagcattggcatctctgtccttgtgtattacctgggatgactattcagttaacaaatgctttcttcctaggctgtgagcccaagtttgttggatgattggatgggggctatcagcgcgttggaggctatcagcgcgttaggaggctatcagcgcgttaggaggctatcagcgcgttaggaggctatcagcgcgttaggaggctatcagcgcgtta

SEQ ID NO: 150147 - DNA, 426 bp, Homo sapiens
cccgccaccatttacaatgtgcctccctggctccccttgctgcatcagcttcacttctagggctgcgtctcccccagcacacaaatggtatctctccaacattgttcaggttgcaaaagacgggatccagcctaaccttccatccacaggggatgaagggttaaatgcatcatgacacactcatgagacggaataccacgcagtcactccagccaatgaggcaaggccatgtgtcctaagagggaacgatctccaagagatgtggggtgagaatagccagggaggcactccagtgccaccccggtggaaggcagacaaggagctgtaaataagcctcacttgagattatgtgagaaaggacaagcgggaattcacggcatggagaggccctgccctgcggctcactgtctgctgtttcctgggaac

SEQ ID NO: 150148 - DNA, 1416 bp, Homo sapiens
aggccgacataaccagggagggctagctgctccaactgtgtgctcccactgtaattgtatttacccatcctggtgtatatctggtcatttcacaatggcctgtcgctccctgtctgtctccctgttaggctgtgaactccttgggaatactcctgtatcttgctcatctaatactcccagaacctcatgcatacctggcatgtagtagatgttcaatacatttttgaatgagtgaaagtgtgatagagggcagtgcccttacaatttctttctgagatcttgcttcctgaccacaggattcactcgctgaagaggagtgatcagtttcataccagcagcaccctctgcccactgacagatggttctccactgggaaactttcttcatccccggtggtatttgaagggagttctctatacatgtttaccttgtaaaatttccctccgtcagtggccctggccttgctggccttcccattatacctcttggggggcactactaatacccatgtcttctgctgtttctcaaaaggcccctagccttactatccaaatagacactgaaaaggggtggaaatcctgggggcagtcagctctcagagggtgcctttttagtgtctcctgcccctctggtttgccattgcctggctcctgctgagtctggagtggggccctatgtgtgaagcagtagcctcctgttagagtgctccagaccatctcagtgtgaaccaagggctgttgtggccaagagctcggcatcccagagtcagtgacgagaagggaggaggcaggccagggcaagaacatggctcagacttgtgtgggagtgtattagtcggggtttttcagagaagcagaaccaataggttgtatacagaaagagatttattataaggaattggctcatgcaattatgtaggctgacaaatcccaaagtctgcagggtaagttggcaagctggagacctacgagagtgtaggcctggtctgaggaccagcaagctcacaacccaggaagagccaatgtttcagtttgtatctgaaggcaggaagaagccagcatcctagcttgaagccagtcaggcagcagcaattctcttacttgtgggacagtaaactttttgctctattcaggccttcagctgattttttgaggccacttgcattggtgagggcaatctgctttactccaactcattccatttagatgtgaatcacatccagaaacaccctccccaacacacccagaaaaatgtttgaccaaatatctgggcaccctatgacccagtcaagttgacacataaaattaaccatcacagggagcaatagggggatcagatgactctcaactccagctgttggaagtcacacttaacgtacacacacatgtacacacacacacacacacacacacacac

SEQ ID NO: 150149 - DNA, 428 bp, Homo sapiens
aggccgacataaccagggagggctagctgctccaactgtgtgctcccactgtaattgtatttacccatcctggtgtatatctggtcatttcacaatggcctgtcgctccctgtctgtctccctgttaggctgtgaactccttgggaatactcctgtatcttgctcatctaatactcccagaacctcatgcatacctggcatgtagtagatgttcaatacatttttgaatgagtgaaagtgtgatagagggcagtgcccttacaatttctttctgagatcttgcttcctgaccacaggattcactcgctgaagaggagtgatcagtttcataccagcagctcgcccctgagttagcagctcgcccctgagttagcagctcgcccctgagttagcagctcgcccctgagttagcagctcgcccctgagtg

SEQ ID NO: 150150 - DNA, 1074 bp, Homo sapiens
tcaaagtttgaggttaaaaaaatgttaaaagatgtgagttaaagtttatgtgtgtgatgtgacttaactatgcagaaaatatttaagttggatgtacttgttttaggtacatctactatacttattctctcaaacctgggtaatagtttctcagtgttcaggttaccttgagaaaggccatgcttagcgaactggatttctcctttgagaaattttagtatggtttgaggaaatcaagtgataaaggagtatgctgaatatgcaatcatttacttctactgagtgctgcattttaagatgctagatgagaagagtagttggttttgcttcattatgttttatgtctttgagagagatacaggtcttggaattcactttttaaatgttacgttccaaccttatatgttccaaggtgcagtgcactgtgaatcttttatttttaaaaaaatttgtaggtgcttttatgtataactttaatgatttataagatgctaaatgaattgtttttgtacctaaccattgtaatccaaaagataagggtgtggtttacatgcttttcaaaaatttttgttaagaagtagcaaatgaatggtttaggatttcaaatagtgataccctcctgagacatgagcatttggagaggcctgagaacctaatagaactcatatagtgtgagtgaaatttgattaaagatgttggaaaatgaagttggatttttgtattcatgtataaaggaaagtctcccagtgctgtcaaaggaattgtggttactacttgctgttctgagctttgaatatcgttatttttctattaaatatcaattagtaagtatagctaatgaagacatataatgaaagtaattttatgctgtaagattgaattggtacttttccttattaaggctttagtaatttgtatgtaatgtcaaataaaaggaattcaaatctgagtaaataacagcctcctactataggaattagattcttctataaaagtcaccatattgtatcctatagaaaagttaaggtctgagtgcatgtgtgcattaaaaacatttcactacctaaaatctca

SEQ ID NO: 150151 - DNA, 543 bp, Homo sapiens
ccacccggatcattttcttcttccgggtatatttagggccagcaacaggtccagcttaaagacatttccaagctgctggaagccaggcatgatgacatgatcaatatccgggcctgagatgtaagcaccagtgttgtgttgaactccaggaaacctctaagagaaagctgccctgctggggactgagcttctccggcggtcctgcggttccctctcctccacgctgtgactcatccatgacagccatcgacggtcaggtcacggaggtcacacccaagcacacacgagtgaaccacagaaggctgtcctggatgccaagcagtcactaattctgccctagtctgctgaccttctatgtggaaaagaagtgcacttctgtatagttcaggcctcctggtctctttcatattcttgatacggtgaggagtacgtcctaccgctgtttacctccagattctggtgcagccttgtgtatttatcgcagcactagtcacaacagcaaagtcatggaatcaacctaagtgcccatcaacggatgaccgg

SEQ ID NO: 150152 - DNA, 223 bp, Homo sapiens
ctgcctcagcctcctgaatagctgggactacaggcataagccactgtacctcgactcatctcatttttctaccacctatttctagacctcacactgaccctagaaagttgaagggaaggatgcacacaagtatcttaacaaaacatttggagaccataaaaacaacatcaggatgactttgatgcatcccacatttctctccagttctaattcttgtcctgaa

SEQ ID NO: 150153 - DNA, 509 bp, Homo sapiens
aaaaaacagagtattacaagagatgacacatttgaaacacttggaacagtgctgggcatggagtagtcactctgaaatgttagcagcattaccatcttcatgatatggctggcattgtgctggagatgccaaattaataaggcctctgaggctcacagtctgaggagggagggagctaactatccttgtgtgctaccacaccacaagtaaaacataaacaaggtgtgacaggaacccaaaacaaggagcgaccagggtctgggctgggtcagcttcctaaaggctgggccttaaaagacaaataggcttttaagctcttgaggtcggagttggggacagttggaggtgagtagagtcgaacttgggtagggcctgtggtagaaactatctgagggccaaaggccagggtcattgctctcctatatgctccagctgtcagagctgtagaccagatggaaagatggttaggtcttatccagacaagaaccacacggcgtaccgaagctcga

SEQ ID NO: 150154 - DNA, 431 bp, Homo sapiens
aaaatcctgacctttgattcacacaaaatcagactatattgcccactctccctcattctgggaagatctgggttcctggttccctgtcactcttcatcactcctgtggccatgactctaagtgaattcagtagccacagagatgatcattccaataccctggcttttcagtccctgttctctgccctaactccaaggtcacacaccacttcttagctgaaattcctccatgttgctctcccaccaccaacatctcctgtcagtttcccatctctgataccacaacttcagcaagtctctgaccccagggagacctccaacccattggatactacagcttttcactgtccctcaccctcctcatgtccaaattcacctccttagccaatttaaattccacagtcaattgtcataaccactcccttccataca

SEQ ID NO: 150155 - DNA, 502 bp, Homo sapiens
agactggctcttgttctgttacccaggttggagtgcggtggcgtggtcgtggcttactgcaatctcaaattcctgggctcaggtgatccacccaggtagctgggactgcaggtgtgtgccaccacacccagctaattttttttaattgtttttttgtagagactgggtatcgctatgttgcccgggctggtcttgagctcctggcctcaagcgatcctttcacctcagcttcccaaagtgatgggattgcaggtgggagccactgcatctggcccttgtctcttatttctgtcatactaaacattgtacttctttttctgcattagaattaaattgctccattaaatggacttttatcagctttgataaactgtattcccagcattgagaacattgcttagtggatagtaggtattcacaaaaaaaattagctgggcgtggtggtgggcacctgtaatgccagcttctcaggaggctgaggcaggagaatcacttgaactca

SEQ ID NO: 150156 - DNA, 365 bp, Homo sapiens
acgtttcccaccactgaattgtttttcctccttttctctgaaccctaggtttttcaaatttctcaagaggctataagcagtcctatataattttcttttaggaaatatacctttgtttgactttttcatgtaccttttgggttttgtgccatttctgtttttcctaaatggtaacacatttgcagacatccctgcgaggcattctaagaaacgagctagactgggaagtcgcttagctgaagtctgagtttattgcctctcattctcacggcagcgttttctaatcccttatactccgaagcataatccttaacactccaaagctcactggataacagtggaacagcagggggctaccttttcat

SEQ ID NO: 150157 - DNA, 611 bp, Homo sapiens
aaaagctggggggtagggaagaaaaatcaagtgaatctgttttaaagtttaaaaaaaccggccaggtgtggtggctcacacctgtaaccctaacactttgggaggccaaagcaggcggatcacctgaggtcaggagttcgagatcagcctgaccaacatagtgaaaccccatctgtactaaaaatacaaaaaaattagccggatgtggtggcaggcgcctgtagtcccagctactcgggaggctgaggcaggagaatcacttgaacttgggaggcagaggttgcagtgaactgagattgtgccactgcactccagcctgggtgacagaacaagactccatctcaaaaataataataataaagtttttaaaaacctcaacttactgctcactactatataggcagcatgaccctggacactgtggggtcaaaaagaaatagaagccacaatcactgaaatgctttccaggagctaacaagatagctggagggaggagacttaatagaaatgaaacaaatgaagagcaggaggcccctaacattcaggaaggctacagagcaaaaagccacttcacttccttaaccagcagcatcaccatcacctgtgaatct

SEQ ID NO: 150158 - DNA, 388 bp, Homo sapiens
taagagaaaagacatcatgaattccaactgaggaataagggagggttcatggaggtggtaacatttcagaaaaggcttgaagggtaaatacaattttaacaagcagatatataggctaatggaattctatgtagaagaaagagtattagtgaaagcacagagggtcaagcatgcatggcacatccaggcaaggtgagcaggacaacagggaggctggggaggatgccaaagtctgtgtctcagaatagactgataaaattaattcgagcaggggaatacaaaatagtcttcagctgttctggcttaatctaggaatgtatttctaggaatggacaaaactgaggacttaaatcttatctttcctaagtattatttctctcagctgaac

SEQ ID NO: 150159 - DNA, 272 bp, Homo sapiens
gaattatggggtttctcaggctgggaaaactgggaaatactggattagaagtctttttttgtagtcacggctatctcaatgctagtggccctcacctctcagtctcatctttccacttttagacagagcattcagagtactctgaaacacatattctacatgtagattgctgcttctgtttggaatcagtgtccgccctcataacaatagaagatcttaaaggaaaatgataaccttgaagaggtgacgtgtgttgcaacagactttaggag

SEQ ID NO: 150160 - DNA, 550 bp, Homo sapiens
cactaaaggttcagatgatcgttagcgtttttggcaatacactatttttaagatatgtacaatgttttcttagacataatgctattacgtccaggcgcggtggctcacacctggaatcccagcactttgggaggccgaggcggacagatcacctgaggtcaggagttcgagaccagcctggccaagatggggaaaccctgtctctattaaaaatacaaaaattagccaggcgtggtggtgtgtgcttgtaatcccagctactcgggaggctgaggcaggagaatcacttgaatccaggaggtggagattgcagtgagcagagatcacgccactacacttcagcctgggtgacaaagcgagaccgtatctcaaaaaagaaaaagacataatactattgcacacttaagagactacaggatagtgtaaacatatgcttttggtttggtcttttatttttgagacagggtctcattctcttgcctgggcttcagtgcagtggcgcattctcggctcactgcagcctcgacctcccgagctccagtgatcctat

SEQ ID NO: 150161 - DNA, 808 bp, Homo sapiens
gcaaacctgacaggggccctgcccccatggagcctccacctcatggaggatgacattaaatgagctgtcacttgaataacaatgtcactacgatctgaattaagggccagggaagacaacatagggcacactgcatgctgggggcccaggcaggtaggatgtatggctctgggaagacttcctggaagaggtgaatcctgaagttacataaatagcaagtggaagtccaaagagaagggcagactgttcttgacccaggggcagagtggggaatccataagcagaggctgctgtgattgccctgggctcagagagactgtgagctcagcccacactgcccatagaagcagcctaagtggtaaccctctatcctcaaggcctcaggggaagaacatgcgctccccatagatgcagagctccatgctggtgtctttcaggattaacagtactactccgaagatctgccttccagtcagactccgtgtctttctgttttaatgctaatcacaggtttacacccttggtattcattgttctttgtattagactctaagttcaatttgccagaaaaaaccaggtcaaccccgaaacaagagagagtttcccatctaggacaccacgaatcaaccaaaaatgatacattcagatgctgtaacagaagtccttactgcccggacacatttggaaacatttagagcggacatttgatcaattattcagtccaaataaaacacaagaggtcctctcctttctttccacaggcctcatttctacactcgaggatactggctttcaggctcccataccc

SEQ ID NO: 150162 - DNA, 408 bp, Homo sapiens
aataaggacgcactcgggcccagcgcgtatcatgtggaaatctggtcttagtgctgggttcctcgtcctagtccgctgacttagacagactagctttgaccagacttactcaaccacgatgaaatcaacttccatcccagttctacaatgtggtgactttgtatctgataccgcagtctttgtgttgccagcgcttagtcctctgaagatgtacttcagtctacttgaggatcccaaagagatgaccaagaaaacaagctcacttcagaacagttagcaattttccagctactttaagagataagagaaattctctcatacctttcagtcagctgttaagtttcatggtccatgtaaagggaggaattggttactgaaaaatcaaaggatctctttactgccagtgca

SEQ ID NO: 150163 - DNA, 628 bp, Homo sapiens
gaaatacacaggagggtttctttaacttcgttggaggagcttgattagcaagaactgggtggtttcccgaccaatggcctgagttggcggacctcactgtggcagtgtgttcccaccacactcaccacctgggtctgacactcaggggctgagcaagacccgggcatggtatggatgccaaggggagccaagaaccaagaatgggccacagtccccattttctgtcccatccccaccctggtttggcttttctctcttctccaaaacagagctagctgtcaggctgctcacgaaaggggacccccaggacaggcatctgcgttcaaggggaagaaagagagccaccccttctaaccacatctggctccaggccaggttggccttcagggatgaagtcactccagctccccctctcccacacacccaggttaaacaatcctgtcaccccctctcaatggaccttggggctctgcgaaatacaaggggaccagcctgcctcaaaccctcaacacctctcggccgcagaggctgtgtcttgggccagtccctcccgtcccgactccaacatggctgctcctttttaccccagcttatcaagctgcacacgtctaggagcgtaatcggtaca

SEQ ID NO: 150164 - DNA, 651 bp, Homo sapiens
gaaatacacaggagggtttctttaacttcgttggaggagcttgattagcaagaactgggtggtttcccgaccaatggcctgagttggcggacctcactgtggcagtgtgttcccaccacactcaccacctgggtctgacactcaggggctgagcaagacccgggcatggtatggatgccaaggggagccaagaaccaagaatgggccacagtccccattttctgtcccatccccaccctggtttggcttttctctcttctccaaaacagagctagctgtcaggctgctcacgaaaggggacccccaggacaggcatctgcgttcaaggggaagaaagagagccaccccttctaaccacatctggctccaggccaggttggccttcagggatgaagtcactccagctccccctctcccacacacccaggttaaacaatcctgtcaccccctctcaatggaccttggggctctgcgaaatacaaggggaccagcctgcctcaaaccctcaacacctctcggccgcagaggctgtgtcttgggccagtccctcccgtcccgactccaacatggctgctcctttttaccccagcttatcaagctgcacacacccggaacttggggaacttctgatggatctgcctaagccggtcc

SEQ ID NO: 150165 - DNA, 567 bp, Homo sapiens
catttgccagagtaactaggtgctagggaaagagaactagtgaaaaaaaaatgttgaaaattgctttgaacagacataaatccttagtcctagaacataacctttgttcattaatcaagtgcttacgtagtgcaatgaaagggatttttacccaatttgacttcatgggtaggtcagtggcactgtgaaaccattttatctggctatattccaagttccttctgtctatttagttaatatacttagcaaatggtagaatttttaccgtgagtttcttcctaagcttttgagtgagagatattatgatacaaaaacagcaataacagaaacatgtagaagtctctctagtttcccctttcactaactgaaaaccaaaagcaaattttttaccaagttatatcagtaagacaaaatacatgtcaaaagacaggagatcaatttcatggaaacagaaaggcttactcccttattgaaatttgagttccagcagtaagcagcttccaagaaaaatctctgtaaaggtaaagggaaagttactgtaacttggattttgaaagtaacgtatat

SEQ ID NO: 150166 - DNA, 714 bp, Homo sapiens
attcagaatttaaaagctgagaatagtgtaacatattgtggggcccatataaatcagcagtaaaataggattttgtatgctgaatattaatttacagactacatttcaatactgtattctgcttaataaaggatatatgtaataacaagttataaaatgtcaattgttcaataaacatttgtcaagtataaatatttgacctagtacatggtataatatactttatatcccttcttaaggggtataaaaatgattataatagaacctgtgcctttacatatagattaagagggtaaaagagatatataaatgaccacaataaaaaaagacatgtgctaagtaccatgagggatctcaggtcatgtatgtaacttagaatagaaagagagaatttctggcttaggtaatcagagaaggtttcatgttgtttgctgtgtgttgtgaagaatggatgggattatggaagttggaaatgtgaacaaaggccattgctggtagagagactagcacaagcactgagggtgtgagggtgtgtgtgaaagcttgtttggagtaaagcaaattctgtttggcaagggcagtgagtgggaggggaaagagcccagataatggagaatcttgtgtgccagctaagatgtttaaactagtgggggagccatgagtgtttttttggactgaagagcagcttgatcagatctatctcttatatgatgt

SEQ ID NO: 150167 - DNA, 273 bp, Homo sapiens
agtaccaggctccagaccctaaccatcccagggaggggagcgacggtcccatgatcaactagataagggaggaaaggcagtgagatggaaagagaggggtcattatgtggtcactgctctgtcactctgcagctgggggtctgcacagtttgcttcacccctgcaagctgtgtctataaaacaagggtcctggagggagtcaggggacaacttggaagacccgcagggtttgaatccaacaacctgggtttaaattcctgccctgccacaggc

SEQ ID NO: 150168 - DNA, 779 bp, Homo sapiens
tgagttcccgccacatctgatggttttataaggggctcttcccgcttcgctcctcactcttctttctcctgctgcattgtgaaccgggtgcttgcttccccttcgccttctaccgtgattgtgagtttcctgaggcctccccagccatgtggaactgcaagcgaaagtgacctaagatgatgtggaagttcttaagaaacgcctggacctggaaagcctagtcccttttcctgtgtttctctaggaagaaagatgctgcagtaggctttgtggccacctactctcagattatgcccagcactgcctgggactggatggctaaatttaattcagaagtctttgccgggaagtccaattatggccatagaccaaaccaagttattgaatttattgttaacagtaatgaacctggtattttgagctccatctgtctgatacttgcatttacttcttaattagttatgaaaccacagtgtgttgaaaagcgttaacatgatcaccaccaattgcccaccagtaggcagtcaataaattatagctattatcacagacgtttttaactgtaccctcatgctttctgtagtaatttgatctattcagtatacaaaatgtctgtcacttaatgaactccttatggggtattgctgtatactttaattccttattaattaattaggagaaaaatggccattagtatctcctatctgggtgagtagcataactgcctcacagtttgtcaaaagtgaaattcacttcaaattgagaagaaatgttaggtt

SEQ ID NO: 150169 - DNA, 343 bp, Homo sapiens
ggttcaagctattctcctgtctcagcctcctgagtagctaggattacaggcatgtgccactaatcccggctaattttttgtatttttagtagagacgggttttcaccttattggtcaggctggtcttgaacgcctgacctcaggtgatctgcctgcctcggcctcccaaagtgttgggattacaggcatgagcctgcacgcccagccaaactgtagcttttagaaaggcttctgatttcccctcatatgttattgtcaaaaattgagatgccaaactgaagtcagagtatataatgcactgactgtccaatagaatacactgagccacaaatgcaagccaaag

SEQ ID NO: 150170 - DNA, 677 bp, Homo sapiens
cttccaggcaggctccagtagcctggagcgccttatggatattaactccctcaaccctgacggcagcccagtggggagggtgcacttcccttcaagtcttacaggtggagtctcgctctgtcgcccaggctggagtgcagtggcgcgatctcggctcactgcaagctctgcctcccgggttcacaccattctcctgcctcagcctccggagtagctgggactacaggcgcccgccaccacgcccggctattttgtatttttagtagagacaggggtttcaccgtgtttgccaggacggtcttgatctcctgacctcgtgatccgcccaactcggcctcccaaagtgctgggattacaggcgtgagccaccctgccaggcctcatgtttgcttatcttaaccaaaatgagccctcgtttcactttcctgttctaccctaaggaagataaaatatcattccaacttggggtagaggcaggtgccagtacccaagaccctgggctgtgcagcaggggctactgtaaacccaagaccctaaacttcctccctctgccagagccagggagcagctctgacgccctctagccccttctccgttagcctcgatttcaaataaaaacagatgcggcaagttcttcctcttttttgtgtgcatttgagataaaaatgagcaaagaa

SEQ ID NO: 150171 - DNA, 827 bp, Homo sapiens
  misc_feature (24)..(24): n is a, c, g, or t
gatgctgagacactctcttaattntcaccgctcagttacagaatcatcactggagctatcccatgggacccagtgctgcgtgtgtcctggaaaccacctgagggaggtcacagcccttatgcacctactgctcactcagccccataatgactgttcttaacccatctgtggattgtgaagtttatctagttgtttataactttttttttagctaaatagaatagaaaacatcaaagtgcatacgtgtagcaaaggtggagtctcgctctgtcgcccaggctggagtgcagtggcgcgatctcggctcactgcaagctctgcctcccgggttcacaccattctcctgcctcagcctccggagtagctgggactacaggcgcccgccaccacgcccggctattttgtatttttagtagagacaggggtttcaccgtgtttgccaggacggtcttgatctcctgacctcgtgatccgcccaactcggcctcccaaagtgctgggattacaggcgtgagccaccctgccaggcctcatgtttgcttatcttaaccaaaatgagccctcgtttcactttcctgttctaccctaaggaagataaaatatcattccaacttggggtagaggcaggtgccagtacccaagaccctgggctgtgcagcaggggctactgtaaacccaagaccctaaacttcctccctctgccagagccagggagcagctctgacgccctctagccccttctccgttagcctcgatttcaaataaaaacagatgcggcaagttcttcctcttttttgtgtgcatttgagataaaaatgagcaaagaa

SEQ ID NO: 150172 - DNA, 702 bp, Homo sapiens
tcaaaatggagtttcactcttcgttgcccaggctggagtgcagtggcatgatcttggctgaccgcaacctctacctccggggttcaagtgattctcctgcctcagcctcccgagtagctgggattacaggtggagtctcgctctgtcgcccaggctggagtgcagtggcgcgatctcggctcactgcaagctctgcctcccgggttcacaccattctcctgcctcagcctccggagtagctgggactacaggcgcccgccaccacgcccggctattttgtatttttagtagagacaggggtttcaccgtgtttgccaggacggtcttgatctcctgacctcgtgatccgcccaactcggcctcccaaagtgctgggattacaggcgtgagccaccctgccaggcctcatgtttgcttatcttaaccaaaatgagccctcgtttcactttcctgttctaccctaaggaagataaaatatcattccaacttggggtagaggcaggtgccagtacccaagaccctgggctgtgcagcaggggctactgtaaacccaagaccctaaacttcctccctctgccagagccagggagcagctctgacgccctctagccccttctccgttagcctcgatttcaaataaaaacagatgcggcaagttcttcctcttttttgtgtgcatttgagataaaaatgagcaaagaa

SEQ ID NO: 150173 - DNA, 834 bp, Homo sapiens
gtttctaagcgtgactgactctcttctgaaccaccgctacagttacagaatcatcactggagctatcccatgggacccagtgctgcgtgtgtcctggaaaccacctgagggaggtcacagcccttatgcacctactgctcactcagccccataatgactgttcttaacccatctgtggattgtgaagtttatctagttgtttataactttttttttagctaaatagaatagaaaacatcaaagtgcatacgtgtagcaaaggtggagtctcgctctgtcgcccaggctggagtgcagtggcgcgatctcggctcactgcaagctctgcctcccgggttcacaccattctcctgcctcagcctccggagtagctgggactacaggcgcccgccaccacgcccggctattttgtatttttagtagagacaggggtttcaccgtgtttgccaggacggtcttgatctcctgacctcgtgatccgcccaactcggcctcccaaagtgctgggattacaggcgtgagccaccctgccaggcctcatgtttgcttatcttaaccaaaatgagccctcgtttcactttcctgttctaccctaaggaagataaaatatcattccaacttggggtagaggcaggtgccagtacccaagaccctgggctgtgcagcaggggctactgtaaacccaagaccctaaacttcctccctctgccagagccagggagcagctctgacgccctctagccccttctccgttagcctcgatttcaaataaaaacagatgcggcaagttcttcctcttttttgtgtgcatttgagataaaaatgagcaaagaa

SEQ ID NO: 150174 - DNA, 648 bp, Homo sapiens
ctctccccgaaggtcctctgaggaggagaaacaaagcaaggcgtgcatgagcaacacgggagattatatggcaaggtggagtctcgctctgtcgcccaggctggagtgcagtggcgcgatctcggctcactgcaagctctgcctcccgggttcacaccattctcctgcctcagcctccggagtagctgggactacaggcgcccgccaccacgcccggctattttgtatttttagtagagacaggggtttcaccgtgtttgccaggacggtcttgatctcctgacctcgtgatccgcccaactcggcctcccaaagtgctgggattacaggcgtgagccaccctgccaggcctcatgtttgcttatcttaaccaaaatgagccctcgtttcactttcctgttctaccctaaggaagataaaatatcattccaacttggggtagaggcaggtgccagtacccaagaccctgggctgtgcagcaggggctactgtaaacccaagaccctaaacttcctccctctgccagagccagggagcagctctgacgccctctagccccttctccgttagcctcgatttcaaataaaaacagatgcggcaagttcttcctcttttttgtgtgcatttgagataaaaatgagcaaagaa

SEQ ID NO: 150175 - DNA, 691 bp, Homo sapiens
ctctccccgaaggtcctctgaggaggagaaacaaagcaaggcgtgcatgagcaacacgggagattatatggcaagctaaatagaatagaaaacatcaaagtgcatacgtgtagcaaaggtggagtctcgctctgtcgcccaggctggagtgcagtggcgcgatctcggctcactgcaagctctgcctcccgggttcacaccattctcctgcctcagcctccggagtagctgggactacaggcgcccgccaccacgcccggctattttgtatttttagtagagacaggggtttcaccgtgtttgccaggacggtcttgatctcctgacctcgtgatccgcccaactcggcctcccaaagtgctgggattacaggcgtgagccaccctgccaggcctcatgtttgcttatcttaaccaaaatgagccctcgtttcactttcctgttctaccctaaggaagataaaatatcattccaacttggggtagaggcaggtgccagtacccaagaccctgggctgtgcagcaggggctactgtaaacccaagaccctaaacttcctccctctgccagagccagggagcagctctgacgccctctagccccttctccgttagcctcgatttcaaataaaaacagatgcggcaagttcttcctcttttttgtgtgcatttgagataaaaatgagcaaagaa

SEQ ID NO: 150176 - DNA, 818 bp, Homo sapiens
  misc_feature (24)..(24): n is a, c, g, or t
gatgctgagacactctcttaattntcaccgctcagttacagaatcatcactggagctatcccatgggacccagtgctgcgtgtgtcctggaaaccacctgagggaggtcacagcccttatgcacctactgctcactcagccccataatgactgttcttaacccatctgtggattgtgaagtttatctagttgtttataactttttttttagctaaatagaatagaaaacatcaaagtgcatacgtgtagcaaaggtggagtctcgctctgtcgcccaggctggagtgcagtggcgcgatctcggctcactgcaagctctgcctcccgggttcacaccattctcctgcctcagcctccggagtagctgggactacaggcgcccgccaccacgcccggctattttgtatttttagtagagacaggggtttcaccgtgtttgccaggacggtcttgatctcctgacctcgtgatccgcccaactcggcctcccaaagtgctgggattacaggcgtgagccaccctgccaggcctcatgtttgcttatcttaaccaaaatgagccctcgtttcactttcctgttctaccctaaggaagataaaatatcattccaacttggggtagaggcaggtgccagtacccaagaccctgggctgtgcagcaggggctactgtaaacccaagaccctaaacttcctccctctgccagagccagggagcagctctgacgccctctagccccttctccgttagcctcgatttcaaataaaaacagatgcggccaatccctctctttcttcttacacctccccgctgtggcac

SEQ ID NO: 150177 - DNA, 604 bp, Homo sapiens
ctctccccgaaggtcctctgaggaggagaaacaaagcaaggcgtgcatgagcaacacgggagattatatggcaaggtggagtctcgctctgtcgcccaggctggagtgcagtggcgcgatctcggctcactgcaagctctgcctcccgggttcacaccattctcctgcctcagcctccggagtagctgggactacaggcgcccgccaccacgcccggctattttgtatttttagtagagacaggggtttcaccgtgtttgccaggacggtcttgatctcctgacctcgtgatccgcccaactcggcctcccaaagtgctgggattacaggcgtgagccaccctgccaggcctcatgtttgcttatcttaaccaaaatgagccctcgtttcactttcctgttctaccctaaggaagataaaatatcattccaacttggggtagaggcaggtgccagtacccaagaccctgggctgtgcagcaggggctactgtaaacccaagaccctaaacttcctccctctgccagagccagggagcagctctgacgccactataagcccaataaacagtaagcataaaataaaaataaacaaagatcggcagg

SEQ ID NO: 150178 - DNA, 211 bp, Homo sapiens
agaaacactgtgcccatgtggaggaactcatactgagtcctctgtgggtgcgtgggaccgaggaatgtagggggaagattatgtattagatatagaaagagatgtaattttcatttttttttaacctgtgggtcattcatggtataggtttgcgtagagagcttgatggaacttaagaatgacttaggaattatttagttgtaaattaaat

SEQ ID NO: 150179 - DNA, 399 bp, Homo sapiens
ggaatgatgaatctacaagccaaggaaaaccaagaattgccagcagccacaaaaagctagaaaagaggcacagaacagattcttcttcagagcctctagaaggaaccaaccctgctgacactttgatttcagacttctggcctccacaactgtgagagaataaatttctttggttcaatccatggtatttttatgtaacattttgaagtttagagttcatcataaatcccaacaactcagtgaggtagcatttttattattctctttttatagctacagaaactgaagcctaatgacattaagtgagtttttcaaatttacttagtaagttgtaaagctagttttcaaacttgttcatttattcaacaaatattcatctttagtttgcttgtgaaaggc

SEQ ID NO: 150180 - DNA, 1033 bp, Homo sapiens
ttaagtctcgctctgttgcccaggctggagtacagtggtgcaatctcagctcactgcaacctccacctcccaggttcaagtgattcttctcctacctcagtctcccggaatcctttttatatggagcatcttgcaaaattagtgttctgagagtcataacatgggaaacaatgcttaattgttttgaatgtggtccaaggacgcttgcatcagaatcactgtggatgctgattattgatacaaaaaatcatcgccacgtcttgttatgtcagaagctcttctaccagaagctgaaagagaatagcctttcaaggaacatggagaagttaacgtgaggatgtcagaacaagaacacagagggtcccttggtccctaatactttgggggccaccatattatccctggactgcttagcatggaccgttatgtaatagagaaataaatttatctcctgtatttgccattgctatttttgccttcgataatgcagctgatctgaaaactaattaattcagagataaaaagagaacgtacgttctgactaatcatggtgagtagtctctgttctgttctttattaaaaagcatggatttctctgttgtgatgtctttctttttaaggtaaaaagataaggtctttcttctttttttctctttttaaatttcaatatcttttgaggtacaagtggtttttggttacatggatgaggtctgtagcagtgaattctgagattttagtgtacccattacccaagcagtgtacactgtacccaatatgtagtcttttatccctcatccctctcccaaccttccctctgggtcctcaaagtccattatatcactctgtatgtctttgcatcctcatagcttagctgaatcaagatatattttaaaggcaaaaatgttaacacttgataatggattggatatgtggcatttagagattggataggttgggattttttaaacgttctgaattgtaatttatgttagaaattgtccaaagcactttcattaaacttctgatttctcta

SEQ ID NO: 150181 - DNA, 367 bp, Homo sapiens
ccatggatttcagaggggctcattttacataattgtctatttcagtgatttctaaaatggtttcatagcttcctattttcttttgtcttggagtttaacttagtcctgcaagtaactgctttgctgtttatctggtgtttaaaagtttttgttcagtgactgggaagcactgttggatgttaacagtaaaccgagggaggaaccctggactcggaggcagaaagcctgggtttgtgcaaagcaggcttctttattactgtgtgaccttcggcaagctccttgggctttctgaatcactgcttcctcatctgtaaataagggttatgctacctgccccatatgactgtttctattgttaaataaggca

SEQ ID NO: 150182 - DNA, 384 bp, Homo sapiens
cctgggtgatgctgtcattccttctaactaccaaatttcaagcattcttgctatactccatggaacacatctgccttcagtagtctacccttaaaatagaaaagggttaacctcataaagatgtcactccctttgtactgttatgctgcccttgggagactcaaacagcatagcaaatatatatgggcaatgtaattgcattcgatcttctaggtcacagaagactttgttagctggtatagcagacagggaaaagtgagcacattcccatctttaagagcactgcttctaaattctgtcactctttttgataggaaattaccctaacagcctcattttttccatcttagccttcacaacaaataataaataaagaaggagtga

SEQ ID NO: 150183 - DNA, 165 bp, Homo sapiens
gagttttatgtcatttgtagtcagttattaaaacagtataggcttctgggttctttgaacagctagtggtggtactgtcactaagtgttgtagttcatgtggctgtcaaaagacaaaattacagcacacttagtttagagatcttaattgtcttttatttgcaac

SEQ ID NO: 150184 - DNA, 234 bp, Homo sapiens
catggattaaaagggatcttcctgactccatactctgataggcaatgcaccaagcttgtgtctagtctcttggacaagttgttccttttgcctggaatgcttttccctcttcaattatctggtaattggttcttcaagctctcagcttaaatttatgttttctcagaggtgtttcctgacccctccccaaactaaatccttctgctatttgacctagtacctttactttccctt

SEQ ID NO: 150185 - DNA, 297 bp, Homo sapiens
gccacgtctttctgagaatgggagggaagccctttccgaaggcagaggaccggtaagggcccttcaaagctctctgaaacagcaacacggtcggagggaggtcattagcagtgctgtgtggcttcctcatcctcatggtaagtgagcactgggagtaagacaatcagcccttcagaaaccactcgggcctggagaacgcagccagggctgagccacagagatggggcaggagcagttctggcctccaatatacagcggcgctttgctcctctcgcacaagtgaaatcacagctgatg

SEQ ID NO: 150186 - DNA, 268 bp, Homo sapiens
aaattgatatggctggggattaagtaatggaataatttggggtcggaaagaaagtaaagctaaggatcactgagctactcaggaacactagggaacgtagggaagttctttttttttttttttgagatggagtcttgctctgtcatccaggctggagtacaatggtgcgatcttggctcactgcaacctccgcctccgaggttcaagcaattcttcctgcctcagcctcccgagtagctgggattacaggccaccacgcccggctaat

SEQ ID NO: 150187 - DNA, 356 bp, Homo sapiens
catttcagaggaacaagaaaaaagctaatatgttggagagaaagtgaatgaggaagaaagaagaatctgattagggctatgtctcgtttctggcagactccagctggaagaactggaaaacatcttacctttacctttacatattctttgatatttgaatttctgaattttggctacatctcacaacttaaaggaccataaaggttatattatctaagtgactttatatttatctaaaaaagtaatggaaccaccaggatttttaaccagagcagggaaaaactagctctactgcacaaatgcaaagggataatgagaatagaaaataaagttataattttgtattctatctcaat

SEQ ID NO: 150188 - DNA, 125 bp, Homo sapiens
tgggaagtacactaccctacccttactaagtctattcaggaataaactagagaattatgtgatgagatgtaggcaaaaaatcgtaatatcataaaaaggactcatactgcttgaatgaaataaac

SEQ ID NO: 150189 - DNA, 498 bp, Homo sapiens
ccccaagattgcctgggaattgcctgcttgagcttggaatgccaggtaaccacactgggatggccctcagagcccctcacagcccctcacacctcacagagtggacagagcatcagagacttgagtgatctgtccacagtcacacagctagtcccaaagaagagccagggccagaatctacggccggtgacccaggccccagtccagtgaggctgacacagccaccctgggacagtcatttggaaacctcacttggggtagtttgcaaagatgaatcaaaaccctcagggctgcttctaaatttagcaggcaggcactctgcactagagagatggttccttagacaacttgtgaaaacacccgctcaagaagagcatgctgggaaggtacaaaggaactattgcaaaagactgagtgggcagtttgctttacagggaagacgggataggcagaaatatgcagaagtggagattttcccccaaattcacacagaggagt

SEQ ID NO: 150190 - DNA, 1086 bp, Homo sapiens
acagccctgtagagagatcttcctcgtggcacttgccacttgtccagaaataatatgttacgtgttggtggctcccgaaagatggcggccttcaccagtttctggagttacaaatgcacttcaataatgatcaagtcatgctgcaacaggcacagagaacaaagaaacaactgcaacaagaaactgctgaacttgggtctgaaatcccagcattaacaaaaaaggtcttgaagtgttttctagaccagcccattctgctgtcgacatctctgatgaaaagccccactagatgtctttgcccagacttttccttctttttcacctcatctcatgccctggagaggagtagtgcctagtgaccaggaggaaacctgcaggttaagagctatgtccattaaaatcagcaaatattaaataaaattaaacactctggtcctcagttgccaatagccacatttcagacgctcacgctagtggcccctgtattaagcaaaacagatttggaaaattttgaccatcactcaaaactttttttggacagcactgttctagagtcaaatggaataagtgatcactgtattgcccaggctgcagtacagtggtgccatgtcagctcactgcaatctccacctcctgagttcaagcagttctcctgcctcagcttcctgagtagctgggattacaggcgcgcgccactgtgcccggctaatttttgtatttttagtagatacggggttttaccatgttggccaggctggtctagaactcctgatctcaaatgatctgcccaccttggccacccaaagtactgggattacaggcgtgagccactgcatctggactgaagttgagttatatctttaaccctcactgtctaactttgagaaagcaatttagtctttctgtgccttggttttattatctataaaatgagggtataagcatcaacttactggggtaatttatgagaattagatgagttaatatatgaaatatatttagattaatccctggcatataatattttctcaataactgttaacaattgctattcattaaagtcttaataaaacaatacctacttca

SEQ ID NO: 150191 - DNA, 469 bp, Homo sapiens
tcatttgtacaatgtggatcataatgcacattcataatcccttgtctgtaatctgaaaccccaaatcctccaaaaaccttaagttttatcaaaaaataaaaaagtttgacaccaaaatttatttggtgcaaatgccttatctgcatagatgggaggtttttagctatctttgtttcacttaatgtggatattaatgttgcgctgcagaaatattgatgagattgattttggggtgctgttccattttctactggagtgttacataatacatgataagaatagtacttagcatattcatgtttctcttcttccttctgggcacagcaccataccactcttagcattctgatagttaggtggtaccatctgactgagttctggccagtaaaatgtcagttccaatgatgtacaatcgacccttgaacaacactggggttaggggcactgaatctccacgcaatggaaaatc

SEQ ID NO: 150192 - DNA, 393 bp, Homo sapiens
tagcagtggttcgacgatggagtaggaagcgtcccatgttgtggatatatagtagcattacgactcgcgctatggcatatgatgtccgatcctctcagagatctagcgtcagacatgcaaacttatcaccgtccggtcgtgggacaacgtcttgaccgggtgaaaacaccttcatgcgtgacctggcagctgtagcttctgtgggacttccactgctcgggcgtcaggctcaggtagctgctggccgcgtacttgttgttgctctgtttggagggtttggtggtctccactcccgccttgacggggctgccatctgccttccaggccactgtcacagctcccgggtagaagtcactgatcagacacactagtgtggccttgttggcttggagc

SEQ ID NO: 150193 - DNA, 432 bp, Homo sapiens
gagggaaggggaaaggagcagagcctgggaggcagtgagaaggcagaacggccagagaaccttcacacctcttcttgctcctccttggtctcttgaggccccctaatcagagtttgttatgattagaaatacatccatacaagtatgtaaaagaaggatgagggcttaaaacatttcccctccaaggtgtgtttgcattttgacatagatctgaactaaaggaaatgaaaagttaaaagtggaattcctatcacgatgaaaatatcggaaggatagagggtcatggagaaatcaggccacacctctgactatctgaatgggccactgctgcaggatttacaagcactgtgcaggcacaggaagtcctgaacaagcgtttggagggttggagatttcctctgagggccacacatgtgaccagcacagggccac

SEQ ID NO: 150194 - DNA, 280 bp, Homo sapiens
tgcagaaagacatctgagcatcacaccgaagaggatgaagactctaaaaagcctcaagtttagcttcaaaatgagttatgaaaaactttcggttttcagaaatcgtggatttcagaataacagataaagctgccgatctgaacatatgtattggttgtacattgcctgtatgctcaactagaatctaaaccccaggagagcaaaggacttggtccgatgctctggcacatataggtgctcaataaattcctgaggaagaaatgcaggaggaagccaggtg

SEQ ID NO: 150195 - DNA, 133 bp, Homo sapiens
gacggggggaaataaagggcaaagctctcggagtgggctagaactggagggagattagtcccttgtcagggttgcatctgaagtgacggcacaggacaagatggcctcaatggggagagaggatgtctgagga

SEQ ID NO: 150196 - DNA, 730 bp, Homo sapiens
gtttatcttttttctgtaatgatggccatagcaactaggctgtaaattctgctgggcttatcttgcacttttaacaggttttatccatagacactgatgataattgtatggctcattgattatctactgctgtgctgagcactttaaaaacagttgtaattcctaatcctcacagtaaccctgagaggaaggtgctgacattgtcctcattctccttgatgaggacactgaggctccaggttaagtgtgcactcaaaggggtagagccaggattgcaactggcacctctctcccatcacaaaacttggagaacatcttacctgttcagagagttctgatgaggtggttaagtcatgatgctatgtgcctgtggccttggtctctccacatggaggatgggggtgatacgggacccacctcaggatgtggtgagcagtctggcagcaccacttagatatagacacctctgggcactgttgcaggaaaatagagttggaagctgcagtgagcctccaacttgtggattgtaccactgcactccagcctgggtgacaagagaccctgtctctttaaaaataaaacaaaatccagcaaggtcttttgtttcccctttttttttaatgaataaacaaagaggccaggagctgctaagggctacatagattccactggccctgtcttcattccttctaccatgtgatgctgcatttctagcttgtggtctggtgtc

SEQ ID NO: 150197 - DNA, 530 bp, Homo sapiens
cctgagctccgtacaaagggcagttacctcagtgtgtatacttacttccttacttagagttgactttatacctttattttggcttttatatcaataaatttattgaataaagtcctgtcaatgtatcagcctcaatttaatattttgtcacatgggatacctattaacttccacaggaatggcaccaggttcaagagtctgaaaaagagatccagcgccagcaaatgagacataaggtttactgagggtaacttgcatacaggttggtccagtggtggtgggctggacagtagaactgccaccttttgcagaaagcatgcagtttatatagcattttcacttaacctccaccccctaacaacctccacctggcaacttcttttaacccaaaacaaagagtctggactccctgtatggccagcattccacgggacaggccagggactcagatgttcctcacaggtaaggaatgaatctcttgggttggccactgcttggaactgtgaacacacattcaggtgtgtctgccg

SEQ ID NO: 150198 - DNA, 322 bp, Homo sapiens
tattcatttaagacatatttatctacattattaaaggtgcttctgctttctcaactacaaataagaacttgagctttgtaagcaaacagacctgcttagaaatatggctcttccctgtactggcttagtgtccttaagcaacttacttatccccttaaaccagtttccttgcctacaaaatgaggataaaaatcatgtacttgaaccagatgtggtggctcacacctataatcccagcactttgggaggctgaggcgggcggatcacgaggtcaggagttcaagaccagcctggccaacatggtgaaacctcgtctctacta

SEQ ID NO: 150199 - DNA, 301 bp, Homo sapiens
agaacgacatttttttttagattccatttcaaaatgttaactttaaaaagcaagttattaagccacatattttcttcatatgccctactcaaatctagaattgttttgtcttcttgactttaaagtctggaaattttatcaaaaaaagaggttagtttagcatgagaacttcttattgaacccatcctggctccaccaccttgccttactaagagctcaaaaataattggttcaatatttaagcatagaattatgctgcagatggataccaacgtcacctcagtacaatttctggaattta

SEQ ID NO: 150200 - DNA, 201 bp, Homo sapiens
cactgatccagacacgtgactactctgtaaaaatttggtgttaggtataaatgaacatgtagtatcaggaactgagtagcaaaaagatgaaaggcaggggaggatatttttcagttaaaagcactctcatttaatgatctaggagtgggaagtaaatcatgggtcttagaagaccagggtttcctttaaaacacttgcttt

SEQ ID NO: 150201 - DNA, 410 bp, Homo sapiens
gtgtataggcctttggattctgtgaccatccaagtaccgggaggttctgcgattctctgtggagcctattcaaaaggagaggggtcatgtcaggtgaagtaccagcagccctctgggaactcacatcccaaggattgccaggcaattggggttaaaggcctttggatgttactgtgactgcagcaaagtttcctgggttcatccactgcaggaaaatgaatcttggaaaacgtcagggggctcatcaggtttcccctgcatgcagagttaggctcggtctcctgtgtgccagcagcagtctctgttgggcagcagaggctgcaagacgaacagccgctgtttactgagcacttacacagtgccagacactactgtgtggagtgtctcattgcttctttgaattacttcta

SEQ ID NO: 150202 - DNA, 343 bp, Homo sapiens
tgtatagtctagagatcccccacaggtggtagtacagccgggcctcatgttttgccttgtttacagctgacagcgttattattctgattggggctctgctttcttatcatattgttgtgttgagcgagccttttcctctacgtttgtgtttcctggcagggcttttcttgccttattgacagtttgtaaaaatatgcattaatttggagtttcaagcatgtatatcatggtgtctctttgctgtgtttgcttgaagttgattaatgatagaacctcgcttggggtcgtcctctggagagttctttcacaggttctgcatgttaactagcaaagcagaacacac

SEQ ID NO: 150203 - DNA, 220 bp, Homo sapiens
gagtttgatatctacttttccatccacaacagactaaatgctgaaaactcgagagcataggtgagcttgtgtttgatgctagctgcaagcagcctgacacagggagaaatgagagctctcctagagccaatctgtgtccctaccaaatctcatgttgaattgtaatccctaatactggaattgggacctggtgggagacgactggtggcatcgataaaca

SEQ ID NO: 150204 - DNA, 345 bp, Homo sapiens
gtgcatgtgcccacatccactcctgcacccaagacccgtgccagtgcacgtgcgtgctcctgcctgccacacgtccacacactgctgatgtatcggtgcacacgtgtgctcctgcctgcccgcacctccactctgctgtatcggtgcacgcgtgctgctgcctgccacacatccacactctgctgctgatgtatcggtgcacgtgtgctcctgcctgccacacatccacacactgctgatgcgtctttgctcacgtgcatgtgtgtgcacttgttcacgccccatgtcggcacccgtgggtgtggacacagactcacgtgctcatgtggtcacaggcacaccctt

SEQ ID NO: 150205 - DNA, 253 bp, Homo sapiens
cattgtctacctgagctagaatacaagtagttggcgtcttcagagacacttgtatgctagctcaggtagatattgaatgaaaaatctacactagtttaaagaatatcataactttttatggaaaagtataataaaactcaatcacagacacataactagctcaaaaataccttaatgtggatatgtcagaatgttcacgccagcacaagaatcaccccatcatccagacacaatgaaccacaagtgcggtacc

SEQ ID NO: 150206 - DNA, 339 bp, Homo sapiens
gccatgctgtgaaccaccaatgggggcacacggccaggaactgaaggcaaactcaaagctgagagcagttcctggcgaacaggcaacaagaaaacaggaatctcttccacacagctgcaaggaaatcaattctgccaacaatcaatgagcttggaaaaggacccaagcctccggtgagatcagccccctccgacaccttcatttcggcctggtgagaccctagctctgctacctagctacactaggacctagctacactgtatccagacttctggcctcatgaaactgtgagctaatcagtgagtactgttttaagctgctaagtttgtagcaatctgc

SEQ ID NO: 150207 - DNA, 314 bp, Homo sapiens
tgccatgaacccggagcgaggctgggtgagcgaagtcctcaggaggcccttggcacggcaggagcaatggtagtgccttgtgtttgctcctcctcctagaggagcccctgaaacctcaagtgtggtctgcccttccttcttggggctgctgtacagagctgttcctgcagcctgtcagatgggtgcaggcgtctgttaacttcctttctttcatttctgcttttatccagcaaagttattaagtttagtatctatcatctctgctcttcttactataaaaggaagctcttggtcttgcccccaaaccctgcacc

SEQ ID NO: 150208 - DNA, 421 bp, Homo sapiens
cttaaaaccatagctgtcatgtacaggaccaccccatctcatatatacacatgtgtgtgaatatatataaggttttattttatgcaatatgcattttttttcccctgagatggagtctcactcttattgcccaggctggagtgcaatggcgtgatcttggctcactgcaacctctgcctcccaggttcaagtgattctcctgcctcgacctccctagtagctgggattacaggcacctgccaccacgtccagctaattttttgtatttttagtagaaacagcatttcactatgttggccaggctggtctcgaactcctgacctcgagtgatctgcccttctcggcctcccaaagtgctggattacaggcgtgaaccaccgcacccggcccacctgagcatttttagatgtaggcctggtga

SEQ ID NO: 150209 - DNA, 313 bp, Homo sapiens
ggacaggctgaaatccagaagaaaatgggaccaaaattcaagtgccctggctgtgagttttggaaaacactggactgccattgctttgtatagaggaaaaacagtagacagtgtttgaaacagttctccaagcgcctttcctatgttggcctgccctttcaactttcccacatacctgttggccacaccagtggccagactgtcctgggcacagtgggagcgtaagtttccccatattcaccccatggccttgtctgctccacaccactgctccctttgcagcctgaaacacacgtatgattgagaggtaaca

SEQ ID NO: 150210 - DNA, 361 bp, Homo sapiens
ctcctaccagtgatgagtgtggaagaggctttatatctttttagatgagaaagctaaaacttacttctccccctgtgaacagggcaatacccactcttgagggtcataaagggttaatgcaaacagaagctcccagcaaagctcacaggaggtgctcctgaggtcagctgagtgtgacagttaattccatgtgtcaacatgattgggccacagggtgcccagatatttggctaaacaatatatgtgggtgtgtcagtgagggtgtctctgaaaactctggtaaataacatatatgttggctgcattcattaggatatgtgatttgggtaataaaggtctgggagaaaaaaaaaaacaaatt

SEQ ID NO: 150211 - DNA, 376 bp, Homo sapiens
gagtgaagagatgatcagttggtcccacagggtagccatctttctgtggaatgttaggcacgggcatttatgctgagcatctagcctttagtcacctgctactaggaagttacctcttagacgcacattttcattatggcttatcaagtcacttatagttggcaacaaagatgttacatgtgtctaatttgctgacatatctagtcactggaagtaccagccagaatgaggtcagaagaatgactaataaatattttcaggatggcaggtttcccttgaatagggcatgttattaaattcagaactcttatctgtgtgacttaaacatttagctgtttatttttaatctactgaagaacttttcatgggttttgtg

SEQ ID NO: 150212 - DNA, 151 bp, Homo sapiens
atggtggggacaacaaataaagagatcatttctaagagttctcagcacctgaaggagaatctcccaggtattaagcaaaaaagttttgaattttaaaaataaaatagagataactcaggaactcctatcaaccaagtcttctcttagaatt

SEQ ID NO: 150213 - DNA, 431 bp, Homo sapiens
aattgtcaggaaggcctggagaagaaggcgtttcaaaaagcaggggtggtcaaacatatcaagtgctactggaaagtcgagtcatatgaggaggaataactgatcactggcttgtcaatatttaggcagataaaggaatgttggggatgaaagacccattagagtgtcctgggaagagaatggggagggagaaagtggaggcagcaaggcagacagcttttccaagaattttactctggaggagaccagataactagggtgacagttagaaggagatgtggggtcaagagaggttccactacatataaagaaccctcgcaactcagtaataagaagataattagcccaattaaaaaatgcaaaaagatctcaacagttacttcacaaaagagatacatgaatagaaaataagcatatgaaaagttgctcag

SEQ ID NO: 150214 - DNA, 343 bp, Homo sapiens
gtctgcctcctgggttcaagcgattttcctgcctcagtctcccgagtagctgggaccacagacgcacgccaccacacccagctaattttgtatttttagtagcgacagggtttcaccatgttggccaggatggtcagtctccgtctcttgacctcgtgatccgcccgcctaggcctcccaaagtgctgggactacaggcatgagccactgggcccggccgtgataactttttttcaggtagaaatcttttggttctttttttatcaagtattttgtgtgatgcttacagaatacatttattaagtattttgtacagctcttattttttgttgttgttttacaa

SEQ ID NO: 150215 - DNA, 523 bp, Homo sapiens
ccaggctggtcttgaactcctgacctcaggtgatctgccctcctcggcctcccaaagtgctgggattacagacgtgagccgccatgcccggcacatttcaacacatgagatttggaggtgacaaatatccaaatcatgtcacaaccagtaggataaatactacttatttttcattcctcagatgagaacatttagtcacagagtgtggggcagccagccaacttctgatgttcagagtcagtgctgtctaaacttagctttcatgttctttctacctcagaaggctacttctcaatcaattatttgggatcagttggtttcatcacatggcattgcatcatgaatatgctgaacaaggccaagggaaggcaacaattaactggcagtttgtaggcttgtgattagatataattaaaagtcacataaagttccaaaaaatatttttcacttgtttcatatctcaacaacttccacttgtttaagttagtgtttttccaagttgcattgtgatgaggagaatttg

SEQ ID NO: 150216 - DNA, 700 bp, Homo sapiens
ccacctctcctctctgcctgactctcccacccctgctcccccacacatacccaaacacaatttacgtcttggcctgtggctcaagaattttgtccagaaatctcttaggccctcaggcccttgcgaaatggtaaacatttgctaatacgaaaaaccaccaggcttagcaggagatagaatcttggagactaagggttgttcagagccccagagccaggtagaagcccagggaaacctgcagccatgatgaaacagtagttgtggtcaggcacggtggctcacacctgtaatcccagcactttgggaggctgaggcgggcagatcacgaggtcaagagatcgagaccatcctgaccaacatggtgaaacccccgtctctactaaaaatacaaaaattagctgtggattacaggcgcctaccataacgcctggctaattcatagtatttttccggtaaaaaaacggcagttcacgccaatgtttaggccacggctgtgtctccgaatccatgacctcagtgtgatccgtacgcctgggccctcaaaagatgcatgggaattgcaggcgtgaaccaccgagcccagactgtaagtttctttgatcaatcgaactgtggccaaagggacatcgatgctagtcctggactaggccacaagaggtctagtctataactaatatgtctcatacgaaggcaactgcta

SEQ ID NO: 150217 - DNA, 374 bp, Homo sapiens
tctgcactcactcattcttgaaaccagacatgccaagttccaggagggacatcggacagaaactgcccctgttcttctgccccttgacacacccacctttggggtgtgaaaacccaccagttccagccaccatctcatttcagcctcccaaggcctttgctctacttgaaaaagcctcagcagagaagaaagccatcccgggaggatgaaggcagcagattctgctctgttcactgacagcactgatgcccagcacctaccaaacacacagagtcttacacatgttatgggacttatctctattaattcactgagttatcctggtaacctgatgagattaggtcacttatcccatttcacagacgggaaactga

SEQ ID NO: 150218 - DNA, 210 bp, Homo sapiens
atcagatttacaaaaatgaaagttcgctttatccagtattaagaaggttatgatcacttgttaataggatgcaagtaaaacctcttagaaggcaattctgttagattgttgaaagatgtaacctttaattcaacaattccacttccagaaatcatcagaaatacacagttggatgaagataaggcataaaggatattcgctgtagcattg

SEQ ID NO: 150219 - DNA, 216 bp, Homo sapiens
gaaagatcgcagagccagttttcaaacagtggaaaaactcaagctctatcacatgactcgaggcagtcagcgtgtaaggtgctggggctctcctggtgcaggaggttcccacaacattctgctttctagtgggagcaaacgcaaaatttgtaataagaatagtgtgtggaatagggaccacaaaaaagctgtattaactgtgcataggtaacccag

SEQ ID NO: 150220 - DNA, 164 bp, Homo sapiens
caggaaagagttccttagactcctgcatggcatcatgaatgctgctgttcttcttaccttggtttttttcctcctcctctaccttttctaccttggtgtgctgggatcagatcctgcttatcttccacttcttaagaaaagctgacatagaagacacattggga

SEQ ID NO: 150221 - DNA, 449 bp, Homo sapiens
tgagaagaccttaggtcaaatcacttgcctaaggtcacagcagtatagaggcaaagccaggactggcacctaggcctgcctgttctgcaaacttcctcccccaagagtttcagacttggaggtcacaccaggctgcctgggatagacaggtgatcgtggggttgtaattacaaccccacgatcacccccttagggcacccaggcaagatccctaagaggcacccaatgcccaggccaggggggctgcagccctcagcccccgccaggattcccgcaggctcctggactggaagctccctccgcggtcggattctggagtgtgggaggcatcttggcctgcagtaagcggtgctgacggggactctggccacagaggtcaggcctcctgaaaacagcactgccttccgcgctgccccagcttgccccattccttgtccgccaacccgccg

SEQ ID NO: 150222 - DNA, 330 bp, Homo sapiens
agtgaggaggcggctgcagggcccggccaggctgggccccattcacagctcagccggagctgaccaggccagccctctctgctggaagcccagtccaaaggagagagtgccctggggtccccatcccgactccgggccagccctgaggctgcagggagggaggtggagatgcccagggggtccctgccccagcctcccttcaggctgcaccacaccgaggcagaagggtagtgagagggacctcggacgggagtcctgagccctgttccccaggccctgtccatcggcagcacccagagaggctgtgggtttagtccaagtcccagtttt

SEQ ID NO: 150223 - DNA, 285 bp, Homo sapiens
ccagcagtttgggtggtcaaggcgggaggaccacttgagcccagtagtttgagtccagcttgggctacagagtgagactccatctcggggggaaaaaaaattagttagtcccagctactccgaaggctgaggtgggaggattgcttgagcccaggaggttgaggctacagtgagccgtgatcacaccactgcactccagcctgggcaacttgacctcctgggctctgctgtattttcttcagagtccttattgcaacctgacatttcatgggaagtttctttctt

SEQ ID NO: 150224 - DNA, 177 bp, Homo sapiens
cgaggccctggggactgtcttgggtatacagttgtccaggggggagggatcctaaagtggggcaaggagagggctgggcgcggtggctcacgcctgtaatcccagcactttgggaggccgaggcgggcggatcacgaggtcaggagatcgagaccatcctggctaacacggtgaaac

SEQ ID NO: 150225 - DNA, 350 bp, Homo sapiens
gaccaagtattctttgtcaaaaccgccttggtcattacattgatccaaggttatcatttaaaaccacactagtacaattcacagataaagtgtaaaacacacatacacgtgcattcacacatgaaccacactgaaatgaagatagtgtgagctttcttaaggaaaaatgaccttatttttattcagaagaagagaaaaaacaaagcaatctgtaccactactcaacggaatgcttctgctcactttttgaaatgaaacatggacagctctccttcatgatattaggtcaaaattagacaaaaagtagagtcaaattgcacaagatcataacagtcagtggaaaggccatg

SEQ ID NO: 150226 - DNA, 357 bp, Homo sapiens
attattcccactttacagatgaggaaacagaggcacagagaggttaagtaacttgcccaaggtcacacagctagaagaggcagggttgggatttgaacacaggcattctgagtcttaacccctgtgcttaacccacccaccttggtgggcagaagtctcagtttccttggggtgcctgggccccccaaagctttctgtctgcgtcagatgtaactcccaggagctcctcttgtttccatgagcacgccttccgggccgaggactgtgttgtgttcatctttgtttccacagtgcctggatcactggcatctagcaggggctcccaattccaggctctctgtatgaggtgctggaggc

SEQ ID NO: 150227 - DNA, 266 bp, Homo sapiens
gctctgtctgctaaacagggttctatataaccagttatattatggatcaaactcttcatcatgctccacttctccaagtacaccataatataattatatatacttcttacatacacacacacacacacacaatgggctttgccatgctacaaaacaaagactccaaaaaccacaagaaggattaaataagaaggagattctaacacacagatgaacttgataatatcctacattccagcctgggcaacagagcaagaccctgtctc

SEQ ID NO: 150228 - DNA, 329 bp, Homo sapiens
tggacccaagagagaaaggtcatgtgagagtagaggtgtgacctccttttccccaggacatgtaggatggccaataagaatcagtacaaatctttccacttcccccttcggccttgtttactttgttttatttcaccctgctttcaccctgttttgttcatcctctttacaggataaaagagaaccaactgagagccacagggttgaactggagaacaaaatactggttacaatggaggcctatgccctggaggctaaggtgtgtagccttccagagaagaccttcataaccaatggttacagcatattttcttcccaggcattgggca

SEQ ID NO: 150229 - DNA, 405 bp, Homo sapiens
gctgctgcggtcgatctagaggctccctcataaaatagtcaccccacacaacacacagtcacactcagtcactctcgctctcacacacactcacacattcactcttacacacattctcacgcgcacacacactcactctcacactcacacaccccacattcttttccacctttctccacagaggagggacagaggcctgggcctggatgcggtgatcgtggggttgtaattacaaccccatgatcaccggggattatgggccatctgttgtctgtttgttagttttgagatggagttttgctcttgttgctcaggctggagtgcaatggcgtgatcttggctcacctgaagctccacctcccaggttcaagcgattctcccgcctcagcctcctgagtagctggg

SEQ ID NO: 150230 - DNA, 620 bp, Homo sapiens
gatcgagctcggaccttacaacccacacaccacacacacacatgctcagtcaccccacacattcataaaagtcaccccacatgccacacatacacacacacactcataagatagtcatcccacaccccacacacactcatagtcaccccacacgccacacacactcataaaatagtcaccacacatactcaaaacagtcacctcacacaccacacacagacacaccagtcacctcaccacactcataaaatagtcaccccacacaacacacagtcacactcagtcactctcgctctcacacacactcacacattcactcttacacacattctcacgcgcacacacactcactctcacactcacacaccccacattcttttccacctttctccacagaggagggacagaggcctgggcctggatgcggtgatcgtggggttgtaattacaaccccatgatcaccggggattatgggccatctgttgtctgtttgttagttttgagatggagttttgctcttgttgctcaggctggagtgcaatggcgtgatcttggctcacctgaagctccacctcccaggttcaagcgattctcccgcctcagcctcctgagtagctggg

SEQ ID NO: 150231 - DNA, 741 bp, Homo sapiens
accgttattgaattcacacaccacaatactatgcaggaacggggagtttgggagaaggtgatcgtggggttgtaattacaacccctacaatcacactcataagccacccacacaccacacacacatgcacacccatagtcaccccacacaccacacacacacatgctcagtcaccccacacattcataaaagtcaccccacatgccacacatacacacacacactcataagatagtcatcccacaccccacacacactcatagtcaccccacacgccacacacactcataaaatagtcaccacacatactcaaaacagtcacctcacacaccacacacagacacaccagtcacctcaccacactcataaaatagtcaccccacacaacacacagtcacactcagtcactctcgctctcacacacactcacacattcactcttacacacattctcacgcgcacacacactcactctcacactcacacaccccacattcttttccacctttctccacagaggagggacagaggcctgggcctggatgcggtgatcgtggggttgtaattacaaccccatgatcaccggggattatgggccatctgttgtctgtttgttagttttgagatggagttttgctcttgttgctcaggctggagtgcaatggcgtgatcttggctcacctgaagctccacctcccaggttcaagcgattctcccgcctcagcctcctgagtagctggg

SEQ ID NO: 150232 - DNA, 267 bp, Homo sapiens
gaaacgaccataatttcagctgtaacgttttgttctgtactgctgtcagcatacttggaattagaaaatccacacctgccatttgaagttcatgtttctttttctccccttgcccttgtgtaccgtgtatggaatgatctatctttaaacgtgattgggaccaaatcaagtcactgggcatggacattcttctggcatactacccctgaagagggatggggagaacttatagaggcagacacactgacagcagaaaaagtgacagat

SEQ ID NO: 150233 - DNA, 226 bp, Homo sapiens
gctctggctgccaataccccttaaaggtttctatcaattctaccttaactactcttggtctgttttgtctctccatcccatgttttaactattagaaaaccagattcattctctatcctctatcaactgttgtttcaagggtatctagaaaaggcttcttttttaaaatcttctattctgctagaagattactttatttatttattttgagacgaagtcttgctct

SEQ ID NO: 150234 - DNA, 229 bp, Homo sapiens
cgcttttgatcactaactctgaatagtgattattcgcattactttctcagtaattgtactagtgccaaagcaaccaaaaatttaccaactgtactgtatgcttttatcactaccatagctattatgtcacttttgtaatctatattataaaagatatagtatatgacataaaatatcagttctgttttttttttttttttttttttttttttttttttttttttttttt

SEQ ID NO: 150235 - DNA, 1240 bp, Homo sapiens
tcatggactctgagcatggactcagaaactactgaggagaggcatcgtggtgctgaggtaatgttttaaacaaagctggtgtttgggtgggtctttgtgtagagaaagtggcagtatcttgtgtcacacttgctaagctattgtgtaatgacagatttctggcatatgctaaaagaaagcaatttgtacctgatgtttgagttggaaagagaatgttatgtaaatgaattgcttttttcctcattgatagtttaaaatgagcttttgatctactatagtctgtatgtgaatttctgactgcagatgttttgtaagtccattcctgattcagaacaccctgtctaaagtacagctccatctctgtgccgtgccccactttactgcactcatagaactcggtctccacctataacgctgtcaggtgcttgtttatttgtgctttttgtcttttctggcagcaaagcaagaggataggtgttgtttttgtgtttttgagatgcggtcttgctctgttgctcaagcacgagtgcagtggtacaatcatagctcaccacagccttgaactcctgggggaccgcaggcgctcactaccacacctgactaatctttttatttttatttctatagagatgaagtttcacactgttttgtgcaggctggtctcaaacacctggcctcaagccatcctcctgcctcagtctctcaaagtgttggcattatagccatgagccactatgcctggcccaagtttgtttgtttgttgtttagcattattattttatagcaaactttaaattcttgtttattggcaggataaatagagggaagaaggacgagcaaataggtaaacatacctgcctcctagtgggtaatcttgggcaagttttttcacctccctctgcctcctcatctgtaaacaagatcctgcgtgcccgcctgggatgcctgctaagatggcacatgggaagcacctggccttatgcctggccctggtcagtaagggctgtgcggttccacttgtacctgataaaattctaatctgattaaaagctttactagctcgtgatggtcattcttttcctctaacttagcagcccgatgaaataatgtagtaagtaaatgtaaccttgttgtttgtccttttgctgccacgatgaacacagctgtcttgctagacctctgttgacttcaacagggatagcatcaggtttattggaaatttacatatgggacagtccag

SEQ ID NO: 150236 - DNA, 205 bp, Homo sapiens
attttgtaaatccagccattcactaaatttcttttaccaggaacaagttaagaggggaacacttattaacatctgagtgaacactgttggtggaaaccctagaaagattttgccaaagtttttaagggtgagatggcctaccaggataaaaaaaaaaaaaaaagacactgataccatccaagtcataacacaggtaatctgaatg

SEQ ID NO: 150237 - DNA, 355 bp, Homo sapiens
  misc_feature (318)..(318): n is a, c, g, or t
gaggctgctccaggatttaggcgttgtagtgcatcatgcttctgtctcggaacaccgtcctccaggggcagccctttgggggtgtccccaccgtgctgtgcctcaacatcgccctgtgggtgctcgtccttgtggtttactccttcctccggaaagctgcgtgggactatgggcgcctggctctgctgatacacaatgacaacgcctgacctcgctgatctatggggagcagagcgagaagacatctccctcggagacttccttggagatggaacgcagagacaagggattctgttcctggttcttcaacagcataanaatgaaggacgaggatctgattaacaagtgtggggac

SEQ ID NO: 150238 - DNA, 885 bp, Homo sapiens
  misc_feature (848)..(848): n is a, c, g, or t
gggttccccggcaggtcagagaagctttggggcggggccaaggttggcccctgcttgggaggagccgggatgcctctctcacagtgatgcagagaggaatttgctgacagtcccttgccaggtggggctggcttcgcccagccggcgaggaggaggacccgctggcagtctcctcccaggtggggagcgtggagcctgtcactgcagcctggcggcctgagcgccgagcctggggctggggccgcggtgctgaggacgcaaatgtgagccttggaggagcctccctcggggtcaggaatcgagcggggacaccgctgggccactcagaaggaccgtttcctggggactgatcaagaggagggaaggtcctattacagcccagaggccacgtggggcctgagccccaaacctcagctgctgttccagcagccccgtagctgggtggagcctccgggcctgacgtggaccttcactggagaagtgactcagggatcctcccaggatgtctgcctcaccagacgacctgagtacagggggaaggttacagaacatgacagtggatgaatgcttccagtctcggaacaccgtcctccaggggcagccctttgggggtgtccccaccgtgctgtgcctcaacatcgccctgtgggtgctcgtccttgtggtttactccttcctccggaaagctgcgtgggactatgggcgcctggctctgctgatacacaatgacaacgcctgacctcgctgatctatggggagcagagcgagaagacatctccctcggagacttccttggagatggaacgcagagacaagggattctgttcctggttcttcaacagcataanaatgaaggacgaggatctgattaacaagtgtggggac

SEQ ID NO: 150239 - DNA, 774 bp, Homo sapiens
tacaaaaaataaaaaaattacccaggtgtggtgatgcgtgcctgtggtaccagttactttggaggctgaggtaggaggatagcttgaacccagaaggttgaggctgtagtgagttgtgattgtaccactgcactccagcctgggtgacagtgcaagactctgtcttaaaaaaaaaagaaaggagagagagagaaaaggaaggaaggaaactcttctactatatatctctaaccctgctacttcctaaaatttagtcttgtagctccaccactccaatagtgtcattattacccatatccttcaagaataatgcttgtattcaacatgaaaagagaagaagttggctgggcacggtggttcacacctctaatcccagcactttgggaggctgaggcaggtggatctcttgagtccaggagtttgagaccagcctgggcaacatggtgaaacctgtctctacaaaaaatacaaaaattagcccggtgtggtggggcatgcctgtagtcctagctacttgggaggctgagaggggaggattgcttgagcccaggaggcagaggctgcagtgagctgagattgtgccaatgcactccagcctgggggacagtgagactatgtctccgaaaaaaaagaaaagaaaaattaaagagaagagattaagaacagcatgaagtaacctcaacattaaaggggctggaagaggaagttctaagaggagccagtttagatataagatgactgagaaggacctacttactggagaaggtaggaaga

SEQ ID NO: 150240 - DNA, 169 bp, Homo sapiens
ctgaagcaaaagagattatagttaccagaagtatggcctctaatggtgttgagccttttcaagaaccaacaaattatctttgtgattacagtagtttaactatggttaaatgttactgctgttgcgctgctttatttaatgcactgtggaacaaaatataagggtactg

SEQ ID NO: 150241 - DNA, 389 bp, Homo sapiens
gttttcctccctcagcctcccgagtagctgggactacaggtgcatgctgccatgcccggctaagtttttgtatttttagtagagataggggttcaccagtttcacgtgttagccaggatggtctcgatctcctgacctcatgatccacctgccttggcctcccaaagtgctgagattacaggcatgagccaccacacctggctgagcgttctgattttctactttctcaccaatccttggaatctttttgtcttttacattttggttatttagtagatttgtggttataatgcattattttctagttgctaataattaattaatgtgagcaactttatttattggccacttggctatccttttttgagaagtacctgtttaaatctttt

SEQ ID NO: 150242 - DNA, 343 bp, Homo sapiens
cagccattttttcaagtaaaaatggtattccatttaaaaagctcacaactcaactgcacaagttcttttccttgagttaaccatcagatttgatattcaataaaagtgttttacaggtacttttcatttcatcatacaaaatatatttttaaatgtactcaaggattgagatacaataaaattagtaagttttattgcttcatcaaggacataaagtttaactggcattttttttttttaattccaagtgcacagtgatgaagaacacaactactagtacaatttagtaccaatgccttaatttgtgccaaggtgctggcagttttacccaccactgattttg

SEQ ID NO: 150243 - DNA, 428 bp, Homo sapiens
ttgattcacacaccacaatactctggggttgtgacgtggggttgtaatacaaccccacgaccaccttctcaaagcctgagcagaggctgcggaccagcatgcagctgaccgcagggctgacaccctgtcccctttactctggcaggaaaatgcggtctcacgggccccgtcctcacccctccactcttgagtctcagatcccccatttccacattctgaagtccctcaccctctctttcccattctctctacgtaaactcaaatgttctctcactgttttcaccagagcagcaatccctgcgtcagctttggcgttcaggctgtgccaagggcagaacatcgttctcattagtagaacccccttctgggtggatccttcccaggtgcatcctgccctgtctccaaggcagccctggctattgtcagcc

SEQ ID NO: 150244 - DNA, 371 bp, Homo sapiens
atccttccttgtgatatgaagctcagaagatccatggtaagttaaaatgaactaatcatttatgcggttagaaaaagatataatgtaagttaaattcagacttaaacttgaatttggaaaaggaggtatgggttgttacaaacagtcaaacaaacacacctcactaacctggatttgagtgctgacttttcctaaaactttgagcaaatcactgaatttgttcaagcctttgtttctttttctgtacaaatagggatgctacatatatctctcacaaggatgttttaagggttaaatgatgtaacctaaatgctctcataaatatcaaatggtatgtgacatcataaattatcattattaaattcctcata

SEQ ID NO: 150245 - DNA, 275 bp, Homo sapiens
gcccaggctgcgttgtcgctcatgtctgagatctcactggccccatggatgccatgccctgccctcttagactcaaatgcggtggggacctacgcctagcccccgtgcatgcactggccacgtcctgcttgaactccactttgggaggccaacttgatcagagacctcagcaaaccagcttcaccttggcaggcggctccacactctcagatcagacccagacctctgtgtacaactggtggggcccctgcctggggggctgcctcctctgtgtg

SEQ ID NO: 150246 - DNA, 308 bp, Homo sapiens
gtaaattcctgtatctactcaaaacactacccacagattcatcctcattcaggaactacctgcaacttacccaccacctgtctacctataagctgatcttaccgcatcctggcagaagctgagggagtgtgcacgcccaaggtggcaacggagtgtgtgccacatcagcgtcttcatgacaccaacggccagcaggagagagcgcaccgggcaactgccgcactgcagaatcccgctcagctctgcagagccaggccctgagtctggtgctaactctgacagaaaggaacccaacataggttttctga

SEQ ID NO: 150247 - DNA, 891 bp, Homo sapiens
tcaagagcaaagttctcaatatttgtacgtttcagttttctctctgaaaaagtggagataattcctgtctcaaaagattacaaatgatcggttgagaggatgtgtatagaacgttttgtacactgtttcatacatagtaaatgctctattcctattctcctggcattcagtgctttcataatctggcttcaacttattcttctagcctcatcttctgtgactctcttccagtcatctgatgctgtaccttatcaaattatagttgaattctaagtaataatattttttatgagaaagtcagaatttttttgttactgtaattttttaaagtttgctctattttagtatgtttggaagacaggatggaaactttcctgcgagatgtatctctaattttataatggaagtcatgaagaaattagaatttacttaaatttgctttaaagttcttgtaatactttagttgtaataaatgagaatattcatataaagaaaaacacggtttccagttttaagataggtaatgtggtttcaattctttctcttgataatcaccaacagaaaaaaagctgaaataaaattcccatctttaatttaaactagaggtatctccaacccttgagctaaaaatccaaagagaaagataaataactaaggaagagcatcaaacttgagcgcttaagaacctacaggatactgataaaaagcaccttgttttacctgcaaactcagaaaggcttagagcttagaaggactggtactacagaatataggagtgaggcaggggccatcaacatagagattgcttgaaaacactgaataaggattcctatgttcccacctcacaggaaatatactgtctggtttaacaatatgtattatatttaacag

SEQ ID NO: 150248 - DNA, 477 bp, Homo sapiens
tctgcccagttgtcacctcagccaagagaacctctctgtctgccatatacaatatcattcacatctttccccatccttttcactctccagccccacctcattgtctccccagtacttgccaccatatcaccaatgtatattaccggtgaacttgttgttctctacttcctacactataatgtgtgctccatgaaggcagggactttgttcactccagtatgcccagagtctggccaaaatgcctgatccctgagatggacctgcccaataactatttgctgacttaataatgagtgagtgaactgccaaaccctatctgctggcatgtgaaggacactaacatcctgaactggtacagacaaaaccaggaccttacgaaggtcacaggtactagttgctagtaggttgggaactggggaggagagggctgagtttacagagggcagtagcctaccttgactcccatctacctgcttc

SEQ ID NO: 150249 - DNA, 405 bp, Homo sapiens
tctcccagtctttaccttgtctttttgttctaacaatgttttttgatgagcagagatttgaagtccagtttaccattttattcttttgtggattgtgcttttagcgttatgtcaaatccaaggtcacaaaggaagttttatagttttaggttttacatttaggtctaccatccatttttagatttttctatatagttacgggtttttttttttttttgcattttatgtatacgttggttctaccaccacttgttgaaaagacaatatgctttctacactgaattgcctttgcacttttgtcaaaagccagttgtccatatatgtgttggagtagagcctttttgagctaataaattttgtaaaattttaaataataatactaggcagattaatagggattaaatt

SEQ ID NO: 150250 - DNA, 834 bp, Homo sapiens
ccctcttctgggttacagactgcttatttctcatgcttcctcacagggcaggatgacagtgagagagccctataggatcccttttacaagggcactaatcccactcatgatctaattacctctcaaagtatccacctcataatactatcatattggaggttagaattttaacatataaatgtgaggggggacacagacattcagtccttaacagattacactgatctgcagagaaatgcagaggtagaggctcaatgaaatgaaagtgaaaagaacctgactttacttcatctttcttttgattaacttgtgatcttgagccagtaacttaaagcctaaagtctcacagctgcctactcactcaccttaatccgaacagtacaaagacaaatatgtaattttacatattaactttaccataattaggtacatgtaaaggaaatgaaattcaaagttggttaagaaagtgcctaagaaggtagcacatttccaggtgtacctcatcccaaatttggagaccaaattataatcttctatcccacaagtcctcagccaccatgtactctggcaactcagcaacagacctattgagagcagacaagaagcacagaggtgaagaggtttatcctaacccagctttggtatcccaggagttgccatcaattggaatcatgaggttaagtttggtgatttgaaaatgagacttggctttaaacaagtttgttgtcaataccatgattccagagaattctagccatttgtcaaagatatggaaatcatggaccagcccctagagtaagggaggctggcaaaacccaggtaggaggtcaggga

SEQ ID NO: 150251 - DNA, 372 bp, Homo sapiens
ctcaccctcccgagtagctgggattacaggctcacgccaccatgcccagctagttttcttctttattttttgttgagatggggtttcaccatgttggccaggctggtctcgaactcttgagctcgtgatccacctgccttggcctcccaaagtgctcacaggcttgagccaccatgcccggccctaatttttaaatttgttgtagaaacaaggtcttgctatgttgtccaggctggtctcaagcgcctggtctcaagtaagcctcccaaagtgctggggttctaggcttgagccacctcgcctggcacttgcaccgtttttctgtgcatgcatctccactcccactgcccaggacctgtggacttagatttg

SEQ ID NO: 150252 - DNA, 126 bp, Homo sapiens
agaagtgctttgcccaggttaagctgaaagacaagaactcagggcttctaattccaatggtataattcttaaatgcaattgggaaataattgcccatctccacaaatgtaagtttagttttggcag

SEQ ID NO: 150253 - DNA, 576 bp, Homo sapiens
aaatattggcccagctagactttcttccattaacaatcagttgagacacatttttaaagcaacagcttaaatgaatggctgtgtgtctgtaataattttgacttaaaatgtcaactggatttgagatgccatgtgcatttaatcaatgtctctatattgtaaaataaatatacttcagcgtgactgctgtgccagccataaatcataattcacaaagagaagaacatcttatcctctctattgatagttgttaatgacaatgctgattaaaatggcatctgcctgccatattattgttaaacagtctattagaatttctattacatcctataacctaccactatttccctatgtgctgatacgtctcttatggaataaaacatgatagacagttagatttagagtttaacacttaaaatgcaaaactgaagagcagagctcactagtacattctaacacatattatttccaaaattaagagggttccttccagcagagattccagtgatcaaggtagtgttcaaggacttgttcctctcttttagaattaatatttgagtctcccttccttccttc

SEQ ID NO: 150254 - DNA, 568 bp, Homo sapiens
ttcatggataaatcagaaaacatttggatatgttacactgccttagggtcattgttataatcaactatcattatttactatgttggactgcttttgcccatgtactcagtaaggaagtttcagttgaagtaatactaggcagaccaacttttaccacaggacattaaaaccaagagaactgacagctcaaccctaaaagctgaacatctttttttttctctctctttttttttttaaataaaataggcaattcacctgtctggatctttcctcaaatctgtttccaggtcctgcaaagtttacctttaaaaaagcatgattgtacatgagcaaaaatacatggcctaaatatgtgtcaggcttgcttactggaagaagggatataatttccagaaaaatacagtaacatgtctatagaaaaatcatatgtaggatgtaaagctcttacaaattaactgttaagtaaacagaatttctgccttagaacttcattaactatgttaaatgaaggtaagtttagcctccctttcctcatcctctttattctctagtgtgtcctctaaaaagg

SEQ ID NO: 150255 - DNA, 343 bp, Homo sapiens
aaaaagtacctgggatatctacagacactcagtaaaactaagttgaatacatgaacacatacttgcttgtttcttttcttttattttctacctacaatgctaaaatttatgttcaggcactgtattaaccacaggaataacatatcctcgcaaatgccctatgaggtaggcatcatttctgccttcattttacacataaggcgagaggcgcagagagcttcttacactaacagtttgttcagagttttggagctctggtaaactgtggagccaggatcaaactcaagtctcctgactccagagacctttgctgtaactattatctctgcagtggtccccaaca

SEQ ID NO: 150256 - DNA, 451 bp, Homo sapiens
gtaacgtggtaagtaagacaggcccacttccatttgggtagctatgtaaacttggtaagctacttaacctcttggtgtcccagttaccttatatgtaaaatggtggaaccaatagtacctatttcataggattgttatgaggatgtaagagttttatgtgaaagagtttagaacagtgaaggcagaaggtgggtgagtcgccaagagatctgtcttgaggtagtggtgcctgctgtggtcatcttagatatgagggatatctgaggaagaatcgactggcttggagaatgatagaagattgtcaacaccggatgtgggaatcaaagctgagaaccaggtaatccaggtcaatggggattggtggtacccgtcttagacctggagaatttggagggtggtattagagtttgcattagaagatttcaaccctagagttggactagttgagctt

SEQ ID NO: 150257 - DNA, 255 bp, Homo sapiens
taagacaaaagtcaaatagatttagcatcaaggaagcggtaattttggtgacaagagttccaatggagtctgaggtagaagctaaactgaagagcaactaggatataagtagtcagcaaccaagcccaattcctaaatgataaaaattccaaactctaggccaggtgcggtggctcacgaggtcaggagatagagacggggtttcaccctgttggccaggatggtctcgatctcttgatctcatgatccacccac

SEQ ID NO: 150258 - DNA, 151 bp, Homo sapiens
gcggccgcctactactactactactactgctcgaattcaagcttctaacgatgtacggggacatgttcctgaatccaaggagtttcctccgtggcagtggcaccagtgctcccttactctcgccaaaaatacatttcacaccgaccgcctg

SEQ ID NO: 150259 - DNA, 291 bp, Homo sapiens
taggtgtgagccaccgtgcccagcatagcagttattatactttccatgatgaatggagtaatctttccagcagtaatctttggggtgggaaggggtacttgcacacacacacacacacaccccatcccagagattgtgaggcatgctccctagtccccctgggagtgactgccttggaaaaaattgttcctgaagggcaggatggagggtcacaatccctcatccttttccaccatgaggtggaaaaatggtcaagagtctctgccttaaaaatggagcttaggagataaa

SEQ ID NO: 150260 - DNA, 270 bp, Homo sapiens
aggccccacgcatgcccaggctgccttcggttctcaggcgctggtggctgttcccagggtctgggggccctggggggccaggatgctgttgtcctctgctcccgcctggagaccactgtctcctccaaagctctgtaaactgtcagtagtgcaggcccctcagaagccaatgaggttaacgggcaggtcagcgtcaggggctcacccagccaccccagaaccccttgctgttgattgccagctggcaatccacgcatggcactgccctca

SEQ ID NO: 150261 - DNA, 654 bp, Homo sapiens
cctgtcatgcatgtactgcctcatggctctaagatggctgccaccgctccaggcttcacaacctcacacaactgtgtccagaaataaggacacagcttctcttcttgcatagctctgttgcccaggctggagtgctgtggcacgatctcagctcactggaacctccatctcctgtgttcaagcaattctcctgcctcagcctcctgagtagctaggattacaggtgtgcaccaccacacctggctaatttttgtatttttagtagatatgggatttcaccattttgcccaggctggtcttgaactcctgacctcaggtgatcctcctgcctcggcctcccagagtgctgggattacaggtataagctaccacacctggctaaattttgtatttttaatagagacagagtttcaccatgttgcccaggctggtctcaaactcctgacctcagctgatcctcctgcctcaacctctcagagtgctaggattacaggcgtgagccattgtgccccgccttcattctaattttgaacatgcattcccatgggaaataatctgatcacaaaatatgttagaaacaacataagaatcataaagttgtttcttccaatacacagtttatgtataattagttcttccatggcccccgctgcc

SEQ ID NO: 150262 - DNA, 115 bp, Homo sapiens
tcgagctcggtacctcataaacaattaccaacatgcaagaactccaagagttattcctgggagcacctactgaggaccctattagaaaacaagcgtcaggcaaccaaagtgacta

SEQ ID NO: 150263 - DNA, 438 bp, Homo sapiens
gataatctcctttgtgcaccatgtaatttgccctgaggaacatgtaggagagtgcatttaagttattgatactatttgctttgaggtgcctggctctagatgtgctccatgtgatgcatccacacagaaaaaaagctttatagatgaatataaaggcatgtgtaatggtctgtgggtaaagtttctggacaatggaaagagaataggaaggaaagttatgtatttctgttgactgttagttttatcaaaggacccttcgcaaagatttctgctattctttgtcactgtcacagtctcttgctaagagcactttgtcttaaatatcctgttgctcctttactactattacctgaaattgatggaactaataacacgataatacaaggatactgctccttggtgtttttttctgcagtggcattcagaaatgccttgtat

SEQ ID NO: 150264 - DNA, 679 bp, Homo sapiens
agttaccaaaacatctccacccctagcaaaactagccatctaaggccttcaagttgttctttggtctgaaatatgccaaaagttcatcaaactactgttcaccaaagtctccaccagaagtacaagcttccaagatcatccttcaatataaaagtgttcattcaacactgctctaaatatcctctaatttggccccatcatctatctttcatttccttcctaaatacttccactgtgttgaaaatcatcatctgccatcagcagtatagtgtggttattgcctggaacaccagagggaatcaaatctagcactgccacttccaactctgtgaccaagggcaagttgcttaacttctcaatttcctcattcataaagtgagactaataatagtaccaatattataggattattgtgaggatcacatgagttaatatgtgtttagagttgggaacagttttgcttccggcaaatagtaagtgcttgacaaatgtattaaaatgaactattttttattagaacactcatctataccctcaacctaaaacttaacctgctcatcccctgaggacatggcttctactgaagggctctcaagtaaggctattttttcttctactatgaaccccctcccatatttataatttttaacagtatgtgactttggttgggcgacatatg

SEQ ID NO: 150265 - DNA, 261 bp, Homo sapiens
agttaccaaaacatctccacccctagcaaaactagccatctaaggccttcaagttgttctttggtctgaaatatgccaaaagttcatcaaactactgttcaccaaagtctccaccagaagtacaagcttccaagatcatccttcaatataaaagtgttcattcaacactgctctaaatatcctctaatttggccccatcatctatctttcatttccttcctaaatacttccactgtcttcccttttctcggtgatcgtacc

SEQ ID NO: 150266 - DNA, 223 bp, Homo sapiens
tcccgccttcagtctctccagtgtttccagttacttctcaccgccgagcacctttgcacatgttgttccccgcctggctgaatcctgattctccttcagcttcagctgccctgtcctcaatgcagaaatacgtattcttccttctttaactcctcaaccctaaccctactaaccctaatcccacacccccaaattaaatcctctctggactagattaaatgca

SEQ ID NO: 150267 - DNA, 606 bp, Homo sapiens
caagatggtccccaactcagaaggttcaactcataattttttgactttattacgggtttatcaggttgaaacttcatagttaggtcaagcggcatcaggacttaagatggttcagcttacttacaattttttttttcagtgggcttatcagaggttgtttgttttttgtttttgttttgtttttgagacaagtctcactctgtcacccaagctagagtgcaatggcgcgatctcggttcactgcaacctccgcctccagggctcaagtgattcttcctgcctcagcctcccgagaagctgggattacaggtgcccaccaccatgcccagctaatttttgtatttttagtagagacggagtttcaccatgttagccaggctggtctcttaactcctgacctcaggtgatccgactgcctcggcctcccacagtgctgagattacaggggtgagccaccacgcccagccagacatcattctgtatttgcaacccttattggtggacatttataaaactgacatgagttcatgaatgcttcctgtgagaagggtgcttctaagaaaggagtcagattttatatgtgggaaagccaagctgaggagcatc

SEQ ID NO: 150268 - DNA, 620 bp, Homo sapiens
atgagtctgtgtgggtcaaggtgtagcggtttcagagggcatggatctttcaggaattttgggcagtcttggctgaaaataaaggaaggaatgagggctgggttgggggaagtggacaacggagtatgacagtgagaggagacagattgataggaatcaggtgatggagaactggggtgtcaggataagatgcttggagaagtattggccctctgcctaaaagaaatcagggtgggctgagtgaaaaataagctttcaaacatgcatgttctctttgccttttttttttttcctttctcttttggctgggttttcacgtgtgttagtgttctgggggaattatacgtgcatcagacacgtgcagatgtttggttcactcagctggttgattcagaaagctgcaggaagcagtaggtcaagctaaggaaaaggcatgcatatttcaatatgtgtgtgcggcaggtgtggtttctatgatctgaacagaaatgcaggggaaaaggagagccggtgtatctcccagcaaatgtctccactctgagatgatgggtatgattatggccccaggaatggtgataattcctgatatttgtgcatgagtgtacttgtctgggagtgcc

SEQ ID NO: 150269 - DNA, 402 bp, Homo sapiens
tcaggactggcaggcagactgtgtgtggaagatgagagagaggactggggaatatgtctcagtttggggtttgaggctggagggatgatgtgaactagtcactgaggagagagctggtgggggcctcaaacatctgccttcatgtgtggagccggacaggtcagtgggcagcaggacgtggacgatgatgctacaggtgcttgggcagacagttctcacaggacttgaatggacactgacagatggttaatactgagtgtcaacttgatcacatgccctgtgattcaagttaacgggaaactacaacagcccagtccagacaggatacaaatggctcagactctttaggaatgaaggtttaggtcactccaccgggaaaaaaccacaacctgctgaggtgct

SEQ ID NO: 150270 - DNA, 618 bp, Homo sapiens
ttcacttgttatgcctttggttatgcttatcttcctccattgaatatcttattatctcatcattataaaaattagcttattttctgagaacactttcaagtcttccttgcccctctagtttatattgatttaccattttccccatatctctggtgtgtttcccagagagtctgttttttgtacctctatgtaataggttattagcaaatattttctaaattgagtatctgccactaacaacaggccagcataaattatagaaattagtataatataatctaattttactttgtagtcaaataattaaaactaataaaagaagaggagttattaaacagataagtcagggtaaaattaatcctgttacatatgtccacttagtaagtacattttaaaatcaattttattgaggcataatttacatacaatgaaatgtacccattttaagtgtaatctgatgatttttgacaaatatatacaattaggtaatcattaccgcaattaagatataaaatgtttttataaccctaaaaagttccttatgccccattgcaggtagtcttcctcccatccctggccccaggcaatcactgatttactttctgccactatagatta

SEQ ID NO: 150271 - DNA, 113 bp, Homo sapiens
ctgggagttaaaacttcttataacaaagtcgcttatattaaaagaaattaagtaaataaaccaaacgcagtgactcacgcctgtaatcccagcactttgggaggccgaggcag

SEQ ID NO: 150272 - DNA, 387 bp, Homo sapiens
ctgatccgtgtagagtttatattagccctgtaataatttctatttctctttatagttatctctctttcttttgcataactcatggttcaaaggcaatacaagcatctctctaacattaaaatcagtttagtattttaagacttcgagagaaaggaccataatagggttgccaagtagtattcagatcttgcaacaaccaagaaaattacaaagacttggagaaaacagtaaaaatagcagtgagttgatagtaagcactctattgtaaaggaaaagatagtggtgatatgtctgttaaaattgtggatttcttgttttgaaggaatgtcagctccatttctagggcagtgacagccagcaatgaagattcagcagtacaaagggtat

SEQ ID NO: 150273 - DNA, 245 bp, Homo sapiens
gaattccagctcggtatccctgctaggaatgatagagtgaggtgtgtaaccatttctaagcagctccaggtgatcctaaaggcgctatcggtgctgagatccaccactctaatccctgtggctatgtggaactagcactcaccttttctgtgtttgctctccccgtccttgagattctggtggtgacacgggcaccaggaacacttccctggactgactgatgagatcagggtgcaggcatctca

SEQ ID NO: 150274 - DNA, 381 bp, Homo sapiens
gaaaaaaagtgtacattgaagtattaggtatagtattttttaaaggagggtttattgatatttaagtttaggtgcacatatataaatgcagacagtaatgagcaattaaatgtaacagtttggggatttagggagcttttaatttttttatatttgctgctgcttaattattatactttgtcatctttaaagacaactagttaagtatgtaggtgtgtctagcaatcgtttctaaactcggtctttataggctagatatcacatctatcaatttccttggccttattaagttccttggatcttacattgtagccctttagctcatacttttatgttgtttgagagtgttttgttgttaaaaacatggaaatcttaaaaagg

SEQ ID NO: 150275 - DNA, 442 bp, Homo sapiens
  misc_feature (11)..(11): n is a, c, g, or t
  misc_feature (18)..(18): n is a, c, g, or t
aggtgactctnaggatcnccaaacaccgcaatctgaaattctcagtagaccacatataaccagtaagatggtccagaagggaggcttttcttaccctttgaagagggccaacctcttaattagttttttgcattaaaatgatataaactttggtctctacaaaagctattctggcatgtgggatgatgtgatagtagtggtattgatgtggatgagtagtgaggtgagagataactgttcacacaagacaaaacctttccttcattaaaggccagttttttttttaacaaaaagagaagaaattgaatattgatctctaatgggtaaattctaaccattaaaaaaatactgagtggaatctgtgtgaatcagttaattttataattggccacaccacttattttggcacctactcatagattgcggtgtgctgctggatatc

SEQ ID NO: 150276 - DNA, 646 bp, Homo sapiens
gagcgtaacgctctatgtggtggacgttcgtgtctcggcatagacacacagatgtaagaagcctatgaccatgctactagctcctatctaaatccaggtcttgtcacatcccattggctgaccgagtcatatggctaggctaagctcagaaacaagaggtatcaaagtacactttgcctgtgatgaggctaatgtaatatttggatatatagtactattgcagaagaacgaagaatctgaaattctcagtagaccacatataaccagtaagatggtccagaagggaggcttttcttaccctttgaagagggccaacctcttaattagttttttgcattaaaatgatataaactttggtctctacaaaagctattctggcatgtgggatgatgtgatagtagtggtattgatgtggatgagtagtgaggtgagagataactgttcacacaagacaaaacctttccttcattaaaggccagttttttttttaacaaaaagagaagaaattgaatattgatctctaatgggtaaattctaaccattaaaaaaatactgagtggaatctgtgtgaatcagttaattttataattggccacaccacttattttggcacctactcatagattgcggtgtgctgctggatatc

SEQ ID NO: 150277 - DNA, 352 bp, Homo sapiens
ctgttgagtgcctctgggacctgtatttttcttgctggggtgggatttattccgcttctcccgtactcctgcatctccaaggccagtggaggacaccaggggacagctggctgagatcaaggattaacgtcaaggaatttcttcatcgtctccatcatcaaattctacttaacatgctctgcccattccaagaaaaaaagaggaatgaatgtgaactctttttgtacatacagccatttactcaaaaaatgcagccggcagagattccacagctgggaagctgactggtaagcaccctgtgtaagtgaacgcgctcagtgggatggaaggaagagtactgaggggacgcggg

SEQ ID NO: 150278 - DNA, 174 bp, Homo sapiens
aatgctgtttagcacttgagcggaaacaggcatccataagttaacacattagggagaattaggccgaagctgatcaataggtgactacttaaggcagtctagtatttggttattaaactttgttgtgtcctacaaagcacagttgttgctttttatagcttaattgttttttgg

SEQ ID NO: 150279 - DNA, 595 bp, Homo sapiens
gatctatccaagcgaactgctgaaactatctgtgtctctgtttcctcttctataaaatgggaataacaatagtgcctacctcttagctgctatgagaattaaaagagctattagctgtaaaacactgagaaacagcaactgcaaaataaaaagcactaaaaaacagctcgttaaataacaacttaacaagcatttcattattagtcatttaagataatggcataagtgcaaaaaataataataataaatctgaaatgcatgctcaggactgttcacctgagtagtgctttttgatcagagagaaaattttaaaacaattctaaatgcccatcaactagagaccaatgaagcaaaatgaggtatgcccatgcatatgaagaaatgctgtacagcctttaaaaatgacaacaagtaacactgttttgggtaaggacacacagcaaagcagtcaaaagcacagaccctggagccagcccacctcgctcacaaccagctccaccacatatgggctgtgtgaccaaagccaacggctgaaacatctgtgccttagtttgctcttctataaaatgggaataacaatagtgcataccttggc

SEQ ID NO: 150280 - DNA, 339 bp, Homo sapiens
tcctacggaaactcccaggttcactccaaagcttaattcagatgcaccatggccgtttatctgccactgcagctgtttatcacatggcaccatcatggtcaattatttgtctaagctcaccttgcagtgctggcttcttcaagtcaggaactgtgtttgaatccttgtagcatcccctcccctcacacacttcatagcacataggagcctggaacacacttaagaacttagaacagtgcctggcacagtagagattcaactaatatttgaattaatgagtaagtaataggtgcacaataaatgttggttaagtaaaagatagacaggttgtatatatgg

SEQ ID NO: 150281 - DNA, 392 bp, Homo sapiens
tggcctcccacagtgcccggccataagtgtgaaaatgtctttaaccgcctggcccattgggactttgaagaaattaatgaaaacagataatactaatagaagaggatgtacagagggttaaagaatatatttggtttgagatccatttgtttaagatgcatgaaatctcacgaaatggactttatcttggtatgcttttatttttttaattttaactttgaaataatttttcctttatacttctttctgtacactgctgctttcatttttttttaagagacctaaaggtatgatagggacaaggaaagagagggtggtgatcctgttgcccttgtgggtaaggactgcggaggcagtggtgcagttctcaagcatgaccacaaggtggagtc

SEQ ID NO: 150282 - DNA, 432 bp, Homo sapiens
acccacccattttttctatcttaccatgtctctgaaacagttttagaataacaataccaaaactactaccaacactatgatttctgaaaacagtttaagattttcttttctttttttttttttgtagttgttttgactgtaggatatatcccaattaccgatttttttttttttttttcagagacagaggctcactgtcatccaagctggagtgcagtggcaagaacataccagttactgaattttaaaatcacttgaaatagttcttttattttgagtcaagctggcaaccaaggtaggcttgaccacaaagaaaagaattattccaagtgacaacatttagatttaagctcagaggctccattttattttctatgctttgggattgctttttataaattttttattttgctttatagaattatgagaaat

SEQ ID NO: 150283 - DNA, 295 bp, Homo sapiens
ttgtggcttctgccattaacttgtttcagtttgtctttttgatgatttggggtaaagcaaaatgctgtttcattgttatctatgtttggggaaacctaaaaccccctcaaagagttacgtatgcactgaatggaagggtatccattagcaacagagcggttttttagacatcatccaactgtaacaattcacttggaatctgaattacattttctagaattctacatatcacccagtgcagtcttatttgttgatgtgttgtttaggtttcaaggcactaatgtactgcagattt

SEQ ID NO: 150284 - DNA, 430 bp, Homo sapiens
cgaggtggggaggggccccacccatgttttcagccattccagacttgaccacagttggggatcggcccagcccagcccaatcagcctgagcagcgacagcaatggtgacgctgctctgcagagatggccctgaggggcttcacggccaggccctgcgccccaactgttggcccagaacctggcccaccactcacttggaccccagcaggccaaggggctgactccctctgagtctcagtggctcctttgctaaatgggagtaataacagcaccttctcagagctgccaagagaactaaatgaatgagggcctcacacaggcaagtgcccagtgtcagatggcactgttacccagccaggagaagggagtagtgggggtagtcactctcaccagagggttgcaaaggaaaataataaatctcaggaccccc

SEQ ID NO: 150285 - DNA, 801 bp, Homo sapiens
atatttagttgcttgatttttaattacaacattgacttgtaaaggatgttcccaactaaaaaataaaatgaagtacatgattataaaaataaatattagaattttttctagttttactactttgaacatgttttttctttcactgagaatgtgttaataggcgaaaatgaagttatataatagataacttgcaggatagcaaaagataaagcatatatggtatctgttgttttgcttttcatgatttcggtatccatggtcaatcatggtcagaaaataggtgagtagagtacaataaaggtattaatattttaagagagagaaagaatattcacataacttttattatattgttgtaagtgttctattttattactagttattgttgttaatctttttctaatgcattaattaaactttataataactatgctataggaaaaaaatagaatatatatacgggatatatggggctaaatactattagcagttccagacatccactgaaggttttgaaacatattcactgtggataatgggggaatactgtataccttacttgagataaactgcatatgaattatagagctgtttgtataaatgattataaattttatgtgctgaaagttgtaacaaataaaataaaattaaaataatgtccatttttattattattagaaatgctgctaattggttggtaaaaattagttgttgcctctgttacttataccaattagcagaatttggaatctgatattttgcaataattttattatactttaataataataaaagtaatag

SEQ ID NO: 150286 - DNA, 439 bp, Homo sapiens
cccctgtcccaccaatgctgccacagcacacatttgagggggtccttgcagttatgcccccttttcctttgtctatactctctctgacttatgcttagtcttctcagaaatctggagaagctgagtcatctttctgggtatccgtaagaaccacgtgaaaggcgggttattgctccttaagcctcgttagagcaatgacctgatatgggttggtaagagtagaaccgcagccatgtgcctcgatttcctcaaatgcaaaatgaaagaattggatgtaggccatgtttcagggtcctctcttgctctggggttccaggagtagaaaacacccaagagacagaggagaaagggagctgattgattatttgctatctctgctgggcagggctaagcaattgccatgaaatctctattaattctcagaaagatcataggaggt

SEQ ID NO: 150287 - DNA, 392 bp, Homo sapiens
aagggcaaactttacatttaagcaattaaattaaaacccagtcattcacatcagattttgaggtacacaaacatttgtgagcagaagacaagtcaaagttctggtgggaaattctggtgggaacactttgttaagtctgttgaaaaaaatgagttacaaaaccaatactcaagggccctcaatggccaaaaaacaaaagcagctcacaggcccagtcccagagacatgggcaatgttaattctctccttgcttacctacagaaaagcatcagaacaaggcctgccttgaagaaagaggagggaaacaaaccgcagttcaggccacataagcagcttgcgatttctttccctgtcttctgcctaccactcagtgttataaaataaaccggaga

SEQ ID NO: 150288 - DNA, 104 bp, Homo sapiens
gcctggctaattttttgtatttttagtacaaaatacaaaatagagaaatacattagaaatacaagtacgatgctcttgtcagggaagaaaaactctttctttat

SEQ ID NO: 150289 - DNA, 839 bp, Homo sapiens
gtcctggccacgccatcggcaacctgctcgtcttgtctgtgaggccttcccagctggccgggctcaccctcagctcccgcacctgtgcctgccccgggaatctggggccgtttcccactcctcttcaaccgtcagcgacaccttgggccttcttttccagtcaggtgggacggcgcccctgtcaggctgtgtcttatctctcggaacacgggcaccccacagaaggtcctgcctcctgtggtctggagccccacctcaaggaagaaacccatgctgtctgctcgcaactccatgatgtttggacacctcagccccgtgaggatccctcgtctcagagattcgggggcacatgtatcccctgggcatattgtgtgatgctgaggtttgggatgcaaatgatcctgtcactgagatggagttttgctcttgttgcccaggttggagtgcaatggcatgacctcagctgactgcaacctccacgtcccagcttcaagtgattctcctgcctcagcctcccaagtatggcttttaagtgctattttaatcaaagaatattaaaataagtaagcaaataaagtagtacaagaagctagaaaaagcaacaaagtaacactaagaaggcaggatgaagaaagtgataatgattgtggtggtcaattttatggattgacttgactggaccacagagtgcccagatatttggttagatattatctctgagtgtgtctctgggggtatttctggatgagattgacattgaaaacattacattgagtaaagcagtaaaacattcatccaatctgttgaatgcctgaataaaataaaaaccgatgcgtaag

SEQ ID NO: 150290 - DNA, 258 bp, Homo sapiens
tgccaaggcaggtggatcatttgagctgagaagttcaagaccagcctgggcaacatggcaaaaccccgtctctaccaaatacttagctgggcatggtggtgtgcacccatggccccagctacttgggaggctgatggggaggattgcttaagcctgggaggtggatcgcgccacttcactccaacgtgggtgacagaacgagaccccatctaaaaaaagcaaccggggtcaggcacagtggctcacacccgtaatccc

SEQ ID NO: 150291 - DNA, 340 bp, Homo sapiens
gccatagtgcatacatttgctgtttttcatctgattcacctttacctctctacttgatgctatagtacatttacaaatctgcaagtatgctgcagaatacaaaatattgcaatgcagtgccatagattatactcaggcaccatagtaataatcagaacaagtagttcttaggaaaaattatggagaagagttcataattggaatgaacatgtttcttgttgcctctaatatctcatggctaattattatgaacatagaattgtcagatgaacctagaaatgactcatatcacattggtacactgattctcttaatgaaataatataggctggtattgggt

SEQ ID NO: 150292 - DNA, 510 bp, Homo sapiens
ggaatattcatacacatcaattatccctctacggcaagaacaaggggctcctgcatcatggtgacaaaaacattcagaaggcagggacgtgatgacttgcacatcagaaagatttatagctttttttttctttattgctagaacttgtcatctttagattaagacaatttgcagcactaatgatcagccttcatccctccatagtagcacatttggtgcataaatgtgtgagtaaacccattcactcacacacacaaatgtgagcgcatatgaatgcatttgtatggccccaaggccctgctctctgtcttacttatggactatgcttagactgtcttgattctccatggagtgatgtgataacccaagagtaaagattttctataagcaaagtttggccctcaatgcccaaacttatttagtctgagtcctttcggtggtgaggaagaagaatagaaattatctaaccagctttcttcacataaaagaaaatgtcttaaaagccataag

SEQ ID NO: 150293 - DNA, 197 bp, Homo sapiens
aggtagaagtgagagatgagctgaaaacaggacaagtgcttgaagtaagaagcttttaaactcacccatattggggaataagacctataatttactctagtaaggctgaaccagctctgctctcaaggacaccaaggcagggataaggcatcctaaggaaaacatgggggctaagacaaagtcaacatactaactag

SEQ ID NO: 150294 - DNA, 382 bp, Homo sapiens
  misc_feature (365)..(365): n is a, c, g, or t
tagtagcgctggcccaagttatagaaaaaaaaagtggcttacttgagggtatgcttcaagttcttagtgaggcaaggctggaagacagcctgatgtcatgctctgcagaaaccccaagcgtaccatgagctacatctgcactctccaggaggctgtgccactactatgttttcaatcctgataatgcaatgtgggcaattcaacaattaaaaacaggccctggccaggtgtggtggctcatgcccataatcccagcactctggggggccgaggcaggaggatcatttaagtccaggagttcaaagaccagcctgggcagcaaagtgagaccccatcttttttttttttttttttccttttttttncaaaaaactgggggaat

SEQ ID NO: 150295 - DNA, 418 bp, Homo sapiens
agtagagatgggagtttcgccatgttggccaggctggtcttgaactcctgacctcaagtgatccacgtgcctcccaaagtgctgggatttcagatgtgagccaccgtgcccggcccatttgtctcaatttttgttttcttttttcctctctcttgcctctttaggattgaatatttttaaacgattctactgtatcttctttgttagcttattgtctacaacttttgggagaggttgctttagggtgtatagtatgtctttaagtgatgaccttacaataatgcatttctgtttttcttatcctgattcttgtgccatcatcatcatgatatattttacctttacatattttataacctccagatatactttctttccttcatacagttatcttttaaagaaatataaaataccagaa

SEQ ID NO: 150296 - DNA, 200 bp, Homo sapiens
tgacatctctgcaaaccttctccctatagttgcataaagtttgaggtggacagtaagtagtggaaagatgggttgaaccttatttcagagtgggatcttcataggtttttctcatcttgtttttagaattttttgttgtttgtgtaaagatggtattacggaaacataaggttcagtgaaggaactcaggatgaaggtgg

SEQ ID NO: 150297 - DNA, 349 bp, Homo sapiens
atggaatgatttttgcctatccttattactgataatatatgcatacagagtttgaatacatctaaattaggctgatgggaatcacttagggatctagtctagttcccttcttgtaaagtggggaaattgaggcccagtaagttcaggtgccctaatccaagtctttcagctttttaggaacaggcttgtacaagtttggagatttgactcccactcaatttgttgcatgtttcttttattcctctaggttgttttcactttttatttttcatgtttcttttctttttgggacttctgtataggcttgctgtttgggtatagaaggaacagagaaaatgtgccatggaag

SEQ ID NO: 150298 - DNA, 293 bp, Homo sapiens
gcagtgctgggagcaggagaagatgcctggatggatgcccatgccgaagacactggatgggggaaataggagtcagcacgcaagacagggaagctacaggagaacctgaaaaaacaccataatgggagtcaaacaagaaaccaaaccaaggccaacccaactcagggtcagagcccaagaaggggttacagacagacttcaagccaagttcttcctgcaggttcagagcttggtgcatggccagggtcttggactaggggtcataatatgcttatctccataggttattttag

SEQ ID NO: 150299 - DNA, 174 bp, Homo sapiens
tgagggcagggaccaactactgaatccctccattactcctggatcccataacacccaatgcctgccacgtgacagacacatacttttcctttctcctgactgagccagatagttgaattctctgatctgcctccttatttttaatttataagactctacttaaaaaatagcttt

SEQ ID NO: 150300 - DNA, 405 bp, Homo sapiens
catagttgattcctagagtatcactgccgttgttcataccatagcagaggtgtgactctggggatagaagtgggaacaacagcttcatgatttaatgagcagctccttgttgtggtagaagcagccgttcccttaacagatcagttctgggatgtgactctgggagtctttttctggaaactcagtctaggacctgcttttccagcacccccaaggattctggagaatactgtaaccactagggctgcacacaaggaggaagtgtgatgttgaggaagtgagaaaagcccagcccagtggagcacaaagggtgaaacataggttggaggtcagcaggggccagattgctataggccactgaccttcttggctcaacctacggcactgtaaagccatgcttttgga

SEQ ID NO: 150301 - DNA, 381 bp, Homo sapiens
agggctggctgaaaaattgttctcccaaacctatcctccccaccaaccaccctcatctcagaaaacggcaccccactgagtgcacctggcttagccctcgactaggcatttcctgagttccctctttcctctacccccatgtcccaggacccagtgctgccaatcctacatcgagaccacactgggaacccagcatttctctccatcaacactgctcctaccccatcatctccccagacactgccagagcctccctgaggggtgagccacttcccttctgccctgtaccacctggtccatcctggttgtacatggcaaccagagtgattgtttaataaggcaacccacccctgcttggagccttttcctctctttctacag

SEQ ID NO: 150302 - DNA, 332 bp, Homo sapiens
ttttagccagctttcacttctttatagtcttctgggtctatagaagtttaagataataattttgtgtattgcttgtgcaatgttttttttttttaaatagagacagggtttccttatgttgcccaggctggtctggaactcctgggctcaaatgatcctcctgcctcaaccccccaaagtttagggattacagatgtgaaccactgtgcctggttcacttgtgcaatttttaaaaattgacaaatcacgcagaaaaaccagcaacttatgtcatgatcaaatttattacataggccaggtgtggtggctcacacctgtaattccagcagttt

SEQ ID NO: 150303 - DNA, 439 bp, Homo sapiens
gcagctggagccagcaaagatattggacagacaaaccgcctgccagccaagaagcagctggtgcttcccaggtccccctggccctccagcaggttctggtttcctaggcgatgccggagatgggtattccttctggctctcctccctgctctgccttgttcctcccagtttcatgttgctgcaggctggtcccaccctgagccctactccttggctttgtttcatctcccatgcataagcgaatcattcaggcactgtctggtgccccgatactgtctctttgtgggcccttggtttcctcaaactctcatgattacttcaaatatctcccttcctcctccatgctgattgagagcctgaccctgccctggccttaaggaattcatgatcaatggtaatttcactgtctgccctctttggaagagctgcaggaacccag

SEQ ID NO: 150304 - DNA, 382 bp, Homo sapiens
gaaatcccttttcacctgttgactggcctgtctcccccaactaacatgtcggctccgtgaacacacagctctgtctgccagagccgccactggacagctggtgtccagcacagggcaggcatacagtaggtgctcagtaagtactcgagaaagagcaaatggccccaggtccttcctatgccaggcgctccttggcagccccaccgcactttccccgtttgctgggcagcagcagtcgcagctgtcgtagctggtgagatacaatatctgttgcactaaatcatgacctccttggggaccgtggcctcccctttcttcattcatccaccacatatattaagaaccagtgccgtgccctgtcccatgtgctatccctggcctg

SEQ ID NO: 150305 - DNA, 244 bp, Homo sapiens
aagtctgcccaggaggtccccctcaacccaagcaactggagcaacttgaagacccccgcactgccgtacagccctttctgtgatgcctccagagccaccaggaatctctctcccatggccagtgggcggccagaaggagctgtgcccctgacctgtcagaggggccagatgccctcattcccagcctgtccctcaccccaggaaactggatccagagccccaggccctactcctcaacgagagg

SEQ ID NO: 150306 - DNA, 311 bp, Homo sapiens
tctgcctttggccatttaagcttcttcctttctgaatttcagcctctagtgctcaggaggaggtcagggatctggctcttaaagggtgttggagaaaggtctcctttccatattgcttctgaggacttcttagaccattggcagcacacgtcctcacatgaaggtgggcgtatgatctgggagactctgcttaagaaaccggatctctttattgatagagccatctcatgagcaagtaatgcaagctgttggtaattacagaaaacctactgtggaatttcatctaaaattaatgaagagtcagcactgtg

SEQ ID NO: 150307 - DNA, 317 bp, Homo sapiens
cgggatttgtttgcacatctacaaacacaaattatttgcattactctcacttttctacacattatcttctgtttacagagttggaaaatagctcagaaaccaaggtacaaaccccctagaatcagataacttggcatgtgctctaaacaatacagagttttaagagatatttagttttttgggtttcatttaaaaatatttcagtatccttacataactagcgttgaaaggtaaatattagctaagtttattacttaaatcctgcgttttgtaccataaatgacaatgtgcagaaagtacctgaattggcccaagtc

SEQ ID NO: 150308 - DNA, 398 bp, Homo sapiens
ttccttcagtgctcacaccgaccctatgagtggggcggtcaaactgtccccattttacacacagggaaacttagtgaatggcaaggctgggtttgagcccagctctattgcccccaaagataaggctccattccctgctccatttcccaggcatagggacttgtagggggctggaaccccaggatcaactctgggctcagagggccccagcaataagtgactgttgattactcctgatcccaaagctgacttcaggcaagctccttggaggtcgcagccccttcttgctatgcccagtggcaatgatgttcataatcccactcctcagtgcagggttccactaagaacccatgatctcctacctcaaatggacctcatgctttctgagtaagcctccc

SEQ ID NO: 150309 - DNA, 266 bp, Homo sapiens
ttagaaaagtgcctccaggaagaagagtcactccaaggggtgagactatcaaaaaaggaagtgtgtttttcctgaactgggctgatgagagcacactgattaattcaatagcttgcatatagagggaaaagattggggagttaagataacgtgccaatacagaatataccatcaagaatgaataggtgttagagcaaggactaagttgtttggagattattttgagatttcatgaattaccatgaatagaaggacattaacccagg

SEQ ID NO: 150310 - DNA, 449 bp, Homo sapiens
tcctgcagctgttgctggagcaccaggactgcattgcccctgatcaccaagaccccctgcatgagctcctggaggatcttggggagctgcccaccatccctgaccttattggtgagagcatcgctgcagatgggcacacggacctgagcaagctagaagtgtccctgacgctgaccaacaagtttgaaggactagaggcagatgctgatgactccaacacccgtagcctgcttctgagcaccaagcagctgttggccgatatcatacagttccatcctggggacaccctcaaggagatcctgtccctctcggcttccagagagcaagaagcagcccacaagcagctgatgagccgacgccaggcctgtacagcccagacaccggagccactgcgacgacaccgctcactgacagctcactccctcctgccactggcagagaagcagcgg

SEQ ID NO: 150311 - DNA, 387 bp, Homo sapiens
aaaagctctgtgggtgattctaatagccagtctgggaccttattgtgggccagattatgagaactactataacaggaagacatagacctgggctggctctaatggaaaggggccttctagagcgcctgggggttttgaactgtttgggtacagataactctttttagtctggattcttacagtgatcctgaaaatgtatattatgccttttctctttaggaaatctttgggaaggctttgttagagaacgtctttgtggatgaaaggggctctctttctccacatctcttagacccactccaatccactccaaaccaccagagaaagtcctcattgttcagtagaaatccagctgccacactggatcattcccatcagcacaacaca

SEQ ID NO: 150312 - DNA, 255 bp, Homo sapiens
acccactaatatagccagattttcaacctgctgttcaaaaaagttcactacattgtttggagaaatcctagccatgataaaccaatgcttggtcagaaatacttagttttaaatggagaaaggggggaaacagggcaaccctttatgtcctccaataaattacacagagtcattccataggttatatatattgaaaaaataagctttaaaatatcaaagataaatttactttaaaaattagtacaaatgtaccta

SEQ ID NO: 150313 - DNA, 838 bp, Homo sapiens
  misc_feature (37)..(38): n is a, c, g, or t
  misc_feature (58)..(58): n is a, c, g, or t
  misc_feature (99)..(99): n is a, c, g, or t
  misc_feature (122)..(122): n is a, c, g, or t
gaccaacaggcctgggtggggacagcagtggctgganngcatgcagagaagccgagcnacagcctaagagaagagcgaattaaagtgacagaagccctntgggaggcggaggagggctgacngctagagcccaggagtatgagaccagcctggacaacatagcaacctcacctctacaacatagcgacctcatctcaacaaacaataaaaaaagttagctggggccagccaccatgccaggccacaaagcatattttaaaggatgcaaatgaagagctatatagggcaaggtttggaagagacccaattgtaggagcttctgttcccatggagttgaagtgtgccaccctcccatcacctgaatacattcttgctctccagcccagaaactctcagaacctagtcgttttgggtgtttatggaagcatcattatgtatgcacaattgattaaatcattggtcattggtgatcagatcaaccttcagcccatctcctctcctgaggtcagggagtaggttcccctggtaccagcctccatcctgagaccatccaggagtccccccattcatctatctcccatcagtcattcattagcatacaaaaagacataacacattggagattccaagggttttaggagctatgtgccaggaaaccaaatatttacagttggcctttagaactgagaaagtccacttataggaggattttcttctgcctccaccacccctgagacagcaaggccaaccgctcctcttcctcctcctcctgatccatttccacttaatgagtagtaaatacatttttcttctttctgcttttcctctagcttacttt

SEQ ID NO: 150314 - DNA, 341 bp, Homo sapiens
accccacgtcaacttctcccacctgaccacaaaggactacatggagatgtacaatgtcatcatgaccgtgaaggaggaccagttctcagccctgggccttgacccctgccttctggaggacgagctggacaagtccgtgcagggcacaggcctggccttcatcgccttcactgaggccatgacgcacttccccgcctccccgttctggtccgtcatgttcttcttgatgcttatcaacctgggcctgggcagcatgatcgggaccatggcaggcatcaccacgcccatcatcgacaccttcaaggtgcccaaggagatgttcacaggtaactcctccctgc

SEQ ID NO: 150315 - DNA, 330 bp, Homo sapiens
ctgttcacaaagcgtttaaaagttggatttaatgtaactggactccttgggcttaaatgcatggagacctccccctactctgtgctccttccccttcctcattctttccaccccttgtcttagctcagtattagattcttctttgagaatttctccggctcccggtggagtatttttctgcagttattgtttttttttttgtaatgggaagtacagttcagccatgtacaggaaaggaacgtgtttactcaggtatctttcgtgaatcccattttatgccctgacagttgcaagtactgcaggtccattttcgttgagatttagacatat

SEQ ID NO: 150316 - DNA, 345 bp, Homo sapiens
gtcatctgagatcccagtcgacggagactctcccagtgtttgtcatccagaacactgggagagatcctaggagaactctgggtgatagtttccattttcagaagtctgggtgatagttcccttttcttcccatatcttactttgaatgaagcctccatggatgaggtagcccaggggaaacctccagctattatcttgtggggttaggtcgtatgaagctcttacaggagaactgggtctttagggtgttgtgtaggggggtaacttaggaaaattcagccataacaccttatacaggagattatgctgcatataaaccctcttggagagagtctccctcgaact

SEQ ID NO: 150317 - DNA, 412 bp, Homo sapiens
aaaaaaatgagaattaaggtaaatctttcagaaaatagtacaaaaacatgaagatatagaaaaatagaaaaaaatgagaaatttaccataccgggtcagaagattctagagacaaataataggggtcccagaaggagaaataaaaaaagcagagggatggccaggctcagtggcccacgcctggaatcccagcactttgggaagccgaggctggtgaatcacatgaggccaggagttcaagaccagcctggccaacatggtcaaatctcatctctattaaaaacacaaaaattagctggacctggtagtgcatgcctgtaatcccagctactcaggaggctgaggtgggcgtgattcttcactaaacctttagggtgcccaaccccctatggcccccacacttctaaccaag

SEQ ID NO: 150318 - DNA, 183 bp, Homo sapiens
aatctcattgactcttacatataggttgtttgatgacctccaaatcttcagcacatacaccagtatagtgctccaaccttatttctaaatgtcgacaggcacccatctccattcataaaaccaaaacagttttttcctactaatattcccctactgcgtttaacaaccaatcattctccatgc

SEQ ID NO: 150319 - DNA, 377 bp, Homo sapiens
ttgaggccctaaaatcttaataattactaacagaattccacaactgaccttctttctaccacccttctcttttacctaatagttaaaataattaacaattacttctaacagccaggcactgttctaagagctttatgtagagtaagtcatttatttctcagaactagcttatgctatgaaagaggttgtattattatgctcattttacaaatgagcaaagtaaggcacaaagaaattaagtaatctgcccaagaaacagtagagcagatatgaactcatgaagtctggctccagagtgtgaacccttatagacttctgttgagaacatttgtagtagtttcctaacacctcatgacaatacttaagtaggtaccatt

SEQ ID NO: 150320 - DNA, 763 bp, Homo sapiens
tagatacaagttcctcatcaggtatatgatttgcaactacagtatcttctcccattagtgggttgtcttttccctttcttaaaaagctttttgagacatggtcttgctctgtcgcccaggctagagtgcagtggtacagtcgtaactcactgcagcctcaaactcctgggcttaagcaatcctcccacctcaaccttccaagtaactaggactgcaggtttgcattaccacatctggctaattttttaatttttttgtagagcaagccccttgctatgttgtccaggctggtcatgaactcctgggctcaaatgatcctcctgcttcagcctcccaaagtcctgggattacaggtgcgagccaccgcacctggccagcataatgttttcaaggtttatccatgttgttgcatctatcgatacttcatttctctttattgtcaaatactattcattggatgaatataccacattttatttattcattagttggttgatacttgggtttccaccttttggctattatgagtaatgctgctgtgaacatttgtgtaccagtttttgcatctgttttcatttctcttgggtacataagtaggagtgcaattgctgggtgatgtggtaattctatgtttaaccatttaagtaactgccagactgcttcctacagcagctgcaattttcattccccacagcagtgtatgaggatgccaatttctccacattctcgccaacacttgttttttttattatagccattctaa

SEQ ID NO: 150321 - DNA, 518 bp, Homo sapiens
aaatccagtgtggaatggttctgtcatctacccagttactcatgctagaaactgacagccacccttgacacctcccacttcttccacatcctgtcaatcattaagtcttgtccactcaattttctaagatgtcttcaatctgtccacttctgtctgtttctgctaccatcaccctagctagtctcggccaccatcatctcttaaatggctatcgcaataacttccagactgctctccctgaggccattcgacaacccttctcattttttcatgctatcccctactcacccttcaggtcccatgcctctctcccactactaactaggttagagtcccttagtatgtgctcccatgctaccccatacttcttccctatagtctgtgctctagtaattaattacttgaagcaaaccatttatgtcttccactgctagagaaggttcatgaatgtaggggctgcatttttattcagtgctaaattcccaccacctagtagagtacctggcatagagtagatg

SEQ ID NO: 150322 - DNA, 561 bp, Homo sapiens
gacatatgcagaagagtgaaactagactcctatctctcaccacatacaaaaatcaaatcaacatggtcagatttcaggtcttcaatataagatctgaaacaatgaaagtagtagaagataacattggggaaatgcttcaggacattggtctgggaaaaatttcttgagtgcaacctcaaaagcacaggcaaccaaaggaaaaaatgaacaaatgagatcacatcaagctaaaaatctttagaacagcaaaggaaacaacaacgtgaagagacaacctatagaataggagaaaatataagccaactattcaattgacaaggggttaataaacagtctatagagtcaagtgaggtggctcactcctgtagttccagctactctggtggctgaggtgggaggatttcttgagcccaggagtccaaggcagcagtgagctatgatcatgccactgcattccggcctgggagacaatgaccttatctctaaataaataaataaatgtattttttaaaaaaacagaatatataaggaactcaaacaacttgataacagcaaaataaa

SEQ ID NO: 150323 - DNA, 457 bp, Homo sapiens
tttgtttgtcagtctggtttgcttgactagtcaatgcagttgtgaaagcattttagaaaaagttatttgtaggttttttcctagctatttctgacccttgcatggcagattaatttttttttatgccagacagagttaccttatattattgctcaagatttttacctgttcgacctatgagcctaacttttataaatttatttagtttatttctttcagaatagcaatccttcaattaactgtttcatcactctaagctattattagccaaatttacattttcaaaaggtttgactcttagatgtctaggttatttatttccacagagctattgtaatttgtaaagtcattaatttaaaagtcttttaagatttctttttttatgttggctggaatgtcaaaagcagagaatttgtcttaataccggtagaaaagtcagcagattcaaagtaggcag

SEQ ID NO: 150324 - DNA, 352 bp, Homo sapiens
tcagtatcgccttaccggtgttatcgatgcacctgccagtcgtgctggttcaagggcaggtggcaggtggacaatgtcaagggatagtgtgactggcgtattgtgctgtgggtggttctgaggatcgagggcttgaggagtcaggcttgctctgccgtccgggtgcatctgctacgtgctccctctcttccagaagcttctttaggaccactctaagtgccatgccctcatggccctagcttgccaatgccccccaaaacttgatgttacatcctgtccctacctgacttttggttccattggccatggcctgagtgacaaaggaatgctgtggaagtgtggcttctggcct

SEQ ID NO: 150325 - DNA, 255 bp, Homo sapiens
actcctcgattggaattattctggggtgtgtattttacactgttgcccgagctctcccctaaatttaagcttcagaaccactgtgggagcttaagagtgacatttcttgttggctcccttcctccctctcttatcacccccattccaccgcagaaccacccgcataaactacttgctctcaatcctcgcagcaagttctgcttctggttaagttggtgcgggtccaactgagacatctcaaatactaccccctcc

SEQ ID NO: 150326 - DNA, 212 bp, Homo sapiens
tcaaccaatcacagcacacagtcggcgctcaaccaatccctgcacacagtcggcgctcaacaaatcactgcacacagtcggcgctcaaccaatccctgcacacagtcagcgctcaacaaatcactgcacacagtcggcgctgaagctccgctgcccgcctattttacaccaacccctgttcggttgaggggagatgttcggttgagcggaga

SEQ ID NO: 150327 - DNA, 569 bp, Homo sapiens
ctacatactttaaacttcctcaacatgacaaaacttttaatgacttcacattctcaaatgaacatcaattattattctgtattcttttaaatacctaaatatgtaccacaacataatgtatatggaactgcctggcaattattcatagtttgttgatgctttatttttcctgtgtccatttacatcaactatcatttcagtactctaaatatgctatggattgcaaacacaccaacataaaacgcaggctagggccgggcacagtggctcacgactataatcccagcactttgggaggccgaggcagatggatcacgagatcaggagttcgagaccagcctgaccaacatggtgaaaccccatctctattaaaaatacaacaatttgtcgggtggggtggcacactcctgtaatcccagctactcaggaggctgaggcaggagaaaatcgcttgaacccaggaggcggatgttgtggtgagctgaaatcacaccactgctctccagcctgggcaacagagcaaaactccatctcaaaaaaaaaaaaaagaaaaaaaaacaactaatagc

SEQ ID NO: 150328 - DNA, 228 bp, Homo sapiens
accaatatatgtcaatctgacgatgttgtccaaaatatttttagctttgaatttttttcagccagtatcaaaagtgagactctaaaatacttactatatgtctatgtcaaatactaagtcctttatttttttctggaaatattcttaagtaaattctgattagaatcactcctaaaacaccattatcctgattctagatactcagggcagaataaacggtaaagtgaa

SEQ ID NO: 150329 - DNA, 625 bp, Homo sapiens
tttcttcccctgacaataactgcatttttttctctaaggtagctttccctccaaccgttgcttgttgttcttacccaagacccagtatctgccaaaacaaatgtatgtgagtgataaacgctgagaggaatgtctgttggaccacaggaaatttcctgttcaggaagagatcttgggaacttcctgtggaggagtgcattgtgggacttttggctgcagtcccttgaccacagctgcaattaactaaaggcagagggggaggggagaggaagaagaggagacagctacccacagacattcttatccatgtagcccgaggagagaatgggctcatacaggttcacaactttgcaagtgaactagatgtctagtgcagaacaagatcactgtgcccaacctcctttactgccatccatctttcacagccttcccggtgctttcctagggctcctaaaaacagtcactgtcacattatccatgtgcattccccagtccctcataagcacacatgaagtgtccatgccctctgtagccccaccaactgtttggaatctcttgattagcttctagaatccaggcattggagttggtggtctttctccatcccaacttaagtatgaaagag

SEQ ID NO: 150330 - DNA, 667 bp, Homo sapiens
gattcatttgtactaaaatgaggtaaaccagtgtttcttttaatactcccaaattttactcaacatatgggttaaacattgttaaagcttctaaactgatataggcaattgaagccaatccaagcaatacatattcgagtaatacatagtcactggccaaatcaattcgtgggttatgagaaaacaatgccatttggctgaaatattccctatgtacaggcagagaagagcaggtagccaagtgccactttggtgttctgccatgtcaacattcaaaacagggccatagaaaagcaaaacgctctgtccaccctctccttcccttaataagttcacctatgtaggaagaggacaagtgccctgacttctggctgtccacgtaagtgtcaaatgtaggggccctttcacactagggcttctacatgagtgtctccctttaaactctcatgtcttccctggaatttagatcaattatcatccattgagttatgtacaaatagcagacatactcatggtctccacctaagaggagatagaacatttcacttttcttgagagaaaagtcaactttatctatttttttgtttgtctgtttttctattttaagattacataaagtactagggtttggaggtaagagatctgagccaagtcatggttttgctgt

SEQ ID NO: 150331 - DNA, 254 bp, Homo sapiens
ttgataatcactagctcactgtcgcccagtgattaaggtaacagaagctgctaattcattctataagccttgcactttgaactcagccctctgtaagtaaggtatttgtgttaaatgcttttgttctatttaataaacttttatcctgcctctccggggtatggcagatgtaaaattacctgttgttctggaaaatggatgactcagacactaattaaagttactgttaatattagccacaggtggaaatgagg

SEQ ID NO: 150332 - DNA, 171 bp, Homo sapiens
gggacagttaactttctccactcatgaagttgtttaagcgtctccccggccataacaactttctgaagagagtcattttatttttagtccacattgcctctgccttttgcttctcaactttttgctcccagattgcgattcttctctcaaagacatgatatattttttcta

SEQ ID NO: 150333 - DNA, 483 bp, Homo sapiens
tagctgttctagaggtccccgacaggtggtgctcccgggtcagggatccaatcgaagccaggagctgtgacctaagccaaaaagatgcagcgatgccagatccttaacctactaccctaggccaggatcaaacctgggctgcacagagacaacaccagatccttaacctgctgtgccacagcagaaactctactaaggctatatctgaaatatgactgcactgtataatttaggcacaaacaagatattaatattaatagagtataggaaagcaaagttaggaggcccaaagttagggcagaaggtcagagaagcttcttaaggtaatgcctaacctaagttcttaaagtgagaagttagtcaagcaagggaaaggtaaaaacagaaggaagatgaagggattccagactgagaacactgcacgagaaaataccaatcacattatgagttgataaacaaggggttaagagcatatctcagcat

SEQ ID NO: 150334 - DNA, 331 bp, Homo sapiens
cggtgatctagaggatcccgtagtccttaggacgtacatgtcatgtgacttttcctcttggtgcagaactgccaaagatgctaagtattcccccatttaaagaaaactccccatgggtctgctaaagcaggaaaaagacatgtacttagtaagatgaggccaaactgtcactgcaactaccaactatcgtgacacttcctctgtagaatctgtgaagaaacagggttgtcctcaagtcctctgtcttctgggatgtactggttcattattaaaggctgttgtttttcctcgaagtcaagatgtgaaggtatggctgaccaactctaagggg

SEQ ID NO: 150335 - DNA, 716 bp, Homo sapiens
gaacatagtaagcaggtatatgaatagtttgctagtatctaggggagcttttgttttgttccccgttggttactaatacttaaggttcatctttttccaatgtctgggcttcagatgttcagaagtttaatcacattccacttgtggactgcttttcttcttgttcatctttcctggtaggatatcacttttttggtttcaagcccaaaggagggggtcatttactcaagcctcttgtcttgtcttgtcttgtcttgtcttttctcttctaatagagatagagtctcactgtgctacctagatagactgtgttacttgaactcctgggcttaagcagtccttccacctcgcctcccaaaatgctgggattacagacacagtgcccacccagccacaaagcccccagtgttgatggtccctggattcccacttttgtccctggggcctatagcctcagcttctaaatctgctacttctctgctagatcagcaaatgaccccagagcaaaagtggcctagaatgcaaagcttcctccttatggaatttcatcctcttcttcatcttgatcaccttatcttgttctatgattcttttaaggagaggttttcccttccttccagcttttttagttttgtgggtgtcaagtaggagagagataattagtttgaattatatactcatctattacccaaaataaagtcctttaaaaaaaaaaa

SEQ ID NO: 150336 - DNA, 291 bp, Homo sapiens
gagaagagtatacgcttttcttttgtaaattctaatatttagcactttttgttgttttgtcagtcatattgttaaaaaggtaaaggcagagtacaaagttggtactggagaaactagtttggggaaacaaccgatgttctgtcaggacgatcctgaaattcatattaattactttttaaaataattgtgccttgagttatgaagaaagctataatcctgagccatgtaatcccacacggcttccatgcagccaggagacatggagtgctgggcactgggcatggctttagg

SEQ ID NO: 150337 - DNA, 362 bp, Homo sapiens
gggctggaggaagtggggaaccaaggaggaagtgtggtttgtgagaaaatgattagcaagaaccagagtctgcttgggtctgggtcccccaggacacccagtgggcagaagcttgggcatttggctggccgggctgtggacaaggactatcagcctcatgttccctctaggaccagaacagtgtcctggtccccagccctctcctgatcccgctgcccgcaccgggcgaatgtctgttcataggtgtgctgccatccactcctccgttgcctgcggtggctgcaggcctgatgcagcaagcagggacctgagagcccaggggacacagcctcaggttcagtagccaccccagaggtccccag

SEQ ID NO: 150338 - DNA, 489 bp, Homo sapiens
atgtgtcatctgaaatcatattttttattctttttttgtttttcgagacagggtctcactctgtcacccaggctggagtgcagtggtgcaatcacggcaccctgcagcttgaccatgtaggctcaggtcatcttccacctcagcctccagagtagcggggaccacaggtacgtgacacctcacctggccaatttttatattttgtagagatggggtttcaccatgttgccccagctggtcttgaactcctgggctcaatctatctactcaccttgacctcccaaagtacagagactacacgtgtgagccactgtgcatagccttgaaattgtatcaacaagctttttatactctgttacattaaaatccattgatttgtcctgcaatttgaatggaacttttactcatgcatgatttttataacatcatgcactgaccatctggaaaatactggttccagagaattacgtatatcatccaatttttatc

SEQ ID NO: 150339 - DNA, 564 bp, Homo sapiens
  misc_feature (86)..(86): n is a, c, g, or t
tcgcagagtctcagcttccagtgagattacaggcatgcaccaccacactccagctcatttctgtgtttttagcagagacggggttntggcatgttgggccaggctagtctcaaactcctgacctcagggaatctgcccgccttggccttccaaagtgctgagattacaggcatgagcttaatttttatatttttagtagggatagagtttcaccatgtttcccaggctggtctctaactcctgggctcaaagcaatccacccacctcggcctcccaagaagtgctgggattacagatgtgagccactgcgcctggcctgttaccaagttactatctataaaggtgtatcatttaaccctctcccactgttaagtgtgtatgtgcctgtctgatcaaactctgaaagaatttaatattaccagtttaaaaatctttgctattttgttgagtgatagataaactttgaggtatctgtcaaaaggagtagggaaggtatgtcatatacagagcagcatgagcgaaggtggcatgctggcagtgtgtgagcggcactgtctgccagag

SEQ ID NO: 150340 - DNA, 181 bp, Homo sapiens
ccttcctccctggcctgctcccttccactcaggggtcaagggtccctgtgacctattctcataggagcctctgctttcagggtctcagcagttatcacattctgttgtcgctgagtttttagaaattcggctgtctcccctcgcagtctcaggccccgcctgcctgccactgggctgtggg

SEQ ID NO: 150341 - DNA, 563 bp, Homo sapiens
cgcgtcatgacactggtggcaggactgctttgcggctgctgccctgctttcctctgtgagccgagtgtcctgtcttgtctccagccctggcccagggctgcctcggaccctgcccagcgccacagggtgggttttggccccctgtgctcccccgttccatccctccctccgcgctgagaggcacttccagctctgccagggactttgactcggtgctgtgccgagtgtcccaggacacccgaagcttctcctgaatctctgggcagcacagacggtggcagtgctctgatcagttggtgtgaagtgttctctcctgtgagacttcattagcattcctgtcctgtcgcttgctgggtgttatggtaaatacctcgggagtgtaaacgggaaactcacccatggtgagcagcggctgggcgccatcgggtcaccgagggcaggttccacacgggagctttccgctccctccagggcggtattgcacttgcctggcagtgcgcgctgggggctctggtggcccctctcgggcctgtgggctggctcacttggcctgactgtcactg

SEQ ID NO: 150342 - DNA, 772 bp, Homo sapiens
gtcttagtgcctgtggggtcccccaagaacccaaatggtggttgtcgtttagcccacatgtgccagggtcggggggatgggggagcccgggcttccccatgtttcaagtccgtgcttggtgggcacggggggctgaagaccacaagaatggtccctgagtctctgtggtgccatgcgggtgccccgtgcgtggtggcagggtgtgagttctgagaaagcagcagcctggtggagaggtgggaggtgggcggcagagtaatggcctgtaacagcaggcagcacccgcctgcttcctggctgctggctgctccgtgcagagttggttggccagggaggccggaattgtggccctgtgctcccccgttccatccctccctccgcgctgagaggcacttccagctctgccagggactttgactcggtgctgtgccgagtgtcccaggacacccgaagcttctcctgaatctctgggcagcacagacggtggcagtgctctgatcagttggtgtgaagtgttctctcctgtgagacttcattagcattcctgtcctgtcgcttgctgggtgttatggtaaatacctcgggagtgtaaacgggaaactcacccatggtgagcagcggctgggcgccatcgggtcaccgagggcaggttccacacgggagctttccgctccctccagggcggtattgcacttgcctggcagtgcgcgctgggggctctggtggcccctctcgggcctgtgggctggctcacttggcctgactgtcactg

SEQ ID NO: 150343 - DNA, 744 bp, Homo sapiens
  misc_feature (548)..(548): n is a, c, g, or t
aaggttcaatgcaaaaagaacagagtctggcctaagaggaatgtacaacctcagaaggagggcaaaggggccagcagtgtctttcctgctttcctcaaggggtcttgggaggtggatcccattcagcttgccagaactctcaaaagacaaaattacaacaaatttagtttaaagatcttatttagcttttatttattatttcagaatcaactttgaaacccagtctggataaaaaaattggcttaaacaaatgcatagctcaaaacacaaattcttggagcttcaaaatttgagagagaacttgcccaggacccctgctgctgtgagagatctgtgtgcacaatgggcctggtgggtcgctgtgcttggccactccatgcttctggggtttgatggaagttctacttcagattgcatttcctacacgaatcttgcatcccaggcataaaccctgcttgattatggtggattagctttttgatgtgctggtagattcagtttgctagtattttgttgaggatttttgcatctgtgttcatcaaggatantggcctgtagttttttctttgctgtgtctctgccaggctttggtatcagaatgatgcttgcctcatagaatgagttagtgaggagtctctggtcctcaattgtttggaatagtttcaagcagggatggtagcagctcttctttatacgtctggtagaatttggctgtgaattcatctgatcctgggctttttcttg

SEQ ID NO: 150344 - DNA, 563 bp, Homo sapiens
  misc_feature (511)..(511): n is a, c, g, or t
  misc_feature (523)..(524): n is a, c, g, or t
  misc_feature (544)..(544): n is a, c, g, or t
  misc_feature (553)..(553): n is a, c, g, or t
aaggttcaatgcaaaaagaacagagtctggcctaagaggaatgtacaacctcagaaggagggcaaaggggccagcagtgtctttcctgctttcctcaaggggtcttgggaggtggatcccattcagcttgccagaactctcaaaagacaaaattacaacaaatttagtttaaagatcttatttagcttttatttattatttcagaatcaactttgaaacccagtctggataaaaaaattggcttaaacaaatgcatagctcaaaacacaaattcttggagcttcaaaatttgagagagaacttgcccaggacccctgctgctgtgagagatctgtgtgcacaatgggcctggtgggtcgctgtgcttggccactccatgcttctggggtttgatggaagttctacttcagattgcatttcctacacgaatctgaatttaccaaacagttgatgttggagaagcatgtccagctgacgcaagctcaaggaacctgactcgaaaaagaaaagncgggccaggggnnggggagaggaggaggggggngggagggangggggggggg

SEQ ID NO: 150345 - DNA, 188 bp, Homo sapiens
tcccctgagtgtgcaggcctgcatttttgctcagttcagctagcgcagtggcctgctcataaagttttccaaaacctgtaggctgtatgaagaatagcggttactcctaagctgcttttaactttcaccttgtgattctcatcatatttttgttgatttccctcctttgagttcttttatgtatttcc

SEQ ID NO: 150346 - DNA, 194 bp, Homo sapiens
tacacccacgtccctaacagcattattcacaacagccaaaacatgagagcaacctgtgtccatcaacccgtgtccatcacatggatatataaaatgtggcatatctacatggcggaatattattcagccttaaaaagcaaagaaatcatgtcaatgctacaatgttgttgtaatcctacaacattagacgaacc

SEQ ID NO: 150347 - DNA, 295 bp, Homo sapiens
ggccagagtggaagtcaccaatacctatggcatgaattgcactagggagaatggtagtatgcgaagagctagcagtcttcaggacatgaaggcggggtcaaagataaaggggttcatcttgtgtttcaggagcagtgagttgcagagtcttcctctggaagttttaaaatttgaaaaaatcattaagaagaagagttcagcttaattaaaaaaatcagaaaaactgattaactctttacagaacattaaatatgataatgccaaaataattctaatgattgaaatgctttgagtc

SEQ ID NO: 150348 - DNA, 318 bp, Homo sapiens
tatggagtgtttgtataggctcatgtatttttttaattcatcaattttgtaagctcataattcttttgaggactactatcctaagttaagtggacatactttccttacagctccttcttcctcttgttcatgggcacctttcatttctttccttaaatactaatagtctcacagatactagattatatttcagtgcattaccagtcctcttaatctagctgggtaggctgagctgtggtcatggttatttgcagcttggaaactctacttgcatgctttctatttttgtgcagtttgagaagtcccttttcctcatgg

SEQ ID NO: 150349 - DNA, 459 bp, Homo sapiens
aaatgagacgattttctcattaaataactcgagttaaagaaggatgcaaaagagaagttgcaggatatctagaaagtaacatacagtggaatgcaactaaaacggtgctcaaaggacattcacaagctcaaaggacattcacaaccttaaacacctaggtaactattatatgatcaatgtatttagtctttaagtcaagaaactagcaaaaagacaaattacccaatgaaagaaatacatagcaaagataaaagcacaaattattctattagaaaatatggaataatagaattgatagataaatgcaattgcaagttcttaaaaaccagtaaagcccaaatacacaaagttagaaattttaaaaaagaaaattactacatataagaaagtttactttgcaaaactagatacaaatgaatttgaagatataacttaatagataattttctaggaaaatgt

SEQ ID NO: 150350 - DNA, 191 bp, Homo sapiens
ctggccactgtgaacgtgtgtgggggtgggaggctcacgtgatgtgtgtgtgtcatggattccatggggctgagggccagaacgtgttaggacgtgtggagcaggggtgagacggggcttcccacctggggaaaggacaggggtggcaccaaagaaccgaagcagaggcaaccctgtggccaacctctgct

SEQ ID NO: 150351 - DNA, 604 bp, Homo sapiens
gtcatgtcggtacctgcttacttacccagtgtgtgttgtcccctccattttccatgcgatctccttgtgcagcatgatttatagtcctttgggtatgtacccagtaatgggatggctgggtcaaatggtatttctggttctagatccccaaggaatcgccaccctgacttccccaatggttgaactagtttacagtcccaccaacagtgtaaaagtgttcctatttctccacatcctctccagcacctgttgtttcctgactttttagtgattgccattctaaatggtgtgagatggtatctcattgtggttttgatttgcatttctctgatggccagtgatggtgagcattttttcatgtgttttttcgctgcataaatgtcttcttttgagaagcgtctgttcatgttccaaggtacttttaaggaacatctcaaaatgaacgctgggaccatctttcagtgtgtgtgtgtgtgtgtgtgtgtgtgtgtgtggtgtagaagcacaaatctgcttaaaacatcacactcatcctggtaaaatcattttgaagcctttgttatttttttttttttacagagcaaggtagaagtcaaagaggact

SEQ ID NO: 150352 - DNA, 291 bp, Homo sapiens
ataatcagatcccttcaaactagtaataaagcgcaaaatcagaaaagcagtcagagaaaaaaagatacattatgtacagaaaattaaagaaaaaaacaacagcagatttcctgtcagaaataatgcaaaccagaagatactggagcagtatctttaaagaacagaaagaaaaacctatcaacttataattttatacccagagaaaatttctttcaagaactgggataaaatacagacttttaagttatatcaacctgaaagaatttataagtagcgtgtgcactctcaatg

SEQ ID NO: 150353 - DNA, 397 bp, Homo sapiens
cttcacaaatatgtgctctatattgtctgccaggtctcaaaaattcatcaagcaatttccctccaacaagggctgcagttctagtgataaatagcatctttagctgcacagtctactactcatcaaccagtgggttttttttagcacctggaaagtttttttgtactatatgcaactcctacttcacattgcctgtgaccattcagaatagaaaaaggtctgttgatgcatgccagtgctggttactagtcagtgacagagaacacagagagggacaaacacagccatgaaccccctggcactagtaccagcacctagttggcaagtagtgggtgcatctctcaagtgaagtgtagatttgtatttagtcctgcttgctctcataaaaagagccagt

SEQ ID NO: 150354 - DNA, 364 bp, Homo sapiens
caagctaacaaaataaaatgtaattacttcactgaaaagttcaagaaagaatggcggttggcctagttaaccccaggagctcatggctcaaattatattgtcagctttctctctctctctttctacttgtgtttcttcctctctcggtctttcttctgtgttggcgtcattctcaagcaagacttctgacaggaggcctcagaaagccccagctcccattactcctacagctatgaaatgaagtgaaaaaaaaaaaaaaaaagaaggttctctctcttaaaaatgctaaccaaattcctggcatggagtcccattacaccagcttgaggaacctgctcatccctgcaccaagcacaatgtccag

SEQ ID NO: 150355 - DNA, 693 bp, Homo sapiens
gattatcagatccagcatcctgggcctgagatgtaagcacttttcagagaggaaaaaagtgttggctgtcctctttcctcactcctctctcatcaacaatataaaggtatcagtgaagaaaacgtttttaacactagtgtccgtgtatactgacttctggttgggaaggtgcctgtgattcccacctcctctgccagatctgccgaaaaaagctaagaactggatgctgaaatggatgaacttgagcaaagcctcatactgtttctgggtggttatgatctctaggccacttactggttttgaaattactgcctcttcctactctgtccttcctatcacagacagcaggtttattgcatagactaggcggtgccctttacattgtcttcctctttcaggtaaatgaagaggttgctttccagttttaaggtgcccttttacaaataattattagatgaatcgaaactcttaggagtaataattaaagaaatggaatttgaaaaagttattcagctttgtttgtactttaggttcctggcttttatagtaatgctttatatttgctgttgttcctgtaatcagaggccccaactcttggataaatgggcagtgtccttatttcgaggatatgggaactgaggaactgagcactcaggtgccttttatcagagctactcagtgattggggaaatt

SEQ ID NO: 150356 - DNA, 432 bp, Homo sapiens
  misc_feature (361)..(361): n is a, c, g, or t
  misc_feature (385)..(385): n is a, c, g, or t
  misc_feature (401)..(401): n is a, c, g, or t
  misc_feature (404)..(404): n is a, c, g, or t
  misc_feature (412)..(412): n is a, c, g, or t
  misc_feature (414)..(414): n is a, c, g, or t
  misc_feature (416)..(416): n is a, c, g, or t
  misc_feature (422)..(422): n is a, c, g, or t
acttcaggatctcaggtgctactccacaaacagaaagataagcataagcaaaggtgaagaggtggaaaaagtttttcgagaaacagtcggtagtctagtttgatgagagtgaaaggtacatcgtaggatgttctgggagataaagccagaaaggtaggctggcatcagattcataaaaggccttcagcaaaagaatagagagtctgagaatggcgtgaaccccggggggcagagcctgcagtaagccgagatcgcgccactgcaacctccgcctcccaggttcaagcaattctcctgcatcagcctccggagtagctgggactacaggcatatgccatcacgccccactaatttttatatncccagtagatacagggctcaccgncgtcggccaggctggnctngaacctgncngnggaggnagcaccgggt

SEQ ID NO: 150357 - DNA, 465 bp, Homo sapiens
cttttttcttttctaaaacaggcatttctacaagttccctccaagtactgcctcagcagcatcctacagattctatgacattgtgttttcattttcatttggtccaaaatattttgtaatttcatttttgattgcttatttgccccatagattatttagaagtgtgctattaatttctgaatatttagagattttccagaaatctttttgttattgaatttaattccactgtagttagaaaacaaaacatgtataacttgtatccctttaactttagtaagacttgtcttatggcccagaatatggtctgtgctatagtctaaatatttatgtcctcctcaaattgttacagtgaaattcttaccctagggtgatgatattacaagataaggcctttgggagatgattaggtcatgatggcagagcccttatgaatgggattaatgcccttataaaagagatccc

SEQ ID NO: 150358 - DNA, 458 bp, Homo sapiens
agccccagtttacaacagctcaaggtggttcatacaaagcattgaagcttaaagttgctgtgagttcagcaagcaggagggttgagaagacaggcagatggtttaaaactaaaggtcaataagtgggcaagactagttaaatgaggcagatactccccaaagatggaattccagaaaggtgcttgaaaaggactgaattcttaaagcctactgctgttagtatgtagagttcttgaggaaacaagcagtttggcataacttaatctactaagaaactataagaaggtgaaggaagttggaacatcttactggaaaaagaatgagggagtgaagagggaatcttgtgaattcaaaacttgcagaaaagctattctgtttcctttttgtttaggttctcatgcactagcagctgctagaatagatattggaaggcagggccaaaataggtcagttgttca

SEQ ID NO: 150359 - DNA, 552 bp, Homo sapiens
agccccagtttacaacagctcaaggtggttcatacaaagcattgaagcttaaagttgctgtgagttcagcaagcaggagggttgagaagacaggcagatggtttaaaactaaaggtcaataagtgggcaagactagttaaatgaggcagatactccccaaagatggaattccagaaaggtgcttgaaaaggactgaattcttaaagcctactgctgttagtatgtagagttcttgaggaaacaagcagtttggcataacttaatctactaagaaactataagaaggtgaaggaagttggaacatcttactggaaaaagaatgagggagtgaagagggaatctccagtcatgcacgtatgtcacagcgacagctaattggcaatgctttcaggctagcagtctcgactcatagaggatctcctagaatagataacggtagatgggaccataagagatgagtatttcagttaggcaagacataggcgactataatggcatatgactggcatcgtctcttcgcacacatcacgagtagcacagtatgcatatgct

SEQ ID NO: 150360 - DNA, 279 bp, Homo sapiens
catatgtggacattgttgtcaaactaaaaacacagtgatttttgtatcttgtttagttttaaaatgttcccagcttagggtttgtaaaaacattttaaaattgtgaaatatagcctatatacagaaaagtgcataaaacgggtatgcacaatttagcaagtaattataaaggtgtcactcatgtaaccaccaccctgggtaagaattggtaggtactgccttaaagtagtgtagctacgtaacacagcgcttctccacagggggcaattttggctgtca

SEQ ID NO: 150361 - DNA, 129 bp, Homo sapiens
catgctagatgcttttgcataaattaccttacttcatctaaaatatgaccctgggagatcattattgcaggtgaggaacttggagctctgagaaattaaggttggcaaatgatagaatcagaataccag

SEQ ID NO: 150362 - DNA, 551 bp, Homo sapiens
gtcctgcaactgtaattcaggcttaacaatatttggctgaggttgtgagagtctatacagccattccccaggatgcatctggtttctgccagagtggcaaattaaatacagttatgctaggggcatcctctggctctctaagagcatcactaatctctgccaccccacctaggatatggtactggctttcattgatgtttttagctgatgcaggcagtttctgaggtttgcacttctccctctccactgtactatatcttactatagaggtcagggactcaatgtgggggttactccaattgtcaatccaaattatacattcagaggaaataaccactgggtgggtctgttgacccagtggaataaaaaagtgcatttttctaggactccacttattatctgacacccactaaccttcatttgaggaggggagccatgacggcagttcagctctacaggtatcagtgtcaattcagactgtgtgtgcaatagtccttgaatgcctacccagacatttcctttcctccagtgcactgtagctacagtaaatg

SEQ ID NO: 150363 - DNA, 215 bp, Homo sapiens
ttaggctttcccatgggggttttggattgggtagttacaagaaaacacgtgcgcaggggaaatttattgacacgaccctgatagaagcacagcccctcaggcttgctcactctcactctctccccacctcttggttgagctctgctgtcactgcctccagacctctcatgaaggccccgccaccaccctccctggaatctgtaagtaagatattt

SEQ ID NO: 150364 - DNA, 472 bp, Homo sapiens
atggagctaaatgatccaccaacttctagattcagctccagagttaagaccagctgggccatgcaatatcgttctaagggctttcaggggaggatgcagcccctttcagtgtgggcagcccctgtatggtgctgcattctccctaggatctggtggggatgggctgccaggatcagcaaagaagagaccccatctcagagtagatgggcacctgcctctgtgatttggccataggtcagcccaatggccccttggctgaggatctactgtgagccacccctgtgcaaaccagacaagtttcccaccgttgggggctctcggtccaagagaggtagccaattggactacaaactctaggtggtcaagacttggtcttgtttactgcttccttttcggtccaggaactctgactgaaacctagcaggcattcaatacccatctgttagatgaatgggtgggtcggtgggccaat

SEQ ID NO: 150365 - DNA, 281 bp, Homo sapiens
ctcgcgctactgcccagctttccttccaggaacgggggcacacatcatggtctaacctacttaagaataacagacgataggcaccgtctgttaatttcagctgcttcttataagaaataagagtctgatacacggtgatgtcaggcctcgagatcataaaaagatttcccacagggtctcctaaaataggagagacaaccggaagtcattttggttgaggtaatcgagtacagaacactcctccagctgcaggggataaataacactttcccaatatagat

SEQ ID NO: 150366 - DNA, 528 bp, Homo sapiens
atggggctctgccttgtgccctcagaatgtcagtgtgtgccagccccagtgagtcatttaacacgatgacactatttacagactcattggcactattggtgacaggacccttcagcactgatgcttagatcagcaaggactaggcagtgataggaagggccagccttgggcttaaggaaaacaagatacctcttcctacaccctgtggaaaagattcctgaaggaccactggtgtggctgcttgttgagctccagagccataagaggggtaattaggtgattagcagtcattgacacttttcttggagcgagttttcagtctttctttagaagagattggggagaaaagggggattcgatgcaggagaatgtgtggatcaaagcccaacctaaccagtttcctattgcgcctgggcccagcacaagagcaggtggaatgctgggagcctgccctatcccagcagcaccagctctgccatgttctcccagtgcaaggcagcacagagcagcaactgacagcctcagctt

SEQ ID NO: 150367 - DNA, 378 bp, Homo sapiens
gcctaggaataatagactgtatcacttaggtttgtctgagtacactccatgatgttcacacaaagacaaaattgcctaataatgcatttctcaggatgtatgcacgttgttaagcgacacatgactgtacaatggcctaaactaaaacttgttttatttgaaattcgtatactatccatgaatccagtagtaatcataaaagaagagacagaaaataagacgtataataaaagtcagcttttttttttactagaaataacaggtgtcctatgaaaagcagttattctcttcagattgcttccttgaggagaatctggtttccttcttttgatgaaaaaatatgagacaagtataatcatgatctgtgagaatacaaat

SEQ ID NO: 150368 - DNA, 231 bp, Homo sapiens
ggaaagcgacatagaggagggaaaaggcatgtgacgtagtaatcatctgccttcattcaacacagtggtccagaccctcagcctcttggaggctctagatttagaataatctatatcatctgaaggaaagatacatttcacttgaaacagaagcttttctataccaacagcctctccttcaagcccttctatggaaagcgctcatttcacatccggcctctattcagtttt

SEQ ID NO: 150369 - DNA, 329 bp, Homo sapiens
gtaattttcatcacatcatgtcaagggtatatgctgctgttaacattatcattcatttaagattctattttaatgtgtggacaataattatttataactggtaatttaatgtaccatattaaagtaaacttctttgctatatgtatgcattgtatagaacagatgactttctttgaataagtcataatgctaaaatatatttaccttactttcttggtttaaaaaacacccctttatcactgttaaaaggtaagtgaaaaatccattactacttaaaaattaatagtattcctatctttatggagtcaagttctacatattaaatttaa

SEQ ID NO: 150370 - DNA, 460 bp, Homo sapiens
ctcccaaagtgctgggattacaggcatgagccacgacacccggcccaaaactgcaatttatagtgcactgagcagcaaagaaaagtgacgagagcaccacttacgatctctgttccaacaactcgactctgctgttggaacccaaaagcagacacaggcaccatgtaacagatgaaccaggctacatttcaataaaactccatgtctgcacactgaaattagaattttagataactttaatgtgtcacaaaatagcctccattcgattttttttcattgtggttcacgcctgtaatcctggccctttgggaggccaaggcaagaagatgacttaaacccaggagttggagacgcagcctgggcaacatcaggagaccctatctctacaaaaaaaattttaaattagctgagtgtggtggtgcgcacctgtagtccctaccctttgggaggctgaggcagg

SEQ ID NO: 150371 - DNA, 423 bp, Homo sapiens
tctctctctgtctcacacacttgcaggctataagggcttttctttctccgaatctccaaacttattcccacctggggattttgcactcactgctccttctgccaggaatgctcttcctctacatcatcccatttgtttcagctcaaagttccccttcagagaaggtgcccctgaccaccttcctaaggaagactcctcctctaagcgtccctccatcgtatcatcctctttcctttgttgcacagcattgctcacagtctgtggttattttgcccttttctgtgttttattgggatttgtctgcctctccctgctggaatgaatgctttacaagaccctgctcttcactcaccctacatcgcccaggaccacaacagaaaccagcatgcactactggttttctagataattattgactaatta

SEQ ID NO: 150372 - DNA, 428 bp, Homo sapiens
gttttagggtatatgtgcacaacgtgcaggtttgttacatatgtatacatgtgccatgttggtgtgctgcacccaataactcgtcatttagcattaggtatatctcctaatgccatccctcccccctccccccaccccacattagttgaagtaagttacaagtttatccgggttcccaaggaagagacctacctccccactccaccttgaacagaggaatgtaaaagagttttacagccatttagaaaaccccgcatccccagtttttagaaactgagccctagaattccaacacaaggaaatctcaccttatttcattgccctttgagcatcattttcattaatacctagcatttctttttgtgagggaagaaccaggtccccagcctcccaatacacctagaatgtgctggcaacattgtggcaag

SEQ ID NO: 150373 - DNA, 487 bp, Homo sapiens
taccatgatcagattcattctgatttttgtccttaaatagctttctattagcatgtgtttcattatcctggaattaggaaattcaatttaaaattgctgtgtttttcaattatcccttttatgccctgtcaatgtgaaagcttgtgttctacttcagctctgtaaacttttcttttatgactgttttgattgtttcattctgtctgttgtctctttgctgtctgtttatggaactccttttggatactatgttggaatttctacacctatctatctgataatttccaactttttcttcttctgtactatggtttgggataatttcttcaccttagtgagtgtttgaatgaagtgcttttgaaaactgactagaggaacagatatcattgattgtttccggacagtaggttaaatatatttttgctgccctgaggaagctgtccattgttcctgccctggagaattatactagctgggatttttcaaa

SEQ ID NO: 150374 - DNA, 472 bp, Homo sapiens
aatacactttagcccgacatacacacagtgtggtacctagagcagcaatattagaatcaccagggagcttgttagaaataaatctcaggatccacttcagactgactcaacaagaatgtgcattttaaaaggacccccaaataattcctatgcatattaaagactgagaaacagtgatctagaccattttaaaagacacggttctctacttagccccaaacagaaccatcagcacttccaaaccccatgccagttttcctctaacaaattgcaggcctggtttcccaagccaatatcctaaatagggagcaagcagacttcagacatggtaagtctacagcccatcatagttattgtgcactctctaataccaggtctcctgatgtcctattctagccctttctacaggataagaaatagcatcagcaggactatccaacaagacatattagatttggccttcttccctgac

SEQ ID NO: 150375 - DNA, 406 bp, Homo sapiens
tttccatcatcacccggcaccagcaaggcttttctagaagatactggcaggctgtggagaagggagtcagacacggggcttcttccagccggtccctctgtctcccttccagggacccaaacatctcccagcacaagcatcccagggagctgccgtgtgggagcgtgggaaacggctcactctctcgagccgccagaagttggcagtaagcagttggaagtgatcacagggaggccacatccagacaatttagttttaaaaagctgctttccagtgaaatttaaatcagtccattaattttgaaaacactctcagtgtcttttattatttggaatctaggcatgggaatatttctattttcacaaggaatgttttaagagtcaggttttaggacaaatgtcatgca

SEQ ID NO: 150376 - DNA, 911 bp, Homo sapiens
cgccgtaactgcacaatacacgaatcaaaacgacaaacgccaagctcagtatttcttcagaaatttgaagtggcccattgatgtctccaactattattgcagaactacgtattctctccctaaattttgccaatatttgcttcgtatattttggggggccctgttgtttagtgtgtgcatatttataattgttatatcttcttgataaattgatccttttattagtgtttaatgcccttgttccaattgtaacagtggttaaattaaagtcaattcatgtcatactagtagagccacaccacctctcttttggttaccatttgtatggaatatatttttctgtttttcactttcaatttatttgtggcttgcaactaaattgagtctcttataaaaaaaatgtagttgtgtgatttttaaaatccattacactgacttttgcctctcaattggaaagtttacttcatttacttttatagaaattattgatgagaattactactgccattttgctttttgttttctatatggcttacaattttttgttcatttcttcccttaatagtttttttgtgattagttgatttttatagtaaaatgttttaaaaacctctgtcattttcttatgtgtgcattttaaaaatattgtctctaactgccataaggattctgtttaatatcttaaatttataatcctctatgttttaattaatgccaacataatttcaatagcatgaaacactccatatctgtgcagtccccttacccatttcatgttgtttcacaaattacattcatatacattctgtgctgaataacataaatttataattatttttataaattttttcaacatgtatagaaaataaaaatggagttataaactaaaaataaaataatgctaagtttta

SEQ ID NO: 150377 - DNA, 235 bp, Homo sapiens
gggaagacaccaaatctgtatgatctctcctttttccttaaccccacttctcaggtcctcctctcagccctgttccttcctgtccccaaagctctgccttatcctcttcccctctaacccagtgctgtccaatggagatagaatgtgagccatgtaagtaatcttaaattgtgtaacacacatattaaaaagagaaacaggtgaaattaatcttaatatatttaattcaacccag

SEQ ID NO: 150378 - DNA, 382 bp, Homo sapiens
atgcagtcttccaaaatgtgcatggggctgtaattccatctagtgtttacaatgacactataagccttggatggaattacaatcttaatgggaacaatcagagtgcactactccatatgctcagagaattcaggatgaactcaacttctaaaataaaaagcaccaagccattggcatgtaattacaaccaggaggccaagctgtctgcttgctagtatatgagaaatgctcaattgaaagtaccatctcaccttattgtagcaaaacctatttaatgtatctgaaaaacctcttcctctccaaaattaaactttcgactttcgtgatgagaaaatttccacaagggtctaccacatagaggtgatatatatcgggtgatgac

SEQ ID NO: 150379 - DNA, 249 bp, Homo sapiens
ttccgggacttgagctggaagaaaaaaatacggactccttagaggccaaataggaaaaagaataagcaggtaacccaagcataggagcgttcaagctagccttggctctaacggtgtctacaaaccttggtgaacttgagcaggcgacagtctagagcctcagaacgttggcagctatggaggacacatggctcagactgccctttaggaatgaaggtcttattccagctgctgagacagccccaagcc

SEQ ID NO: 150380 - DNA, 563 bp, Homo sapiens
atcaacactctaacatcgaaattaaaagaactagagaagcaataacaaacaaattcaaaagctagcagaagacaagaaataactaagatcagagcagaactgaaggaggcagagacacgaaaaacccttcaaaaaatcaatgaatgcaggagctgtttttttgaaaagatcagcaaaatagaccgctagccagactaatgaagaaaagagagaagaatcaaatagatgcaataaaaaaaaatgacataggggatatcaaatgattagcaacttaactatgaatatgaaagacaaaattataaacagctagatagcaatctcattttaacatggaaagttttgtgaggtttggtaaattgcttgaggtcagaagctcttaaagagttaagttgggattcagactcatatctgctgactccaaaccgtatttgccttccattatgtcacaatgttccctattttatttaggtttagttgttgtgcaactgctgattattgaagtagagggtggaggacatatgtatttcatataaggaatttactttcatttaaggaatttattt

SEQ ID NO: 150381 - DNA, 580 bp, Homo sapiens
  misc_feature (70)..(70): n is a, c, g, or t
atcacttgagctcaggagttcaagaccagcctagcccacatggtgaaaccctgtctttactggaaatacnaacattagctgggcgtgatggaaggtgcacgcctgtaatcccagccactctggaggcagagacacgaaaaacccttcaaaaaatcaatgaatgcaggagctgtttttttgaaaagatcagcaaaatagaccgctagccagactaatgaagaaaagagagaagaatcaaatagatgcaataaaaaaaaatgacataggggatatcaaatgattagcaacttaactatgaatatgaaagacaaaattataaacagctagatagcaatctcattttaacatggaaagttttgtgaggtttggtaaattgcttgaggtcagaagctcttaaagagttaagttgggattcagactcatatctgctgactccaaaccgtatttgccttccattatgtcacaatgttccctattttatttaggtttagttgttgtgcaactgctgattattgaagtagagggtggaggacatatgtatttcatataaggaatttactttcatttaaggaatttattt

SEQ ID NO: 150382 - DNA, 346 bp, Homo sapiens
caacaagcaaaactcaatctgtttcactagagcctggagtcagttacttcctgggcttggtttgtgaagaggggcttcctgcctgctggttggctgaatcctggatgaatgcccagtgggattaacatgattcatccatttgttttgctcaactcaaagagcacactgggtctttctgaacaggaaccacctcaattaacccgtaccgttgttgaaactattcccgttcagttgtttgaattctgacacttctaagttggcttcatctcagctgcctgccacatttgcaccttctaagtgaaggagccccatcctcagccacgctgcctgcctgcctgtgatgctg

SEQ ID NO: 150383 - DNA, 1034 bp, Homo sapiens
cttagtgtaatgggtaaaaaagggtgactgtttcaggctccacttcccctccaccccatccccacttaacttttgattttttaattccaaaaaataaatactattgtagcgagtcaagaaaaagtagttctttttaatacggaaagtgctaacaagtgcttttaatatggaaggatatacttcaccacctctggtttggggtgtatccttccatacctcccctttcgctcagccctggtggtgtgtttggcaaaagaggttcccaccctgagccatctctttgttagtggcactctctgctctggaggaagcctacccatgttccctgagagggccgcctctctgtgccatagcatggtgtgaatgtgaactttcttgatactacctcactctttcacctggcccattgctgggtttctgggtctgatttgagccccagccagtccgggagtgacagccaagaggtctacggagcaggcagcccaccccagggcctcctcagaccccagtcctgtggttgctctaaatcatggctcaggaagggcacaacctcaggacccatgtgcagagctcagcgagggtcacgtggtccccactctgctgcccaggggtctctctgctatgaaccccactcatcctagggacaacttggtccccaccaagccctccagagctggatcagtggaatcaggggaagaaggaggaagcttcacagtccaccccatgggagcggcccctacccactgcgaaagaccaagtggagatggcaagtcatgtgcccgtgcacacgcgtgtggatgcgcatgcgcgtacccagcccagggacagccgagagggaacccgacaaagagatggaggtgggccagcgactgaggcagagacaaatagggctccaggagagcgcgacagacaggaaatccttctaaatcaggacacagccccaaaacgttattgctgttattactattagctctgtgtaaaggagcaagtgggagcaaggatccggtgcgagtgcagcccctgccacgcgcctc

SEQ ID NO: 150384 - DNA, 488 bp, Homo sapiens
gattctcctgcctcagcctcccgagtagctgggattacaggtgcccaccaccacacccagctaatttttgtatttttagtagagacagggtttcaccaggttgtcaaggctggtctcaaactcctgacctcaggtgatccactcgcctcagcctcccaaagtgctgggattacaggcatgagccatggtgcccggcctcagaatttcattttcaacatgttttgcatgatgggtgattttggagaatattttttgctctatcgcaggatgattaagatgtggacaaggtgaagcggatggagggggagctttgaaagttacttgctatttaattgaggaactaaactgctttgagagcctgggggtcagatcctctgccttttcctcctccccacctgcagtgcaaacatcagacaattgatcactattgtatcttggaggtgggagtgaccattgcagtgctgggaccagaagatggcattgtatgt

SEQ ID NO: 150385 - DNA, 182 bp, Homo sapiens
agcctagatggcgccactgcactccagtctgggtgacagagcgagactctgtctcaaacaaatgaaccccaacatagctgttggtggcaaggcctttctccatgaccaagggacggtggccattctctccaagtttcttcatctgtaaaatgggtacaattcagtggccctccctaacaggg

SEQ ID NO: 150386 - DNA, 283 bp, Homo sapiens
gataaacaccttccaaaggctggctactgcctatagagaggataatgctgagctggcaagtaatgtaatcactaacactcactgatgtcagccagctagtaaatgatagaggtgggatttgaagcaagcagtctcactccttaccctgtgttcatagcctcagtgctactcagagagatattgggtcttgggagaacagaaagggacagcaaaattgtggagttcattctttttgtttgttcttgagacagggtctctccctgttgcctaggctggagtgcag

SEQ ID NO: 150387 - DNA, 255 bp, Homo sapiens
ggatacagctactaaaacagaaagatggttcatcttggataaagtattttaattacttccacaagacgaaagggagtacatgtaaattttaaataaagatcaactccgtagacttaaataggttcaaacagataaattcaaggtgactactgtcattaataactaatatttaggaagtatttttcatgtatgtatattcagcacatttattatacatagatttatagtcaccagttcttgctttccaggagaatg

SEQ ID NO: 150388 - DNA, 296 bp, Homo sapiens
catccactgcccccgcccctgcttcttcggtgaacgtggggctgcggaacagacccctcctcacatcctctccactcctgaccacaggaagttccttctctccccttctgggtttgacagtctttcctgaggtgcaggtgggccaaaaatgtagagctcatcttaggaggtttatttctgtcttgtgagctaatcaagacactgggtgcagatgtttaagttttatcaagggagcagtctcttcagccagatgtgtacagcagcagaaggggcttgcctgcacggtaacgtgaaac

SEQ ID NO: 150389 - DNA, 344 bp, Homo sapiens
taagtatctgttgactgaataaatacaggggagcaacctgccaaaactgtctatcataagtggaaaaggggttatgagcaacagttagtgaagagaagtgaaagaaacaagtcaaagaggggagaggagagtagaaaattttaacacaagctgtggcttaatgaaatccatacaattttagtgtgcttttgtataaataaagacaaccagtaggtctccttttccctacagaagctataaaaagaaatggaattagaatcttagtagttataaagatataaaacatacttcagagcaaaaatgtcaaacaggcatctcaaatttagtatgaccagtgttgttaa

SEQ ID NO: 150390 - DNA, 640 bp, Homo sapiens
  misc_feature (23)..(24): n is a, c, g, or t
caagctgagacgactctctaatnnccaccgctacagtaccccattctgtatttggttcaagctccagcaaactgctcacgtgcctcgtatgttctacaagattcgcacactgggatggctcatgtggtgtcatgaattgtgaacattactgtgcagtcattctcagaaggtggggaaaacaccaaaacaaacaacagaatgcctggcaagcagcagcgatgaggataaagatagactgcaaggcctgttcctacctctggtgatcagggtgggaggagggaagaaaacgggagtgcatctgcctggggcctgtaccggaggaagatgctcaggaggcccagcagacccaggactctctcccacctgtggccccgtggcaagaccaaaggggagctctttggagctgtggcccctttgtgtcttccaaatcatattaattccaaattaaaatgaaggacattatatgcatcttacaaccaagttctagaatcaggccgagtacagtggttcatgcctgtaatcctagaattttgggaggctgaggcaggagaatctcacatgaacccaggagttgaaggctgcaatgagctatgatcacatcactgcactccagcctaagtgacagagcagatcctctcag

SEQ ID NO: 150391 - DNA, 736 bp, Homo sapiens
attttgctcttcaatgttgcctgtaaacttagcaggtaaatgtattctagtataaaacatcattgaccaaatctcttcctttagtttttctgaggtagtgcatcccattaaaaaagtctcttcaattagatttggctttagtttagaaaggggtttggtaagtcatgtcttccatatgacatttctactcatccccacactgccttccacttaacctgtacagacagccccaacacatgcacatgtgtgtacacaactgtatatgcagcagccagtgggctaacaaatatcagcaaagaacttttttaaaaagaatttgtaataatccgtgctgtctagaaatgtgagttacttaccttattaggaaaccggcttataatactatatatgactctgcctgcattttatagttaagaaatgtacataaaaattgctatattttcacagtttcattataatgtctgtttagtaacccatgtccactgatactttaaatatgctaattactgagcaattgcaatagaaatccagattttcataagaaaatgaaatagaaggatactgcatctttaaaaaatagagtgaagatattttactgtattcgtaacatatgtgatagtggaaaaagtattttcaaactcacaaattttacagaggttgtaaatagtttgatgaagtatgttgggaaagagagcttctagttttcatcacaataaaaagaaaaaacttgttcaga

SEQ ID NO: 150392 - DNA, 188 bp, Homo sapiens
gcagaaacctgaagttatcctgagaacaaacgtcactgccatggaaacacctcctccacgttcccgatggtgcactggttttctttcctgtctgaccaacaagcctctggagagtggccaccatcttacaggctcactttgtattctgtaaactttcagttggaaaataaacacactgtctccctgtc

SEQ ID NO: 150393 - DNA, 231 bp, Homo sapiens
gaagcagctggctgggacaagaagtttctgattcagagagaccggtgattgaggtgggattaataaagggacatcattatttcctcagctgagcccccaatcaatttttcagttagaatcctggacacataatgttactgtttcgttcttattagtcacatgtgtttggggctaccccatcgtaaccacatgagagtactgttggcaaaacaaaacaaacaggatgtttaa

SEQ ID NO: 150394 - DNA, 465 bp, Homo sapiens
cttttctgtgaagtctttccaaataaaaggctccctctcactgctgaatttctacagcatataatttgtacctcattttctgctctgtacatgcccaagccccctactggtattgtgagctccctgaaggcaggccccaatatttaccctggggtctctgtttccccttctgggccctagaaacagaatcccttgaaaaaatgccaagagctctgtggaggctccagacttagcagctgagaggggctgctaagagaagccaaccaggacgggtgaggcaggtcaccaggcaaaggacttggggtagctcagaatcaggaaacagcacaaagaaagtccctaagacaggagcaagtagggcaggagtaaaggcaaagggtgctgtgtggagaaaaaaaagggaggtgagaggagaggagggggcagggaaggtgtactaaacctgaatgaggagtgagatctgag

SEQ ID NO: 150395 - DNA, 885 bp, Homo sapiens
gctgctgcacagcggggagatgcctttctcctgtgagtgcggcaagggctttgtgaaacactcaaagctcatcgagcacatcagaacgcacacgggagagaagccttttcagtgtcccaagtgtgacaagagtttccgcctgaaggcgcagctgctcagccatcagggcctgcacacaggggagaggccttttcactgccctgagtgtgacaagaacttccgggaaaggggacacatgctgaggcaccagcgcatccacaggcccgagaggccctttgcctgtggcgattgtgggaagggcttcatttacaagtctaagcttgcggagcacatcagagtacacacaaaatcctgtcctgctccaaatgaactggacattaagaaaaggctcagccaactgtttgcaatgatagaggccgattggagttgaggcagagtgggacatccaaagcgttgagcaggattggtattgcccaggaatccacagcaacagtagccagacccgctggtagacgggttttaggagcaggtatccttctttgagcaagagtgtcatgcaagttaggaatatgaagaaccacaaaggattttctcttcagaagcatcaccaattatatttctttctttttttttttttttccaagatggagttttgctctgtcacccaggctggagtgcagtggcgtgatcccagctatattggaaaagacagcattataaaacaaggacataattttatgaaaaaggaggcatctgcaaacgaaaacaatttctacgaggttatatgtgattgttaacatttttaagaaaaggtgcacacagaaatccagataagatgtgattacctttgtgcatttgtataaaaatatatgtgtgtaattataa

SEQ ID NO: 150396 - DNA, 147 bp, Homo sapiens
ggcgatctagaggatcccagatgcaaccaagttcagttcttgctgaaaacacaaatagatacctggtcctcactccctaccttttgagtgagatcctaggagaagagtctggattattaagctctccgagtgattcttatgttcata

SEQ ID NO: 150397 - DNA, 349 bp, Homo sapiens
gccgggaggactgatgctattctgaaggctgcgtttgttgctttggacgctgtcctcaatcttgtcttgtgtatgtgtgttgccttagctagacgtaagcttcagaatgtctaacacctacatgatgcctgtccactgctctggtggacatgaaattactgataaggggaaagggtctggaaaactcctggcattctgtataataacggagaaatttatctggcctgaacttgggttacctggggcaagaggcacctgagcccagcctcagccttctaggattacggcactcataccctggggtgagctgcagggaaagacctccatgggcagcctagagcctgggatg

SEQ ID NO: 150398 - DNA, 508 bp, Homo sapiens
tatatagatttcgtaaaatgaataagcgcctggttccgagaagacccttgagtgcctctttgggtcaacttaatgaggtgggcctgccttcagcagctatccttccagatgaaggtgcagtggatctccctagcagaaaacctcctgctctgccaaatggaattgtatcaacagggaatacagtaacacagcttattccgcgagggacagaccccagctatgattctagtctgaaaccaggaaaaatagatcatctgagcagtagtgctcctggatcccctcctgacctgctagaatctgttcctaagagtatttctgccttacctgtgaatccacattctatacctccaagggggccagcagatctgcctccaatgcctgtttacacaaggagcttgaacatgccctggagaagaatgaagtggacctgcctgttcactccttgaaggacctgcccacctgtgcttcctcctggcttcaccatcggagcctctgcaaggaacccacg

SEQ ID NO: 150399 - DNA, 670 bp, Homo sapiens
tatatagatttcgtaaaatgaataagcgcctggttccgagaagacccttgagtgcctctttgggtcaacttaatgaggtgggcctgccttcagcagctatccttccagatgaaggtgcagtggatctccctagcagaaaacctcctgctctgccaaatggaattgtatcaacagggaatacagtaacacagcttattccgcgagggacagaccccagctatgattctagtctgaaaccaggaaaaatagatcatctgagcagtagtgctcctggatcccctcctgacctgctagaatctgttcctaagagtatttctgccttacctgtgaatccacattctatacctccaagggggccagcagatctgcctccaatgcctgttaccaaaccacttcagatggtacctcgaggttctcagttatatccagcacaacagacggatgtttattatcaggatcctcgaggagcagctccgccatttgaaccagcaccttatcagcagggtatgtattatactccaccaccacaatgtgtgtcccgctttgtccgacctccaccatctgctcctgaacctgctcctccctacttggatcattatccaccctacctccaagaacgtgttgtaaactctcagtatggcacacagccacagcagtacccacctatata

SEQ ID NO: 150400 - DNA, 758 bp, Homo sapiens
tgcagagaaaggaacacggaacaccccggagtaagtttttctgtatgtaaattaagcctcaatcactaagaattaataattcttaccagggctcaggcccatctgtttcctggatgagccctgggtaggccctgggggatgccaaacagagctgagcaggtaagcagggaaagaggaggcatggcctccgagaaagacagaaaacagcctggctttgtgtggccaggttcaggaacatgacctgtggccatggtctgcttttggccagcatctcccgttaatctctgggacagctgctgcagcatcacctgagtgccctttggaaatgcaccttctcagccccatcctggatccagactaagggcacgacccagaaacctgtcttcatgagccttccaggtggagctcgggagccccaatacttgggcagctcctatggagctggaaggagcagatttgccttcgatataaagaacactgagcacctgctaactgcctcgttttcccttcttgtgtccatacacacactggtggaaaagggcagcatggtttgcctcatttttaactcagattccttggccatgaaagaaaaacaaaaatcagcaaatccggtctcggttcagttgaggtcaaactcttggtttggtttggtttgctttggtttcattgcctcctggaaatggtgctcatctactttctggttcctggatccaattcaagctgcacaaaataactgagtcagcacataaagtccaaaa

SEQ ID NO: 150401 - DNA, 170 bp, Homo sapiens
aattgagacgcctgataggaatgttcacacatatgtagctgtaatatgacttgtccttcttgagtgcaaggtgatctggctgaggtcggggtgagattggcactgaagccaagggtgcaatccatttctatggaaagccaactggcccatagtggaaggtggtctcacgg

SEQ ID NO: 150402 - DNA, 453 bp, Homo sapiens
ctacctcagcctcccaagtagctgagactacaagcatgggccactacgcctgggtaatttttgtattttttgtagagatggggtttcaccatgttgcccaagctggtcttaaactcctgggctcaggagatccactcgcctcagcctcccaaagtgctgggattacaggtgtgaaccaccataccccgcctgaggatggtgacgtcaaggtgtgggggtgatgggagcccagtgccgtaatcagttggtcagtgttggtagctgacttactcccacgaagacccagctcctgtccctctgcctggggctgtcttgccttgtaccagtcccatgctctcgtcttgtagtttttgagggtcaggaatttacagtggctttgtggggtaaagttggctcagggtctcccacgtggttgcagtcaagctatcatcagtgcatctgagctcccttggg

SEQ ID NO: 150403 - DNA, 404 bp, Homo sapiens
ctactcagacacattagatttaaagatgaatttaccttttcatgagctattggtgagcaaggcactgtgatgggagaaatcttaagactctgagtagcagatatcctgaaggaggcctcttggcaaagaactcttcctttcctatgaagggaaagagagtattggaagattatttgcagtgttttgtgtgtatcatttttggtacacagtttttattcatgtatccctaattaagttttttttttttttggtagaggcagtgtcttgctgtgttgcccaggctggtctcgaactcctggcctcaagtgatccatcccgcccaaaatggtgggattacaggcatgagccaccatgcctggctcctaactttctttaggtataaaaataagacgtcatcttcagga

SEQ ID NO: 150404 - DNA, 417 bp, Homo sapiens
caataactgggaaaaaaaataaactatgaaatgcaaaaaaggaaagttggattcacacctcacaccatacataaaaatagtcttcatgtagcttaaatacttatatgtgaaaggcaaaattttagaatattggacaatatttttatgactctgaggtaagagtagatttctaaaaataagacattgaaaacaatgagaaatccaactatattaaaattaggaatttctattcatcaagagacaccaaaaagagactcaaaggacaagccaaaggcagctgtggtagctcatgcctgtaattccagtactttgggaggcagaggtgggaggatcagttgaggccgggagttcaagttcgaggttgcagtgagctatgactgcactccagcctggatcacagagtaagaccctgtctca

SEQ ID NO: 150405 - DNA, 244 bp, Homo sapiens
gtcaacttgtggttcagcattgttggagcccaaaggggtaggagataagtacatgagggtgtgtgcttgcaagtcatggccttgatggtacagggatagtgggagaggatttatggcaattcttggaggactttacctagcactttctcctaatggagatgggaaggaagcctgatgaagggttttaagcaggcaagtgacaggattagatttggatttttaaaacagttcctctagggtctag

SEQ ID NO: 150406 - DNA, 234 bp, Homo sapiens
aactttcccatcatcaactcacccagaaagcagaacattcactttcccagttctattcaggggccacaggtgctatgagcagatgcaccagggcgctgtctacaatctgtgaccaggagcagcgatgctgacccagcttccctccatcaggtgctgccgtcgtggagatgcactcagcaccagggcacggagcacctgctccttctcggcgatgcgctcagcaccagggcacag

SEQ ID NO: 150407 - DNA, 418 bp, Homo sapiens
attgttaaagaaggactgtattgattattaaaggtaactagaatgggcattcttcacattcatgtaggtttgcttgttcaagttaccactttctgaacaagaaggttagaccatagacttttaagggctgcatactgcaaagggatactctgttctttaggttacatgggcagggatcactgctgagaccatacctgccaaaggaaggcaggctttgctctctagatgctggacttgaaattgtttcccctctgcttagtgctgcattattttttttgcttcttaatctgctgcagagtatctagatcagggtgtccaatcttttggcttccctgggccgtattggaagaagaattgccttgggccatatataaaatacactaacactaatgatagctgatgagcttaaaaaaattac

SEQ ID NO: 150408 - DNA, 457 bp, Homo sapiens
agccctgagcttgactctggcagaaggaagtgcccaagatgggagtctaaccctgccctcaggggactggtgccagggaggcagggatcagggcagcacctgggaagccaccccacagggccagcctgactactggccagccaggccactgtggccatatcctctctgcctgaccctccctctctgagtggacgacagttcagttggcccccaggactgagaggacccagggagctgccatggtcctggtgcgtcagagccctggagccctggagccctcttcaatgggaagagggaggggaggcccacagcaggagcacacctcccagctgaaatgtagttggtccctacactgtgctaaggggcgccatgaggtgggaagagatgcttggggatgcctggtgtgggcccatggacagcctgtggcctgggtcctggcatgactgtgtccccttgc

SEQ ID NO: 150409 - DNA, 426 bp, Homo sapiens
atccatgtacatgtctgtgagcaggtccatgtacacatctttgggtgtgcatgcacaggtccatgcctctgtctgcatgtggttgtgcgtgtgtgcagctgcatgtgtactggtgcatgtgggcatctgcatgtggttgcatgtggcatcctgggagcagagatgccctggagaggaggaaccagctgtggtgtggagctaggctgaggcgactggggcagaagggagatgggtcaggggctctccagcatcccacacttacttgctaaaccatggctttgattctggcacttgggctggggctgctgaatgaggcagatgaagatctattccctatttttgctcaggtgggagggcaggagtcagactacaggcagtaaataagcagcaagtggcagaaggtgcccagtgctacagtggaaatgg

SEQ ID NO: 150410 - DNA, 319 bp, Homo sapiens
tactgtgcactcaccagtaagagcctcctgcgccgccctcttcttctggcggtacctagtgactgctgtcttgattttgctccatgacatcattcttatcccaagttgtcatccctaattttgcttggcttgattaatcaagatgttcctctttggggttagcagtgtgtttgggggcacctttggggcttaatattcctcttatgcagcattacctaagtgctctacaaatatggcagtttggttcagtgaagtagtgagtagctcacaaaataggttaaaaggttttgttgtcagtttggtcatgggtgagaagtta

SEQ ID NO: 150411 - DNA, 355 bp, Homo sapiens
gttattgtcacatttaatttgttcaaaaaaggagaggaaagattgaagacattaagcacagaaatggaagatgtgaaaaagacttaaatctatattctagagatgaatgttacaggacctaagatgaaaaaaatttgctggatggatctgtgacagtttagtctacaaagaaagaaattaatgaggtgacatcataacaatagaaactacccaaaatgaaccacagagagaataatggctaatttaaaaaagagacaatcagtgaactgtaggacaatttcaagtgcctcagtattcatgttattcaagttgctgaagaggaggaaagtgggagagttttagactgaaatatttg

SEQ ID NO: 150412 - DNA, 396 bp, Homo sapiens
ggtagtcacaacatgcctgtgtctacaagacagaaccaatgttccttagctcagcctgtttctcaatctgtagtttctaatatcctgaattccattttcttttttgagtcagggtctcactctgtcaccctggcgggagtgcagtggtgtgatcatagctcattgcagtctccaactcctgggatcaagggatcctcccacttcagcatcccaaggagctgggactataggcacatgccaccacactcggctaattttttttttttttttttttgagatggagtttcgctctgttgcccaggctggagtgcagtggcgggatctctgctcactgtaagctctgccccctcccgggttcatgccattctgcctcagcctcccgggaagctgggacca

SEQ ID NO: 150413 - DNA, 666 bp, Homo sapiens
tttttttttaaatggctatatgaaatggaagctactagtttatctatttgggtctccagatctcctccttgtttatcatccaagtaccaggaaactggagaaactctcatctgggtaccaaccaaagacatctcttgtatgaggggatgaacaaacacagatgactcatttctcttacactgagacagaagcagaattaactcctgtcagcctgacacaattctgcatgggacatctcaaatgcctcaaagacacctaggtgattttgaaggaattcccagtcgccctgggccgctgcccaatgataagccaggctggagagactcaggctgattctaaatagaaaatggaacttccctggtggaactccacaacctggatcacccattctgatttactagctcttgggtaagagaaagaacaaaaatactctactccagtatcacattttacaggtgaatatagttgtggttgtgatcatggctctggatactttgcagccttgatctctcactacagattatgccatcacattctatttcctcctggagcctctgacctcactgtagcaggtcaatgaacaagatgtgaaacatctcaaagagccacactcccaatgcagaaaatgccttttgttagttttctgtacattctctatccaaagtc

SEQ ID NO: 150414 - DNA, 488 bp, Homo sapiens
attgcagtcaggctcaagttattaatcctctgtagcttcatgtttatttatctgcaaactgtgggcaataataactatttatatagagatagtataaagattgcatatgttcatggatgtctagacttaatggctacccacattgaaagtagagttaactctctgtaaatttcagttatcattctcacagtaagacaaaagcaaggtaactggtgtgccctggggtattctaggggcaggggagcagctaagaggattgagaatgtggagctaaaatgtgtagggccctgaatgcccagttaaagattggggcttttttcatacttcagtcacttgggtaacatctttacaattttgtcagtgtctgcagatttcctgtaatattatctattagtaatttaaatagaactaccttttaaaaaatgctacatttcccccatcaatatgtgagctttccagttgcttcacatttcaacaacgcttggtgt

SEQ ID NO: 150415 - DNA, 274 bp, Homo sapiens
aggctctgagcggtctctcgtctaccttgtctctcggctctaccttgtctctcggctctaccttgtctctcggctctaccttgtctctcggctctaccttgtctctcggctctaccttgtctctcggctctaccttgtctctcggctctaccttgtctctcggctctaccttgtctcccggcaaagcagatgcacggggagagcaaggaccagttccaaggctcccctctgccaagcccaccatgaccacgcatggcccacaggctgagacttg

SEQ ID NO: 150416 - DNA, 499 bp, Homo sapiens
gtgtcatgagagatgttactaaaatgtaaaataactgtatgaatattccagagagaagggaaaaaagttgagaagcaccgatattgaagtatttgataaatgaatgaatgatctgaattttaggtgtcaagttttcttatctatgccacttcaaattttccctctgaggccaggcatggtggctcttgcctgttatcccagctacataggaggctgaggtgggaaggactgcttgagcccaggagtttgtgagctatgactgcacccattctacttctcgacctggaaggtaagccataccctccttgtttctactccacctggtcaccagtggggttcctctaacacaaatgtaaccattaaacactatttctcaaagtgtggttctcagactacctgcaccaagattaccctgagctgctggtttaaatgctgactcctgactagaatataaaagtctctggaaatgggaatgaacatctgtttcatatatctaaga

SEQ ID NO: 150417 - DNA, 203 bp, Homo sapiens
catactgttctatgcctggaacctcttctccccatcccaccactccatcaaagcagtaacttcttactcaggttttgtgattggctctagggcacctcgttggggaagctggcctctcagcccagggcagttgcacagcctccttccacagctcttcttcctgctgctgtggcttacatgttgtctctaccactggactatga

SEQ ID NO: 150418 - DNA, 543 bp, Homo sapiens
tgcgtatgctgatactggggagggggcagagatgggaaaggggcagttataaattgctaagttattgtgtttatattcagcacatcttgcagccaagattctgtttctctctctctctctctctctctctctctcacacacacacacacacacacacatacagacacacacacaatcagtgtaaagattctgacctatgcctggaaatacaatcctaagtctagataaaggggagagctaatgaaggctcacagttgaagttgtctgatttgtacacacccagcacacattcagactcgattgtataggtcaaattttcccagaaacatgcgatcacggctttttgagctcaaaacctgtggataattgttgcttaccccaatatcccactttccttcttttccttagaagtagaaaccttggttttgaggtagacacattgctgcccaactgaatgacctgatcttcttcttgccttgcaagaaggtatgcctagacttgcaagaaggtatgcctagccttgcagctaggtatgcctagact

SEQ ID NO: 150419 - DNA, 494 bp, Homo sapiens
  misc_feature (466)..(466): n is a, c, g, or t
tctccccattccgctacataatttaaaaaacatctcatctctcaggacctggccactgcctctacaacaagcctcctgggaagtctcgttgtcccatcgacacctctcccttctttcgctccattttttttttttttttttggacagagcaagactccctctaaaaaaaaaaaaaaaaaaaaagaaaaaaaaaaaaaaacacccgcacggggggcaaccgcacggcggtcacttcaaacaaagcagggtagaagcataataacaccccggcgtgtaccccacgaacaaaacaaacaagtggtgagcagacctaccccgggacgaaacgacgacatgtgctaccgcgcgtaaacaccaatctggggtgcgcacacacaacactaacagcgcatcacacagacaccgtaccgactgcgagctgcgtgacgccacatagagcgagaccgaacatactatacagccgacncgaaagcacgcagcgccggctagcacag

SEQ ID NO: 150420 - DNA, 984 bp, Homo sapiens
catcctgcagctggagagcagagaaaaccaaagactggccctagaagttaataacacaagcggcagactccgcaaatgggatattgtaaacctttaataacaccatgggacccatatgaagtgccaccagtgatgctggaagtcctcccacgaagcagagaaaagtcatgacattacaagaaaaaactgaattgcttgatacctagcatgaatggaggtctgcatctgcggttgaccgtcatttcaggcagatggttcatcttgcagacaaacgatgagagggaagtagggaagaagcaccaggtgtccttgacactcaagagaatatcccctctgctgcactactggatgcctcctggaaaaactcatcatgtgaaattgataatcagagcattcctgggctagctgctgtacactcaaccaatctccaaagtgcactgtccttccagagagtatggagggaagatcagatcacactgcattttcagacaatagtggatgatgaaatacagaggccattttgaccgtgcgctctccatgtctgacagagccagcagcatcacagcatcaagggggccctcaacttgccacaagttttaggaagtagcttcagggcctctttccaggcttgaacagccatgtctgtctgtctagatgaacaaatgcccttggggaaaacaactccgttatgacctctaccaactaaaaggtaaagttctactctactaagtcataccacgcctcaccttaatggcaccagcatctcagagtaaaacaggatagtttagatagagtccactgattcttagaccttgctggctgctccgggaagggccctttgcaatggatttctgttgttgtatggatagagtccagtaagggatgtggggacgcttcaggtctgaagagttcattttcttaatggcactggaaaggttaattctgatgacttctctccgctgctatatctccatctatagttca

SEQ ID NO: 150421 - DNA, 1150 bp, Homo sapiens
cctgaacacctcttcgaaactgatatctctaaaataaattctccgtttcccagagacctctagaaaagactctctacctcttcatgggaatatacttttgctgcaagaaaataaaatgttttctctttatctcttcatggcagacctaagtgtgagaaaaaggttgctggtgatttaccacaccacagcctgagtacacccaggcacgcatctttaaaacatgcccaaagatatctctgtgaaatgtattcagtagtggattccagtattcacagccttcatttacacagttcactttatttaatttgtacttactggtaatattaagtaatcagagttcatatccttgggaaaattctcccctgaaggccaattcattcgtaataaaaaccacattttgagcagtgagtgaatccagctggttgcactagtaagccattttcattttttatagcacatttcagctttccaagtattgcatatttgtatgggagaaatgttttctgaagtcaagcttaatgaaacatgaagtcaatgatatatgcaaacatctatttattcctctgctgtctgggaagttttgatcaagaaaacacttctgctcattagagaattgaccagatgcagtgctattaacatttctgtgatcaaataaagctcacccagatgaaagaagaattgcaacactaacagcctggaagcactcaaccgtggagatattacccccaaaagtgaagcatgctaagatacaaaacaaactgacttcaagcacatctgattaacatggccattgttaactttcccactacttggcagactttaaacctgcttatggataacagtcatatgatgctggataagaacctcatttatatcagtgtaattctctatgcacatgttcttcatgtttatagaaactgcattgatattttgttactcctcaacatgaccctagaaaactaactgatcatatagaacttaacaaatacagaagcctatggctaaggcgccttcggccttcgtaagggaatatacaccactgtcctgccgtgccggtgggggctccattacggtcagttcacattctacagaatccgcaagcaagcatcgatacgtatataattacctccgtatcaatattgcgcgatag

SEQ ID NO: 150422 - DNA, 1163 bp, Homo sapiens
tcacggcgtccattccgccgcggttcctggggcgcgggagtctaaaataaattctccgtttcccagagacctctagaaaagactctctacctcttcatgggaatatacttttgctgcaagaaaataaaatgttttctctttatctcttcatggcagacctaagtgtgagaaaaaggttgctggtgatttaccacaccacagcctgagtacacccaggcacgcatctttaaaacatgcccaaagatatctctgtgaaatgtattcagtagtggattccagtattcacagccttcatttacacagttcactttatttaatttgtacttactggtaatattaagtaatcagagttcatatccttgggaaaattctcccctgaaggccaattcattcgtaataaaaaccacattttgagcagtgagtgaatccagctggttgcactagtaagccattttcattttttatagcacatttcagctttccaagtattgcatatttgtatgggagaaatgttttctgaagtcaagcttaatgaaacatgaagtcaatgatatatgcaaacatctatttattcctctgctgtctgggaagttttgatcaagaaaacacttctgctcattagagaattgaccagatgcagtgctattaacatttctgtgatcaaataaagctcacccagatgaaagaagaattgcaacactaacagcctggaagcactcaaccgtggagatattacccccaaaagtgaagcatgctaagatacaaaacaaactgacttcaagcacatctgattaacatggccattgttaactttcccactacttggcagactttaaacctgcttatggataacagtcatatgatgctggataagaacctcatttatatcagtgtaattctctatgcacatgttcttcatgtttatagaaactgcattgatattttgttactcctcaacatgaccctagaaaactaactgatcatatagaacttaacaaatacagaagcctatggctaaggcgccttcggccttcgtaagggaatatacaccactgtcctgccgtgccggtgggggctccattacggtcagttcacattctacagaatccgcaagcaagcatcgatacgtatataattacctccgtatcaatattgcgcgatag

SEQ ID NO: 150423 - DNA, 1170 bp, Homo sapiens
ttggactcgcgccgcgctgtacatttgcggtcagggtatgaaaagtctagaaaataaattctccgtttcccagagacctctagaaaagactctctacctcttcatgggaatatacttttgctgcaagaaaataaaatgttttctctttatctcttcatggcagacctaagtgtgagaaaaaggttgctggtgatttaccacaccacagcctgagtacacccaggcacgcatctttaaaacatgcccaaagatatctctgtgaaatgtattcagtagtggattccagtattcacagccttcatttacacagttcactttatttaatttgtacttactggtaatattaagtaatcagagttcatatccttgggaaaattctcccctgaaggccaattcattcgtaataaaaaccacattttgagcagtgagtgaatccagctggttgcactagtaagccattttcattttttatagcacatttcagctttccaagtattgcatatttgtatgggagaaatgttttctgaagtcaagcttaatgaaacatgaagtcaatgatatatgcaaacatctatttattcctctgctgtctgggaagttttgatcaagaaaacacttctgctcattagagaattgaccagatgcagtgctattaacatttctgtgatcaaataaagctcacccagatgaaagaagaattgcaacactaacagcctggaagcactcaaccgtggagatattacccccaaaagtgaagcatgctaagatacaaaacaaactgacttcaagcacatctgattaacatggccattgttaactttcccactacttggcagactttaaacctgcttatggataacagtcatatgatgctggataagaacctcatttatatcagtgtaattctctatgcacatgttcttcatgtttatagaaactgcattgatattttgttactcctcaacatgaccctagaaaactaactgatcatatagaacttaacaaatacagaagcctatggctaaggcgccttcggccttcgtaagggaatatacaccactgtcctgccgtgccggtgggggctccattacggtcagttcacattctacagaatccgcaagcaagcatcgatacgtatataattacctccgtatcaatattgcgcgatag

SEQ ID NO: 150424 - DNA, 1159 bp, Homo sapiens
aagagggaacggtctactttccttccacgtctttgtgagaaaataaattctccgtttcccagagacctctagaaaagactctctacctcttcatgggaatatacttttgctgcaagaaaataaaatgttttctctttatctcttcatggcagacctaagtgtgagaaaaaggttgctggtgatttaccacaccacagcctgagtacacccaggcacgcatctttaaaacatgcccaaagatatctctgtgaaatgtattcagtagtggattccagtattcacagccttcatttacacagttcactttatttaatttgtacttactggtaatattaagtaatcagagttcatatccttgggaaaattctcccctgaaggccaattcattcgtaataaaaaccacattttgagcagtgagtgaatccagctggttgcactagtaagccattttcattttttatagcacatttcagctttccaagtattgcatatttgtatgggagaaatgttttctgaagtcaagcttaatgaaacatgaagtcaatgatatatgcaaacatctatttattcctctgctgtctgggaagttttgatcaagaaaacacttctgctcattagagaattgaccagatgcagtgctattaacatttctgtgatcaaataaagctcacccagatgaaagaagaattgcaacactaacagcctggaagcactcaaccgtggagatattacccccaaaagtgaagcatgctaagatacaaaacaaactgacttcaagcacatctgattaacatggccattgttaactttcccactacttggcagactttaaacctgcttatggataacagtcatatgatgctggataagaacctcatttatatcagtgtaattctctatgcacatgttcttcatgtttatagaaactgcattgatattttgttactcctcaacatgaccctagaaaactaactgatcatatagaacttaacaaatacagaagcctatggctaaggcgccttcggccttcgtaagggaatatacaccactgtcctgccgtgccggtgggggctccattacggtcagttcacattctacagaatccgcaagcaagcatcgatacgtatataattacctccgtatcaatattgcgcgatag

SEQ ID NO: 150425 - DNA, 1161 bp, Homo sapiens
  misc_feature (53)..(53): n is a, c, g, or t
  misc_feature (58)..(58): n is a, c, g, or t
ttgttgttattccccctccttgatgctgcataaagtggaaactcaggataacntctcntttcccagacctctagaaaagactctctacctcttcatgggaatatacttttgctgcaagaaaataaaatgttttctctttatctcttcatggcagacctaagtgtgagaaaaaggttgctggtgatttaccacaccacagcctgagtacacccaggcacgcatctttaaaacatgcccaaagatatctctgtgaaatgtattcagtagtggattccagtattcacagccttcatttacacagttcactttatttaatttgtacttactggtaatattaagtaatcagagttcatatccttgggaaaattctcccctgaaggccaattcattcgtaataaaaaccacattttgagcagtgagtgaatccagctggttgcactagtaagccattttcattttttatagcacatttcagctttccaagtattgcatatttgtatgggagaaatgttttctgaagtcaagcttaatgaaacatgaagtcaatgatatatgcaaacatctatttattcctctgctgtctgggaagttttgatcaagaaaacacttctgctcattagagaattgaccagatgcagtgctattaacatttctgtgatcaaataaagctcacccagatgaaagaagaattgcaacactaacagcctggaagcactcaaccgtggagatattacccccaaaagtgaagcatgctaagatacaaaacaaactgacttcaagcacatctgattaacatggccattgttaactttcccactacttggcagactttaaacctgcttatggataacagtcatatgatgctggataagaacctcatttatatcagtgtaattctctatgcacatgttcttcatgtttatagaaactgcattgatattttgttactcctcaacatgaccctagaaaactaactgatcatatagaacttaacaaatacagaagcctatggctaaggcgccttcggccttcgtaagggaatatacaccactgtcctgccgtgccggtgggggctccattacggtcagttcacattctacagaatccgcaagcaagcatcgatacgtatataattacctccgtatcaatattgcgcgatag

SEQ ID NO: 150426 - DNA, 380 bp, Homo sapiens
agcctcccactgaacccagggccttctccctgaactttccttccaagggactctccgtgccctggtcctgcacctccctccccctcgctgcattccccagtcaggaacactagtctagcaccagctcagccatcctctctactgcagttcctgccttcccccagaggacgctattttccctcaaaaaacccacaactgaacactgcctctgggtctcaggacttctccatatctcttccacccttccccacagccaagcactgcagctcttcataccccgaattgcttcccaaacatccgtatgtagggtacattacaggtctccagcctgtcagccagccttttctggcatttctccctccctagccaagaccccatgt

SEQ ID NO: 150427 - DNA, 409 bp, Homo sapiens
ggcagctaccaaggaccttgaataaaggtgggttatgaaatgttgtacgcaagcatacccagatcagagaggaggaggtgcctgagtgattcccgcccgccaagcaggtcctcccaagctggcctctggctgtgctcccagctcccaggcacacaagctccggtcaggccagcctcccatcctccctgccctctgccctaacctcactcatactcccacagcaccaggtcagctcctctgggagctggaaggaactgagatgaacacaccagctctttttttcacatatttggagaaaacagccatgggaggacagttaagagggtggcagctctccaacacacctagtttgccaacatccttcctaaatgtagtgcccagagatgcgattagcgttaaggagaaacta

SEQ ID NO: 150428 - DNA, 402 bp, Homo sapiens
caaaagccaatggcagaataaggtttccatcctgagcccttccagggtataataacagcaactggatgatcctcaaaaggatcatcagactttcccacagaaggcctccctttaaccctgtcctccccaagaagctgagatagcatagtgcaggaaggcttggcagcttcttggaacttctttattttaaattcagctattttcatcctaaattttaatgtccttgtcttttcatttaattttgaaatctattataggactaataaaataacatttgaaggacatcaggcactaagtggggaatcattttattattatgtctttttttcaaaagataaccttgttttcttttcaatttatacaaattatttatgttcagtggagaaaaaaaaattaacacat

SEQ ID NO: 150429 - DNA, 364 bp, Homo sapiens
tgttgacccgccttttattcttcatctcacttatatcacctgtatgtatcacctggttctgatacctaccaaccttctgaccttgggcaatttccttaatttcctcaagagcctcaatttcttcacctgtaaaatggggatataacagcacccataggaaacttacactttagattcatgagagtggttggctcttgagtgttggggagaaaagaaacggtgatatctacagtgtccacagcagagcttagaacaaagtagaatctcaataatatttgtgggattaaggaaaatattatgttaataaactcatcttcagttggtgccactactcaatagtagaatattgctcaacattgattac

SEQ ID NO: 150430 - DNA, 373 bp, Homo sapiens
tgtagtattgttaggggagcatacctggtgtgctctgacgtgggcttgatttggccgttttcccacctactgcagtatatcaggcactctgcacagcttaaaagaggatttttttggtgacactcagctgcaggcactatgaattgttcttttgtgccctcctgattccaccagggatatattttatatatatacttgattttctattttgcttctattttggttgcctggttagactgagggtatgcctggtattgactgttagttttttgggtctagctgatgattacagaaactctgccatcccaggggtccatttaggtctttgcaattttattctaatccactcagctgttgtactgatgttgttgct

SEQ ID NO: 150431 - DNA, 475 bp, Homo sapiens
gcctggcagggcctcagctggtgcctggcaccgtcccgggccctggcctaggtgctcggtggactgctccttcctagtgccaggtccacttgcagctcctgggagctgccccgggagctcagccctgggtgcccctggctctcccagctcagtgtttcactatgatcaatcagggtatcgccaggaagggtcagggctgccacctccctgggccacctggaccgaaagctgggagaggctgccacagaccacctgggtaggtggtccacaggggcccttctcaccctgggccaggtctacagcctgtgtttagtctggggtggggtggggtggggggctttgctgcttcactgcaccccacatgagccctgttgggagggctgccagatgcagggagacgcagaggcgcgggtacacattgctccaccagccagacccagagcttcctagtggggaccagtctggagcttgaaat

SEQ ID NO: 150432 - DNA, 411 bp, Homo sapiens
cagttctccaagacaagctggatctggggagacttattccaatcagagaaaatggcatagtggtaggattcactgacctgtccaaccattcatccacccatccatccttttattcattcataaaatatttactgagtacaatttttgtgccaggaattgagcttccaatggtgggcaaaagagtaaaggatgtgaggtgaatggtgcatagaatgacccagctagattagaggattggaatgagagaaaggctagaaatgtcatttgagtcagtatatgcggacctccgatatcagactccggtgtttaaggaatttcctgagggcaatgaggcctgatatggtacggtggccccactcatcacctgtggaagacatacggatgacctcctagttcacattaagggagttt

SEQ ID NO: 150433 - DNA, 177 bp, Homo sapiens
aacaataacaacaacaacaacaaaaacaacacaaaaaacaaagaaacttcaggccctggctctcaaggccctcctgttcccctgcacatccctttctcccctagtcccatctctataggcccctacccctgagccatcttccttcaacccccattcaattttggtgccatcatcttg

SEQ ID NO: 150434 - DNA, 173 bp, Homo sapiens
gggacatgccggaatcagaggccttcctcttatttcagccgcaaagaggccttcctcttttactaatcctcctcagcacagaccctttacgggtgttgggctggggaacagtaaggtctttcccttcccacgaggccatatctcaggctgtctcagtggcggggaaaccttgg

SEQ ID NO: 150435 - DNA, 353 bp, Homo sapiens
ataacccatgagttatttagaaacatgttgtttccagatatttggagctattctagatattcttattactgttgatatctagtttcatttcattattattagagaaaatatcctgtatgattttcttcttttgatattcattgggacctttttatggctttgcatatggtctatcttggtgactgttactgtgcatttctgcgtgtcacgttctataaatgttaatggttcaaggtatttgaaagcattacacaaattctgtatatgcttagtgattatttttctaagttgttctattagttgccaagggatgggtattaaaatctctagctatgattgtagattggtctgtt

SEQ ID NO: 150436 - DNA, 513 bp, Homo sapiens
gtttccagcgtgacagcagtggtagagtgttctctgtgagctagtagaatcaggaaggctttatgaatgaagtaggtttaaaaaggtaagatttggcctggataagaggagatgacctccagcagaggaaggagcataagcacagtttagaggattaaaaagggtaaacaaagcatatcatgtggagaggaaagtgggggaaccaggctggggtggggtttagttagggagcgagggaatataaagacatgagtttttgctctaagaacataagttcaagttagtgtgttttacttgtggaaaagtaacagacagttcttatatttctaaaacttttatatatattttttttaccataggtcctgatgtttttagttcaaagagtcttgcgcttcaagcccagaagaagattctgagcaaaatagccagcaaaactgtggccaacatgttgattgatgacaccagcagcgagatctttgatgagctctacaaagtcaccaaagagcacacaca

SEQ ID NO: 150437 - DNA, 633 bp, Homo sapiens
ccacaaaagactccaaagagatcctgagcaaaaggaacaaagttggagacatcacactacttgaccctaaactgcaatgctctagtaaccaaaacagcatggtactggcataaaaacagacatacagaccaatggaacagaatagagaatccggaaatccatgtatttacagtcaactgattttcaacaaaagcaccaagaacatacactggagcaagtgcagtgtttttaataagtggtgctgagaaaactagatatccatttgcagaaataaggagctagaccccctaactctcaccatatataaaaccaactcaaaataaattaaagatataaacgtttacacctgaaactatgaaattattagaagatgatgtaggagaaatgcttcaggacattggtctgggccaagattttaggaagacctcaaaagcacaggcaacaaaagcaaaactaaacaaatgtgattatataaaactaaaatgcttctgcacagtaaaggcaacaattaaaagaataaagaggcattacataatggtaacgggtcaattcacaagagggctaactatcgcaatattatgcaccaataaggagcaccagatcataagcagtctcaggactcaagagactaat

SEQ ID NO: 150438 - DNA, 313 bp, Homo sapiens
tcagcaaaccacaacagctaaaaaccaggatatcagaacattttggatggtatctatgtctctgaaaaagggacagttcagcaggctgatgagtaaaatctaagagttgtacagctacagaaacaagatgtcagataattcctaagacctatttgtgatattttaataatgcaataaaagacagctattgaaaaataaagtagtgatgaggtttcaagacatgaatgatgggatttgctgatggctagcactcaggatgtaagggaaagagaaggattgaggctaactattgagttttggtctaagaactgca

SEQ ID NO: 150439 - DNA, 476 bp, Homo sapiens
ctgcaccccagcaacccttgttcactcttccgcccaagccttagtcctctcttctgaggctcccttcctccctccccacagctgtccctcaaggttccacatctaccttcttgatcatctcatgcaccaccatggtcttccctatctgggagctgtggtccattcattctgttctcgttagtgaatcgctggattgtttatctcacaccttctctcccaactcctggctatgagcccctggatgcctggggctatgtcaatttcactttctcctcctctgcctacatcagaccttcgatatgggtttgctgaatgaataggtggcttctcccttcctgtctccttcgactgaggttgggatggtcaggaggaagcctcaaaattagatgaatgcatatctcatttttcataaccaatagcctacaaaatcagctggggaagagaaaaatcagccacagcatgggaagccttgggga

SEQ ID NO: 150440 - DNA, 209 bp, Homo sapiens
cccgcaactcctgtgaattaaatcttagaaaatgatgcttccaagaaattttctgtatttatttgtacaagggttcatgagtgcttatgtttgagttattggatgctctcacatagcaggtgctcaagaatcctcctttaatagaatttcagaatcataaaaacatgtttttacattgttagacaatacccccaaatcctagggccagg

SEQ ID NO: 150441 - DNA, 223 bp, Homo sapiens
tccccttgcacgacccgttccagcaactgcaggtcaaagtcctgctcacgcttccactggcaacagaacaagaggttaaacgtagtcgcttcctgattgctgaaagagcccggctggtcacctttttccatggggtcctttggaagatgaacctgtgatccccttagggaaaagctgtatgtgcaatagagaatgaagctgctgtccccttcatatgggctgt

SEQ ID NO: 150442 - DNA, 792 bp, Homo sapiens
tactcggggcacttctggtgtaaaggtgggcagatcaactgaggataaggagttcaagaccagcctgaccaacatggtgaaaccccgtctctactaaagaatacaaaaaattagcggggtgtggtggcgcatgcccatagtcccagctactcaggaggctgagacacaagaatcaccactgcactccagcctggaccacacagcaagaccctgtctcaaaaactaaaataaaattcagagctttccttaaggatttgaataaaattacaaatccatctttagaaataaagtgctcaggccaggtgcagtggctcatgcctataatctcagcactttcagaggctgaggccagcagatcacctgaggtcaggagtccaagaccagcctggccaacatggtgaaaccccgtctctactaaaaatacaaaaattagctgggcctggtggcaggtgcctgtagtcccagctactcgggagactgaagcaggagaatggcgttgaacccagggggcagagcctgcagtgagccaagatcgcaccactgcactctagcctgggtgacagcgagattccttctcaaaaaaaaagcacttggaggaagcctcacagagccctgtgctggaccacaccctggggatccagtcctggcctccagccccatttctgtaccaccctgagaccatgggatcttcctcaggttggattaccttgtatccaaggtgtggaccctatgggctcctgctaggtgtaacttgacacaacgggttccgttgtcaggtgcaatttagaaact

SEQ ID NO: 150443 - DNA, 167 bp, Homo sapiens
cattgtaggatgtttaccagcatccctcctggctttgatccactagataccagtagcatgcctgagatatgacaatcaaaaatgtctccagatattgccagactttctctggggggcaaaatcacccagttcagaatcattgttttagtcttagtgatgatccttat

SEQ ID NO: 150444 - DNA, 570 bp, Homo sapiens
gaaacacagatttcttgtcctctgaattgaaaatgtctggacttttgactatagtcattatttaaatccagattgtgaggtgttttttcacctatcttaggcagcattcttttcttcttttatcctttgtgctttaggatatatttttattgcagagattttatgaattcctgaattaaatgtgaacctatttatgtaacactctcttctaaacattgggttaatatacctgagcacagtttatgaacctttgtcctcttctattccatccattaaataaacgagaggatggctgggcatggtggcttacgcctgtaatcccagcactttgggaggccgaggtgggcggatcacagaatcaggagatcgagaccatcctggccaacatggtgaaaccctgtctctactaaaaatacaaaaaattagctgggcgtggtggcgggtgcctgtagtcccagctactcaggaggctgaggcaggagaatggcataaacccgggagtttggagcttgcagtgagccgagatcgcaccattgcactccagcctgggcaacaataagactccatctc

SEQ ID NO: 150445 - DNA, 373 bp, Homo sapiens
ttgtcagggaaggatcctttgagtaggtaacctttgagatcttcctacaaaagagtcagccatggcaaagattagagggatgagcattctaccatagggaaccatgttacacaaagccccttgagctcttggagtatttaaggagcagacaggtcagtgtggctggaatgtaatgggcaaggggtagagtggtgcaaaatgagatcagagatagtcagggtctaaatcatttaaggctttgtaagccagagtaaggagtttctaggtgtaaacgaaagccagtggagggctgtagcagggggaacgccttttgaaaaagattactgtcgctgccgtgtgaagactggattctgaggataagggtaacaagggt

SEQ ID NO: 150446 - DNA, 221 bp, Homo sapiens
acatgctcatctcatatgcttacatgcccagcctcacacacaccctcctaacaagagtctgtccggtttctcagattcctcagctgtcctgcctgctgatcctcagacagggaaccctctggctgttgggcatgaggagtttgcttcaccactttgggtgaaataaaatgggcctggcacctgggcctggcacgtaggcctcagttttccaggccctcccc

SEQ ID NO: 150447 - DNA, 155 bp, Homo sapiens
tttcaaccttcagtaattgtttttcattgctcactacctgtccccaaagccaatgacatatatacattttaatattgttgttttggcagcctcctatttctaatattccaactgtactaattaacttaggctaagctgcattatagtaacaaatg

SEQ ID NO: 150448 - DNA, 153 bp, Homo sapiens
gagttagcggcacagcctcctgaaagattaggagaagagagtgacatatgcaggactgttagaacacctacaatgttatactttgggagggtcaaaaggaaattgggatggaagaggataagaacattatgtcaactaaccaggcatctttgt

SEQ ID NO: 150449 - DNA, 310 bp, Homo sapiens
gattggagtagatatttagacactgtacagaaaatacttgcttgcagaatagcagatattaacatgtgtatgaaatgtgtgtttttaattaatgcattttcattcactcagaaaagaaaagatcgccgagtttagcttaaatgtagcattgtggcatattaaaatggcattcttagactttccacgttgctgttccttttgccttcactaaacagtgctggcctctcatttatccaagttagaaatctagatgcaattctaaaattgtcaacctagaatcctctaccttcatgcttcccactcaataaat

SEQ ID NO: 150450 - DNA, 205 bp, Homo sapiens
taaaataaattacccagtctcgggttatgtctttatcagcactgtgaaaacggactaatacatctagcttcagagtatagtggtcaagtatatggattctggaggcaactttctgggtacacaccctggcctaggcatttattgtgcatcactttctttgtctgcaagatgaagataataacagtaactaccacatgggactgtt

SEQ ID NO: 150451 - DNA, 443 bp, Homo sapiens
acgcaggcacgacgtagagaaacgccccagcgccgagctcataagaacgcccgatggggctctgcctacaggtctttgcgtgactcaggtctcagttccatggcacctcctcctaggcctctcctgtgcccatcctacctgcagaagcagccgcactccctactatttatcccactgccctgatctccctacaccattctactttcttcccggcactgatgcatctgtttgcctgctcagtttctgattccctccactgagataacagccctgtgaaggcaggtgctatgtctgttgtgttcacagctatttctcctataactagaccctgaagcagcccttggcacacagtaggtcctccctacatatttgttgagtgaatgaatatgtaaaggtttgattttttaaaaagtcaaataaattgggcactgtacttctcctta

SEQ ID NO: 150452 - DNA, 774 bp, Homo sapiens
ctactgttatgaattgccacaacttggaggcttagaacaacacaaattagtactctcacagtcctgaaggctacagctctgcaatcaagatatcagcaaggccatcattccactaaggctctaaggaagaatccatttttgcctcttcctgcttctgggatgcatccactttattagacggcaaactagaaaatgcttcctacagtcgccacataaaaagaattatcatcatgccaaacaaattatcatcggtgccaatgatgtgagaattgagcagaaagagcaatgcaacagtttttcttttctggccatgccaaggtggaaggtgatcttaattgaagaaagaatgctcaaagtaggtatgtgcagtttcagaagtacagctatataatatccgctatgccttgtccagtaaccctctccttaatcctggctctcacgtggattgtccttcctatattataatcctccacatgtctttcctttacagagttaatcccgaattacgtatttcaaatatctaatatagttgtgttagaaaaagaaattctcaagttctgagattatggaatatcctgaaagaatgctaaagcaactataccccttaaagaaagatcattatcaacttgtagaaaactaatcctatagtgtggtgagaatttttggcagtcatattgcaccactctcatacttttaacaatgcatttgtgagaaccacctacaataaaaatatggcaataagattagcaactagtgttatttgttatattttcc

SEQ ID NO: 150453 - DNA, 546 bp, Homo sapiens
ctactgttatgaattgccacaacttggaggcttagaacaacacaaattagtactctcacagtcctgaaggctacagctctgcaatcaagatatcagcaaggccatcattccactaaggctctaaggaagaatccatttttgcctcttcctgcttctgggatgcatccactttattagacggcaaactagaaaatgcttcctacagtcgccacataaaaagggtggggcagtaggagacactgaattcacatatcattgaaaaccaaaatattagaagagcttaagttttaaagaatgctggcaaatgtttaagcgatcagcactgctggtttactataaacataatggactacacgttgagtaccttgacatatgagtaaattcatatagtacaaatcattcaacacagatatcttgagaacaagtgagaagacagccatctgcaaaccagagagaaagtcctcataaggaactgaatcaaacttcaccttgatcttgggcttcccagcctttgcaactgtgagaaataaatgtgtctttatgcca

SEQ ID NO: 150454 - DNA, 394 bp, Homo sapiens
agtccttcaccgctcagtttaaatgctgtgatctctcacagaaaactttctctaattctccctacctgtctgtcctctgacacatctgcttagcacttatctcattattttattgcaattgttgtttatatattaatgccccaggttaccctgcttcaaggacagggcctaaagtatttgaaggacaatgcatttatatatacgggcacaaaagtatttgtcagaaagaaagagagagggagggagagaaatgctcacttccctattatgagcaagtgccataaaaatccttacatctggccaggtgtggtggctcacgcctataatcccagcactttgggaggccgaggcaggcagatcacgaggttaggagatcgagaccatcctggctaac

SEQ ID NO: 150455 - DNA, 898 bp, Homo sapiens
cggctaatttttgtatttttatttgtagaggtggggggtctatgttgtctaggctggtcttcaactcctgggctcaagcaacctgcccaccacagcctcccaaagtgctgggattctaggcataagccaaaatgcaggcccttctaaacaagttaatatattttaattttccagtactaaagaatgtggtaataaataacctttagatgcaagcttttgggtgggtacttctcactctacacattttccattcacacatgcctataaacgcttattcaaaattcagacctctctcctgaattacagttccatatttccaaatatctgaatgtcctcatacatctcaaattcaatatgtcctaaaataaactaactgctttactcctcacacccaatcacacaattttccgtattattctatacatgtgtagtggccagtgtctagaaatctgatagttaaaaaaacatactctttcatttttacctttcatcatctaagtggccattactaaatcttttccatttcatctaagtattttaaaaatcaattctatctcatccatcttgagtgcattggtttagacccctgccatcactgatttgctacagtgttcaccagtctccctgtccttcaactcatcttctcttctagggccacaattaccttaccaatactcaaatattatatgacttccctgctaaaaaaccttcagtggttccttgtgctaaactctcttcagcatggagaaataaacaagaaagaaacaaattttatttctggtttctgattacttttctagccttacctcccactatctcttccccctccacacactaaccctagactctagtcatactaaacaatgtattccatcctgcctctgtgtccctgaatgac

SEQ ID NO: 150456 - DNA, 372 bp, Homo sapiens
caccacactctgcctaaatgccacccccacccccgccagtggttccccactgacctctgtgtcgaggtcagtttccctggcgtgacctacaagcctcttctgagattctgcttctcactccctttcctgtgctgacttccagcactcctggcttctcccctcacattccactgtaacaatctgtgcttctcttgcatatctctggacctttgcctaaaccgttccctctgcctagaagtcatccccctcctctatgcttggtgaattctcccacatttcctaagactcagatcccctgggctcttcactgccaccacagcactgatcacactgggctataactggccacttctgagtctgttttcctgtcca

SEQ ID NO: 150457 - DNA, 398 bp, Homo sapiens
cctgctgcagcctgctgagctgacagaggctgtagagtcaactggaaaggattttctggggctcccctcatcattcattggcatctagagcaacatgccattttctccattttcaagcagctaaaaaggaagactaaaggctcacatttgaaaggactacgattttccaactagtttgagcctgcctgcaagtgagctttgtaaactaagaacagtttccagtgcacactttcttccttctccataaggctgggtaataatctcctttctagaagaaagtcacgtaaatctggggctgctatgaattttcaactggtgtcagaccaacatgagagctaaagtgcacaaagcgaaatgcaggcgtggtgtggcctttacaaaacaaaaccagaaagtct

SEQ ID NO: 150458 - DNA, 748 bp, Homo sapiens
attctttctacactatccatttaatgagcatatgttcagtcgtcagacatgtactaaagtctcaaaatttatatctcttgcccatatctatcatctgaactttagacttaattatctcttattgaccctaccattctatctggatgttcagaaagaccacaaacttcatgtccaaaactaaacttaatgttttcctcatacccatctcataaaaccaaaatcaaacaaaaatatagacaaaacatagaacagcctgttttttcggaatcttcttcctcagtaaataggaagaatttgtgtctttggcacttccattttcttcacaaatattcagtctactgttagagcattccacttttatctcttaaatatttctcaaatccatatactaaattttatctccagtgctatcacctctgagtcagtctggtgtgatacttcacctgggccaccagagttaccctcctgactggtcttgcctttctttactccaaatatattaagccagtatgttcttttttaaaatttggagtttactgcttttaagagaaaagctatagcattcttaacatggccttcaaggcctacatagtctggctcctgccaactgtctttaacttgattttgtaacctgatctctgtattctagtcatcttggccttctcttagttctcaaatgcactttccttctttccacctccttactctttgacagactgacgactctgactcttctttcaatatctat

SEQ ID NO: 150459 - DNA, 190 bp, Homo sapiens
actacaggggcaaaggtagatttgctgtaagaggctatgggtgtatgggagagtaaagaggtaacaggagccagggattcccaagaggtcagacagagagtagaactctcatcacagatgtagcaaggaagctgccctcaggaggctttacaaagaacctttgtcttactcacctctaaatctaccgtgg

SEQ ID NO: 150460 - DNA, 310 bp, Homo sapiens
atgaattttaaattgtttgatcagaattagcaacattagtcactgccaatagccttttaatttccacagagctgccaaggggagcaaaaatagaattgtgaggagagttccagcaggcagatgtgctcctggcagaagaggcctcgtggtctgctggaggtgtcttcaggtgctctggggttggtggagcaaggccagggaggtggtcggggggcaagcggttttagccccagctttccacttcctctgggtggcaagggtttgctgtcccaagaaactgtggatcccggccgggcacggtagctcacac

SEQ ID NO: 150461 - DNA, 487 bp, Homo sapiens
ggtcggccagttatacagctccagttacaacagctccagttacaacagcccagttacaacagctggttatgtcatttctccagcctgagtgacagagcaagactctgtctcaaaaaaaacagacagagagaagagcactgggtgtgacagcagccagaggaggaagacagggaatctctctggagggtccccaagaaatcctctgaccagcagaggaggtcaaggaaagggtgtgaggtcacatgattccttgagatccaggattcacacattcccaccccaaccctgagatagagtgtcaagaaggtagcagcatggccaagtgccacagagtagctggagtggatgaagttggaagaaaggttgcaggaaattgactgtgatagtggtgtcaaatcacagggagttaatgagaaaatggattagagaggaactgtacgctgtaaagggaagagccttttcttctcattgagtatggaaatcatag

SEQ ID NO: 150462 - DNA, 401 bp, Homo sapiens
agaggctggaggcaggaatatctattgcaacggtcccatcttggaaacagaaaacaagaaattgatttaaggaggaatttgtggacactggtgatgagaggagacaaagacagaagatgttgagccaggattaccacagagttttaagcctaagtgaaagatatagggaattcagaagtgagacttaatcttgacagatggtgagtttgctttttgatatgttaagtcactttagatgagcaagctgagtagatagaaatgcaggattaagttcaagagaggcctgagctagacttgtagatgtgctggtcatagttaaagttctttaaacttcaaagagatgatagctaaagttaggagagtgaaatgacttagggaaaattggagagagacaagatcaa

SEQ ID NO: 150463 - DNA, 361 bp, Homo sapiens
atatgaggaaacgacctgcttttcaataatcagtgctgggataatttactctccatctctggggaaaagtaaaagttgacctcttgcttatgccgtaccaaaaatcaattccatgtagcttgtagctctacatgtaaaaagtaaaatagaaaaggatctagaaatactttcataacttctggtggtagggagacatttaaacagaatcaaaaggactaattctaaagggaaagatcaataaactggactatatttaaattaggaatttctgttcgttgaaagccttattaagagagccacacatgtcggacagaagtatctagaatatctaaccaattcttacaaatcaattttttaatgg

SEQ ID NO: 150464 - DNA, 323 bp, Homo sapiens
acatgttaactgataaaacatacaaaaacgtcctgtcttggtaacagcaccaagactattatctcattccctgtattaatcagatcttaaaatcttgaaccaaaaatgggcctgtgttgtttgcagagtatggcaaattgtattttccaaacatggccacattaatacacataatatcccacacgcttttcttacaaggtggtgtagatattcccatatcaatgggtataggaggctctgtttcttccccctaaacctggctggacttttgtgacaaccttgccaaacagaacctgaaagaagtgataccttcagggactagg

SEQ ID NO: 150465 - DNA, 482 bp, Homo sapiens
cacactcccacagtgtaatcatcaaatcaaacctactcacttatggagataaaagaacacttcaaaaatatgtaagcacttttctgtcaaaagggagtgactctccgaagactgtggcagagttgggtctgattcttttaggcaagtgtctgaacatctcacagattctccatctggggggaatgggcactaccaggggtgttgatctgcctcctgtcaattagtgtgtggtcaggatgtggtaaccgaggaggcatttgcaggagtggaaggtgtgaaggatcagggtgctcttgtgggtgtgtttaaactatgttggcgtgctctttacccgactccctctcgctcatttgaagttcgtgtcatgctctgccatcttctgccccttcctgttcttgtcatctgtcaacttcctgtctctgagcaattcagctcatggtcaactggccaaccccagccagctcctgccatgccctgggtta

SEQ ID NO: 150466 - DNA, 297 bp, Homo sapiens
aatcaggctgtaaacagaggtgctaccacaaggaccggaagcagagaccacactggtgctcagctgggttgcaggctctgcctggtttcattgtcggggaagccaccaggcctgcccccagccagcgagatgtcacgcatgcagccgggtgtcatccccaaaactcccgggaaactctcggggcaccagggcaggaagaggctgacgtcaactttaactccggggacttcaaacgaaacttttagaaatgattcctttgccctttacttggtgacgtaataaactgatctttctctg

SEQ ID NO: 150467 - DNA, 305 bp, Homo sapiens
gttgattttaacagtgactgataatagttgaaatatctggatattttttctttacattctcctaataggggtgtcatgtttttcaatgtatttaatatttattaatgaataaaatcacctgttttagtagagttttattttgaagggtaggtaaatagtgaaaacagtaaaaattctgctcagttaaccaacgtgaggccaaaacattcttgggctcagtttcccaccagataagatggagatctgttttctgatctcatttaagagtgtcttttgaccagccccattcttccaaatatgggtta

SEQ ID NO: 150468 - DNA, 210 bp, Homo sapiens
cagctaactttaactagaggctagatccaactaattagttttatattattatacctggcacatggctaaaatttcagaacaaaagccatgaatttctgtttgcatctttctgtatgtttacatatatctacacatgtgtatgctatttgtacatattattctatctccagatggtatttattagaaacagtattaaaggagctcaactgg

SEQ ID NO: 150469 - DNA, 260 bp, Homo sapiens
ttctgcgtggaatgagagacctccaaggctggcgtgtgtgggaggagctggctgtggctggggcagagggaccccagcagagaacaggctgctggatattcatctgtgcctgctgaacccctgctgcagtcaggagccccagctctgccattaagcagtccctggatgacagtgggcgttacctggagtggccacgctcaccccaaggagaggctgtctccagagccccagtgctgggcagctcttcctcattcctcggc

SEQ ID NO: 150470 - DNA, 385 bp, Homo sapiens
gtgtagagactgaaaaaggattcccaactttggtcccttcaaaaccagaaacaaaggtgggggatagcccaattaagtggccctagagatttgcccaggagctggagccttccggagaagtccagttttcctatgcagggagaggactgggagttctctggtcacaagcgttctgcctttgttttcatgaagctatgtctcttacctggtaagaaaaatggaaccgcatgcagctgctgaaaactttaaccagaaacccaaagatgttggcacaaagaaaggaggcctgaagaaaacaagtgaccatgaaaacacatttagctcttaatctgacccatttctcatgggccaggcctggtgccaggaatgcggtgatgaataaggc

SEQ ID NO: 150471 - DNA, 364 bp, Homo sapiens
taaaccacggaatttagtggaaatgaacttttcggtcacctgctatccctttcacatctactcagagtgggaagttttctcctggcagtggactgaagggagatgtggacgccagccttttctgctcagtcctaggaaattgtcctgtgatgacttgatgtcacaaacaccatcctggtgcagacccatggagggtttagcccagtggaggcggccacacttcgggctttgctctaaggagaactaattgcacctgcctgccccctcaaggcctgcctgacacagccaccctgtgggggtgtgggatggttggcgtctttcttccacactcatctcctctttgcaagttgggggtgaggtggga

SEQ ID NO: 150472 - DNA, 348 bp, Homo sapiens
gctgttccatccacctgaacactgttctcaagaacagagatctgtgccggcccctcccaccacaggaacagggctgtgggagtgtgggatgtggatctccatctgagcgcagctccatgtctcctgctccctccgtgctttatttctctcctgggcactaagcacttcgcagtataccttgtccactgttgagctccccactgccgaacaagcgcaaggaggcagagctcctgtctgctacgttcactttggcactcccagctccgacggcagagggtggtgcacaccgaggctcagcaaatacctgccaaacacgtgctggcctaaggctgttggggtgagcacagc

SEQ ID NO: 150473 - DNA, 963 bp, Homo sapiens
cgtgtgaggcatttccacagtgaaagcaccaggtctgtagatctgcaccattctgtccacattgcccttagggctgaggacttctctgtagagctagaggtcttgcttaccgggcttggttgtattctgctttttctaacaggttgattccttttaaataagatatatctttcctttcttggtttcagatagggcttgtattcctccacagctagctggttaacatattttccttcaagtgtttgaatttggcttgcttgaatctggaggctttgagtttatgtgttcttatgaagtctctacctagacctgtgtgaagcaagtccttgagtggagaagactaatgcttagttttcccccacaaggtagggagggaccaggaagcttcagggtgtgggcgtgactgttgagtgctgtgtctgcggtgggaaggccagggaattggaggcatgaatgcagagaaaagaggaggccttttgtgcttggaaggactcttctgggtcagttgtaacctaagcatttatggttatttcccctctgctggataattttccagggaactctagctgtggagtggccacactgggcgggctatggcttcattgcttcttcccgcctccactcccaaatgtttggacactgatctttctccattatctgcagcttctcacccttaatgttacccaggctctgtgaatggatagagtgtgcttcattagtgcacaatttcctggtctccttttgtttcttgtgggaggaaataggagagaaaacaatcaataccatgtgtagcaagtctctgtcctgctgttggttaattcaaacatgtgattccactttgaatgcaaaaatagcaacagcaatcatattctgcttctaattgagtgtagaaattatatgtacattaggcatcatcttgtgagcttgctgtggtctttgggccttagcagctgagctggaacc

SEQ ID NO: 150474 - DNA, 489 bp, Homo sapiens
gtcttgtaatctttttgatttaaaatctattttgtctgattacaatatggccacgcagctttttctttcttttttgagactgactctcgctgtgtctcccaggttggagagcagtggcatgatctcagcttactgcaacctctgcctcctggattcaagcaattccccgcacccccgccctccctagcgctgtgctggacgcttctctgtgaggagagtccctcgccccttcttcagatttgggaatggactctcgggcacctgaagcgcctgctcaggatcaggccggcacctggacatgaatcccaaacagaaagcctgagccctgcctggcgctttcgcggctgctggcacggctgcgcagaaacgccagcgtccctggaccgagcgcggggaggggcaggcttccagcagcgctgtccactgggaagaagacacaacccacatttttagattttccagtttccacgttgaaaaagcaaaaaaaaa

SEQ ID NO: 150475 - DNA, 746 bp, Homo sapiens
aggagctgtaacaatcaccgcgaaggtctgcagcttcactcctgaggccagcgagaccatgaacacacctggaggaatgaacagctctggatgggaggaacaaacaactccagacatgccgccttaagagctgtaacgctcaccgcgaaggtctgcagcttcactcctgaagccagcaacaccaacaaaccccccagaaggaagaaactctgaacacgtccgaacatcagaaggaacaaactccagacacaccatttttaagaactgtaacactcaccgcgagggtccacggcttcattcttgaagtcagtgagaccaagaacccaccaaatccagacacaccaccatgtcacttcctcaacacatggggattagaattcgatatgaggtttgggtgggaatgcaaagcaaaaccatatcattctgccccagcccctgccaaatctcatgtcctttttacatttcaaacccaatcatgttatcctgcattagtccaatctcacaatgctataagaacatacccgagactaagtaatttataaaggaaagaggtttaattgactcacacttccacagggctgggtggcctcaggaaacttacaatcatggtggaaatagaagcaaacccatcctttttcacaaggcagcaggagagaaaagaatgaatgctgagtgaagggaaaagccccttataaaacaatcagatcttgtgagaactcactatcatgtgaacagcatggcagaaa

SEQ ID NO: 150476 - DNA, 556 bp, Homo sapiens
aaaagaaagaccccagctaatgatttcctggtccttcaaaatcccacatttggatgaagggaaagatattataaaatggataacagaatatttcaggggggcagtttccatgatatctgctattgtggtatcctaatttcaagctaaagaaaagaaaaaaaattccactaagccataccaagcaaaatagctactatagcaaatcaataccactcctcctccaaacagatacccaaaggatagagggtaactgtcagatgatgtatcaaaggcacatacatcacaggatttcccaaatcttaatactggacagatctacaccttctctcaaaccaaaacaaattcttgttgtgaattcccaaaaacataaggaaattcctataatcaagacacgagaaatatctagacgttttctgctccctagtcatgcttagagagtaataaaaccaaagaaagtatcatagtgctcacacctttacctgctgattacagaacatgaagatctaaggatgtcctgtaacaagttactggaattaggcaccccttgtaatatgtt

SEQ ID NO: 150477 - DNA, 347 bp, Homo sapiens
ggtcttcagatgggattgcttatctgagaagaaactgtcacactgatctttcaagttcacagtgaggacaagggcctcacccagagcagacccccaggtgatgactgcagccctacctctcgaagtgtcctgaaggagtagacatttcaagtatccatttcttataatagaggttactgactaaatccaacacctggtaacttaaatgtgtgggagccttttgctaccacagagcaggggaggggcaggaagccaaaactggatgcaaggcagagggctgggcttgagctctggcctcagtctctccttgtttgtgaagccaggatgatgccacctgccttgctggg

SEQ ID NO: 150478 - DNA, 446 bp, Homo sapiens
tcgcagggtgaccctgggagtctctctccccgtggccaccaatgccttccctaatggaatgataagggctgcccagcagccttatacaaggagtctcaatcctacaagctcacggaaacccagggaggtcatctgggagcattctacaatgtggggttgggggagaatgcacccacagaatgggccaggggtctccactgcagctcacactggctccggggcccacctgacccctctgctctcccccaagcccctgagctctccccttctagacatagacaagcatagaggctgggcatggaggtcacctgcagtgtgcctgtggatgggccaggacacacaggaaggacaccaatgtgcagagtcccagagagctcggggacacacgggcacatgcagagtggcacttactacacaccctgaaactaaagcccacaagaacagat

SEQ ID NO: 150479 - DNA, 661 bp, Homo sapiens
cttgtctgcagatgcctccaggtgtccgaaccaagtccgaagtcaacgacaagcaatgatggcgatggcgatcctagttaataaaaaggggggagatgtgggtggcaagccacccaggtgccgaggcaagagaccaaggacaccagccgttccagtataataaaatataaaacaagaatagttataccagatatagatcttagatatgattatatatgaatgtcattaatcatcagtttgtagcaattactctttattccaatattataataatcctcgctctattatcataacctaggaaaaaccaggccatacagagataggagctgaggggacatagtgggaagtgaccagaagacaagagtgcgagccttctgttatgcccagacagggccaccagagggctccttggtctagtggtaatgccagtgtctgggaagacgcccgcccgttgccaggcggaccgtggtctagcggtagcgtaagtgtcaaaggaaaacacccgctacttagcagaccgggaaagggagtctccctttccccgggggagtttagagaagactctgctcctccacctcttgtggagggcctgacatcagtcaggctcgcccacagttatccggaggcctgaccgtctccctgtgatgctgtgcttcagtgg

SEQ ID NO: 150480 - DNA, 347 bp, Homo sapiens
ctctgaacctgccagttatgacatgacccattttcaagaggaaaccccggggctcagagagacaaaggagctctgcccaggtcacagggccaaggagtggggcaccctgctctgactgccccaaagccctcatcctccgcaccccactgcctctgcgtcccacagagtctaggctcatttcggctcggtggccagcctgaggccctggggaggggaaggggtgtcaggacgcccaggtgcagatgacctgggaggattctgactcagccccacaactggagcaggagagcaccacaccctcctaggcctcctggagcctcgccaaggccttccttagggtatgacat

SEQ ID NO: 150481 - DNA, 488 bp, Homo sapiens
ctggtttcgaactcccgacctcaggtgattcgcccgccttggcctctcaaaatgctgagattacaggcgtgagccccctgcctggtggaggactccttttttaatagttctggcttactactttcttgaaccctctttcttggtatatgtacaatgaacagagtttgactcatagaatcatctaattgtaggactggcgggacttatgggtttattttgccaaaaccctttattttagacttgtggtaagagaggtctaaagaggttaagtactacttttaatcattgaaggcagaactggttgtaacagaggttttatgattctttgcatatcttgaagcccatgtatctggatgaaattctagcaactcagcctcttccttgaagcgtagttgtcatctttatggcaactgacttttctcctcagattcgtttatctctttgctgggctccaataacatttggtatatacctctgttaccttactt

SEQ ID NO: 150482 - DNA, 296 bp, Homo sapiens
tatctttgcagctaacagtttaactgttaaaagctcaagtgttgggagcagtacttatttatccattttccatttacccaacaaatatttattgcatgcctttatgctccagttactgacaattcagcagtgaacaatagccaagcccaaggagctcaaagactagtaagtacaggattatagtcagccaaaacttgatttaaatcctagctcagctacaagaccttagctaacttaatctctttctgagcctcagatttgtcatctgtaaaatgggaaaaatattacctatttca

SEQ ID NO: 150483 - DNA, 421 bp, Homo sapiens
caggaaagcggtcccggcagagggagcctgtagggtgaaggttctgctgcaccaggtgggacaggggtgaggaggaggcggactggtggctggagccaagcaggaggggagaggagagtggtaggaaatgagtcagaaaggcagagcagggagattattctaggcttgttgccactgagggagatgagaaactctgggggaattttgagcagagaagttacatgatctgacttatgccttaaaaatccttttgttgtttacggaataagcaggtatgtagggatggggtcaaggttagaagcagagagatcaatttaagatcaattatgggaggttatgataagccctttgtgtatctgtttgtcctattagcacataaaggggactcagtggtcttcaacctttagaatacataagatgt

SEQ ID NO: 150484 - DNA, 316 bp, Homo sapiens
caaattatcaatcctgtggagggggtcatagtctgatttatagcctgtcaggcagagggacaagtggcccaggactggcaaccggcaaaggatgtaaacaggaatttatccaaagagaaagactgcctcagtggaggcaatcttgtgggactgggtctttaacctgtggcatcagacatgaactccaagtagacagtgtcagaattgaactgaattgctggacacctatagctggtgttgaggagttggagaagtggaattagagaagacaccaggtatttggtctcaggaggaaaaaagactctttttttttttt

SEQ ID NO: 150485 - DNA, 234 bp, Homo sapiens
tgggagcaggtgcagcctgactcttcactcccagccacgcaggtgaagacacaatagcctttctgcagctcaccactaggcctggagcttggggctttaaaaggtccccatacatcctctgagccaccaaaaactgtttgccaaagaaggcaggggtagaaatagctgcattcatagcctgtgctctgtcatcaggcacgcacagctgggttcacgggatcctggggtagtaac

SEQ ID NO: 150486 - DNA, 446 bp, Homo sapiens
gctgtgtgtacatgcttgtgcatttgtgtgtgtgtgtatgtgcacacaagcctgtgccgtccaagtgcccatgtgcatatttaaatgcgctcacccgtgtgcgtgggcaaatgtgtgcacatctacatgtgtgtcagaattattgtgcgtgtgcctatgtgatgtgatttcaccccacccctatggctgtaggacgaaggcagtacacactgagcaccctgcccatgccctcggtagcactccttctttccttactgttccacagtgtatacagagagacctgaatttaatacccagctttgccagttactcattgcatgatctgaggctggtcatgcaagctctctgagcctcagtcttctcatccgtgaaatgggagaataaggaacagcactggtgtggagtggcattgaaggtcatgggtcataggtgtgtgtgtggctggg

SEQ ID NO: 150487 - DNA, 245 bp, Homo sapiens
aattttggttttgctttgggttcaccttgccatttatgctgcccagggatgccttataaaaatgcagaaaacgaccaggcgtcgtggctcacacctgcccacctcgagctccctcgtatgtggtgtataattttaacatgcgtaggtaattacagtgttggtacacaccacaccacacacacacacacacacaccagcaaacatgcacaacagttcatctcatctcccatcaactctcagatcag

SEQ ID NO: 150488 - DNA, 429 bp, Homo sapiens
atttgttttctttcttacagcaaggcatttaatggttgaaaagttgatattttccaagataatttaaaaattattgatggagtgtcactctgtctcccaggctggagtgcagttgtgcgatctcggctcacggcaacctctgcctcccaagttcaagcaattctcctgccacagcctcctgagtagctgggactacagtacaggcatgagacccattttgtttatattataacccatcagatgttgttatccccattgtaaaagtgagacaactgaggcaaaaagatacaaagtaattttcctacaaatgcacagctaaaattagcaaagctgggctttgagagctggcacactggcttgaaaccataaaataattgcctctattcttaaaaaaagtaagtctatttctcattaataaacacaattaat

SEQ ID NO: 150489 - DNA, 370 bp, Homo sapiens
atttgttttctttcttacagcaaggcatttaatggttgaaaagttgatattttccaagataatttaaaaattattgatggagtgtcactctgtctcccaggctggagtgcagttgtgcgatctcggctcacggcaacctctgcctcccaagttcaagcaattctcctgccacatacaggcatgagacccattttgtttatattataacccatcagatgttgttatccccattgtaaaagtgagacaactgagtaattttcctacaaatgcacagctaaaattagcaaagctgggctttgagagctggcacactggcttgaaaccataaaataattgcctcttctatttctcattaataaacacaattaat

SEQ ID NO: 150490 - DNA, 415 bp, Homo sapiens
acaggaggctggagatgagagtgcagcaccaccctgattcacagtcccatgggagccagaactgtgccatcaaaaacaggggtcagggtacctctctcactatggagcgtggcctggagggcagaggatgcagggtttcctctgtctgtccctgcttgtttgctaagtaacatcagcagctgtctcagctggctattctgttggctaaagtaacacattgatttctcacagtcccagaggctgggagtctgaggtcagggtgccagcaggctctggttcttggtgagggccgtcttctgggttctgtccttagacggccttctttggtgtgtgcacttcgcgagagacagtgacagagggcgcaggcatgagcgctcagtctcatttcctataaggacaccaatcccatcacggg

SEQ ID NO: 150491 - DNA, 477 bp, Homo sapiens
  misc_feature (135)..(135): n is a, c, g, or t
tatgtcctaatcagctcaactgacagtaattttcaaaaaatataccgtcttaatttaaacgaatgaaaaatgtgctacaaaaaacttgaagaagtaaaaacttcagccttggacaataacactagcagaactatntatgatcctgtacatgcagctccaaccacttctacgcgtgtgttttatattagtgtaggggtttgttgtgcagtaatatttctcgtagcaataatattagctgttttgcaccttcatagtatgaaaaggattgaactggatgacaggtattgtacatattttgggaaagaaaaaaaatgaaagcagttatttgtatatatgtgggagcccatacacatctgatgacagtggtgcagggaaaggagggaggatgattaagccccagccaaaggaaaaataagatgacctaatcactgtctctggtttctctgaacttatttttattttttaaaaattaaggtc

SEQ ID NO: 150492 - DNA, 628 bp, Homo sapiens
  misc_feature (135)..(135): n is a, c, g, or t
tatgtcctaatcagctcaactgacagtaattttcaaaaaatataccgtcttaatttaaacgaatgaaaaatgtgctacaaaaaacttgaagaagtaaaaacttcagccttggacaataacactagcagaactatntatgatcctgtacatgcagctccaaccacttctacgcgtgtgttttatattagtgtaggggtttgttgtgcagtaatatttctcgtagcaataatattagctgttttgcaccttcatagtatgaaaaggattgaactggatgacagcattagtgccagcaggagttcccaagggttgtctcagccatccacccagacgactcagtatccgagagctgacacacccaacaatgcaactcctatcaccagctcctcaggttatcctaccttgcggatagagaagaacgacttgagaagtgtcactcttttggaggccaaaggcaaggtgaaggatatagcaatatccagagagaggataactctaaaagatgtactccaagaaggtacttttgggcgtattttccatgggattttaatagatgaaaaagatccaaataaagaaaaacaagcattggtcgaaacaaagatcaagcttctgaaattcaggtgacaat

SEQ ID NO: 150493 - DNA, 1273 bp, Homo sapiens
agtgagttctagctctttcaggtcccaacaagagctggttgtgaaaaagagcctggcacgcccacttgcctctgctcccaccctgtggtctctgcacgtgccagctcccctttgctttccaccgtgaggggaaatagcctgaagccctcactggatgcccaatcctgaactttcccaaccagcagaaccatgagccaaataaacctcatttctttataaattacccagcctcagatattcctttttggcaacacaaaaatggactaagagaactagagtagctgatagaattttttaaaagaagggtaaagttggaggaactatactacttgattttgaagctacagtaatcaggacaatgtggtgaagggacagacacgtaagtcaatggaatggagacgagagatttctacaaatatggtcaatgggttttttttaacaaaggtacaaaaatcaatttaatggagaaaagacagtcttttcagcaaatgttactggaatagttgtcatccatatctaaaaaacaacacctcaacctcacatctcatacacagctgaacttaaaattgatcatagatctaagtgtgtgaaatgtaaaactataaacctccttgaaaaaatcatagaaaatcttcatcacctggacttgggcaaagactttttactctaaaagcgtgatccatagcagaaaatgttgataaattgaatttcatcaaaactaaaaatgactgctctgcaaaaggatgatgctaagagaataaaaaagacaagctaagattaggagaaaatattgcaaagaacatatccagtgtgtgttctgaatatacagagaaatctcaaaactcaacaggaagaaaacaagccaattgaaaatgggcaaaatacttgaacagacactttaccaaagtggatatacagatatcaaatacacacatgaaaagatgttcagcatagccatcagggaaatgcacattaaagccacagtgagatatcacttacacccattgaaaaatgactacaataaaaaaaaaatctgatagtaataccaactgtcatcgaggatgaggaacagctgaaagtcatgcattgctggagggaacatgccactgtggaaacaggtgggtgctttcttatagacttgtatgtgcactcaccttatgcccaggagtccctctcctgtgtgttcaacccagagatatgcaagctgtgttcacacaaaaacctgtatgtgaatgattatactagctctctttataattgcaaaaaaaaaaaa

SEQ ID NO: 150494 - DNA, 468 bp, Homo sapiens
agtgagttctagctctttcaggtcccaacaagagctggttgtgaaaaagagcctggcacgcccacttgcctctgctcccaccctgtggtctctgcacgtgccagctcccctttgctttccaccgtgaggggaaatagcctgaagccctcactggatgcccaatcctgaactttcccaaccagcagaaccatgagccaaataaacctcatttctttataaattacccagcctcagatattcctttttggcaacacaaaaatggactaagagaactagagtagctgatagaattttttaaaagaagggtaaagttggaggaactatactacttgattttgaagctacagtaatcaggacaatgtggtgaagggacagacacgtaagtcaatggaatggagacgagagatttctacaaatatggtcaatgggtttttttgtacctttgttaaagtcgacgcggccgcgaat

SEQ ID NO: 150495 - DNA, 931 bp, Homo sapiens
tatagcctgtcatcttcccagaggtgacattgtcatcattccagagaggttattatatatattgattacctttgctggtaggacaccgaaacatgtactctaccaatggaaagccattgaagagacgtaaagcagaatgacatgatcagagctgctatttgaaaatgtcatactgtctttagtgtggcaaatgacttggaggtggcaggaggatggtttagaggggcagataattaaaccacatgatggctgagaagccatggtggcctgttcttcagtgaagtcacgtcagtagaacagtgattaaaagtaaagctcaagtcaggtggcctggaattaacttttggctccaccctttgccaggtttgtaaccttgggcaagttactgactgactgtgtcagtcatctctaaaatgagaataatgctgatgtctatctcatagagttattgtgaagatacagggaatacaggtaaagctgtcttgcatgtactgagtgctcagtgaatgtgagctgtgataaggatgacgattcattcaactacaatgttttgagtatctactatgtaccaagccctcttttaagtgctaggacacccagtgaaaaagcatacaaactccctcttatcctgacgcctgaggcttccattctagtgaggagagaaaaataaatgaagaaaagaaaagataacatcagttcatgatcaatgctatgaagagaaagaaaggagaatgaagggattagagagctctggcaattgttctttaatgtagtcaggaaaggcacatatttaccaaatcctactatgttctgggtactgttctaagattaggattcagaaagcagacaggaatccctgccctctatagctgacctgctcatggaaggagaaacacaaaaaataaataagagatgtgatcgtggggtttaa

SEQ ID NO: 150496 - DNA, 477 bp, Homo sapiens
tgctgtgtcctgcagagctctcagtctctgcacttgaggccctgggcctgcatcaacgtgaaggctcttcagtgttatcacgtggagacagatgataggaatcctgcaaatgagcagaaaggatgtgacgattaaagtttcttctgacggtattacaaactgaagtcagtgagttccttctctactagttttttattgccaactggaattctgcactgtgttgcagagtcaggggtggggagcgtggaattgttcccttactatctgctgctttatcgactgaaattgatcaaggctacaacaaaaacatttctagaaatcatttgaatgcggtaggaaaaactctgggaatggagtcagaagaaagtatattttggagtgtgttttcaggtctaaaaatctttgccagaaatactctttaatggaacctccagactgagtaggaaaacagggcatactgttttttgaaaggcatga

SEQ ID NO: 150497 - DNA, 578 bp, Homo sapiens
gactaggacgagacaagagggacagggaggcttcgcggaaccctacgcccacccgacgcgttcgcccgtccgtttttatttttatttttattttggtttttttgttgttgttctcttcttttgtcttttttttttctttagagacggggtctagctatgttggccaggctggtctcgagtccccgggctcaagcgatcctcccgcctcagcctccggaaaagtgggactacaggcgcgcatcgccgcacccggccaatccctgttttaatccttttccttaaaattgcaaaagtggtgtctttttcctgcagatggaccctccctgatacaggaggagaaaaagagacagacacagggaggagagcactgcacgcagctgaaggcagagattggaatgacacctctgcaagccaaggaacacggagcattgctgggaaccaccggaagaagccagaagacaggcctggagctggctttccctcacagccccagaaggaacccaccctggtgccaccttgatttcggacttctggccttcagaactgggagagaataaatttctgttgctttaaacttc

SEQ ID NO: 150498 - DNA, 546 bp, Homo sapiens
cccaagtagctgggattccaggcacatgccaccacgcctggctaatttttgtatttttagtagagacggcgttttgccatgttggccaggctggtctcaaactcctgatctcaagtgatccgcctgcctcggcctcccggagttctgggattacaggtgtgagccactgtgcctggccagagaacagattctttttgaatctatgcaaataaccatgttgctgtaaacataagaataatcgttatgcagccaacagacacatgaaaaaatgctcacatcatcactggccatcagagaaatgcaaatcaaaaccacaatgagataccatctcacaccagttagaatggcgatcattaaaaagtcaggaaacaacaggtgctggagaggatgtggagaacgaggaacacttttacactgttggtgggactgtaaactagttcaaccattgtggaagtcagtgtggcaattcctcagggatctagaactagaattaccatttgacccagccatcccattactgggtatatacccaaaggattataaatc

SEQ ID NO: 150499 - DNA, 230 bp, Homo sapiens
tactcttttaaaatatttattacataccagatttttacatattcagacatcacgttaattattttgacataattaaaaaaggagtgttattatgtccatttttacagaaagcaaatctgatatgcagaaagtattagtaatttgccctgtaatcagctacgaagttgaagaaattggatttgatcccagagctatatgacattaaggcctattattgattcttctttgcc

SEQ ID NO: 150500 - DNA, 457 bp, Homo sapiens
tcgccgaataactacatcgaggctgcaggcgcttgggatggggcgacggtataacggggtccaacccccgaaagcggctgcctttccgccaggctatagcatttcggagatcaaaaccaagtgagctatgaccgaaaggtaatttacagcaagtctatttaaaaaaaaaaaaaaacagccaatgcattatcaattagagtcctgctgggccatattaacacagattccacttaaaagagacaatcaaaggctcagcaacaaataggaatacatttatgctcttcaaggagccaaagaaaatgcaagaacatcttccctagaaaggcttcctaccctcgcataatactttaccactgctcttgatcaatccaggctgacagaatttcagacattagcagggtcttcccacaattcacagggatgggggaagccatgttacctgtcttaaacaaagcag

SEQ ID NO: 150501 - DNA, 190 bp, Homo sapiens
aattgttattggatatcatcattggcccacgctttctgaccttgggaaatcaattaaggggttcataatctcaattctgtcagaattggtacaagaaatagctgcatgtttcttgacattccacttggtaggaaataagaatgtgaaactcttcagttggtgtgtgtcccttgtttttttgcaatttcct

SEQ ID NO: 150502 - DNA, 396 bp, Homo sapiens
taatttataagagacagggtctatctatgttgcccagctggaatccagtggctattcacaggcttgatcccactacttatcagcataggagttttgacttgtgctgtttccaacttaggccagtttacccctctttaggcaacctggtggtgccccactccacagaggtcaccatactgatgctcaacttagatcggcatagatgctcaacatagatcggcactacagcctagaattcccaaacccaaattcaaattccctgcttcagactcccaagcagctgggactacaggcactgccaccacgcccagctcaggtctatgtattcttttcaactttttgcataaataacagcatatgttcattatcttaaagatcactctataccaatataca

SEQ ID NO: 150503 - DNA, 136 bp, Homo sapiens
ttcttttgaggtaggattcatctgactttatcacaatctcagagaacctgaatggcttgctcatgatcacacctttagatgtagctaaggcaggactggatccaagctttagtactcatttccataaagccatttg

SEQ ID NO: 150504 - DNA, 474 bp, Homo sapiens
gaaagggaggacatgagatatggagggaccaggggtggaatgatatggtttggctgtgtcctcacccaaatctcaacttgcactgtagctctcagaattcccacgtgttgcaggagagacccagggggaggtaactgaatcatggaggctggtctttcccatgctattctcgtgatagtgaataagtctcacgagatcggatgggattatcttgtttctggttttgcttcttcctcatttttctcttgccaccacaatgtaataggtgcctttcgcctcctgccatgattctgaagcctccccagccatgtggaactgtaagtccaattaaacctctttttgttcccagtttcggttatgcctttatcagcaacgtgaaaacgaacgaatacatacaccccatctctactaaaaaatacaaaaatcagctggacatagtggcgcacgcctgtagtctcagctactcagaaggct

SEQ ID NO: 150505 - DNA, 178 bp, Homo sapiens
cacaagaccttcatgtgagtagagggtgccctcagctcacccaccactttcgataaactgaggcaggactgaatgtggaatgaggcaggcctgtttactgtgtccaggagggactgattgggcccatttgagataagttaggtagcaagcggcctagctgagcagggggctaggtgca

SEQ ID NO: 150506 - DNA, 234 bp, Homo sapiens
tacattattccccagcacatttttaaaagaggccaaaagagagaatctgcctaatcatcttgcctctttagactatcagctcccactggacagagtattatttttgtcttctccagctgtatggcacctggcatgttgacgttactcaagggataaacagctcattcattacacagtgtcatgtatattaaataatgtccataacgtcctttgaagatgaaaaccacttcaagc

SEQ ID NO: 150507 - DNA, 339 bp, Homo sapiens
gaaccaacagaaattgcaataccaagtgcaaatgagttggaaagtagaacaactgccagcccctgtcccttcccactctatatccaacagttcacacaggggattggccattttcttcatctttctgtcttttcctacccatccttttagacccaattcaaattaagtcttccataaaagtttcttggtaactctagctctaactgattttgctatttttctatacttggtctcacactgtcaattagtactttaatatatgctgccctagaatgtttcatttgatacatcgtaattccttgatatcttttcccaatggctaactggagttaaatcagt

SEQ ID NO: 150508 - DNA, 362 bp, Homo sapiens
ttacctagctaacaaatatacacatgctcctgttaaaaaaaaaagaacctttctctagagtttaaaaaaaatctggaaaattctttatcctaatgaaaatatatgttcacgtgctttatatttatgttcaatatttttattgggattgaatttcaattatttaatatttaatatagaacgttttatgtctaagtaactggaaacttaaaaataaaaaaaatttaatgaaagtatgtacattgttctttagacataatactactgcacacttaacagattacagtgtagtgtaaacataacttttatatgcactgagaaatataaaaatgtgtctgacttgctttattgcagtggcctggaac

SEQ ID NO: 150509 - DNA, 270 bp, Homo sapiens
cagaacacgttgtagacacaggaagactcaaaattcagctccctcattctcctttctaataaagttacttagagatatgcggaacagaatgaggatgtattataaagaataggaagacttgggatctataaatcaacagatccaacaaaggacatcaggccaggaagtttaaggatgagaacaacatacctagaagccactggcacatatcagagcaggagaagggaatgtctagaaggagggtaggacttctcccagaaaaaaacagta

SEQ ID NO: 150510 - DNA, 183 bp, Homo sapiens
acatctaagatctcaatagaacatgcttttgagactaatcacatttacggaagaggaaaggctactcttgattaatatgaatgtaaagcctttgctattatttagaatctacagggaagttttttggctatctttgtatattgatgcatataacaatttgacagaattagaccaaagatataa

SEQ ID NO: 150511 - DNA, 472 bp, Homo sapiens
ctgcagcccaaggccttggggagctgggatgagcgctggactgtgggcactgcctgccatcctgctgggacatcttggccatggtatcagtgtctcagggccttggctgtcctatctagagacctggaggcccaaactagagcactccagagcctttctagctccaacaccctacaactctacttcccccaacagcttctcgtccattagtaacctgctgcagtgccacataagggagggctaacaacactagaatttttttttttttgagatgcagtctcgctctgtcaccaaggctggagtgcagggatgtgatctcagctcactgcaacctctgcctctcgggttcaagtgattctcccgcctcagcctcccaagttgctgggactacaggtgtgcgccaccacgcccagctaatttttgtatttttaatagagagggggtttcaccatgttggccacgatggtctcga

SEQ ID NO: 150512 - DNA, 402 bp, Homo sapiens
ctgcccagaattcacagtagcattcagctactcacaattcatgtgacctcaagaaaattaacatcattttacttccttggggataactcacctactcctcagtctaacatttaacttgtgcatgataaggaaataagatagttgataaaagaatgttcagctaagtgtcaggtttttggaaaaaccaccaccaccttgcaagagttactaaaagaatgttaaattaggtctggtgtatactttccaacagggaagagaatgaactgaaatatatcctagctgggtgcagtagctcacacctgtaatctcagcattttgggaggccaaggcaggaggtctgcttgagaccaggagtttgagaccagcctcggcaacaaatacgtaccctgtctccacaaaaaa

SEQ ID NO: 150513 - DNA, 120 bp, Homo sapiens
atgaaaaaagtggtttagagaaagtataacttgcaacttgttaaacatttgcttgtgtaaacatttgctgagaatcctcagactctcctgagatattttttcttaactgcacattttttc

SEQ ID NO: 150514 - DNA, 325 bp, Homo sapiens
agatgggggtctcactatgtcgcccaggctggtttcaaactcctaggttcaagccatcctccagccttggcctcccaaagtgctgggattacaggcatgagccaccatgctcggcaagccctgtttctttaggacaatatctgaacacaaaggctaatttagaacttttggattctctccaggttgtaaactgggtgcttgttatcagcagggctctggagtcagactttatagggtttgaatccttatcccccttttcccagctttctaatttgggacgagtggcagaacgtgtctttgcctcagcctcctcctctgttcaatg

SEQ ID NO: 150515 - DNA, 378 bp, Homo sapiens
taccaattaactaacccacttccctcccactaccccctaaccttcccagcctccaggaatcacccctttactctctattctacatgttttaactccataatacattgttattatttttgctttttactgtcaattaccatttagaaaaattacaacattagaaaatttcttatgtttacctacatacttactatttttagcattctttattcctttaaattgactcaagtttccattgttatcattttcctcttaccaggagaatgttctttactactttaagcctcagctatttttatatattatcttacatttacccaaatatttggcaattttggtgttcttcctttagtcttgtggatctaaattactgtccat

SEQ ID NO: 150516 - DNA, 407 bp, Homo sapiens
ggtatacagtggggagccctgaggagtttaaagcactggggtggcatggtcagatcttcatatgacgtaggttacttgttgatgtatgaaggctgaattttaggacggaaagactagaggtggggaagtgagtttggaggctgttgtattaattcagccagtagttgatgagggcttaaagttgggcaggagatggggagatagaaggaatatttcaggaggtagaattaaccagacttaatgattgattggcactgtaaggtgaggcagaggccttttataagtggatgctgagggtggcagagaaagggttgaggatgattcctgaggcctggcacgacagatgggagtgctgtaaattgagataggatatatagggagaaaagcaggttgagaaaagcaggtag

SEQ ID NO: 150517 - DNA, 574 bp, Homo sapiens
gatcttagctcgctgcagccttgacttcccaggctcaagcgatcctcccacctcagcctcccaagtagctgggactatgggcatgagccaccatatccagctaatttttgcattttttgtagagatggggttttgctgtgttgccaggctgatctcaaactcttagactcaagcagtctgcctgccttggcctcccaaagtgctgggattacaggtttgagtaactgcacccagctgagtgcttgcttttttttggtggtggttatttgctcttgctctgctcacaacagtgtggggaatggtgaggccagagatatgtaggggcagttaacaacaacaaaaagtaaacagtgatactgtgaagtgctgttctaagtacttttcatatattagtttattgaacccttacaacaatttctattcacatttgagagaactgaggccgtgagtactttgcacaaaattaatatagcaggactagcttctgagactgtgttttggcttcagagactatattcttaaccaccaaaccatgctgcagattgtaagttgcaagttatgagtgtgattaggg

SEQ ID NO: 150518 - DNA, 519 bp, Homo sapiens
tgtcagaggatccgaaactgacatagaggaggacgaggaggaggacaaggaggagcagcagcagccacagccgcagcaaccaaatgtcattatttctaggtcagtaggattctcagtaacttggagttaaactgtctctaatctacaatgactgggcctggtaataattcacgcctctaaataatcccagaactccatggagaagaaagacaacagggtgcgtgacaatggggcgtttcccgctctgtgaacgagctccagggatcagaggcagctgctcttctcacagctccctgggctggatgaggttctcactcaaagaaggttcaaaccaaatcctgctcctgaggagacagaaggggcaggacttccagaattatttttgagattctacttcattcacaaactctacatatatttatgaagcaacctggcaaatcgtgggtcctgagaaacaagaattaaatggatgaacatctgcccgtggaggtcgcagtcagggaaggggcacagaagcaa

SEQ ID NO: 150519 - DNA, 272 bp, Homo sapiens
cctctccatacctctccaaaaatttgctaacagatatcacagtaattgtcttaatcttttctccaatataaaagtccccagagaaatggccaaaaagcaagaatctggatgtggtcaggtgtttggctaggccttgagttgcttaagaagtggctgagggaatgaatagacaaatgtgtgtagtgagagttagttgaatcttgacacaaagtgtttggctgacctaatgtagactagagtgagttgattttggctgccaacatactgtgttg

SEQ ID NO: 150520 - DNA, 568 bp, Homo sapiens
aaggcaagccaagaatctggagtcagcgtggaactgggaaggactccaggatgagcctggaagctagtggtctagaggctaccacagtgcttagggctctctacccacagcctctgctccctcaaatccattctctagtataaagtcacctagctattaaattgtagaaccagaatttgaactccaggatgggcctggaagctcatggtcaatattagctcacaggttatgtgatgatgagcaattcagagtattggtaaacagatgctaaaggtcaaaggttggcagtgggtccgcagtcacagtgtaatagcaagtgaatggactttggacatacaaaggatcttggttttagcccaattctgccatttgctagttatctggctctgggtaagtcatttaactctcttgtactttgacttcctttcctacaaaatagagataacaatatatactgctaagtgctctttggaccttgaataaaaataaaagagctaacaatatctgacagttacagaatcctcactgagtgtattatatgaattaattcatgtaatcctcataatac

SEQ ID NO: 150521 - DNA, 487 bp, Homo sapiens
tctgtctcaaaaaaaaaagaaaaagttatgaattgtttatttctggaattttccatttaatatttttggacagtgggaagtgaagcctcaagtaagggagggctactctagttaggatatgagtgtgagatttttaggacctaaactagggagataatagaaggaatagaacatttagatatttaggagataaaatatttagggtttagtggataatttagtgattaattggtgtttggaggaaaaatgaagcatggataagaggttaggggatgatagtgctgtcaactgagagagaaaaatcaaaggttttttttaagttttaaggttttttgttttttagatgggaggaggtatggagatgtattcaattggacatgttgagtttgagattcttatgtaatctccagtaagaagttcaataggcagttggatatattactaaaacttgaagactaggtctgagatgaagataaaagctgatgat

SEQ ID NO: 150522 - DNA, 590 bp, Homo sapiens
gagaatggccctcaactgagacagggggactgtaggtggagctggctttaggtgcctgtagggtggagctgcagggaggctgctgggttgctgagtgtggaggtcaggagaggtctggcctggttgtggaaggtaagggagctatgggtagttgaagttatctgaggctctgggactgcaggaggtcccctcaggagggagactgtggggagcccaccggtgtgaggagactaagaaggagcagctagggagggaggaggacgcagaggaagggggtcctggaggccagtgtgaggtggcaggcaaggactgaggatggtgaccacacggagcaactggtgggctgtggccagggctgctccagtgggcagtgagggtgaaaacccagcgaccgctctgtgctgcacacagagacaggcgctgtggctctccccattcgcagctgtgaaagcaggcacagggtggtagaggaagtaggggtgcacagctagtaacagctgagctgggatttgaacccagaccacccgaccccagagcacactttttaacctctgcactatcctgtaatggagcctgagtgaaagcatttt

SEQ ID NO: 150523 - DNA, 288 bp, Homo sapiens
tttctagaacacctcacccaacaacagcagaagatatatttttaaactatgcaggaaacatttaccaggatagaccatgttctaggacataaaacaagtctgagtaaatttaaaaggatctaagacataccaagtatgttctctgaacacaatgttgagttaaattataaacatagagcagaaggcggtatctgggaaaaccttaatttttggaaattaagtaacacacatctaggcaggtgcagtggctcatgcctgtaatctcagcactttcagaggctaaggcag

SEQ ID NO: 150524 - DNA, 289 bp, Homo sapiens
ctcctctcaaggcctccccgctcccacccctggccctgtccgtgtgagatgctttccatccaggagcaccagctccacccatatgagatgctttccatccaggagcaccagctccacccagttaggctcttctgtcatacacaccacagcaccccacacttgtcttcagatgattacatttttaatggtaaaactgtgtgactagtaattaacatctatcactcagattctgagtctaggtttctacaagcttcgacctgcagccccagcttgttcaacctacagcccc

SEQ ID NO: 150525 - DNA, 368 bp, Homo sapiens
acatttctcataatgtatctctgtcattacacaagacatgactgtacccttgtacactgtggaggtggagggggctacagatgggagttgttacttcctcaagacagcttggtgtagaggaagagcttaggagatagggtaaagccagttcactttgaagcctacttctcccccttttttttccacaagctgttgagaccttagtgagctaccttagacctgagtttcctaacacttaaggtaggattaaaaatttttactgcagtctgggcaatatggtgagaccctgtctctacaaaataaaaaaattagccaggcatggtggtacgtgcctgtagtcccagctactcgggagactgaggtgggaa

SEQ ID NO: 150526 - DNA, 249 bp, Homo sapiens
  misc_feature (9)..(9): n is a, c, g, or t
  misc_feature (12)..(12): n is a, c, g, or t
ctcgtgcangangagagacttgctgaaggagaaacaaactctgcagtctgaccctagggaatgagtgctatgcggatcagatcaagagagggcggctgcctggctctgatgcttcccagacttgggacccaaaactcaagaagacaacgaaacatagtttttgctcttgttgcccaggctggagtgcaatggcatcatctcagcttaccacaacctctctcccggattcaagcaattctcctgcctcag

SEQ ID NO: 150527 - DNA, 498 bp, Homo sapiens
  misc_feature (49)..(49): n is a, c, g, or t
  misc_feature (59)..(59): n is a, c, g, or t
tttttggccagttatccatgttttggcctgtcaaaccatttgcatgcanggtttttggnaaacaagtcttcaaattagttgggcacatatataggagtgctattgccagctcatacggtaagactatattttgctttgtgaggaactgtcagtcttccaaagtgatttttacattatattttacatttgtaatgcaatgagatttttttgtcacaatctgcatgcccaggatggaatcatttacattttcatatcctgagattgatttttgtgtgtttgctgtaaagttctatgaatttcgacaaatacacaatgccatgtatccaccattatgatatagagaatagtttcgctgctcttaagaaaaaaaaaatcctgtgtctcaactactcatcccttccaacccttccatctctggcaaccactgatctgtttactgtctctattgccttttccagaatatcatgtaattggaatcataacagtatgtagcttttt

SEQ ID NO: 150528 - DNA, 387 bp, Homo sapiens
cagatgcagcagaagttgcaaaatgacctaactgcagaagtagcagctgctactaaatatgaacctggatcctatatagcttctcctctaggatttacacacaaggaaaatctgaatcaagatccagttttggaagtaacaaaagagtatgcacagattttaagaagaaaatacatactctgaaagataaggcaattttatttgggctattcacatgatattttgtttcccattaaatatatgatgtgaacatttttactaaagggaaatattctatattatacatgtctgatgaaaatttatgtagtattttaaataatgtttcttggcctcttcagctaacttttaagtggattttgcaaatgaaaaccagtattactgagtttt

SEQ ID NO: 150529 - DNA, 177 bp, Homo sapiens
ctaagatgtcagcatttcctcttggcaggtttcatatttgcttcttagcacttcctgggagggaaaaacaaaagacaccggcagatgtaccttgccatgggccatggcccttcctgtggcccgtgtacctctcacctgggtccctggagacaccagtatccccactgctacactgac

SEQ ID NO: 150530 - DNA, 299 bp, Homo sapiens
aaaattaaccaggatgtgtggttgtgtgagctcctcattttgctctgcttatatgtttccctggtcttgatggttcaggctgcacttacagagctggggtaacagctctaagccagtcctgaactctgtggtattggattgcaataggtgatactactgtgtactcatgttttaaaaatatatacacagggccaggcacagtggctcacgtctgtaatcccagcactttaggaggctgaggcgggtggatcacctgaggtcaggagtttgagaccattcctgaccaacatggagaaacc

SEQ ID NO: 150531 - DNA, 359 bp, Homo sapiens
tttgtgacactttaagccaggcaggaacatttaaaaattgttattgtagaaaaaaaatgtaatttttcaacagaaaaaaattccctattcatcattcaatatatcatcatttaatatgaaggacaataaaatacactctttaattgcctgaataaatttgcattttagagtaatttaattttcactaatgtaatttgaatgactcaagtgaaacataaaggagttaactgaacagattgattattttgggtataaattttacagaaatcaacaacatttattactaaatataacacacatttttatttctaaaacaaattttgagtactttaaaatgaaaatcatgttgcaaaaatcat

SEQ ID NO: 150532 - DNA, 315 bp, Homo sapiens
gaagcctcaaaagatggaatctatccagctactttggttttgtttacttcttaggtgagtgggggaaaagagaaggaatacagttcaacacgtatttatctgttttctcatgcaattcttacaatagtcttataagacagttattctatttttcacattagtaaaatgaagcatagggtaaatgcctcgtttaagtttgcacagccagattctggcagtaaatccagcaatttttctactacactacattgcctcttgatgttgtcgaaaaactggaaataattagattctctttcagtggttaagatataataa

SEQ ID NO: 150533 - DNA, 395 bp, Homo sapiens
aaaacagttgaggtaatattgggttacaggtatttcttaacataatattgaggaaaaaaataaaggaatcctactgaaaaatccttctgattgatatatatcaaaacaagtttggaaaatttcactcatgattaatttttttttaatagagaaaaaaaaacagaatcattaagttgaggactggtaaaagcaaggaaatctctcccaattcttggccagacattcacaaaaccatgttctctcctattcaacatattgtattcgaaggcaaaccatgaaggcaaaacagatgttcctaaaaggcaacctagagtcagaagagaatgttagtaggtaagctgtcgagatttgggggtatgaggtggtagagtcacctccttttcctccaaacctgc

SEQ ID NO: 150534 - DNA, 295 bp, Homo sapiens
gacagcattaacattctttcggttataatttaaaaccaacttgagatatgatatcatcacagcttgaaacttcataaacaattcttcaggtgaatgtagcgtgttatctaaaattagctaaaagggtagacttgtaagtatacatggaaatgagtactatatatctcccaaaggttttaaattttaactaatcactaaaagagaaactaattgtcagcttgcttaatattgtgcattcaatttcatgttcagagcagcaagttttttaacatgaaaattaacccccgtctagaga

SEQ ID NO: 150535 - DNA, 469 bp, Homo sapiens
ctaacccagtctgagctctcccagagctgaggctgagaccaattctacccaatcacatagcttgagagtaggggagggagtgattacccaggataaaatctttgtattatttcaccaaaagaagggtgttcaacccagcgatctcgttactgggtatacacccaaaggaaaataaatcgttctaccgaaaggacacatgcatccatgtgttcattgcagcgctgttgacaacagaatcaacccaggtgccctcaatggtgaattagatttaaaaaatgtggtacgcatacaccacagaatactatgcagctataagaaagaacaaaatcatgtcctttacagaaacatgggtagagctgtaggccactattgtaagcaaattaacacaggaacagaaaagcaaatacctcatgttctcacttataagtgggagataaacattggatacacatgggcataaagatgagcg

SEQ ID NO: 150536 - DNA, 180 bp, Homo sapiens
tgccccaggacctgctcctactcacacacgcattttcatttgtctttccacccctttcttacttaactcatgtactttggggaatgctaacttctacctccaattctagagatggcccagagtctcagagaatgtttcatttccctcatcagtcttggatttggggaagtcatgtgaact

SEQ ID NO: 150537 - DNA, 497 bp, Homo sapiens
gcagcgatgcaatcatagctcactgcaacctcaaactcctggtcccaagttgatcctcctgcctcagcccccccaggtagctgggaccacaagtgtgcgccaacaaggccagctaatttttaagatttttgtagagatagcgtctcactatactggccaggctgatcttgaactcctgggctcaagcaatcctcccacctcgggagggtgcataatcttatgcatttcattctaatacaaacctaaaactcaaaagccccaacacattttgatcctcaaaaatactttctacttttctagaatccattataaatagatcttcaaatgaagttccaaggtctattatttctattttgctgtcagaagttgggaaagcccagaagaacgttccttgttgctctggaattgaaacagagatcagagtcccagccattggacttgccacttaggagtcagtggacctcagcaggtcacctgctgcactgcagagaccactg

SEQ ID NO: 150538 - DNA, 462 bp, Homo sapiens
tctaattctcttgggtagacatcttggaatgggattactggatcatataataagtatcttttaacttttcaagaaactaccaaaatgttctccaaagtagggaaccatttgtgttcataccatcagtgtatgagcattccagttgctccacatcctcataacacatgacattgtcattctttttaattgtagccattctagtggttttgtagtggtatctaattatggtcatagtttgcatttctctaatgaccagtggtattgagtgtatttttatgtacttgttagccttcccttttttgtgaaacatctgtttaaatcttattggattgtatgtcttcttttattgagttgtaaaagcactttctgtattctggatccaagtcctctgttagaaatgtgctgggattacaggtattagccactgtacctgggcacatcattcctttttaagggtggcta

SEQ ID NO: 150539 - DNA, 325 bp, Homo sapiens
tgtttctgggcagatcacgaggtcaggagatagagaccatcctggctaacacagtgaaaccccgtctctactaaaaatacaaaaagaagtaccgctatggctgcaggaacagggtagcctaaaatgtttatctatggctctagagcagtgctcacagcacagggctcagtcatataagccactaagacgtatttgataaatgtctgttaggtcactgaatgtccctagtgccacatacagataacagacaccaggacaaaaagaaaaagaaaaaaaaaaaggaaacacaaatcttttactcggcacattactatatgcctaacct

SEQ ID NO: 150540 - DNA, 391 bp, Homo sapiens
atactctgcaactttctttaatattttgttaccaacatttatccttatcaaatatgaatctagtggctctttttaacagttgcataatatcctatggtatcgttgtaccatagtttattcaattattccccagctgatataccttcaagagcattctaggtttttaccattcctaacaacactgcagttaaattcttgtacatatattcatgtgtatctactttgatatttgaaggatagattcctaaaaacggagtcagtgactcatgcatgatgtcagatgatactccaaaaaagttgcattgctgtagagtcacacctgcaaaatatgagagtacctgtttgcctcacccctgccaggtgttaggagtctttttaagtgttctctctc

SEQ ID NO: 150541 - DNA, 445 bp, Homo sapiens
acgcccgttaaccactcacagtaccaggtttgaatttcatatcactgaaggaggcactgaagaggcaggaaaaacagtcttgaatactgaacaccaccccttccctgtcgcccccattgcccagcagcagcaacctggtgctgagagtttctgtgtgctggagagagggagggccagcaattgtgaggcattgaactcagcactgcccttgttacagcagaaagcaaaaccggaccaaacccacctaatgcctacccatggagggagaatttaaaccagacctagccaaagcagaattgctgatcccagtggtccgaacttgagtttccacaggcctcaccactgtgacctaaagtgcttggggtctccgaataaatctgaaaggcagtctaggccacaaggattgcaacacctgacgagtcctagtgctaaactgggcccactg

SEQ ID NO: 150542 - DNA, 234 bp, Homo sapiens
cgtgcataaatgctcactaaatacctccctgtgctgggcctgagctaccaaggcgatagggcacagactttgcttctatattttgatgaattatcaaaaataggtaaatccatactgtactagggagcacagtggggttacttctctactgtaagaggtgctgggagtctagatggcttcctttctatagggggtgttagagaaagcctgcacttcggagagacaggcctgtgg

SEQ ID NO: 150543 - DNA, 133 bp, Homo sapiens
ggggtggctctctgagggcattctggcatgctgttttcccagaaaaatggtgaatggatgctgagaagtaaaaccaacagctgtccactacatactaattctttataaacagtgttatgcatgtttatcctgc

SEQ ID NO: 150544 - DNA, 256 bp, Homo sapiens
taactgttccaaaatggttggtttaaacgtgatcaccacttcaatgttgggactcctcgcagaaatcaatatataggttctatgattgcatatagggagagaagtaggtaaacaattagctccaagtatgaaaataatgcttaatctactggtagaaagccaaattcttttcttgatgaaaatgcattacatgaaattttaagtctttctgtctatagtctggttttcttttgaaattgctattagcaacacaata

SEQ ID NO: 150545 - DNA, 445 bp, Homo sapiens
gtggttttcagaaatatccaaaaattttccctcccataaggactgagtttaatttagaggagacataggaaaaggtatgaagttgagcaaagcaaaaacactatggataagaaacagaataggtgcagatttcaagatacaaaatacccaggagagtgaaaatccagatattactgtacagcaaaataaacatctaaaagtaagaaaattgtttttgaaaacaaggactatatggctctaggaaacatagagcaggaggtaagaaaacacattcctgaatctctgggagacaaaaagaggtcataaaaagatatcatggtttgagttctccactgtaacaatgtcatacaaaatgtaaaaccaaggaagtttaaaaaaaagatactctagtccatcaccactgcttgtagagcaaccctctcctagtgactgagaaaaacacttc

SEQ ID NO: 150546 - DNA, 414 bp, Homo sapiens
cagtcctaaccttgagaatgagtataaaaccacagttgtgtaaaatgggttacacagagtcgtggcacaaatgtcagcaatgccgatcttcctgaactctgactagtttaaatatctaaagagaatttccctgtgactaaagccccccccctgggtgtagacagctgcttggtataatgaatccagctgagggtagtgtactcatgggcagattggcatgaatgtggccacctgcaaggaattaaacaagcaggattcttgtggctcaaaaagaccccagtgttcgctcttacacgaactatcaaatttatctgtgcagcactgctattccgaggggagaaaggaaatatgactgtcagtattttccaaataactaaagttaaaaagtttaaaatttttcaaccaggcatggta

SEQ ID NO: 150547 - DNA, 371 bp, Homo sapiens
ccccccagttaaagaaaatgccacaaatggaaaatcaaactgaattttaaagtgtgtatctcaagagctgttttcaaacagaggctctccacatttggctttctacgttcaaacacattgtgctagcagagtaaagagaaggggatactgctgtgctattatattttaataatgtcagtaggtgctttgggctagaaacacagccaactgttctgaaatggaatctagttccgttagagaccttacgagatacagaagcagagactttcgttttatgcagggatttcagttagcaaaatgttttccctcttcctcatttttattcccatcctctcccatctggaaaagtcactaaggtacagaagacataa

SEQ ID NO: 150548 - DNA, 136 bp, Homo sapiens
gaaaggggcacgactttgagccttcctttttgtcccgtggctggtgggaagctgggatgactagagccagaaaagccaaatgatttgtccagtatcccacagcctgtctagggaattccaaacacttaactgcctt

SEQ ID NO: 150549 - DNA, 229 bp, Homo sapiens
aagcaaaaacgatacatcatctggtgaatggataaaaagtgggtatagccaaacaatggcagtaccaaaagaaaaaaatgaggacatgtctaaaggagaaaggagtcaacctgaaagaatttccaatggccaaagcttgaaataatttgagcagctaagtaaacagtattagattcaaacccaaaggataagtatcaatgagtccacgctgatgacaacagacttaagg

SEQ ID NO: 150550 - DNA, 286 bp, Homo sapiens
ggccattctcatgttattggcaggattcagttttgactgagggcatcagttcttctgtgactgttggtgggggccctcccttggttcactgccatgtgggtctctctgtagggcaggcagctcacggcatcagaactcacttccccagagtgaggggtgaaggtggggaggaaaacaagagcaaacaagcaagacagaagtcatagttttttgtaaatcttggaagtgacctcacatcacctgtgctgtgttctgttggtgagaagccagtcactaaatccaatca

SEQ ID NO: 150551 - DNA, 286 bp, Homo sapiens
attggcatttgcttgccagagcataagatggaaatgcaggaagagcctgggaagtgtctctcatatctaaggcagaatgctaccaggggtacaaacgagtagggcctggacatcttagctgctgctggacctccaggtcccaccggccatcatgctgactgaacagccactgtaagaacaggaaatggggtacagacaatgaagtccaatgttaaagaggtttccctgtccaggaaaacaaaggaacaatagactcctacgcttaatattttaagagttttgtggt

SEQ ID NO: 150552 - DNA, 513 bp, Homo sapiens
tgcctgtcactgagatactgatgaggctcttttttgccttgtattccgattctgcccacttgtctaaatcaatgattccactataaatcatgtaaaaagagtaagagtcttttctgagagcgagctatgatctcaaactccagaggttctgttaaaagcatgcctggaagagacggaacatatcaccagactctgtacaaatatgaaggcttgtgtgtgttagcggttcagattgctatttttctacataatataccacagctctgtttcagatactggccttttctccctgtaatttaaaaataaaaaagaaagaaacctctttcagaaacaatgaccaaataccgttcccgcttacgctggctaagtgaaaccaattcaggttttgaggccactttcagtggatgagggagaagcgacacgagctctctgcatccccggccactccttgcccaagcctcagaccacatggaactgaggaagaagggttcatgctctcacccagtcagcgca

SEQ ID NO: 150553 - DNA, 268 bp, Homo sapiens
tacaggcatgagccaccactcctgaccccatttctcatttttaggagtaatttttttctatgtgaaatagactggttttattgatagtgctagaaatgttttgagccttttgttcacttccacctgaagtatttacattatttatataccattttaagtctattattttctctaaaagttaaattccaaactaaattgtaaattatatttgtggttttggtacaaattaaaacaataatagagatcagagaaagaaaaatataactta

SEQ ID NO: 150554 - DNA, 385 bp, Homo sapiens
cccgacttcatacaacaaagctataataaccaaaacagcatgatattggcataaaaacagacacacagaccaatggaacagaatagagaacccagaaaaaaatccatacatctacagcaaactcattttcaacaatggtgccaataacatacaatgaggaaaagacagtttcttcaataaatggtgctgtgccttaagcagaggttaggtttgctgtacagacttaagttgatgccttctgcattgacagtctctagagatttagtctttctagtctttcttctcttcctggtgcagagagggagacaccctgtcaaagagatactcctttacaaacgtacacttcccttaaaaaagggcaacttttcagaactactcctgtatc

SEQ ID NO: 150555 - DNA, 285 bp, Homo sapiens
tgaaaaagactttaagcaaatgaaagagttagccaagtagttatctaggacatttagttagagaggaaataaaatgtaagttaaacaaagtcatgcaaggtatttcaaagactggcttatacagtaagtaaaactgtgttttaggcacttcatatgtatcaaattacttacttctccccacaacccaatgagtaacatagaaaagttaaataacttccttaggtttacactgagggagcagaatttgaatccaaattcaaacccctacaatatcctgcctctgag

SEQ ID NO: 150556 - DNA, 253 bp, Homo sapiens
gctggtaccttcgcacctccttttcctcagcccatcaagaagctcaagatctcacccaaaacactaccaggagtggacactggagatgacctcccgacatccattctgtgtcctcctctcccctgaaatcaggtgagggtgcagcgtggggaactgacctttgcagtggtgcacttgtctgagctaagagtaactgaatccctcttgccagagataagaaatgagatttaacctcattctagccgatggtacc

SEQ ID NO: 150557 - DNA, 367 bp, Homo sapiens
cacgctgattctgtggtcgttctagaggtatcccctctacgccccgctcaccacctctgcctcccgggttcaagcgaatctcctgccttagcctcctgagtagctgggactacaggcgcgtgccaccatgcccagctaatttttgtatttttagtagaggtggggttttcaccatgttggccatgatgatctcaatctcttgacctcgtgatccacccacctgggcctcccaaaatgctgggattacaggcgtgagctactgcacccggcccaacaatctcttacagatggacattgagatctccaattattctgctgctttaaactatacaacagaaattgtgttttgacttgaggcattttgggc

SEQ ID NO: 150558 - DNA, 359 bp, Homo sapiens
ctcagctgccaaagtttcttgaagcagctctgctcaaaggcatatgctgggctcacttctgagggaaatttcctttttggggaagttgaagcaaaggaatttcctgtgtgggcagacagagcttcctgacttgaaggcttcttggaagggaaacagtttcataatgaaatgacaaattaaagacataccagccgggttcacttcaaaacagctattgagagtgcaggcaaagccctattatactccctcacagaacaaaaataaatcccatcctgacaggtttctgtatgccggattatatccgtccccccacacctttcttcacagccttcttcatgcttcccttcctcccacccccg

SEQ ID NO: 150559 - DNA, 107 bp, Homo sapiens
ttctgtgttgctcacagagctttactgccttccagggcttgttttgcacctcctagttgctctttctaatgatttcagtgactgtcccacctcaacataggaaagag

SEQ ID NO: 150560 - DNA, 418 bp, Homo sapiens
caaagtgctcggattacaggaatgagccaccgcacccggccagtaatttttgtatttttagtggagagggtttcaccatgttggccaggctggtctcgaactcatgacctcaggtgatccacccgcctcggcctcccaaagcactgggaggtgcgagcccagctcctgatgttctttaagggtagtgctactggtttagggttacattattgtgggactggtagtcctgtccttagtgtggggttctatgagctggatagtcagaaaaagagcatacatttgggtcatcttgtttttagccagaaatgggtccagacaactctccatgtgaatccaggctaaggtgatttgatagcacttttagcatccttactccaatcttgagtcatgatttgagccacagggcaatctaggcatt

SEQ ID NO: 150561 - DNA, 397 bp, Homo sapiens
agccactgctcctggcctaataattttttatttatttatttttttgagttggagtctcactctgtcacccaggctagagtgcagttgcatgatctctgtctccagaaaaaacaaaaaacaaaaagataatatttgcatcgttattggctcatttttgattacttgggaaaacagctttcaaaagcttaaggtttttaaatacatgtgactttctatattttttttctgatgttctgtttatagcattttgtgtgtgtgtgtgtgtgtgatggagttacactcttcttgtgtaccctggagtgtagtggtgcgatctcagctcactgcaacctctgccttcttggctcaaatgattctcctgccacagcctcctgaatatctgagattacaggcatgc

SEQ ID NO: 150562 - DNA, 136 bp, Homo sapiens
acagcactataaagtccatcctttattccactgatataaacaatagtctttttttttttaatgatggggtctcactctgtcacccaggcaaaagtgcaatggttcgatcataactcactgcagcctcaacctcccg

SEQ ID NO: 150563 - DNA, 557 bp, Homo sapiens
ggatgatttaaaagcatttcatcttcagagaggcaatgtagttggcgtaaagagggagacgaaggagtaagaaagaaaggagagagctatgtagaaaggaagagagatgcagagcatatagttaaatagcctttgcattttctgaatctttcccatagcacatctttacaacatgccactgacatcagaagtctcccttgtgctacagtcaatctcacttttttcagatgagtaaatatattagaaaaaccctagggagaaagttaaatctaggagctgagcagcaattttacgaagttacagttccatgttaactgaaatttcattatccttctcagaaaatacaactatgtcagaatttcttccaaaaagcaccataagtttttgtttttttttctgaaggggttatgtatatcctccgataaagtttctttcccaattccttgatgattttataacaaccttacattttgtctacatagcccctcttatcacttatagcagaaaaaggggaataaagagatctatatgcacagtctcagaaaggggacttccac

SEQ ID NO: 150564 - DNA, 329 bp, Homo sapiens
tgtcggggattataggcatgagccactgcacccggccatctcaacagtcttgagttctggccaggtatcttgtagaatgtaccccacgtctggatttgtctaacatttgtctcaagatcatacactgggaatttgggtttttggtaggaataccagggaagtgatgcacccctctcatgacatatacatgacatcacttggttaggtgtctgccaggcttccccactataagtttgtgacttttccctttccctactttagtcgtgggaagtatcattaagtctagttcaccttcaaagggtggtaatgaggtgggaatatgggggtaa

SEQ ID NO: 150565 - DNA, 322 bp, Homo sapiens
ttaaaatcataaacatcttacagaggcatttctgtgcttcatggagacagatggcatatacaggaaagacagggagctaagacagacaagaacaacatacaggacaaagcacctgattaaacactgcctgaaaatctgattaatcttttgactcaggaatttaaggctagtcaaaaaagccttctgtgaacaccagtgacatttgatgtttgcacaaaaaattaataaataaaaataaaataagggggtaaaaaaaagacacaagagctttgggtgatatttggcactctgcctctgaaaatgatgacaaaccctgggtatt

SEQ ID NO: 150566 - DNA, 416 bp, Homo sapiens
cattatttcacacacttatttgcttgtttcttgctgaattccagattgcggtggtactttaaaaaaaaaaaaagctccaatatcaattttaattttgcttctaaccttttggaccagccacaccctgacacttaaaaaataataatgaaatgttagtataagaaaaattgctagctgactatcccagccttcctccttagtaactaaacctgatttggggcacattgctacctagactgtaatagactttccagtgtcctgcatggccaggtgagctctggacgatgatagagataaactaaattactgtaggctataatttaaggaagcctcctttaaaaaagtaaggaaaggatccttttttcctttctcccttcctcccttcatttctccttccctcccttctgcctccctcc

SEQ ID NO: 150567 - DNA, 577 bp, Homo sapiens
aaaaagagacccctcttggatctaagtgaagaagtgagcttgtgatgaatgtttgttgactgagcaatgacagaggatcacagcacccttgacctgccaggtcacctgatcttctcacagagacacaggtggctcccgattcagacaatatttgaagccctgaaaagcctttgctgcatttccacgaatatctagagtgggctggagaccccttccccgagggtccgctatttctaaccatggattgatcttaagagcaccaaggcctagctctgaaggtcacattcctcaacacagacctttctctaccaagaaagagaaagctgagaattttcccccagaattttccactggggcacaccacattggccttctgtgtgcttgggtttcccgtgcctggggtgtgaggggcccaggcagcttctgcgcagttgagtcatctctcttccatggttccccaccagccaagagaatggtatgaatgtccacaggcggcctcttcatgggggtctcaggaaatgggcatttgagggtcaggtgggtgaccctagtcccccacaaaggtagcatctggtgg

SEQ ID NO: 150568 - DNA, 320 bp, Homo sapiens
gggaccaggtgagccagggaagagttgctctttatttaagtgaaaagggtggtctgggccggcctggtccctctgcccacttgctcacaggccgaattggcagctgggactctgtaggtcactcgctgctcctgccacccgacgtgcacctcactgctgcccccaagaatcctcccagaccttcactggctccatcaccccctccttcagctcctggtcagcatagcctggcgcaggtgtgggctgcctttgccgtggccttgccgtgtgactgtgaacacttgtgagacccttccgagcctcagtttccccctgcgtga

SEQ ID NO: 150569 - DNA, 724 bp, Homo sapiens
ttttcttaattccctgatttgatggtaatttgtaaaagtaaccttcctttatttagtttttcctgtagtatcttagttgccatagaaactgtgtctgcctttttctcattcacattttgaccatttatgtaatattagttaaattaggcaattataataagtgtgacctggaagcatccacagctgactctggcaaggactgagctcaatgcaggagcagagctcagcaggagccacaagagagtggcctggtcctgcagccaggggacctcagcatgacttgcaggggcatcagaatgtagattttccatgggaccttttcattaggtcagctcacaagttctattgtgttacatttggctagttggagttaacattactgagcattttaaaatgtcagggctgtgaaagtaaatgccgtaattccctagttttgaaatttaaacattgcaaaaataatcacttgcttccagtactgttacctgtaccagatcagcccttagatttacgatggtttcattgtactactctgtgccttttgagttttgtcattcatcatcctctgttgtatttgaggcattagtgggtataaatgcatactgtagccagagtgcctgggtttgtgtgcccttactgtccttaactgctgtgtgcctcagtttgcccatctgcaaaatagggataaaagtgcactcagttgagtaagagcattccaatgtatgta

SEQ ID NO: 150570 - DNA, 292 bp, Homo sapiens
aggaaagtgggggaagccaggagtcacaggcctcacccagctcccacacaaactgaagagctgattatagtggaagacaaagggcatataatcttgggagttctagggccctgcccactaccggtccctctccacactactacagctgatgctttctggaaagcacgaccttgtggcaggaggccaaccagcacaaaaatagatcattagaccaccaaagctaaggaccctcatggagtccattacaccctctgccacctccaacagaacaggcactggtatccacagctga

SEQ ID NO: 150571 - DNA, 485 bp, Homo sapiens
tctaatttctgctatctatcttgtgtttatttttgaagaatcagtggatggacagcatggagaaatgacagtattcagaaagctaggcacggtgtcctgcacataatctaagagcaattcatcaatgcatgaatcatagctcctttattcaatcaattttagataaattagctgtctccagcaagtgagagcattgggtccctcaggcatcttcctgtatatgtcaggttaatgagaaaagatttgtatcatttgactttattgacctgagtatcagcaggtcgtaaataaagtgtatgggttcaacacatgggtttgagatgcagacaaaccccgattctggaattatagaagaagcgtttgccctgagccaggcctaatgagtcagcagcagaaaagagttcaagggatgattcagagcatcactacaacagggtcccataacatttcctatcactcaaaggtctcagtcattaagcatgaca

SEQ ID NO: 150572 - DNA, 778 bp, Homo sapiens
atataacatgtgcttacccagaattcctccctcacaactacaaagcttacataagacaaggaaagcaaagtcagccaagcatgtgtcttcagaaggctgaccctgatgaccttaatttttggaatcagggcctgcatgatacaccctatttcttggtaagaagattccaaggatagaggggaaaaggctcaattgtatatgctcacgttcttctctcaatatcaccctcaggaaagtcgttcatttttccaagaggtagcagataaagggaagagaaatcacctcaaaaagtggttggaccagggttctagtgaatttgttttccacatgttgctacaatagtcaacatcctggggaaaatgtgcagcttatgatatcagcaatgttcctatgtgtctttgtccattcaggctgctggaacaaaataccaaaagctgaatggtttatgaagcacaaacatttatttctcacaattctggaggctgggaagttcaagggcaagacgctggcagattctatgtctggtgagggtaagctcttcatagatggccccttcttgctgtgccctccatagtggaaggagcagagccgctttttgggcctcttttataagaaactagtcatatctatgagaaattcaccttcataacctaatactttctatgccttatctctactatagcattggggattaggtttcaacatatgaattttagggggatgcagacactcagaacatagcactacaatattttgggcaccagtgagtatgactctg

SEQ ID NO: 150573 - DNA, 623 bp, Homo sapiens
tttgttctgacaggcagttaatttggggataaacttggtcctgttaaggcttatgcttacctttgttaggggaagtacagagtagcctgttctctagatctcggttagccttctatagtatggtcttagtgatatcttgtttaaagaggtaatttactatggttgatagaatcatgaatgtttctagccttatgaggacactgttagttgttctttatatagctccttggtagttgttctttgcttggtttgtggagtctcatcttatgtgtgtgcagcattatattcagccagactcaagaggacctctatgcagatagcattgtttgtctttctgtgttgcttcttcctttttgatactccgtcccacaaattctagccgcttcagcttccccaaactgttttctgtctctctgctgagcaacacacctccctgttctatagtactgacagtacttccaagtagaaagagagggtgataatagggcttatttcatctgtttgccttctctcacagatcacagttacatgctgtctgttgtctaatgtttggaaatagttattatttgtatattttctccagttttgtagttgtggatggcaggatggccattctgtgtcag

SEQ ID NO: 150574 - DNA, 317 bp, Homo sapiens
gtagtttaagtcctttgccacaatcagttggtctactgaaacagtcctctaaaaggtctcaaatcctactcacactcctgcccattaatcactaacttggaagggtccttgagatcatctacttcaatcccctagacaagaaaccagcttaattctcaaagttcagtgttccttagcactgattactgctttatctaaactaatagcattttccaggtttaactaaagcatatgtgactagaggacaactgaaatacacttctggattcattttcaatggccactgtatttctgtttctcttaaaacaacaaacatg

SEQ ID NO: 150575 - DNA, 434 bp, Homo sapiens
  misc_feature (362)..(362): n is a, c, g, or t
  misc_feature (407)..(407): n is a, c, g, or t
  misc_feature (415)..(415): n is a, c, g, or t
gagcatgtttagtccacaaatggctgggtacatgctcagctgggtcccctgcagtgctgaacactggcagcaaagaaagaccccaagttcaagttcagttaaaaggctctctctggttttcccttcttcctaaatttatttacacatcaattgtccattagcgcttgctttttgctctttaaataatttttttgttttgtttttggataacctgtcatccaggctggagtgcagtggttcaaccacgactcactgtaacccagacctccctggctcattattcagtggttctttctctcgtgcatctccattctgcaaagactcagcacaaatttctctatgccacctttcctggtactcangcatctctgagcactgtcggattggtgcctcttgtccagcacttnggatgcanattcagggcaaaacctggt

SEQ ID NO: 150576 - DNA, 95 bp, Homo sapiens
gagagaatttctgcttccactatagaatatatacataaatgtaaaatacttacaaaagtggaagtagtgtattttaaagtaattacacttctgaa

SEQ ID NO: 150577 - DNA, 227 bp, Homo sapiens
gctttgtccctgactgccactcctcctctccgagcctcagtgctcatgtagaatgaggaccagagtctctctcagtgtcctctaaccaggcagttggctgctactgctggaaatgtcaccacagttacaagtacaaattcctgaaaggccggctattccctggctgcacaggcagtcctgccccaattagcaaatgcatgttctgggtcacattttgtctgctgctg

SEQ ID NO: 150578 - DNA, 366 bp, Homo sapiens
agttccaacccctgaggacaatggggcccacaggctgagcactttactaaaagtgccagagtgaagccagagattgaaagtcaccttcccgctcccagtgtgctgtctgtttcattatacaaactgcctatttgtagtccaggaaagaagacaaacttctccccatttctactgtcagtagactgaggctggaaaccagtatgcggcctcagtgtccttttctagtataccacatacataataaaaacccaggcagataccaggtgcctagccttttcagtcaaacatacacattttagttaaaggatgagaagttgtcagtgagaatttgtacagagttcacagtaagaaggtgaactactacca

SEQ ID NO: 150579 - DNA, 270 bp, Homo sapiens
cctgcagggagctggtcaatgtggccagaaccaagtagggagggagcaggtgctggagtgaggtcagggagtggggcggggccttgcaggagaggtcaggattccaggttttaattgagcgatacagaaagccatcggatgtcgatcggatgcaatgcagagagatgtctggctactgtgcagtaaagagatggtagagacagggctggggtgagcagtgaggggtccctgcagtggatctggagatacattagcatggtctcccgcctc

SEQ ID NO: 150580 - DNA, 195 bp, Homo sapiens
tgtgaagaatatgatagatgtaaattggaaatgagagttcatgagattgactttgaataggcccagaagaagacttctagcttttggcgatcatgagaacattgtatagaaaacaaatgaggcttccttgctgcattgactttaccaatgtatataggaatgctttttttttcccttaagtttttaagatgtatc

SEQ ID NO: 150581 - DNA, 162 bp, Homo sapiens
agggggagtccacaacatgtgagagaaagagttgtccagcatgaaggaagcaccactgtatagatgccagggaagggagcacagagagcagtgaaattggtggaagctgctgaaaccagctcctgaaaacctttgtaagctgtgtcaagggaaggttccatc

SEQ ID NO: 150582 - DNA, 415 bp, Homo sapiens
cctggagctcaagcaacacgtgcacactggagggatgagggtggttttatgaggtgcctgtgcagagtgttgtgtaacacatgggcatatcctagaggttgtatagcacatttaagaatgccctgaaaatttcacaggtatgttggccctggtgcatactcaccatccatgggtttatagtgaaggttgcatggttattcatctgtgccggtgttatgttgcatatgtatgtgtgtgttctaaaggctacatagctttaagcatatcctgagaattcttccagcgtattcgtcatgtactgaaagatgaggatgtcctgcagattatgggtgcttcaggtcttctggcgggtgaatgtgtgtgtgttggggctctagaatatgcttgtgccacagccaagccccttatctctctc

SEQ ID NO: 150583 - DNA, 196 bp, Homo sapiens
tccactatgtccacggttggctctacttacagagggctcgccactggtgcaaggcacatctcataaactggtgaagctggggcagactgcatcaagtagaatgcgggatgagaagggggcaggcctgctgagctccggctgatctgaaatttccagagaacttggaaatctggattttcatgtgaaatacccaaag

SEQ ID NO: 150584 - DNA, 393 bp, Homo sapiens
catgacagtgtagctaccaggtccgttggtttgtactgctacgagtcttgccatgtcgctggcgagtttatgtcatatacgtgtgttttcactttcctattttcagtggcctgggcctcggtgacatctgtgtccttctaagttactctttcagtcttgtcagtgtttttgtccttcttggatatggtgggatcagtagtgttaagaaacccccttaaaaactaaggacaaatgcaggcgccattgctgagcctctcgggatgcctgggcttggctgctaagtgcaccatggcttcccaccactcaggatctgtgggcttttactctaacatggcattttctcagatctttgaaactttgaaagtggaggagcatcggtaatgtatgagacag

SEQ ID NO: 150585 - DNA, 334 bp, Homo sapiens
tgctaggactgtgagtgtgagccattgtgtccagcctctcatgtattcttacacatatgttttgaacaggaccctaaacacaaaaccatgtatacagcaacactttataagtgataagacactttcaaacataattttgactgtatgatttttattttgtgtacttactacatggtatgtgagatttttggtgatgcaggagcattattacacatgtcacagttactagttacagttgatgtagagaacaagaactcaagtaataaggtaaaaatttgccatagagtttaactttttaaaaagtaatgtcgttttattctttgggcatttgcac

SEQ ID NO: 150586 - DNA, 318 bp, Homo sapiens
gttgacaaaccctgctttaggtgtgtagatgctagaaggttttttgttttattttctttcccccagacatctttcatcatcgctttagaagacagcaagaaaataacgtgggagtatgacaattacaactccagataaatgttcgcagcctgtcagaatggaagcctgggcttcttcctctgttccagtgactcaggaggctgaggtgggaggattgcttgagcccaggagttcaaggcttcagtgagctatgatcacaccaccatacttcagtctgagtgacagagagagactctacctctaaaaagtaataaaaaa

SEQ ID NO: 150587 - DNA, 499 bp, Homo sapiens
tggagtaaaatggtaactttaatttaatgacctttacaaggtagctaagtatttccttgtataaatttgatctgtgttacttgagtaggctattctagataggcttctttttcttttgtggttacaactagactacaggctatcatagtgttcattttccctgccgtcacatttcttgacacacagttaggtgcttttggttactgataggagcattgggattcaaatattcttttttccatgtctctgtgttctctggttttctggagtgactgggagcaatgctgcaattgagcctggacaatccaggataggcaaagttttggctcagtcttcaccttgccactttacctttgatgattatactgagaaataaagggtcttcagaaccaaataggggcaaaatagaattcttctgtatatttctatcaatcagaggagaattgtgtgcacaaaccttggtcttcctatgcacctatccatctgactctactctagc

SEQ ID NO: 150588 - DNA, 347 bp, Homo sapiens
agctgatcagtttttattagaattttccatgaaattttaaacaatggtttcttacaaacaaaccagccatcaggaaagaaaggcatgaataatttccaaattggacaatcagcggacaaataagtaccttgaccacacaagcggtcattcataaatcctgtagtgtaggagtttttcatttaagagtttcctctttaaaaaaacgatcaaggccgggcacagtagctcacaccggtaatcccagcactttgggaggccaaggtgggtggatcacctgaggtcaggagttcaagaccagcctgggcaacatggtgaaaccccatctctactaaaaatacaaaaattag

SEQ ID NO: 150589 - DNA, 596 bp, Homo sapiens
tcccagtgggcgtaacgccaagactgggcaggtggggaaaaataccagctcgtgggataaaatggagagttgctcgatgcatatggtgaacctgggtgatttagtgaggattagagagattgaaaggatacgggcaggtgggtggtgggagaaacaatttgttactatttttgaggggatggtggtgaaagggttgcattgcaggtttgcagacaggtgttgacataatcaagcattcatgatagtcctccaaaatatttttggctgcccatgggaaggatgaggaagtttaatggaagcattgtagcctgttttttttgtttgtttgttttgtttttactgttttcggctagactccatgaatgccggatttttctgaggctccgaggtagaaggaggcgtgatgagaatagctcagggaagatttgggagggagctgctaatggtccaagatggatccgtggctgcatctgcaacagcctgctcttccctggcgctgcgtgggggtggggacacgcaatcagtcgcttatattctagaaaatagagtcatgctaagctatcaacatgttttgatttcatgttttctgtgggcta

SEQ ID NO: 150590 - DNA, 482 bp, Homo sapiens
gcctcagcctcccgagtagctgggattacaggcacatgctgctgcgccaggctaatttttgtatttttagtagagacagggtttcaccatgttggccaggctggtcttgggctcctgacctcaagtgatctacctgccttagcctctcaaagtgctgggattgcaggcatgacccactgcacctggcctcttttgttctctggacagggtgccagctctgctgcttcttagccttctcccatggtgtttctctacggggaatacacacccctcccacctcaaaaccttgtcctgtattatgctgactcctgccctcccctcagttctcagcctaggtgcttcttgcacagggagcccttgccttgcctggctcctgctgtggctcacagtgcccttcatgttaccctctcaagcactacactatataattatttgttttctctgtgacttccagaagaggctgggccccaggagagcaggcc

SEQ ID NO: 150591 - DNA, 409 bp, Homo sapiens
ttgaatccatcacgtcttcacggacccacactcaccccatgtcctcacttctccccttccccagcttggagtccacgatcaaccactgtaatctctaccatggcatagatccttatcacccttgacccctcaggcttggtcattcttgcttgactaaatcacagttctggttaaatccttctctctcttcacctgttctgtgcttgcacccatgaggccaaatgtgcttggagaaaaccacagcaccatattgtttgtctcactctaagctgatcacagatcttaagtgggcccttgatgctacctggcagtctcattgtgtttccactgtctcttcattcccaccactctctcagacaactgttgcatactttctacttgctgttcaaacatccatggtctccttaca

SEQ ID NO: 150592 - DNA, 185 bp, Homo sapiens
agcattagcctggcccctgcagccaggaagggcacatggagcatcctttgggctgggacaatcagagggcttactagaggaagaaacatttggctggggattttacggagggttttccaggtgagagactgcagggccagaccctagcagggctgactgcctgcctaggcaggacgagatcagca

SEQ ID NO: 150593 - DNA, 337 bp, Homo sapiens
ataggtgggattcctttgtcagatacggcagtggtgggttagaggttagcagttaggctgagactcaagcttgagcttgaccccaaaggtagatgagagcaggatgtattcagaaatactagctacaacagcatagccagaacacagggagaacaaaagaagatggcatagaaaaagcaagtcaagagaatattgtggaagggtttgaacgccccactaagaagcttgatttttttctacatgcagaaatccagtgaaaggggaatgccatgatgggtcttggttctggcaagatgtacaagtagagtcagtatggaggatttattgcaagggtggg

SEQ ID NO: 150594 - DNA, 251 bp, Homo sapiens
ctcctgcgttagccttcccagtagctgggactacaggcacttgagcccgggagtttgaggatgcagtgagctatgatagcggcactgcaccgcagcctcagtggcagtgagaccttgtctctcaaaaaaatttgtaaatgaaaattaaaatacccaatgtaaatgacgagttaatgggtgtagcacaccaacatggcacatgtatacatacgtaacaaacctgcacgttgtgcacatgtaccctagaactt

SEQ ID NO: 150595 - DNA, 435 bp, Homo sapiens
tttattagcagtgatgatttcaagggagtattcttttaaagcaaggcagtatttaaatctttcttttaaatcacaagtcccttgagttgatagttataaaactgggttccactgggagttatttgtacatcttcaaggttggcacccttagttgtttgatgtagatgttctagataaaattcctaaagtccagctgttatgatttagcttaatatgtttgtacagaggggtttcctttgtcattgaagagatagagtcaaaacagaattagtcattcttgcatcttctatttatagcccactattattctgatgcattgtcaaagaatgaagtggacaagaatttttcttcctttctttcttttttttgtgtaaacaaaactctttttatactctgtggatttaactttggttgctaacttagtcagacaaggca

SEQ ID NO: 150596 - DNA, 293 bp, Homo sapiens
attcatacaacataagttatcccaagagagttgcaccagagacctagacctaccttgtaaatgaatagttggctatagtaaaaagaaaagataagaaaggccttgtagttgtgccaatttttccactgttgcacagccatcacctactgtgtaatgcataattggcttgagagatgtgaaagggggggacttctaattgtggagaagttaatgacgcacaaaataattaatccagagcctttgcattgtgttgtttccattttatggttttaggaaagagaatgtgacattca

SEQ ID NO: 150597 - DNA, 444 bp, Homo sapiens
ggacatgggatgccagattctaacccaagattgcttgatgtgttggaattataatggtaaaataaggtctgtgccagccactcattaactcatctgattctcacaagaaccctctgatcttggtggcacaatcatacccatttaccaaagaggaagcataggcactttaagtgttctgtactttgcctgaagactcagctagtaagaacagagttgcaagctggacatgtgcagtcagactccaagagctctaaaatcatactgagttcctcttgaatacaaacaaaaggagttaattatatggttcagatctttgatagcatcagactatgatttcctgttgcagccatttccacaaccagactcatgtttgtctcatgagtcaacaagcagctaaccttggctgggagccatgtggctcctttcaagggactatctactgtg

SEQ ID NO: 150598 - DNA, 264 bp, Homo sapiens
ccaattttggcatcacaaacattgaagctgagggagcagcaatgtctaaacattgaaattcttaagttattttgctttggatttgacttgaaacactgtaatttcccaaaacacccagtactttgactgttctgtcagttttttactttgttgcctgtgaaggcttatgtcagcgtcaagctaactggaggcagttttagttcttatcattatttaatgtcatctcccattatgatttctgacagtctctgaatctaacataaa

SEQ ID NO: 150599 - DNA, 334 bp, Homo sapiens
acaaagaatttgcaaaataaccattggtttaaaaagaagtatctacaatcctacattcaacaatatttatcattaaataatacatctcaatcgacagtttaatagcaccaatatagagtggcagaatgaaatcctctcacatttacaattgagaacttctaagaaatatccttggtaattccataaagggaatgttctaattttttacaaaagtaaagttctttaggataaggatttgattaaaacatcctattgataaatttattttgttagttaaatccaaccaagggcatctttagttgtacccttaaaattagagttcaagtagtcaata

SEQ ID NO: 150600 - DNA, 182 bp, Homo sapiens
tccactcatggtagatttaggtagacatacttaaggctaaatttagaaacttagctgcaaaatgatgttttgtatgacattcaaaagctggattaaaaggcagtaaaatctcttgcgttaagaaacgtattgctgtgtggcgataccttgttcgccgccggttgcggtcgcctgttcgaagg

SEQ ID NO: 150601 - DNA, 193 bp, Homo sapiens
ctagctgagccatacatccctcttttgctgttctttaacttcactgaggtataaggttaacccgttaaaatatttcatgttatatggtaaggaaataagagagtggaaaaataagaattggctaatatatattaatacataatgccacacttcatttgctgaaaaatgagttctctggtcaagcgatactccg

SEQ ID NO: 150602 - DNA, 293 bp, Homo sapiens
gaggcagagatggaggggacacaagatacggactctctggtttgagaatctcgttgttcacccgaagtggtaacaattccctgtcccacccaacagcaagctgcagggcagccatctcagcagggggatcttgacccaaatcagtcaggaagttctgcaaatgagcgaggaggaccgtttctcagggctcccagctcgtgatggcagctgtgggttcctgctgagacaaaccaagttgcccttctggctcatggctggcttcacttcccaaatgtaccaagtggtgtctccat

SEQ ID NO: 150603 - DNA, 289 bp, Homo sapiens
ggggagtctgaaagcagtgtgactgcccatggtaaattttttaacaccctgcaggcacaaggggagaaagcctccctttatgtgatccgtttagaggtgcagctccagaatgctattcaggcaggcatcctagctgagaaagatgcaaaccagactcgcttgcaacagcttcttttaggcgctgagctgaatagggacctgcgcttcaggcttaagcatcttctcaggatgtatgcaaataagcaggagcggcttcccaatttcctggagttaatcaagatgataaggg

SEQ ID NO: 150604 - DNA, 449 bp, Homo sapiens
aaaaatgatatttgtgctgagcatttagaagcaggtggaagttttccagctggatcaagtagagggactcctcagaacaaagacagcagagtagaaaggagcagcaaatgctgagagtattgaataattaagtatccctagatcacagcaaggaagcagtaggctggcaaaataagcaggcaccctctgagtgctttataatattccaaagtgaggaatttgaacttatgtaaacctggaacaattaagaaggtttaacgtattccaatttctttttcataaagatgactacaaattgcaaaggataaagaagatggaagatgaagactaatctgtagggagattttaagattgctttgaaagagtagttgttagagtggggggccgggggtagtgataccatttatcagagtaaagaacataggagtaagagtagatttgtggtaaca

SEQ ID NO: 150605 - DNA, 282 bp, Homo sapiens
cagaatccgcaaacttttcaatctctctaaagaagatgatgtccgccagtatgttgtaagaaagcccttaaagaaggtaagaaacctaggaccaaagcacccaagattcagcgtcttgttactccatgtcttttggcaagagaatgaaggaggctaaggaaaagcgccaggaacaaattgtgaagagacgcagactttcctctctgcgagcttctacttctaagtctgaatccagtcagaaataagattttttgagtaacaaataaataagatcagactctg

SEQ ID NO: 150606 - DNA, 349 bp, Homo sapiens
ggactcactgctctgagacttctttcccagatgctgacccacagtatctcagtgcctttcttatagatttacaatgcctttaaacagattttttaaaatatttcttcagcttttctagttgccttaagtggaaagtcagtctaaaacagctcgtatgccattactagaagtagaagtctccttagtgactttttaacctccaaactctcagtcacatctttttagataccaccaatcttttgaaagattttatatttatgatctctatttcttctctgcatagtcacaacttaatccactctagtctgacttctgcctcaagtatccaccaaaaaagataaagctgaag

SEQ ID NO: 150607 - DNA, 407 bp, Homo sapiens
ataatttaaggcttctctgtgaaagcatcttcaggctttgtactgggtaagtggaaaggcaggaaggcacggaaagagaaaaatgtcaaagaaagcttttggtataaaggggctgggaagtcaggaatcttaagggtaacagtagttgggaaaatagcactatggaagcaaaaaatgggacaaaaaggaccagcaagcaatggtgcatgtttaaatgaagggtttgggagattctacaatggtgatatgtaaggttttacagtatacatgtatgtacatacatttagtccagtcaactgcgtaaagagagccaccaggaggtgccaaggagaggaggttgacagctaatctagcgagaatgtgggaatgtggaggtgggggatacagagacaaaggcacatacaaaa

SEQ ID NO: 150608 - DNA, 510 bp, Homo sapiens
tagagtttcagcttctcctttaggtatatgatatagttcagattaatttttgtgtatggtgtgaggtcaaggtcatggtgaataatatttatctgaaaatggttatccacgggagctaagctatgaggaggtaaagacataagaatgacacaatagactttggggactcagggggaatggttgggaagtgggtgagggatgaaagactacatatcacgttcagtgtatactgctcgtgtaatgggtgcacaaaatctcacaaaccaccactaaagaacttactcatgtaaccaaataccatctgttccccaaaaacctatggaaataaataagttatggaacaaatttctaaccattaaagtgatctgaaaatggaatggaaaaaaaaatggatatccagttgctcagcaccattagttgacaagactttttttttttttttttttttttttttaattccaaccaggggtttccccactttttccatttccaaatttttcctttatatcc

SEQ ID NO: 150609 - DNA, 303 bp, Homo sapiens
aacaaagatcccaaaccgcagttcttctcttacccaggcttaccacacggctctgacacacaggggcacacacacacccaagcatgctttcacggggaccaggtaggtctccaacctctgccacagtctacacgcccatggccaccttgcccttccagatggattgatggggcggcggggagaaggctgttataaattaaacatcgagacactgtctgagcaccaggctctgccatccactcattggctggttccctcccaggaggctgcgggcacacagggtgggggagagggcaggggaag

SEQ ID NO: 150610 - DNA, 330 bp, Homo sapiens
gtttcatgctgtctcactgccagctgcaggcttgtaaacacaggggcgctgtagggaaggcccctgctgtcctcattccgggataaacagaggtttacagagccttgtaaaagaagagggttggctcacgaggacttctcttgctcaagtaagtggggcgattaaagtcgaatagaaagttggaaagatccggagagaaacaatgctgtgagcctcttcagcagtggctgagattacaggtatccagaaaagcagagttgagtttctggttccatttgctcatgttgtgcacacctagccagcagacttcagataagtggtggttttgat

SEQ ID NO: 150611 - DNA, 602 bp, Homo sapiens
gagcgccctgcacccgctgtctctcctggtgcaggccatcatgctggccatgaccctggccctgggtaccttgcctgccttcctaccctgtgagctccagccccacggcctggtgaactgcaactggctgttcctgaagtctaaagaaaaacctgcagatgcctccaaggagtccgaaaacaaatccgaagtcaacgacaagcaatgatggcgatggcgatcctagttaataaaaaggggggagatgtgggcggcaagccatccaggtgccaagccaagagaccgagggcatgagttgttccagtataataaaatatataaaacaacaagagttatactagatctagatcatagatatgattatatatcaatatcattaatcattagttttttccaattataatttattccaatattataataatcttcgctgcataatcataacctaagaaaaaccaggccatacagagataggagctgaggggacatagtgagaagtgaccagaagacaagagtgcgagccttctgttatgcccagacagggccaccagaagggctccttggtctagcagtaacgccagtgtctgggaagacgccccttg

SEQ ID NO: 150612 - DNA, 261 bp, Homo sapiens
ttaaggtgcaatgggagataaacaaggagaaatagctttggatttgaggtagcagtgtgtgtattcaggagaaaagtcttcatgaagaaatctgtgtttgaaacgagccttgaagagtggctagggtgaaagtgatcaacaaagacatagaggtaggaaaggtaagatatagtcagagaaaagggcatcattcacttaggatggagtaaagggtagatgagaggagtaggggaaaatatacacagaaaagatctactgggg

SEQ ID NO: 150613 - DNA, 271 bp, Homo sapiens
tgggacctggtcaatggaggagtggtcattaggggcctcatcactcatcactgggaacctggtcagggatgattggtcagtacgtggcctgctggccactatgtgaccttaggcagggggcttttctctgtcacctccttgcctccatctgcagggaaggtgagtcagggcaccctagagggtggctggaaagagaaggtgagaagatgtgttgaatccaatactgcttgacaaacctacaactttacaaatgacctgtgttccacctaga

SEQ ID NO: 150614 - DNA, 185 bp, Homo sapiens
cccttctgcttggagacatcagtctacctttgctctaggccagaaatggccaaaacattccattcctgtacctgtgcatgcattttgagagatccttaaactaatggtaaagggtaaaaaatgcatcggtggttagggacattcttattttctcttgttgagtgggggcagcaaacttctacatg

SEQ ID NO: 150615 - DNA, 589 bp, Homo sapiens
tgttttaagttgctctgagttctgaaatttacatttgcatttacatttggatttcccaaaaggttcttaatccgtatgctaatcggttacgcaaaggagaattagaggggaagttacaaatgcttaacacactaaccatgtgatcttcataaaatagagaatcagatctgagaactccagaaccaacggcagcatcttcccaagtgcccttttctaaaataaaaatctgatggtgttattcccatgcttaaagcgatcaacggattcccaccatttttattccaaacatctcaatgtttgattttaaatgtcctttcgtggcaaaataaaattaggtggctctatgtcattttctagatcacttttttgaaatattctggtccaggaaatctaaaagtgtagaaactattgcctcagctggcagatcttcacagctctgagggaacaccatttgtgatgggaatcacttttaaatgaggcatccaaaatactgggactggggggcagttcagatatacctgcctctggggtcacacagggcattttaaatgatcccggtctccctttcttggggaaggggcacgcaggc

SEQ ID NO: 150616 - DNA, 306 bp, Homo sapiens
tgttttaagttgctctgagttctgaaatttacatttgcatttacatttggatttcccaaaaggttcttaatccgtatgctaatcggttacgcaaaggagaattagaggggaagttacaaatgcttaacacactaaccatgtgatcttcataaaatagagaatcagatctgagaactccagaaccaacggcagcatcttcccaagtgcccttttctaaaataaaaatctgatggtgttattcccatgcttaaagcgatcaacggattcccaccatttttatttgtttgcaggctgcaaacaagagat

SEQ ID NO: 150617 - DNA, 183 bp, Homo sapiens
atccttttcccattagcttttattaataaaagaattacaattaggtcacaaataaacagacaaattattaattacatgatttgaggcttaggatgaaaacttgtcaaaattagtttgatatacagcaaagttatatgacccactaaaaccaactgttcaatagtttttgccttgtgtgaactg

SEQ ID NO: 150618 - DNA, 226 bp, Homo sapiens
tgatacattataaccttcaaatcctttgaccccgttcaagtttcacccattgtctcaatcaggtcctttatagccaaaggtactagttcagaatcacctattacatctagttgtcaggtctctttagtttcctttaatgtgaacacttccttagcgtttccttgacttccataaccttgacacagatgatgactctaggtcagttacttcatggaatgaccatcac

SEQ ID NO: 150619 - DNA, 209 bp, Homo sapiens
ggaataagatctatggactgtcgacgtcagtgccctgactgtggcattgtactatagttacccaaaaggttaccactgggaaacattcagtgaagggtacactggctcttcattatttctcacaactgcaggtcaatctacaattatctcagaataaaatgcttttaaaaattggctggatgcagtggctcatgcctgtaatcccagca

SEQ ID NO: 150620 - DNA, 607 bp, Homo sapiens
agtggaattgctggatcatgtagtcatggtaatttttgttaaataaaaaagtgttttggtactaaaaagaaaagttggaaaaccacctttaaccatttttgaagtccatattccttagaagaactgcaaagctctcctgcctctagtctcttttctcagctccacctctacgccagctcacactctgaccttccacatgccctggtcctgctgccccacgcccctgtggctccctccggctctcatttctacacatctggacagtcccactcactcttcaagggtctctccaagtactttcactgctggagacatggtggcctgaacattatgaagatctttcctgttaatcacacacctgcagattctgattaaaacaccaaacgtatcatttaagtgcataatcaggctcataagaaaataaggggaccctccagggacgaaagtgaagagggagggagctgcaagatggagaagtgggcaaaggctttgatgacagctgccctgagtgggttcaccctctggacacccagtgctcagttcagtgacctctgctcagggaagaggctggtagccctggactttagtgaggcacagattaggaaca

SEQ ID NO: 150621 - DNA, 296 bp, Homo sapiens
agttaagtttagtcacttatgtaatgccactagagtgtgttgagacagtggggaaatggcatgggataatgaagtagatattgaagggatgttcttagtaagatacaaaatgtctaaggttagtcagatttattagaaagcagggaggccgagtgctgggaaggaaaaagagaggtaaatgacctggcaggaacagatgcagtcttgggagaggaaaataaagtacactcccatgactgcatctgttcctgccaggtcatttacctctcttttcccgggggatcctcaagagtgga

SEQ ID NO: 150622 - DNA, 416 bp, Homo sapiens
atgggagaaatggaaagccaaatacccaagctatcttttagttgagctcccttcctgttaaatttttggccgcaagctcttaaaagaagaaaaactgtttggtgctagtttcacaggcttttctggctccctccaacatactgggcactgtgggccaaaagcaaactggacacagagaaggagagacaggttacaaaaatcaaattaaataccaggcaaggaccatataatggatgccatgacagtgtcctgcaggccaggaagagacacttcatattaatgacttggaaccacagcagcttacatttcctagaatgctcaccctgtgccaatgctgcaggccctttacacacacgccacgatgtggtccatgtgatggctctgtgcgggtgggaggtgtcatcatccttgctcaa

SEQ ID NO: 150623 - DNA, 161 bp, Homo sapiens
agaggatcacatcttaccacaggcattctatcacatttaatatcggtatgcctttggataaaggagaaaaaatttgctgccattgggataagtaaggagatctagattaaggaaagactggttttaaatttctcttcatctttccccatctttccctcctg

SEQ ID NO: 150624 - DNA, 719 bp, Homo sapiens
  misc_feature (719)..(719): n is a, c, g, or t
tccaatttctcctcattacaccttagttaaaaatccaaattcctttccttggtcttaaatgccctacacatcagtgattcacaaccctagtcatatattagaatcatctatggaggtttttaaaaaattattcatgcttaagctccatcctggacctattaggtcagaatctggatgtgatgctcaccaaaattttaaaagcctaccaggtgattcttcttttttgtcgttgttggagacggagtctcactctgttgcccaggctggagtgcagtggcgcaatctcagctcactgcaacctctgtctcccgggttcaagcgattctcctgcctcagcttcccaagtagctgggattaaaggcgcccaccaccaagcccagctaatttttgtatgtttaatagagatggggtttcgccttgttggccaggccagtcttgaactcctgaacttgtgatctgcctttctcggcctcccaaagtgctgggtttacaggtgtgagccaccgtgcccggccagttctacactaattctcaaatgagatcactacacaatgagaactttgctatacttaccctgttgccattatagtacaaaaccacaatgtatctgttacaaacattgaatcccgataggtgatcccatgcattcttggcatcaaagatttctcatagacccataagctgtgccctagttcaggtgttccccaccttatttgacn

SEQ ID NO: 150625 - DNA, 243 bp, Homo sapiens
gacatcttctccagctgtctgggaagggctcctctccacgctgtgcccttcccagacatcttctcagggtgggtcctcccccagactccctccagggggaagaaaacaaagtatcatccatttttctggtaaaagtacagtgagacaccagtctcactggtgacagagagagactctgtctctaaaaattaaggagaagaaaaaaaacttaaaaacattaagtgcagggagagaaaaggtggg

SEQ ID NO: 150626 - DNA, 685 bp, Homo sapiens
caaaagactacatataataccatttatatgacataccagaaaaactatagggacagaaagcagatcagtgatttccagggaatggtggtggcagaaggagttgactaccaagggtcacatggaattctcagggtaatagaacagttatttaatttttatggcagttacacaactctgcttttgtgaaaatgcataaaattgtatatgtggggaattttactatgtaaattatatatcaataaacgtgactcgtctaaataaaaaatttgtaccaacaaaataaaggagaaaacaatcatctcaatagattcagaaaaatgcatttgaaaaacttgttaaaaatcataacaaaaataaataaaaataaaaataatatcaacacccattcgtgataagggctcttgacaaactaggaatggaagagattttcctcaacttgataaagcataactatgaaaaatttacagatagtatcattattaatggtgagatatgcgcttttcctttaaaatgttaataacaaagcaagaatggccactttctccagttctattcaatattgttatggaggccctagcaaatataagaagacaagacaaaaagatagtagatttacaaaggaaaaagaactgtatgcacagacaaagtgattatgtatgcaaaaatcccaaaggaatttataaaa

SEQ ID NO: 150627 - DNA, 466 bp, Homo sapiens
ccacaaagagcagacagtaaaacacagataagacagcttgagcacagagggaggtgggagggaaagtctcttaggcaactgccaaactttacccttatacatggggcccagtaaaacagtgggccttggtaagcatattcctttcccttcatgtgtgctaagatagggaagctaaaagcagactcgggggatatgcctgcagttgcagaaagatgtatgggaacagacacacaactctccctcccaggtaagcacaacaaagagacacagaagcagtacaagcctctgataaactctcccactcagaatccttaaaaactcgtggcctgtaagagagtgcagtttctgatctaattcagtcaaaagtccctcccaggtttgaaaacctgttgactgtcgagccaccctttgtgtttctctcctctttctttaattcttacaatcacaaattattttctattaatga

SEQ ID NO: 150628 - DNA, 551 bp, Homo sapiens
  misc_feature (7)..(7): n is a, c, g, or t
agagagntgaatgagaaaagtcccagaagtgcagaagacttgggtgattatctgagggtttctttccttatcacatgacagagctcttgaagccttggctaggaattctaggcttttagattctttgggcaatggctactaaatgttcataatgttgctcagttgcaaaaacaagacattcaaactatagccaggcacgtcactactctgcatctaaacaagaatctctaaaggtggaaagtgaagtgaaaaagtaggcaactcacctgattcttcatgttgtcccacttcatcaaattgctgaactttctgttctgccttggccaggtagatttttgttgactgaaggtaaaataatgatgcttttgcccaagtaacctttgcaagacttacaggttcagtggctaaagccaccctgaaatcaatatactaactgtctgtttactggaagggtttacttattcaacaagagatacgtcatcacaggcctgaaaaatcgatgtgttctcctggcaatcctctctaaacctgcagcacctagataacaactg

SEQ ID NO: 150629 - DNA, 446 bp, Homo sapiens
catgtgataaggaaagatggactcagataatcacccaagtcttctgcccttctgggacttttctcattcaactctctccctgacaccaggcacgtcactactctgcatctaaacaagaatctctaaaggtggaaagtgaagtgaaaaagtaggcaactcacctgattcttcatgttgtcccacttcatcaaattgctgaactttctgttctgccttggccaggtagatttttgttgactgaaggtaaaataatgatgcttttgcccaagtaacctttgcaagacttacaggttcagtggctaaagccaccctgaaatcaatatactaactgtctgtttactggaagggtttacttattcaacaagagatacgtcatcacaggcctgaaaaatcgatgtgttctcctggcaatcctctctaaacctgcagcacctagataacaactg

SEQ ID NO: 150630 - DNA, 435 bp, Homo sapiens
gaaataaaaatttcacttgaagtagattaatcaacttaacaatgacaattggatgctttccagttttaatggtaagggtagaagaaaacaagaggattctggatgtctgaaaaagagtactgggtaggagaaaacgaagtacagaaaagggattgtggtgagttaaaaccatcacaaatcctaagagggattcaacagaaaatgtccaactggtgaactacaatagggtatgcatattaattatattaaaatatggatataaatttcaggaatccagggtggggtaagggtggtaggagaaagcaattttttttttaaaaaaagtaataaactgtctgggcacggtggcttacgcctataatcccagctattcaggaggttgaggcaggaaaattgcttgaacctgggaggcggagtttgcagtgagacgagatc

SEQ ID NO: 150631 - DNA, 245 bp, Homo sapiens
gatttatgaaggtactgtgagaaataaatgaggtaaaattggacattgttgttggatccttggtgtctgtatgaaggtgctgggtcagatacagtgtttggtacacagtaagttgtcaatataaggtagcaagaaaaattgtgcttaaaacgatgcgacccgaatgaaatattaggtcattaaaagccccgtggagcattatcaagtgtgaaaacaaacatttccttttccttagagaacttggt

SEQ ID NO: 150632 - DNA, 274 bp, Homo sapiens
atggagccccggggaagggatgctgagggaccgaggggcatttcaggtgctggagggggaggtgatgagagcacagggaggggccggatgagatgcgggtttagcatttctctgaacataaaatgtacactttcctagtcattcacaaaagcagtaaagaatatggagtaagtacattgtttagtagaaaagagcagaacagacccaagcgctgtctatacacaggaggcaggtggcgcgtgcacggctccccggtgggcctggcggcatctgg

SEQ ID NO: 150633 - DNA, 206 bp, Homo sapiens
tcacagtgagccaagatcgcaccattgcactccagcctgggcgacagaacgagactccgtctcaaaaaaaaggacctggaaatgggttgctggaggataacattttttaaattagcttttgagtaccaccatactgttttccatagaggttgaaccattttacattcctttggacagaacacatgagttccagtttttcaacattc

SEQ ID NO: 150634 - DNA, 839 bp, Homo sapiens
tcagggagaagaaaaatatccctttactcacacaaagcatttagtaggtttagcccctttactgaagaagattggggcatcacctctcacactgctggctccctggatctctgtatattttcctcttccatctttcttcctctcaatctactcacccttcctacccaggaagaggcacaaattcctcatcctcagcagagagatttggtggtcctcttttgggaattccccttacacctcaagtatgtcattacgatgaacattgtatttcccggcgggccattctaaccctgtgctgtgaccaaggagccagcttgctccctctgtccctcagccaccctcggcacggtatcgctgccccgcctgctggcttctttgctacaggatagcaatagcacttctcacatcacatgcagacacaacaataatcagaggaagagacatctgtctttttcttggtttttgctttttttttttgagaaggaagaaatattttccgagaaatttctcagcacacacctctcagaggacattggctaatgctgtgtcacatgcctgtgcttaaaccagtcacctgcaaggggacaggaccgtgaggattggttcactcagactaaaacttgctctttgggcctagagataggctccacctcaaggaagctcagggccatgtgagggaggcaggtagattcctaaacacaattggaattccattaacaaggaggaaatgaatttggggtagacaatagcatctgccacattgactgcaaatgtgaatatgagttagcaggagaaaaggagggtgtacttctaggaaggtggaagggcattcagcgata

SEQ ID NO: 150635 - DNA, 466 bp, Homo sapiens
acttggttgaagctcctttttacaagccctcatagcaacatgtatctctcctgcacatttacacacttaacactcacgtttaattattttttccctgcgttttaattcctgaacctctttattcccgctaacttccactctaacttcaatcattccttcttgaagaagcaaaagctcaagacccagagtctaaagctgcaacagaccaagccacctgtaatatcgggcacagtgaaaatttaactgggcttttattttactaggactgtaatttttgtagtgttctgattaatgcctacaaagttcccaaggttttaaggggttgctccagctttatagtttgcataagtcctgttacttttagcgcattgattttgtggaaaacatggttttccagccacgcattcaggacattattgcagaaacaccggtatcttcctccagaacacaccatcctgttctatcc

SEQ ID NO: 150636 - DNA, 434 bp, Homo sapiens
cttgaaatcctgacctcaggtgatccatctgccttggcgtcccaaagtgctgagattataggagtgagccactgtgcccggcctattattttttaaatattctttatctgtggttggttgaaatgatggatgtagaacccatgagtttggagtgctgactgtacatggggttcatgctagatgagtagatttatgctgctcttgccagaagaacaaaaaccaggtgctagatatgttcatttgcttcatggtggtgacctttttactatctaaatgtgtaccataacactatattgtatacgttaaatatacacaatgacatttctttaaaacataaataaacaggccaagcttggaaggctatatttcaaaacgttatgagaagctctctctgggtgttggggtttgggtattatttctctcttttttgtttg

SEQ ID NO: 150637 - DNA, 436 bp, Homo sapiens
gtaatagttaatagtgaaaaaaggaaaaaggtcttgagatcaaatgagtctgagaacttctaatttattacattctggttgaggtttatcttctgggtaaaacttaatgcttgtattcattacagcaaatgctgttatgaatgtttaaaaacttaatccttaaaacttagacaaaatggtagttttttattatagaatgtggtgttaatttcttcatctagcactttaaatgcaggtattttttttttttcattacaaggaagtaaaatgtacctattctttttcttcatgataccttttttcttggtcttcctcatgttcttctgcctattggtcttcgaaccagaaaactttcagcgtttacccactattttgaacattattgatcggccttcattatttatattagtttctttggacagggtatgctctctct

SEQ ID NO: 150638 - DNA, 250 bp, Homo sapiens
gattttctctgcttttagaaaattgtaccctgttaggagggtaggagacagagacgtcatcttcgtcaagtaatccaaaggatggaatgtcctgagaccaggctatgcccttctcagttgtgagtttaggcacggggtaggtggggtttgagtggctgtggttatgtctaacagctgggctgaagtctccgtctttaagtcgtcctttctatcctttagagcaaaacaatgttcttgtaggcctttcatt

SEQ ID NO: 150639 - DNA, 1154 bp, Homo sapiens
cacattcttacagaggagatggagcgttatgagcatagtatgtggataggtatcttcacctgcccgcccctgagtcagcctccttgacttgatagcttgaagaatccttttccactgaaatagaggataattaattgacacatctgaaatccccaatcaatcaatcaagagaaaggtagaactaaaaactccttaacttactgttgcttacacccctgaaagtctgtttttaagcaaatgggtaatagtagaaaataggttagaatctatggcttgattaaaaatatgttattacattatcatgttcaggattaggattagtagtcagttgctgtaaactattttgaacaaacagaaaagaacacggaaacatttttaacagagcatttaattatgttggaatacaggatcctagctctgtctgggaacattagcttatgtgagccagctctatcagggtcttcccatggtggttcagaatagatgagcatagcatggttttgtttgtttttgctttcaattttctaatttggcatggatccatatgtatttactatcctttttctaatatattaatatatgctacatttgtatttgcattactataatactttgagttgaaaaagagtttcattgtggagagaaaaagcaaatggtatgccacaagatcactctgatttgagaaaagggaggaggggaagatagtctgaatggaaatctgaaatacggaatgttttagagaaatatgtcacttgcatatagaatgttttaattgaggtataaattaatgagacaaagtgaaaaagaaattatattcagataggactgcactacattatttgtcacacatggatctgttaccatcaggtcaattcctagtatgcataaattttttaacccttttaaaagagacctatgttgaaaacccctgaaaattcactgaagaaaaatcattactctttttctcagtaaatcatatcatctgaaatattacaaatttcaaatttctaggtgctatattaattcaatattacaataactcttacctaattattcttacaagttttaagttgtggtagtttagtgatttttttaaaagatgtgtgaaatgttctctgcaaaataattcaggccactgtctccttttatatatt

SEQ ID NO: 150640 - DNA, 1099 bp, Homo sapiens
cacattcttacagaggagatggagcgttatgagcatagtatgtggataggtatcttcacctgcccgcccctgagtcagcctccttgacttgatagcttgaagaatccttttccactgaaatagaggataattaattgacacatctgaaatccccaatcaatcaatcaagagaaaggtagaactaaaaactccttaacttactgttgcttacacccctgaaagtctgtttttaagcaaatgggtaatagtagaaaataggttagaatctatggcttgattaaaaatatgttattacattatcatgttcaggattaggattagtagtcagttgctgtaaactattttgaacaaacagaaaagaacacggaaacatttttaacagagcatttaattatgttggaatacaggatcctagctctgtctgggaacattagcttatgtgagccagctctatcagggtcttcccatggtggttcagaatagatgagcatagcatggttttgtttgtttttgctttcaattttctaatttggcatggatccatatgtatttactatcctttttctaatatattaatatatgctacatttgtatttgcattactataatactttgagttgaaaaagagtttcattgtggagagaaaaagcaaatggtatgccacaagatcactctgatttgagaagaaatatgtcacttgcatatagaatgttttaattgaggtataaattaatgagacaaagtgaaaaagaaattatattcagataggactgcactacattatttgtcacacatggatctgttaccatcaggtcaattcctagtatgcataaattttttaacccttttaaaagagacctatgttgaaaacccctgaaaattcactgaagaaaaatcattactctttttctcagtaaatcatatcatctgaaatattacaaatttcaaatttctaggtgctatattaattcaatattacaataactcttacctaattattcttacaagttttaagttgtggtagtttagtgatttttttaaaagatgtgtgaaatgttctctgcaaaataattcaggccactgtctccttttatatatt

SEQ ID NO: 150641 - DNA, 750 bp, Homo sapiens
gggggagggggcgggctccggcgggtgcagcttatgtgagccagctctatcagggtcttcccatggtggttcagaatagatgagcatagcatggttttgtttgtttttgctttcaattttctaatttggcatggatccatatgtatttactatcctttttctaatatattaatatatgctacatttgtatttgcattactataatactttgagttgaaaaagagtttcattgtggagagaaaaagcaaatggtatgccacaagatcactctgatttgagaaaagggaggaggggaagatagtctgaatggaaatctgaaatacggaatgttttagagaaatatgtcacttgcatatagaatgttttaattgaggtataaattaatgagacaaagtgaaaaagaaattatattcagataggactgcactacattatttgtcacacatggatctgttaccatcaggtcaattcctagtatgcataaattttttaacccttttaaaagagacctatgttgaaaacccctgaaaattcactgaagaaaaatcattactctttttctcagtaaatcatatcatctgaaatattacaaatttcaaatttctaggtgctatattaattcaatattacaataactcttacctaattattcttacaagttttaagttgtggtagtttagtgatttttttaaaagatgtgtgaaatgttctctgcaaaataattcaggccactgtctccttttatatatt

SEQ ID NO: 150642 - DNA, 436 bp, Homo sapiens
aacctcgggaccttacatccccacgatcacctctggaaagagggatggctgcaaggatttctgctgtggggccctgcctctaaagatacccaatacagtgacagtagccttctcctaccttctttttactttttgctggaatgcagtggtgcgatctcggctcattgcaaactctgcctcctgcaattctcctgcctcagcctcccgagtagctgggattacaggcacgcaccaccacgcctggctaattttgtgtatttttagtagagacgggattgcaccatgttagccaggatggtctcgatctcctgaccttgtgatctgccgcctcggcctcccaaagtcttactttttaaaatgtcttataattgttgattaaatgtcagatgttgcatgttaaagaacagtagaaactgaggtaaatagtatttatatc

SEQ ID NO: 150643 - DNA, 266 bp, Homo sapiens
agcttattttgggagaggccagccgccatgtcatgaagacactcaagaagccctgtgaagaggaagcaaggcctgccaacaacagccagcaccaactttccagccaagggattgagccatctcacagtggatcctccagcccccaccaagccttcatatgaccaaaccaacaccaacatgtaactgtgacctcatgtgagtccccaagccagaatacccatctcctgtctcagaaatgatgagaaataataaatatatgtgctcac

SEQ ID NO: 150644 - DNA, 332 bp, Homo sapiens
attctcaggtgtgtgttgatagaaacgtctgggaaaattgagcctcttggctttgcatctgtttatcatacacaagcattcattgaatgatgtgctttgacataacaaaatctgtacaatcatcaacacaattaagacccattatgaatgaacgctttctcagatgagcgaggggtgggcagaaggcatggcccggaatgtcattattcccttgtatcttcaacctcccaggattttacctaaagaaaggagagtcaaggagagatgtttatgtgccccaagggccatgcttttcagtagcaagaggtccctgcctgtgatagaaaaaaaga

SEQ ID NO: 150645 - DNA, 191 bp, Homo sapiens
agaggtggggctctgtgtgtcagccttcctggaaggcacttaaatgagttcacagaaggcaaagtgaaggacatacgtaggtgactcgagtgtccaccatcgacctgttctgcaacccagctgtcaaaatcctgccccaagctctttgacataagggtacttctggtagaatttttttaaaacttaattac

SEQ ID NO: 150646 - DNA, 523 bp, Homo sapiens
ggactcattccaggagagtgccgtgggggtgaggctgtgccactctgggcctccgcctcaagaaggcctgacagcctcggtgtttgctcccttgggagctttgagcaccactcaagtcgtccaggtggagaggccccatggagagggacaggccctgagatcacctggaggagaagcgaggcctgaccatcacagcatcagagccaagcctccaatggcttcatccccaggaccatcttctcaagagaccccaagcaagagcagcagaagacccacccagctgagccccgccaccccacagagccatgcaaggtcacataatggtcatttttagggcactgagtttgaatgaccagaacagagacttgctgctcttgaggacatgaagaaggtgccccagcttctcattcctctctgcccaggccagtgatctgaggctttctgtgggaaatgaaacatagctcctgcctggcccttaggatacacacgtcattcaaaatccctagcctaagaaaatcaatgc

SEQ ID NO: 150647 - DNA, 553 bp, Homo sapiens
tttagacagagactccttctggcctgagtgatgaaggaagactgtctcaataaataaatacataaataaataaaattataacaatctcagaaggcatgacacctctaggacccattctcatcctacatcctcctctttctggtgctgagaaaaaaaagaaaggaaaaagaaaagtcaaaagaagagggaaggaactggtggtgattgactagcagactggctgaaatcagtgggaacccgtatggctgactgcaatccgcacagaacgagcttgctgatgtcacagcctgaatttccacctgctgtttcatactaacgccaccaaatttgcacatgcaacccacgaagaaccttggagataaccggacatgattaaggactttctagacttctcctttctttccaccaatcacccgctaatcccagaatcctccccctaaaccttttctaataaaagtactgccttaagaccagcaaagagagacagatttgagctggattcccgtatcctcgtgggtcagctcacaataaagctttccttttctcaaaacct

SEQ ID NO: 150648 - DNA, 849 bp, Homo sapiens
  misc_feature (248)..(248): n is a, c, g, or t
  misc_feature (283)..(283): n is a, c, g, or t
  misc_feature (297)..(297): n is a, c, g, or t
  misc_feature (300)..(300): n is a, c, g, or t
tgcggagccgccggagacggtcgggtttgccagggccgggcgggaccgcggggaccatggcggagccgcctcggctacctctgacttttgaggatgttgctatttatttctccgagcaagaatggcaggatctagaggcatggcagaaggaactttacaagcatgtgatgagaagcaattatgagactctcgtctctctagatgatggacttccaaaaccagaactaatatcctggattgaacacggnggagagcccttcaggaaatggagagaatcacaganatcaggaaacatanttngctcctctgttgatatgcattttgatccaggttttgaggaacagctgttttggggaagccagcaggctatgaattcaggaaaaactaaaagccatttccaattagatcctgaaagccagtgttcctttggatcctttgtttccttcaggcctgaccaaggcatcaccctcgggagcccacagagacacgacgccagggctcctccaccactagcctgcggccccagtgaatctaccctaaaagaaggaatcccaggtcccagaaatctggatcttcctggtttgtgggacgtccccgcctgggagagcacccagcacccttggcctgtctgcggggaaagctgttgggagaacaaccatttagtaatgcaccagagaggccactcaaaggaccggacacgtagggcctgggagaaattcaacaagagggcggagacgcagatgccgtggagcagccctcgggtacagaggcacttccggtgtggcgtgtgcggtaagagcttccgccggagctggtgtctgctgcgccatctggcggcccacacgggga

SEQ ID NO: 150649 - DNA, 440 bp, Homo sapiens
tagagaaggggtttcaccatgttggccaggctggtcttgaactcctgaactcaagtgatccgcccgcctcggcctcccaaagtgctgggattacaggcgtgagccactgcgcctggtcagaaaagctgcctaaacagaaacaccattgaagaaaaaagagattgcagtcttctctgtttctgccatgttgaagcttggatacattgcttttgtgtcttctgtagaagaaatcatttgatttgtttatttcttttctctgcaatatgtgaaaagtaaatgttggtggtgtctagtttattttaaaaaaaatagtgcattcctcaatgcagttggaagggctaagatttaaataacattgaaaattataactgaaataaagcagagtgcgccctgaaccccctcccccctccacccccaccacctccgctcccacccatccc

SEQ ID NO: 150650 - DNA, 527 bp, Homo sapiens
  misc_feature (510)..(510): n is a, c, g, or t
  misc_feature (518)..(518): n is a, c, g, or t
tagagaaggggtttcaccatgttggccaggctggtcttgaactcctgaactcaagtgatccgcccgcctcggcctcccaaagtgctgggattacaggcgtgagccactgcgcctggtcagaaaagctgcctaaacagaaacaccattgaagaaaaaagagattgcagtcttctctgtttctgccatgttgaagcttggatacattgcttttgtgtcttctgtagaagaaatcatttgatttgtttatttcttttctctgcaatatgtgaaaagtaaatgttggtggtgtctagtttattttaaaaaaaatagtgcattcctcaatgcagttggaagggctaagatttaaataacattgaaaattataactgaaataaagcagaattcctgacttttctattgttcagtaagttctattgatttcctctgtgatatctttggcaggcagagtctcccttcattattctaaatttggtgaaataaaaattgtattagtttttaataaaaagnggcctcgntggcctcaa

SEQ ID NO: 150651 - DNA, 2308 bp, Homo sapiens
tctatcatttatgagtactatgtccataggaaagccacttcaactcactgtactttttcttacctgtaagagatcaaacctgataaagtatcaggtttattccagctctaacactctgaaatgccacaaaatgcactccccaataaattaagattaaaggaatgcccaaaccccaaacatgatcattgtgatcatttcttatgaaacataagaatgagacataagaattttatatgagatactggcagaatttgctgagtcagtctcaggcaacatttaataagtaaatatgcagctaagcagtggactataatgcttttacacagccagaaaatagcaatattcctaaaattaatgaaagcatacacaaatccactcaggatgctaggacacaggcagctgaatgatatgagcttataatctattcttcccagactatttatcttatcacagcaacaccctgaagccacatgcaaaggatgaaccagactccccagtgctctatagaaccatgagtgaagcagctctggtgagaaaaaggatgaagcctctgatgatggacagaaaagaaagacagaaaaatagagcctctattaatggacacttctataaccatgaagtaagtgagttacaattccattaatgtaatataaaataaggttccctgtttcactaacaataccacccaattcaattcacaatttaaagtcataataataacagtagcatgtctaacatcttgggggcactctctatgtgctagatattaaagtaaatgtgttttaaatagatttttactgaattatcttattaatcactaaaacaatcctatgaaataggtaccattattttctttacttgacatataagctaattgaggcttatggagattaagcaatttgtcttagattatgctactcttaagtagtaactctcaacctgaacccagctttgtctgactccagaacacaagtttttaaccaccatgatgggtgaactctatcactgtgccaagtattaaaaacatgcagatgaggcagccgatgtctcagccagcacggagctcagggattgagcagggaaaccaacataccaacaataatactggaataatgtaagtgctacaaagtggttggatcaaaggacatttgaacgtgaacatttaaataaaaggaaaaagccacaggccaatttattccaataaatcaaacttctcatgttgccatgttccaggtcttttacctatacacataccgtttttatataagtgtagttgtagtttagatacaattcacattctgctttttcactgaatatgtgttaaatttatatgtgcctttccatagtgcttgtaagacattacattttgctgaaggtaggaaatatatcatcatttttttccagaactcaaatatttttcatgtgatgtactttagcaatcattcatcgctccatctcataaatacttagcacttacactgtgccaggtatcttctgaggcctttaataagaaataggaactcattgctttgtaggctttttcctgtaaggatttctactttatttcttcttcttctacccttggggggtaacgatagtgtgtctttggagcctggtggggagaaatctctcttctcaattatttattcatatcagaattttagggttccagaatcattctcatagctataaagtagcattgatagtcccccacagagaggtacctaccaattgtcctgtttccctcttcacagaaattgtgttgtatgtcattatcttgtggggtaatttgtgttgaagaaggaaagccacattgctccaagcaagtggctttcagattggatcacttgtgctggaaatgaaattgacactaggttggcagcacggaatggtggttaaatgcttgggccctggagcttgacagcctggttttacattcttgctgagcaagtttcattcttcttactttacaaggctgttgatgggatggaatgaaatgaggtaagttcagcataagaatagtacctggcacaaaagaactcggtctacattagcttatgttgttgctgttgattgaatgagctcaagctgggactatagatattttacacaaatgtcattcactgcaatttaataactagcagaaaacaatacaaacaaaaaagaaaaaacaaagcattctatcaacaattatacaatgacggacatctaggaattttagtggatatgtttcttaagttgctgtgtgtcgtaagatatgtttttatactatgaagccccttgttaatgccaatattgttaggctatg

SEQ ID NO: 150652 - DNA, 664 bp, Homo sapiens
gcggagtcccagcccggcagagacagggcactggtttccctctaccagagttcctgacccagccgagaacaaaccgcgaagcaagttcagcccaacaacgatggtgaaaagggtcctcctgctcacagtgtgaataacaggtaaaaaatggggatggggaaaaaaactttctaatccactccctggggtcatgttgagggcaagttattagaaagcagaatccataggcaacaaagttaagtgtgtgtgtgtcatagcagcctgaatcgcacacatgccttttccttttgattttctcagaatatgctttcctaaccaaggtaagcttgtagggtgggagggagagaggggaaagaagggagggaaagggtgcagagaagggcttggaggtaaatgtgaccataggacccctcctccctttagttcaatgagcccttcacctgtaattgtgcctggcaaaaatcgtgccttacaaagatactagacttctggatggcatactccttcctctgagtatccttatggttagaatattgtgttgaatcatcgcactggaaagaacttaattgagggttcagctcaacttttatttgtttctgcaaagtgacagaaagcatgccccccaccaaaaaaaaaatgaattttcaatataagcgctcaccaa

SEQ ID NO: 150653 - DNA, 2407 bp, Homo sapiens
cagggcactggtttccctctaccagagttcctgacccagccgagaacaaaccgcgaagcaagttcagcccaacaacgatggtgaaaagggtcctcctgctcacagtgtgaataacaggatatcctcagaccatctcaaaaaggaggaaaagatgactatgatggctcaccagtacccctcttggatcttcattaatgagaagacattcataaccagggaacaacttaattctttattgaagacctataacattttttatgagaaccagaaaaatctgcatattttatatggagagactgaagatggcaaactaattgttgaaggaatgctggacattttctggggagtaaaacgacctatacagctaaaaatacaagatgagaagccattctcttcttttactagtatgaagtcatcagacgtcttctccagcaaaggaatgacacgctggggggaatttgacgatctctatcgtattagtgagctggacaggacccagattcctatgtctgaaaaaaggaattcccaggaagactatttatcttatcacagcaacaccctgaagccacatgcaaaggatgaaccagactccccagtgctctatagaaccatgagtgaagcagctctggtgagaaaaaggatgaagcctctgatgatggacagaaaagaaagacagaaaaatagagcctctattaatggacacttctataaccatgaagtaagtgagttacaattccattaatgtaatataaaataaggttccctgtttcactaacaataccacccaattcaattcacaatttaaagtcataataataacagtagcatgtctaacatcttgggggcactctctatgtgctagatattaaagtaaatgtgttttaaatagatttttactgaattatcttattaatcactaaaacaatcctatgaaataggtaccattattttctttacttgacatataagctaattgaggcttatggagattaagcaatttgtcttagattatgctactcttaagtagtaactctcaacctgaacccagctttgtctgactccagaacacaagtttttaaccaccatgatgggtgaactctatcactgtgccaagtattaaaaacatgcagatgaggcagccgatgtctcagccagcacggagctcagggattgagcagggaaaccaacataccaacaataatactggaataatgtaagtgctacaaagtggttggatcaaaggacatttgaacgtgaacatttaaataaaaggaaaaagccacaggccaatttattccaataaatcaaacttctcatgttgccatgttccaggtcttttacctatacacataccgtttttatataagtgtagttgtagtttagatacaattcacattctgctttttcactgaatatgtgttaaatttatatgtgcctttccatagtgcttgtaagacattacattttgctgaaggtaggaaatatatcatcatttttttccagaactcaaatatttttcatgtgatgtactttagcaatcattcatcgctccatctcataaatacttagcacttacactgtgccaggtatcttctgaggcctttaataagaaataggaactcattgctttgtaggctttttcctgtaaggatttctactttatttcttcttcttctacccttggggggtaacgatagtgtgtctttggagcctggtggggagaaatctctcttctcaattatttattcatatcagaattttagggttccagaatcattctcatagctataaagtagcattgatagtcccccacagagaggtacctaccaattgtcctgtttccctcttcacagaaattgtgttgtatgtcattatcttgtggggtaatttgtgttgaagaaggaaagccacattgctccaagcaagtggctttcagattggatcacttgtgctggaaatgaaattgacactaggttggcagcacggaatggtggttaaatgcttgggccctggagcttgacagcctggttttacattcttgctgagcaagtttcattcttcttactttacaaggctgttgatgggatggaatgaaatgaggtaagttcagcataagaatagtacctggcacaaaagaactcggtctacattagcttatgttgttgctgttgattgaatgagctcaagctgggactatagatattttacacaaatgtcattcactgcaatttaataactagcagaaaacaatacaaacaaaaaagaaaaaacaaagcattctatcaacaattatacaatgacggacatctaggaattttagtggatatgtttcttaagttgctgtgtgtcgtaagatatgtttttatactatgaagccccttgttaatgccaatattgttaggctatg

SEQ ID NO: 150654 - DNA, 525 bp, Homo sapiens
attaaaagattgttttctgtcacctttattttgattcattctttaactccttcaatatgtatagtattttatatttttatatcatttaaaaagttatattaggatcataaaaattttttgagtagaaaaagaaggcatggttatacccattttgtcaatggggagactgaagttcccgctgatgaaatcagctccctaagaatttccagaattaagaggggaagcttcaagaggattgatggtctttagtctccaagccaggtcttttcccaacatcccttcttgcctcttttttatttttgagtatatgttgtcaaagttctgaatgtaaaaagcaaaaatctatgtgtcttggattaaaaaataaaatttcaaagacaagtatattcaaatatattaaaataagtttttcagttaattttctactagcattatattctcctatttagtgtctttttgcactaagctttgtaaacattatatgatattaaataaaatggtagaactattgaaatgttaacagta

SEQ ID NO: 150655 - DNA, 326 bp, Homo sapiens
ccttaaaacaatctctcttctacttttccatctgtgacctcttctctagcttagagatctgagccgggaatttgaaaagcatcctctattcctttttccctcttaactacacttctgttggtcacaaaatcctctcaattctactcataaatatctctggattccttttcctccattcttctccagaaatatttagaggcagaattgagatttggggtggtacctaaattttcagtctcatatcctgactagttgtatctaccagcactcaatgttggtacctaatttaagccaggactgaactgatgtgactcttctcatataat

SEQ ID NO: 150656 - DNA, 243 bp, Homo sapiens
ttctttgggttgattttaattgctgatcactgagcttcctgtacctagacagtgtcatctttctctagatttgggactttttcagccatgatttgcttaagtatgctttctacacccttttcttcctcatcttcaggaattcctattatgcagaggttagtctgcttgatggtattccacaattcttgtaggtcttctttacccttttttattcttgctcctctgaatgggtaatttcatatg

SEQ ID NO: 150657 - DNA, 219 bp, Homo sapiens
cgtgggtccttacagaggtgtgtgtgcgtggttctgcagaacaccagggcccgccaccctcttcctcctccatctgctccatgtaggtctccctccctagcctaggttatcagttttctgaatgccctgttgatgtccccaaccaccctggaagccccagcaggtgccccacagtgcaaacaggcggaaaggctacaaatctgccaaggaagccccaca

SEQ ID NO: 150658 - DNA, 231 bp, Homo sapiens
caaccataagtatgtgttaaatttaatgtgaagtgtgagtaaaaatatctttaggagaaaaaagtctgtgttcctcatatcttggttggaggcgatggtcaggaaaggcttaataaagggaaggtatcagttgagaaaagccttgagcagcaggcatagtttttttgatagactgagatgggaatggagctgcgaccagttatatcggggagtatgagggaacacacacag

SEQ ID NO: 150659 - DNA, 338 bp, Homo sapiens
aaatacctgccaatgatgggttccaactcattctgtcactgggcaccttgcaattcaaggtgacctgcttcttagtaaacaggcaatagaacgttaatgatcagccgaggatggaaagtcacaaagctcagccctctcatattgagaagaaaaacaatgaaattctgagagagctcagaatttccctggaggcagggtgcccaaagctgcatatttactgcttcaagcccttagcaaaagacaaagggttggggtggggggcgtgcttgtcaacccagacagcatctccatctcagttttgcttgtgtttttgtttgagacagagtctcactctgtta

SEQ ID NO: 150660 - DNA, 481 bp, Homo sapiens
ctcccaaagttctgggattacaggtgtgagccactgcgcctggcagaatgtttgattttttttttaagtggacatcaaatttattttcagttaaaaatgctgaaagtaatacatttttacttcatctgtcatagtgaatgttgataatgataaaatcttatttctctaagcactttgccatagctaaataccttagtaaaacatgcgatagacaagggtccggtcactagccacagaaaggctgtcactgttatagcagaatgtaatagggaaggaacattttatgcctcaataagaacagtgtatttgcttgagatagtaataacctctgagaagctgattaattggtaatcacttaagttagatgattttatattgtttgatgtcttataatctaaacgtccctgtgctcttttagagtgtctgccttgaccagtcagcatttcaggagggattgtgactgtcagttaagtgctttgaa

SEQ ID NO: 150661 - DNA, 503 bp, Homo sapiens
gcctgtaatccctagaggctgaggcaggcggatcactgaggtcgggagttcgggatcagcctgaccaacatggagaaaccctactggaaatacagagttagccaggcatggtggtgcatgcctgttgtccccaggttgttcaggagcctggcaacaagagcaaaactccagctcaaaaaaaaaagaaagaaaagaaagctggagctggtggcttaggccatcacctttcccttggctggaactactggacagaccccttttgagattgtgcctgtggtgctgtggagatgtgtgtagtggtctaagctctatggtggagcttgtgtatttgcttgagatagtaataacctctgagaagctgattaattggtaatcacttaagttagatgattttatattgtttgatgtcttataatctaaacgtccctgtgctcttttagagtgtctgccttgaccagtcagcatttcaggagggattgtgactgtcagttaagtgctttgaa

SEQ ID NO: 150662 - DNA, 665 bp, Homo sapiens
acatatcctcgacacccccccgacgggacggcaggaaaacaaaccttacttgtaactcaaagcttctttctgaagttgattgcaggtctctccagccccggacctgggccctgcagccaccaagatgctgatgcctaagaagaacggaattgccatctatgaactcctttttaaggagggagtcatggtggccaagaaggatgtccaccttcctaagtacccagacctggcagaagacaagaatgtgcccaaccttcacatcatgaaggccatgcagtctctcaagtcttaaggctacatgaaggaacggtttgtctggagacatttctactggtaccttaccaacgactgtatccagtatctctgattacctccatctgccccgtgagactgtgccttccaccctataccacagtcatccagagactggcaggctttggcctaaaggtctggagggtgagcaacccgcaaagctcacaaaaggggaagccaaaagacacccacagacagagtgctgtgtcccctggtccgatgagaaagccgaggccggggttgggtcagcaaccaaattccggtttagaagcagatttggttgtgggtgtggtcagtgacctcagtaaaactggagaggattattttgcattgaataaacttatagacagaaa

SEQ ID NO: 150663 - DNA, 577 bp, Homo sapiens
aaccgtccatgggatagctgcttcctgaggaaaaaacaacgccaagcgaacgccacactcttgcctgtaggaactgctgggtgcccactgtactctgatcacttctcaagggtttctgatggcccaagatgctaagttcctccacgcatcgtcagggcggctttaacttagccaagcaggagagctccgtctcctattgcactccactcatcccccgtcccagcatcccatgtcctgagctcctagacatgagcccttgtgcccatttcattgatgggaaaactgagctgcagcaaagggaagtgactggagcaattccgtacagttcgtgataggcccagagcaggactccctaggtgtgggcactgctacaccctaatgagcaccacaggggaaatccacgctgactgaagcgtgggagagccatggaaaaagctacaatgccaaagacgttttttatgttgtcactgataagtgagctgatttaactggcctcctgtgcgcctctaatctaacagtgtggtgagtcataggcccagtcgttggccccgttagccgggcatggtggcagacacct

SEQ ID NO: 150664 - DNA, 461 bp, Homo sapiens
ggagtgctgtagaggcaggctcatcttctgcctccctctgagtcctcatgtgagaaacaggaaatactgatcaaaggcctggtttattttcataaaaccctcccgaaagtcctctggatgaaggtggatagagtcagctttacaggccccactaagtgctgcaaagatgagcaaatacattgtttttgctggcagctggccaggggtttaatgtgactcaggactgaggacagctagaaggtggcaagtaacaagaggcccacatttggtgacagtggtactgcctctcaggggcccgctgtcattaacttttgagaagaggggtctgtgggcccatctggaagccctcttgtgcaggtgtgagcaggtgtgagcttggcagatgtgagcaggtgtgagctcagggcgctggaaggccctgctagggagtgggacggatccagccttccagctggtacata

SEQ ID NO: 150665 - DNA, 285 bp, Homo sapiens
acagacaacagtgatagaaggaagctcgtgtcaaggtccagatgagggacccagacaccaaggaagcccagcatgggggaagaaacccagcgaagctgctgtgttccccttttgatggagagatgagactggctaggcatgagagtgcagagacctcaacataagccccttagtctaaaagaaggatgtagcctcaggaagggccctcagtagggaacacagggttttctgagctggctgccagagtgggaaatgaacagccacctcctgtactatggcagcagg

SEQ ID NO: 150666 - DNA, 613 bp, Homo sapiens
acccttgtccctaaatccttgttccagataaagctgaggagcctgtgctgggactgggttgtggcttcttgggcagggcttactgggaccaaggatttaccagctgtcagaggactgtgtctcctggagctgttcaccagccagggctcagccctcagagcctcatctgggccaggacagagctttcttcacctgatactcagagtggagaggacagaaagacaagctttgtaggccatcacccaactgccttaggaggcttaggatagtccatagaaagactaatgtccccagaagcagaaacagaagagagaagatgtaccaggtagcagcttgtccacagggatctgacgtaaaggtgctttctcatggaagcaaattaataataaatgctgtttgtgtgaaacctccactgtgccaagcattaggtcaggtgactgtgaataatttaacatttattcacagatagcatgaaaagccacagtccatttgccatttagcttatttgattgagagaaaactgaggcacaggaaggcacagtgactgagcaagagtcacacaaacacaaaggggagatcagggtcacatgaggtctgtctgtagccacaggcc

SEQ ID NO: 150667 - DNA, 447 bp, Homo sapiens
ggtgttttaaaaaattctaaaagtaataagatttgcatagtgcctatacttttagattcactgtttttccacacaaagtccatgtttgtatttttcagtaaatatgtattctaaaataaactaggcactttttatttaggcatagtaaaccatgaattcctctttactccatcacttagaattcctatctgaagcatgatagtaggagagccctctcctgataacagtagatctgtactacaagtatgctagtaaggaaccctactaaaaacagctattttgaagaaataatgtacttctttggtaagtattaggtatgtttaaataggtactagtatggaaaagttttcttagatatgattttttaaaaaagaaacaaaaatggactgttttctacaaatcacagtgtagattttataagagttaaagtcaaaatatatttggagc

SEQ ID NO: 150668 - DNA, 304 bp, Homo sapiens
atgctgggtaggcagtgacaggtatgctgttcagggaatactagatgactacttttgaactcagtccttgtcaaacctctgacagtgcagtattgccaggttttaaataaatgaaaagcgaaagttccaatttgtcaaaacaggtacaacatcagagtaattagtagagcaaactctataggtttcaacgtaggatttcattaatagttagctgtgtttaaatatggtttaaagattaatcatgtgggaggctgaggcaggagaatcgcttgaacccgggaagcagaggttgcagtgagccaag

SEQ ID NO: 150669 - DNA, 333 bp, Homo sapiens
tccctctgtagtacagctttatctattgcacacactttccttttcagtattcaccccccattcacggctctgtcctgtctgttcctctctttccaactgccatggaaccctgtggtttcaactttcaaactttccatggttccttcccttccaatgaagaaaaattaccaaaaactggatcatcacagatgtgtcaaacagccttccttcagacttcagactaacttcaacatataacaggtttcaagattacttaccagggtatggaaaaatagcctatatttgtctaccttgtgaccaggacttcattttcattgcctgttctgatattac

SEQ ID NO: 150670 - DNA, 195 bp, Homo sapiens
ggttaagaggaacctggcttctttacatctgtgttcaccttatttgtaaaactagggtataattgtactttcttaataggtttttgtggttattctgacaaataacataatggcacagaatgcatttagcatgctgcttacacatactacgtgttcaataaatattagctattctccttagaggcaagtcccagg

SEQ ID NO: 150671 - DNA, 170 bp, Homo sapiens
ttatagcaatcaagagaaatataccaaaagaaaaacagacaatcgatagaacagagtccagaaatagaccaatacatagaaagttaattgactttttatgaagatacgaaactggattaatggaaaaaggaaacaccagtggtgctggcacaaatggctatcaagatgtt

SEQ ID NO: 150672 - DNA, 321 bp, Homo sapiens
agagtaaaaatctgtctcaaaaagaaaaaaatgtacttaggaggggttaattgtggcgtgtttatggaattctttccttattctccttttagtggggcaaagagaagtaagattcttaaactcaaaaatataggataaagaaacttacagagattttgctttttaaagcattgatcttacgctgtctaggttttaattttgttttgctttgcttttctacacagtttttaaagaaatatttcaagaaatgttggttatttattaaacagggatatttgtacctatgtggcaaagaggcatatttggaatattctctggcaa

SEQ ID NO: 150673 - DNA, 297 bp, Homo sapiens
accgcgcccggcctttctcttgatttttcattcaatttacaacacgttactgaggacaacagtgtagcctggttttgacaaaatttttttattgtcttcatcattttgttgtattctgagttctttcacatagttcttttttttgtgttggttacttagaataagaataatctcaaaagtattgtcagtgttcatagtttgtttttttttttgtaaaaaacccatttcagatttttacctcctaaatgattagaatcagattaaaatagttttgtttcgagtgaaaaatgctgtcag

SEQ ID NO: 150674 - DNA, 174 bp, Homo sapiens
catgacaaaagtcgtgaagagggtgactgaggtttctttggcaatctctgcagtgtgtccaggctcagaccagggagggattcggagctcacaagccataaggcagtacccctaccgcccaggcaaatgagactcatgggtgaccaaagccatcctggtgacccaggacctggc

SEQ ID NO: 150675 - DNA, 487 bp, Homo sapiens
ggagtgaagcagagacaagaccactatcactactgagcctgataaaacattctagcttaatactatcttttctatttttgacacacagtctcactctgtcgcccaggctggtgtgcagtggcacgatcttggctcactgcaacctgattttaaaaatggctctgtcgactgtataaagcactttgtcttttccatcattaatttgatcagaaagcagaccactgaaaacctttcctccaaaacaagagtcagcaaactttctgtaaaggactagggagtaaattttaaattttgcaaggcagacagtctgttgcaattactcagctctgcccttatagggagaaaataaccatagtcaatgtataaatgaatgggtgtggctaggttccagtagagctttatttacaaaagcaggccattttttcccacagaaatgtgatagaaataatttgtgctgaaattttcagctgttgcagagtttttcacc

SEQ ID NO: 150676 - DNA, 234 bp, Homo sapiens
gcccggtgccactgcacaggaatgtcctattttaagcattaccaagtagaaagtcgggacaaattactcagctctgcccttatagggagaaaataaccatagtcaatgtataaatgaatgggtgtggctaggttccagtagagctttatttacaaaagcaggccattttttcccacagaaatgtgatagaaataatttgtgctgaaattttcagctgttgcagagtttttcacc

SEQ ID NO: 150677 - DNA, 266 bp, Homo sapiens
aaaaaaaaaaagtcccatgagattctcatttaggcagaaaccccatgtaagatgccctaagacaatgtttctgtatgctatcatgagtcctaatcaaaatcacttcctaactgaaatgtcaattagtccttctgaataaaacatagttgtttataagtcttggtgtacctgactcactcattttagtgcatcgaggtaggtagattggagggtgactgaggggagggcactgtcagttgtgaggttgtcttctaacagagtatgta

SEQ ID NO: 150678 - DNA, 356 bp, Homo sapiens
ctcaaactctaggcctcaagtcctcctgctccgacctcccaaagtgctgagattacaggcatgagccactgtgctcagccccaacaattatttttgacagataatagggatgtctccttgctctctgtgtctggccaagtagccccaggtgacactcgtttttttttgtttttgagacggagtcgtgctctgttgcccagcctggagtccaatgccgtggtctcggctcactgcaatctccgcctcctgggtttaagtgattctcctgcctcagcctccagaggagctgggactacaggtatgtgccaccacacctggctaatgttcttatttttagtagagacgggatttcgcca

SEQ ID NO: 150679 - DNA, 550 bp, Homo sapiens
cctgggtctctggcccagactggcttgctcctagctcctcttcttccctccctccatcccctactcggtacccctagtcagctcctggaaatggtttcagtattggtgggacctcagaattgcctttcgctgcagtccatgtcactatcacttcttgaacatccactccccctcttcttcaccgagcctaactactccgacccctccttcaaaacagctctgagccactgcaccaggaagccttccatgacctctccaaggtactgccatgaccttctacctacttcttgtaattgtttatgggtctgagcgtcttggaggtggggctgtgtctttatctttgcttcctgagtacctagcacagcacagcagtgctcaatacacacaggatgaataaattaacggatccagcagttcctaatgataatgagtcagatgctagcttaagaggaaatgacagtgcttctaaatcattaacagaagtaattttaagtagagttctctgtctctctggctgtctctatgcctgagaggaaaccgcggcagtaaa

SEQ ID NO: 150680 - DNA, 536 bp, Homo sapiens
tgtcagcccagcccctgacctacatggaagaggttctgaatattgagttcaatggccaatggtcaggaatttgatcaatcatgcctgcaataatgaaacctccataaaaagccctaaagactgggattcacagagtttctaggttggtgaccatgtccatatgctgggagggcagtgcacctggagagggcaaggaagctccatgctgcccacccccacaccttgtgatatggtttggctgtgtccgcacccaaatctcatcttgaattgtagttcctgtaatacccacatgttgtgggagggacagaatgggagataattgaatcatggggcagcttcccccatactgttctcatggtagtgaataagtctcagaagatctgatggttttataaagggaaacgcctcttgcttggctctcattctcccttgtctgccgccatgtaagacgtgcctttcaccttccaccatgattgagaggcctctgcagccatgtggaactgtgagttcattaaacctctttttctttataaatt

SEQ ID NO: 150681 - DNA, 459 bp, Homo sapiens
tttctccttctcctgcttttcatcaagctaaggtctacttttcaaactgtcctcagcttaaacatcatccctccagggatgcctatcctgatcaacaactttggttcagatgtattaccttaacactcttacaccttgttttagtccttatcacacattttttgtttgtttttgagacggagtcctgctctgtcgcccaggctggagtgcagtggtacgatctcggctcactgcaacctcctcctcccaggttcaagcgattctctgcctcagcctcctgagtagctgggactataggcgcacaccaccacgcttggctaatttttgtattttaatagagacagggggttttaccatgttggccaggatggtctcgatttcctgaccttgtgatccacccgcctcggccttccaaagtgctgggattacaggcgtgagccactgtgcccggccaaagcc

SEQ ID NO: 150682 - DNA, 233 bp, Homo sapiens
  misc_feature (17)..(17): n is a, c, g, or t
  misc_feature (20)..(20): n is a, c, g, or t
  misc_feature (23)..(23): n is a, c, g, or t
  misc_feature (32)..(32): n is a, c, g, or t
cctagaggatcccccgnggntcntgcagaagngtgggttcttgcagaaggatggtagaagcaggtcattaagacctcaaaagtcattatggggcatttggcttttaagacaagtaaaacagaagacaacggagggtctcaagctccagttgtcaagaattggctgaaggtggtcgggtgcagtggatcacctgaggtcagcagttcatgaccagcctggccaacatgtctgca

SEQ ID NO: 150683 - DNA, 474 bp, Homo sapiens
agatctggggaagatgaagaggaagaagaagatgttgatgatggcagctaatgttttttgagggcttattgtgtgctatctgtggttctaagcatgtcacataccctgcactgaaaacagctccacaaggtagatattatttctgtttcacagattgagagactatggctacaaaagatgaggtaagggacccagggttaatggtgtggccaggattagaaccctggcagtctgaggccatctccttggtatgtcttcttggagtgagggcagagaaccccaaacccatttggaagcatcatgtggtgttataaagctgtcatgggagagcgggcctccagtggggtaacacctacctaacatcggggtttgagcatggggttcttggctcagaggtgactggtggccctggtgccagggctggtctaaaactgcctggtgcatctctacctcctgctggaggctgagactcct

SEQ ID NO: 150684 - DNA, 325 bp, Homo sapiens
aagatgtcattatcgtgtcttctcctgtgcctggtagcaggtcctgaaggtgaacgtctcagatgtcagacatgggtctatcgggttaggataggtacatgtgactgacagggactgattctccatgtaatcacatgccctgtcccaggagcagctgcaggagtcagccctggacctgaatagcacacacttaccctctgcctcacctacactgttactggccactccgtcacaaccagtccttactagtggacctggatctgccggctctcagggaggggctgcaatggataaaatccattgctagtggtggtgggagtccatt

SEQ ID NO: 150685 - DNA, 211 bp, Homo sapiens
ttgttgttgttctccaagatatcgccctgtttctgctggttgcgttcaacagccattttgcacacactggtgaagagatcttaaaccatttcagaggtggcccataaaggaggcaaaaggggacttgccgtaaaaattatttccatagacatgcaaagttgattatataaggtagaggtcagttaagattctctggcatccattacgagac

SEQ ID NO: 150686 - DNA, 117 bp, Homo sapiens
ggagtttgagaccagcctgggcaacatagcgagaccccatctcttaaaaagatttaaaaattagccaggtgtcgtggcacaggcctgcgttcccatatactgtggaggctgaggccg

SEQ ID NO: 150687 - DNA, 212 bp, Homo sapiens
aaaaagaacgtggttgggaaaactgtggcagagaaaatcaggcctcatagacaacaaaggttagagaaataaaagtaaaaattactgtgtatatattctacaataaacctgagaaattctttataaaaaaatccaaaattaaccacatttctcaacatgaaaaacttcctagactaattcatcactggacccatttactcagttgtgatttt

SEQ ID NO: 150688 - DNA, 788 bp, Homo sapiens
atttcaaaaagtgaggaagcaggttctggagagaacagcaagggtgtggctggaaattcattttatacagatattgtgggtgcgatgtgtggatttaatcagtcatttcagcagaagttagccatagagatgggattataccagcagagacactgccaggcctggaccaatggggacagagacaggacatagtgtcccgtggagatggatgtcctggaatttgacaggacagtagagttattcatctgtgaacatgcactatcctttaagaaaagaggaggacgctggaggcaactcagaggttggcagggctggcactgccaccacagacaagggaacaaagctgtgtccttcttagtttcaaagggtcagactgttgctcagagccttgggggtggggccactgcctcgggccatggcgcccggactacaggctactgccccagtgggcctggaaagcaggatgctgagctgaagaggattattcttgaggcttaagagcaaatggaatttgcctcgctagattttggacttgcttgggacctatcacccctttcttctttccgatgtctcctttttggaatgggaatgtctatcccatgttggtcccaccactgtgtcttggaagcacataacttgtctggtttcacgggttcacagccggagaggaattttgcctcaggatgaatcatgtgttaagcctcacccatacctaatttagatattcagacgagactgcacctagagttgacgctggaatgcgttaagacttttggggctattggaat

SEQ ID NO: 150689 - DNA, 183 bp, Homo sapiens
acttctcctaattttcaagacttataaagctacattatttaagtaatagtactggtgtaaagaaagatcaatgaaacaaaatgaagagactcacacatatacagcccattgattttcaaagatacaaaggcacttcaataagggtaatttttttcaataaatggtgccaggacaattagatag

SEQ ID NO: 150690 - DNA, 185 bp, Homo sapiens
tgggatgagccctgaactaggagccaggcagcctagagtctaggtctggctctgtgaccttggacaagatgctttatctctctgggacctcactgccttcacctgtaaaatgggcagattgagccatctggtttctaaaagaaacaactcctgcttctggatagatggttctagatgagagtgta

SEQ ID NO: 150691 - DNA, 272 bp, Homo sapiens
ttgttatacataataacttctatggcttcgggcaccgagagagggaggccctaattcctttaccagaactggaacccttgtgtacataataacatttttaggaatctatgttcatagctggggacagagtggcagaatggtgaaatgttcccactggtgtcacacccatctcagcgagagtcagcctttgtcacagacctgctccgtgacctcgggaagatgatctgacctctcgacacctggttttcctcctctgggaagtggggatacta

SEQ ID NO: 150692 - DNA, 844 bp, Homo sapiens
tgtgaaagtgaagggctcaaagtgtggtgaaagcaaacaaattaatgtctatttatcctttcaaaagccattttaaaacatccatctcctatcctctcttttggtacaattttctagaactcacaagtccttggccataccaaaatggaaaaagcatgttatctagctgtttgactgggttaattttatgcagcaactccccaagagagaaatgaaaataagttctccatagtgatgagactcccgggtgtcagcctctgttctctctgtagtcatttttcctagtggttttttgttttgttttgtttttaacctcatccttgatggcccagtgactgaggcaaaggaaaccagtgaacttcgaagaaatctggggtcaccagtcttctgtggtcctgggagcttggcatggctttaaagctctactctgctaccctccttctccttctcagtctgtaggtacatcctctaaaccctcacccagctcaggcttatatgttttgctctaatttatactgcttccacctccagctctggttgtaccaaggagttggcttcctttaggattgctgggagaatctaagattctgctcttcaggggtctggttaagtctacacagccctgagaacctagtgtgtctgagctgcttctccctgactattgctcatcggctgattctagtcaggatagcaccaggcccctctgctttggatgaatacagcctatagtcttctcctcactttcaacattcaggccccagtcttctcctcacttcccacattcaggccccaggccctaaccatttctctttaacatcctttaatctcatctcctctttcccag

SEQ ID NO: 150693 - DNA, 490 bp, Homo sapiens
gaaatctttttggtttattaacttggtgaataggggataagcaataaaaagtcttaactaacttcagggtctagcaccctgtatgcaattcgaaaaggcaccaaagtacataggacagtacctaactgctgacacatcccccatgaatgacaagtgtactcatctctaggtaatgacctagtcatggagcaaatgatacatcatccagtattatggggccctctcgtggacaaaggcatactttgcacgcatgaatcatgaaaaaacccagcttcaattatctgtataaaagaacatgtgcaaaaagaggactagcatcaacgaaaaaagccatgaattatctaaagggcttagttgcccacaatctaggagagtgatgggagtgtcagtacgctaaagcagctgtatattccactgccaaaccatctgccataaagcatcaccgactcatccgacggcctatgccccattaccagcacaagaaccaacg

SEQ ID NO: 150694 - DNA, 424 bp, Homo sapiens
agaatagtgttgagctgtggacatctctgggctcttgatgtccaggacagggcttggctccaaaagggtttgtaagcatcaaactccttgtctttagaacggaagaaggaagatgatgatacctaaaagaggtgttatcagaatttagacagagtaggagtgtgggaaggaacccctggcttcacaaagatgtccttccccagccaggaattctgggaatgatgagccatgggctacttgcctaccaaagtacccaacaacgtatctttagaaatcaccaaagtcacaggaaattcttccttggagtattcctcatccagtacgtattcctccagtctttccacaagtatgcactatttccctgcacatctacttgtactttggactgaatgtactcatttgcttactcattcaagacatttct

SEQ ID NO: 150695 - DNA, 340 bp, Homo sapiens
cctggctctgaacttaggcctggctctgaactaggcctggctctgaacttaggcctggcgctgaactctgggcatgctccatgccaaagtgttatcatgagaaatcagtccaccaggagtgagatttgaatcctctagaaggattaaggcgggggaaaagtatctggacagtttccccttatttggaattaataaactaaatttttatagcttaactctctctgtagttatgagagatgagatgcgtgtaacaattaacagttactcgttcttcctaaaacaactgtgttatcagtttcactggcttcaccccagcgttttgagcctcatatgtgatagt

SEQ ID NO: 150696 - DNA, 472 bp, Homo sapiens
  misc_feature (215)..(215): n is a, c, g, or t
ccgtccataatgtgtgccaggaggcggagcgtgcgctgagctgagatcgcgccactgcgctccagcctggggcgacagagtgacgactctgctctcacagaaacaacaacacaaatatcgggatgacggccaagaacggtctgatgatcggaactgggtcagagtcgcggaatgttaccgatcttggtttggcggctactcaaactggctcccanctttgaagaccagaggaattaggtgacagaccggatgtgaggataaggtcccgagctgggagcctatatctcgtggtgccccgttagatggtacccgagtacaccatagcatggtcttttggcacagcagtaaatagacaaggaaagaaaaagagccaggcatggtagagggtgcctatagtcccagctacttgggaggctaaggtgggaggaggcttgaaattcaagttcaggatgggcaacatagcaaaacctcg

SEQ ID NO: 150697 - DNA, 273 bp, Homo sapiens
agaatcgcttgaacctggaaggcagaggttgtagtgagccgagatcatgccactgcactccatcctgcctgggcaacagagcaagactccgtctaaaaaagtaaaaataaaaattcctacctccattcacaccatttatgaaaataaattcacaaatatgaaaaaagagtcatttgtgaaatatctaagctaaaggaactataaatatgaactttttaagcctgattcttctttcacttacattttgttctcaaataaaaggaaggtttttct

SEQ ID NO: 150698 - DNA, 558 bp, Homo sapiens
ttcccccctgcttttggtcctcctttgctttgccttttctttatctgattctttacacatatcttctgaacacagctaggtgtcataacctctaggaatccttcactgaactcctcaagcaaagttaacaactccttctcagttcttccgtgatattttatagtgtaaactgtatttacttaactatacactaaataaactgtagtgtattttcgtttatatgggaatgtggtgatagtctataactactagtgacagtttgtaaccatcactacactcccatgtagctgaattatctgttcatgcatcttcctccactagactatgagcttaagagattatgcatttttcttcaatgccacacagaaggttgtaaacaaatgtctgttgaatgaatactactttatccatgttataccaatgtaattttgacaacacaaactttttacttataaggcacaatgatacaggaaaacggttgaatgtgtttaccctcagcaattaatctaatttttaaataatcaaatctttttctaacagaagtagtgtacaagtaac

SEQ ID NO: 150699 - DNA, 363 bp, Homo sapiens
accatttggagtttgattgctgtcagccattccgatgggttgtaatactggtttgcctccaccagatgttgctgaaacactaatataaatggaacattccttttgggataagtagcattggatttggatggctagagtaacttcagtgttaaccctggctaaatcttttctgcaattattaatccctccatgacttacacagaccatctaagacatgcttaaactttcctacttgtcctaaacatccttctttttaaacaaccaaagattctttttaggacaagtgtttaccatccataaaatcattttatgacttccccaaaccatccacaaaatgcttaaaccttctgacttgtcctgaac

SEQ ID NO: 150700 - DNA, 372 bp, Homo sapiens
tagctgggactacaagcacgtgccaccatgcccagtctctctctttaagaacaagtaaaacatttcccagaaatacccctcacatctcattggctagagattcacgtgattgcctggcaaggagaaaaggggtagctgcggtcagcttaggttggcagtcagcaaaccacagcccccctggccaaatcttccagccacttacgaaacacttcctgcagcccccaaatataagataagactgaaggagaactaccaaggcgctggcagtcaccaaggcattccagcaagaaaccctagaaggccacaaagcagacatcagctgagcaggctgggccacttgccctttctccctttctgcttttagctgtttct

SEQ ID NO: 150701 - DNA, 362 bp, Homo sapiens
gttatatttcaatagcatggatgtgtatatctcacacatatatatgtacaaactaaagtcttgaaggatatgtaccaaatataacagtccttatttcatctttagtttcttcatgtattcctgcattttctaattttcacattaagtctgtattacttttaaaatagagtaacatttaattcaaagagtactcaatcatttcaggatattcctaataaactattaatattttaaaaagttaacgctatcaagtactgtatcggtatgggctttcaaagaaatataaatgattttcttaagtagacaaataagcatatcaattgtaataaataccgctctgctattgaaacttctaaaatagg

SEQ ID NO: 150702 - DNA, 761 bp, Homo sapiens
cagggaagcatgagaaggatacagtacgtttcctctgaagtcgaaagagaagaacatcaacaggattactcacagaagttgctctgcaacctctaagtttgggaacctgataaatataaagtgattgtagctatttttctgaggaatgatactgtgtccagaatttattccttccggtgggttcttggtctcactgacttcaagaatgaagccgcggaccctcacggatggaacaccaggctatagtttcaggaagccagacttgacccagacttgaccttgcaaaaaatagcaaccccttcagaactggtaaagcaatgagaaagaattgctcagaacttcatggagctgagccattcacccatcctggaacatccaccttcctctggaattatttttttaatgtttttttccttcttgtttaatccactaattctctctcttttcctctgtttctctctctctcatctctgttcctttccatagcaacatagactatatatgagtaaatatttgaatatatttaataataaaagtacatacacaaatatttacagaactgctcaatcagaaaaaatacacttaataaataattgttcaccaatggccttgatgtgctgtaatttgtatttccaccaaatgagtcccagttaccttttatgtgtattttccatgcttgttcacctatttgattttatactaaaattatattaaatttctctctaatgttttgattttctaataaaatgttggtcatgttt

SEQ ID NO: 150703 - DNA, 418 bp, Homo sapiens
cctaagggactctatccagacattaaaatagaagtcggcgctttccctttcttccccttatttccttttcccttttctcatttcaactgaagacctttgtaccagttctggagctgttaatcactgacagttgggaactgctactttttgtcctatttaaacttaatgcatctgtacacagccatatttcttcccctctttcttagagcagagtgtcttccctcttgtccaagattaactcaaccacctgggtgctgtgtgtaccacatatgttctgcctttttagggactgtgccgtcagatccatccacgttcgcctctttccccttatccctctttctgctaatatagacgtgctcacgattctaatctttaaaaaggacattccccctaaccgccaaaaaaaaaaacccatgta

SEQ ID NO: 150704 - DNA, 528 bp, Homo sapiens
tcaagacagagggtcagtttcaggccttggtcagtgaatctccaagcccaatttgaagcctaattagtaggaggcagggtaagtgctagaagaggttgcacttctttacagcaaagaaaagtcattttcaaaggtgtgtatgttgtcattccactgcaaggagagcagacaccaggaaatatgttgtgatattaggacatcaagagtaagctgggaattgaggaaaataatttcatagtaaacatatggaataattggccagtggtgcaagaaatctaaatgaggtacagagacagctggacacttttatctcaagagagaaaggattgaaggatagagtgataaaccagggaggtggggtcgagataaacctaaagggaacaagcctgctggactaaatatcctctctctgctcagcaatttccaccgcggccatttgttaaacgcatagctgccatcttcagtgattatttccaagtaacatctatgtttctgaataaaaatccatttgaatctcaagtcagattt

SEQ ID NO: 150705 - DNA, 719 bp, Homo sapiens
tacttttcagccctgctctcttcctcctctccttctgggggacaccaataacaagacacttagatcttttgttatagtcccacaggtcccttagcaccacctcattactgccaggtactcgtagaagtctaggttcctctttggcctctgttggcaagccagggggagaagaggctcttgattaactgctgggctgagttgggagctccctctccctactaggccactgctttgtctgagaggggaaggattgctttattatttcttaccatctggtttccactgacacccaagtggtgtggccatggtatctctggccagtggtgaaaattctgactctgcagtaggtctctgacactatcccactagggagggaaaacagtgtctcatcattgccacgggaagatagatatccaagctcctcacatggtctctaagggaataaggaactaattactgtgggtggggatgagagtcccaagccctcactacttggccttcttaacctggcatggggttgaagcaccttctaataccctgatgagcatggaagtctaggctccccattcagcctttgttgcatgagtcggaaatctattgcatggcagggtgactataatgtattatatatttcaaaatagctaagatagcaaatttcaaatttctcaccacaaaaaaataagtgatgggtatgttaattagcttgatttaatcattcc

SEQ ID NO: 150706 - DNA, 426 bp, Homo sapiens
cgtgaaaaggcaggcatcgtgtcagggtgcatagtcgactccagagtatacacgccgttgttcatacctaagtctcttgggagacctgagactcctactcaagaggggcgcgatcctacctgtatctcttggagaattcccacctattggccctatatgatgaggtcccagggactggaatgacgactatagaccttaaaagagacctcggatctttaagtctgacaccttaccgtaggcctctagccccaaaatcctggaggggaggaaagaaggtgtctcacatccctaccgccagagaagactgtcaggcccagtgaaaacgcctagatcccttggggcgatctcaaacagccttccttgagtcccttcacagtctgggggtcccatctgccgtggccgctcacccctcaccccacagctctt

SEQ ID NO: 150707 - DNA, 1036 bp, Homo sapiens
ggtgtttcctgctccagggattatcgtgatcacggatggggtgacagtgtacctgatgttgctgtctgtgagacactgctgaaccagcttcgcagtggcactgtggcttgttcctttgtccaggtgggaggagtttactcttatgactgcagttttggccatgtgcccaatgtggaattaatgaagttcatcgcaatggcaacatttgggtcctacctgtccacttgtcctgagccggagccaggcaacctgggtctgactgtctaccaccgggcatttctcctctattccttcctgcgcagtggggaagcactgaaccctgaatattactgcggtgagaggcacactgaggctctcagcaccgcctatttaatgagcacctggtctctgcaagcagcaaccctgcctggccttgcgccggaagaagcacactgagaaggaggtgccagccgacttggcagcactgtgtcgtacggcttcgagagggctacagtgtccgagaggtcacactggccaaaggagggtcccaacttggaggtaaagctggtgctgctgtggaaacacaacatgcgcattgagtatgtggctatggcatcctggcccctggagcctgagggccctcgagtaacacgggtggaagtgacgatggaaggcggctacgacattttgcatgatgtgtcctgtgcactaaggcagcccattcgttcattgtatcgtacccatgttatccggcgtttctggaacacgctgcagagcatcaaccagacagaccagatgcttgcccaccttcagtccttctcctcagtgcctgagcatttcacgcttcctgacagcaccaagagcggagtgccactcttctacatccctccaggctccaccaccccggtgctctccctccagcccagtggttctgactcatcccatgcccagtttgctgcctactggaagccagtgctgtccatggatgcaaattcctggcagcgatggctgcacatgcatcgcctggtgctaatcctggagcatgacacgtgggtgc

SEQ ID NO: 150708 - DNA, 325 bp, Homo sapiens
ttacagaatcatcactggagctatcccatgggacccagtgctgcgtgtgtcctggaaaccacctgagggaggtcacagcccttatgcacctactgctcactcagccccataatgactgttcttaacccatctatggattgtgaagtttatctagttgtttataactttttttttagcgaaatagaatagaaaacatcaaagtgcatacgtgtagcaaagatggagtttcactctcgttgcccaggctggagtgcagtggcatgatcttggctgaccgcaacctctacctcccgggttcaagtgattctcctgcctcagcctcccg

SEQ ID NO: 150709 - DNA, 628 bp, Homo sapiens
ctagctgagtgccacgtgctgacgtcactaagatcaatacagcaaactctgaaagatggacagagagacaggagatggtcctttataatgcagtgtgatctgtgctgcaatagagttttggaagctagaagttcaaaacgaggtgttggcagcaccatgctctctctgaagatgctaggaagaatctgctccatgcctttccattcgctcctggggtttcctgcaagccctgacattccttggcttgtagatacaccaccccagtttccgcccccatcatcacatggcctcctctctgtgggtgcctctgcgttccctctattcttcttctaaggacaccgacaccagtcatagtggattaagggtccactcctaactaattacatctgcaaccaccctatttccaaataaagtcacattctaagattcctagggagaacatgaagttttgggggtgtgtggatactgttcaacctgggacatggagtaaataaatggcaagaaagattacagatgactttaagctaaagagggagatagggttaaatgtaggacttttttttttttccaggacgggagaggtttaaacatgttactacattgaataaatgaaataaccatggacatg

SEQ ID NO: 150710 - DNA, 277 bp, Homo sapiens
cctttttttgatttttaatcaacattattgaaaggtataatttatataccatgatattttaaatgcacaagttctcacacaaaaattagccaggggtggtggcgaagtgctatattcccagctgctggggagctgaggtgcgaggatcacttgagtctgggagatcaaggctgcagtgagctgtgaacgtgccactgcattccagcctaggtgacagagcaagaccctgtcacaaaaaacaaacaaaaacagttattcttccttgggaactgcttat

SEQ ID NO: 150711 - DNA, 362 bp, Homo sapiens
gttagtgaatgacaggaaccagagttcaaaccctggtctgttaggcttcagagtccaaacttcttttaaacaactttttaggcgggacacaagggctcatgcctgtagtcccagctgccctcgggaggctgaggcaggagaatcacttgaacccggtaggcagaggttgcagtgagccaagatggtgccactgcactccagcctgggcaacggagcgagactctgtctccaaaaaaaaaaagaaagaaaatgcatttcatatcccactaaactcatagtaaacttgaaaaatcataagttgaaccatcataggtcgggaccatctgtatattaaaagttatataatattaaagtaggtatgt

SEQ ID NO: 150712 - DNA, 417 bp, Homo sapiens
catgtaccaccatctaagcccttcaactgggcaagccaaggccctgcaaagtcaggcttggatcatctttccaggctcaccttctatggccacccccctccaatccagctacagcaggcttctgctttcctgctcctgtgcccttcctcaggcctaccctgcactgggctgcccttcgctgatccagaagtcttactatgaggttttggtccagctcaaatgccagtccacccatcacattttcttccctgcctactccctgcagaactattacattgtattcaatgtgttggtttggttcttctgttagattgagaacttaaaaaatgaggtcttattcctccttgtgtccctggtgcttagtccaagctctcactcttgtgggcctcacactttgtacctcagtctctgccttcc

SEQ ID NO: 150713 - DNA, 384 bp, Homo sapiens
gctgaggcgggcagatcacttgaggtcaggagtttgagaccagcctggccaacataacaaaaccccatctctactaaaaatataaaaattagccaggcatggtggcgcatgcctgtaatcccagctactcgggagactgaggcacgagaattgcttgaaccctcaaggtggaggttgcagtgagctgagatcgtgccacggtactccaggctgggcggcagagtgagactccatctcaaaatgttgggggaaataatccagattcttccctgcggcccccatgccttgcaggctctgtgctgcccctcatcacctccctgccctcccctcctccctctctcccccttgctcactgcaccagccacacggacctcctcactgttg

SEQ ID NO: 150714 - DNA, 578 bp, Homo sapiens
attccaagagttcaagaccagcctggacaacgccgccagacgccctctctaccaaaaaaatacaaaagttagatgggtgtggtggtatgcacctgtagtcccagctactcaggaggctgaggtgggagaatagcttgagcccaggaggtcaaggctgcagtgagctgtgacagcaccactgcactcccgtctgggcaacagagcaagtccctttcagaaaagaaagaaaaagaaagaaagaaaaaaaagtgggggaggacaggggagggtgttttgtttttaaacattactaagcaaattgctatctagagacctcctctagtaaagttatacatctagtggtgtgctggtaaatgtgtaactaccagcttggagaagaaaatggctatttgcagtgtttgccaatttctatagtgtaaatactcccatcatggtcaatttcaataatggccatgtttaacaaccagttcacttaaattcctaccaaaacaacaatcagctctcatgaaccagtccacgccagctccagcatctacagcttacatgtagacaaccatgtggagacatatgtgctggta

SEQ ID NO: 150715 - DNA, 358 bp, Homo sapiens
caggcatgagatttttacttgagatttttccatcctcttttaggactcaggatagacttgtgtggaggtgctctctggctaaggggataagttgttactggtttgggtctgcttggttttgccttgggtggggccggtgtcgatggggcaggcttggcacgagcagtggtgccatggcagggcactgtggcatctcccctagcagtggatttggggtccctgcttgcctcacgtggtgcttacacacatgtacacacacacacacacacacacacacacacacacacacacacacacacacacacacacacacacacacacacacacacacacacacacacacacacacacacacaca

SEQ ID NO: 150716 - DNA, 1202 bp, Homo sapiens
ctgtatttcgccccttctagttctgatcacacagcaatgggcaatgagaaagaaagaagcatgaaaatgaacacattttcaagttaaatatgtgtttgctttaatgtctagcaggaggatatctgttgccaatcacactatgaaaggtcagttgctgaataaacacacataacatcgaccaggaggcggagaaaacacctcctttcttcctgtcttccaagggcatgtgtctggcgaccacccattcatttcagcaaacaaaaggtggaaataaccatctacattttacagaagaggaaactagagattagtgaaaacgctgtttaccttcaagtaatgaagatcatcagttagtgaataaaaggggaccatgtacaggcttggcattctgtcacttcctgggcgctggtgacagacagtcaacaaacatgcatgtgctcaattcacctgctcattggctacgaccaagtcacctctctgttctcaacgatattttatgtctatggcaataaaatgtaggctagacccaaactatgtccaaaagccagttatattttaagaagtaaaccactaaagtgctgggatttgaattacgagtcattgatttgaacagtaaggttcctgctcactctccatggggctcgtccctctggtcaaggcagaaggtctcaaatgactgtgctttgcaagaagcaagaacagcaccaattcagcgatttgccgtggctcattctccagcacgatgacacaaaagggaactgttgttaactgctttctcctcggcctttaatcaaacaaatataaattctcagactgtaactttatgagactcaaaagaaacggctccgtgcacaagtgcccactgggactgaccatgtctgaacttgggctacagcccccaacatcacaaaagcatcctttgataatgagagcccactgggttctatacgatgtctttctgatttttcaaaagttctttacgtcctcagcctttctactcaccatcagcagggagacagttacagattctacaaaacaagatgacagggtcctgctctgtaacctaggctggagtgtggtggtgcaatcacagctcactgcagccttgaactcctaggcttaagccatcctcctgcgttagccttcccagtagctgggactacaggcacttgagcccgggagttcgaggatgcagtgagcta

SEQ ID NO: 150717 - DNA, 247 bp, Homo sapiens
atctgagaacggtcctacctggacgcagtcctaacaatcattataattgaacaaattggagacgcttgctcaaaaagccagtgtcagcccagcaaggatgtcttccttctggaggatggtctcactggcattattcagtgctctctggtcagtccagtgcctctgcagttaccccgacgtacatcctcatccccttggaatggggctgggccctcgtttgaagtacgcctccacactgcctccttgc

SEQ ID NO: 150718 - DNA, 173 bp, Homo sapiens
tccttgggaaaacaagaggtgtgaggcagtcctctaggtcggaccctcccagggctgtggtcgttagagtaaagggaaagggtcacatggctgggtgtttctccaggctttctgcatgctgagcaggctgtaaccagacgtctggtcttgtccagggagagtgtcagaggcgt

SEQ ID NO: 150719 - DNA, 523 bp, Homo sapiens
accgaatagctgggaccacaggagcatgccaccaagcctggcttcctgtggctttgttttcttatgataagttctaaagggtaaaattttgggatcaaaagttgtacgcattttaaggtttttgatacatattaaccaggactccagtttttaagaagtcatttttgttgacttcgggactgtcccaattaattccctaggagatattgttcatcttgaacgtggctgctgtccataatcccaagaaaacgcttggttctgaacagctgacttttccagataaatgaggggctgctcgctgaactatagactgactttcctcgtcacagaaaatgggggaccacgaggttatgggataactcctctctcgtagaggaggggagatgtttcgtgggttttcagtcgaaccgatgtggttggcggaattcagagctggctcctgccggcgccacgccccgtagagttgtccagccacttccctgcatgaagacaggagagcacgaagagaaagtggccgttctgc

SEQ ID NO: 150720 - DNA, 238 bp, Homo sapiens
ctcaattatcttaggctatatttttcttttataattttaaacataatcagttcattcaatgtggctccagaaatcaaaagctttctatggctcaggcagagaccccatgactcgggcagtgacccaacattcctttgtttctctccatcgcaaagcactcagcagttattttggcagctatgcgggagttttgcctccacaatgaatggcatgcctgctctagcatgctgggtggaga

SEQ ID NO: 150721 - DNA, 284 bp, Homo sapiens
catctttctctgtcacttagcctcagttttcacttgtcttctgtctatattccttttctgcgtaagttgtatcacgcaaattttagattttgtggcttttttccagtttctttgagttttctgtgttctccaatgttatgtgcttcaggagagaaggctcaaagctttgctctccttaaattcaagtgtaaatgggaggcatgggtgttgagagtgatctcctataactgatctcatggtgtttccttcttgtcttgcccgtttaattcagcgctgtgattctg

SEQ ID NO: 150722 - DNA, 369 bp, Homo sapiens
atattgcactaaattatagatgcaatcaacagtgttgcctagacttaataattgctcagtgaaatctaggcattaaagaaaatgtcaaatcattcaattccctactaataatctgaaaaaattttatttaaaaccatagcaaaagtaacagcacaagacaaaattggaattttaggtgtgagtattgcaatgatcagtggatgaagagagctttggaaaattattacagtaaaataaaatactcagaaataggaatattttgccccaaattgtgccagttctgaagacttctgagttgacttttgattcaaaagattaggaatgtatgtatcatgtaacaatcagtaaagcagagaaccactctgtgaa

SEQ ID NO: 150723 - DNA, 2507 bp, Homo sapiens
  misc_feature (3)..(3): n is a, c, g, or t
ggncagtctcagtctagccttgaatgtcaggctgaggcctcttgtgttgcataaaagttagtccaggaaatgggttgggcggtctgagtccagccttgaatgtcaggctgaggcctcctgtgttgcataaaagttagtccaggtctggcatggaagacggcataaagaggagctggattgcaggcagtgagacctgttgggagaatcaaggatggcctaaaagggctgtggtgagacctggaagaggtctggagcagtgaggataaagaggctggcaaatcattagtgcttggttcatgactgccatgtgggctgatggagaggtaggaaggctctggactagctgaagtggctttggcctcttacagagtccattctggagccctctggctacagggaagcaaggccagctgtggccttcctctgaagagggcagtgggctgctgtgactctgcgttgtcacagctctgggctccccaaggtgcctggtatggctggcttgccccgggcacatcaaggggttctttgtctccttccagcaggagagtgggttggctgacctggttggggaaggaataggataagcggtgttgagcttcctggtctctgcctggcagacatattggatgataaggaaggatgcaaggagaaccagaagagaggactggggcctgaggacatggaaaacctaccttagggtggtatggcaactgggaagggtgggtttgggcctttggacacagcatacactgatcaaggggaggcacttggcaactggaggcttgtttgacctcacctagcacctttattctgttcttagaggtggtgccttggctgggacaaaacctgtgagaaggcaaacccctcagcacttacaaggggcaccaccagtggcatccggagatgagagattctggctggaaatgtggattttaggctagtgtttgagaaagggctctgaaccaggcacagggtcagagtgtcagtgatggctccaccactgacctttgtaatatgtgacttaggcacatccctcacccaaccatggggctaatgcttccagtttttttcacccagcacttactatatgtgtagccctgtgctaggctcaggatatagacctgatcttgccctcacagggaaatcagacattaaacaagtagtttcaaccagtctggtcaacatagtgagaccctgtctctaaaaaataaattagctgggcatggtggcacgtgccggtagtcctagctactacagaggctgaggctgagcctgggagtttgaggctgcagtgagctgtgattgtgccactgcactccagcctgggtgacagagcgagaccccatttctaaaaaaaattttaaaaagagaaagaagttaccaggtgtggttgtatacaaaggattgtgaggatcaaatgagataattggattaggagcatagtgtaaacaaatactgctgaacggagatctggagaccttaaccctatgccttactgagccactaactagctgtgtgaccttgagaaagttgcttaatcttggttttgttttgttttgttttgtttttttgagatggagttttgctcttttgcgcaggctggagtgaaatggcacaattgatcttggctcactgcaacctctgccttccggttcaagcgattctcatgcctcagcctcccgagtagctggggttttaggtgcccaccaccatgcccggctaatttttgcatttttagtagagacagggttttgccatgttggccaggttggtctcaaactcctgacctcaggtgatccacccaccttggccttccaaaatgctgggattacaggcatgagccaccatgccggtcaaaagttgcttaatctttttaacctcggttttccccacataaaaactacgcagtttgtatgtgtgtgtgtatgtgtgtttgtttttaagagacagggtctggctctgtcacccaggctggaatgcagtggtgcaatcacagctcactgcagcctcaacctcccaggcacaagcgatcttcccacctcagcctcctgagtagctgggattacaggctgaagccaccatgcctggctactttttttactttttgtagagacagagtctcactatgttgcccaggctggtttcaaactcctgggcacaagcgatcctccctcctcagcctcccaaagtgcttacgttataggcatgagccactgtgccagccaactaaggcagctttagtgggatggtgttgaagacagctacatctgacatcctgagactgaccgtggagtatatgaaaagtgttttgaagcctgagtaacatagggagaccccatctctacatcccataatttaaaaattagctgggcatagtggtgcgcacctgttgtcccagctacttgggaggctgaggtaggaggatcacttgagcctgggaaatcaaggctacagtgagccattattgcactactgcactccagcctgggcaatggagaccctatctc

SEQ ID NO: 150724 - DNA, 376 bp, Homo sapiens
tgggatggctggacagaagaaagtgggaagggagggtgtacatacaaagaaaggagtatagtccatttttgtaaaaatttgctaagagttacggcccagaaatgtagctaaaagaggactatagaaccaagaaaaggtttttaagattagaaattctagctcatgtttgtattgtagtaagaatgatctaaagagggcaataattaaagcaacaaatgcttaaggatgtaaaaagagatggtagggttttcccagggttgagggattgccaggtaagtgcaatgatggcacagaagggctggggaagtaggagcctttacaaaggaatgattataacaatgaactatggactccaagttggagcgggagagggaag

SEQ ID NO: 150725 - DNA, 155 bp, Homo sapiens
catcccctgtgaggtcacatatgtctgtgcccgtgtctgtgatgagtatatttaacctcagggtcaagacagaagatattggaagagaaggagaagccactggctcatttcccagtttttccatttttattgaaaaaataaaagtatttcctgta

SEQ ID NO: 150726 - DNA, 330 bp, Homo sapiens
gggcgacagctatttaaccaatcacaatggaagcattgcattcatctggtcatatatctcttgttctttcagctaaccttcttctatagcacaaatccaacaattctgcaacctttctgttacacccatacaattcactgaccctactttttctctatcttaatatctgaagataatattttggattatctcgcccttactcagttctactgtatatggagttggccatctgttaaagggaaaagaaagcagtattaaaataggcaaccatttcaccaggatccctgtgaatctcatggccctgggagctagggacctgcacaccttacc

SEQ ID NO: 150727 - DNA, 432 bp, Homo sapiens
gtacttgtggttacactaagtgcatctacctgaatcccaaagggatttgaatgggaaaaagcaaacttctaacagcttcttaaaaatcaggtgtttcaacatctgctttgatttatgagtaatcccatattccaggtcttaattatttctctaattttttattttaagaagagaaaaagctcatctattacaaagcagaataaaaatatttttgtcactgtcagataatgtaagattatttgaagaaaaatcttttacagtataaccattagtagattttaaagcagagcctctaatttccaaatcattgggaagatgcacagaaaaagacggaaaaaaaatacatccacatgtcaacaggagttttccaagaatcttattattgtgattaccctcattgcaatgtaaattttatgttttacaaactttcta

SEQ ID NO: 150728 - DNA, 814 bp, Homo sapiens
aaattccttaatgatcagaccaatttgagttggattttcagttacttgcagctaaaggaaacccaaatgatatacctgctgctgtggaaatacactaaaatggattccaaatcaggagcctaaatttgtgtcttggttcttcatttacttgcagtttgacctcagacaaataaataatttccaggcaggcactggtgcacgtgtctgtagtcccagctacacaggaggctgaggtgggaggatcactggagcccaagagttcaaggctgcagtgagctatgatcataccagtgcattccagcctgggcatcaaagcaaaactctgtctctaaaaaataaaattaaattaaaataattaataagtaaggtttctatgtaaaaggggtagatgagattacataaaaagcttctaacgctaaaattctagaatctgtgatcctaaattggtttctaaatttaaaaaatgtaaatttcatgtaatggtgaagatcattagcttcttccagagctggactacagcttgggagtaggaagacaggcctgtgtgctcttcaggatatattaagatggcacacatcaaagtgtcatttgggaagatattagcataaacaaaaaatgccacagaactgttttattaattacttgagcctcgtgttttgtccttatgagctcttttgtcctggaattctgaaaattataatttgtcagtacttttgtcactcaaattttcctctctgtcatatgtaatatatatgtacatgtacatgagcatgcacacatactatttttatatgttaaatgtcttgaaatggaa

SEQ ID NO: 150729 - DNA, 402 bp, Homo sapiens
gattagaggattcaaacgacccgaagaccagacgtgaaaccaaggattccagggcgcatagcctcgggcaggactaatggacttaaaaaacacaggctcagcaaaatccacttcacaacccagatggtccacatcacaccctctttcagggacccagagcagccactggaagagaaggagtaggaacgctctcttaaagtccacttatcctattccttcacattaagaccaaagtccaatgtatttaggtaaaaaataatttcttttagaaaatgctaaggtttgtcttctgaaatttaataacagaaacaaaaaaagaacactagaagtaaggaagtgagaccagaaaacacaaactaaactatccttactaggttggaatggatggggtggagttcctat

SEQ ID NO: 150730 - DNA, 335 bp, Homo sapiens
tgaggacagaaagtaggttctggtgaagcaagagggggataaaggtgttgattatttgacgatctttcccagcctcatccaagtttgcagtggtttttttttcctcttttttgagactgagtctcgctctactgcccaggctagagtgcagtggtgcgatctcagctcactgcaacctctgcctcctgcgttcaagtgattctcctgcctcagcctcccgagtagctggaattagaggcgcctgccaccacatccagctaatttttggatttttggtagacatggggtttcaccatattggccaggctggtctcaaactcctgacctcaagtgat

SEQ ID NO: 150731 - DNA, 513 bp, Homo sapiens
tttgccctgtttcatgtctctacatcttcagcaactagaacacatttgtgctcatgcagggcaagtaatagaacactggcctgtaaaatggagaacccaaagcaaaaatcctgtacaacattgtgaatatgaaaggaaagcattggtgtccctgtgtgatgtggtccattggggaactggattcgcttttctcaggctcaggaaactggtctgattctgattctgttttgtgttgggttgccaggaggaggggatgatggaggcggttcttccataaatccaggcttggagatacaagcaattccttttacttcaatagcactggtgaatcatctattggaacaaggtttttattctcctcacctttaaaaaaacatatctccataaagcatttgtgacgaaataaatttcttgatggtctggtgttgacagctggtattttaggcgccctgctaatgcactttgttttgccgcagtgtggtctcaggaagcctaaagctaaagagaattgag

SEQ ID NO: 150732 - DNA, 480 bp, Homo sapiens
gctgaaacagcagacttataagggttataggcctgtgttctatcttgtggtacagaatgacgcagaaagacaaaaagatgactcatacaaatcctttttcctattaatcaaaacgttgtagaagggacaaacagtgacttttaccattcattcaactggtttgtacagagagagagaccagaagcctgaagatattctttctctgaagcttccagaagaatggagtggcttttgaggatcctgcatgctgcaccatagctagaggggtgtattagtccgttttcacactgccgataaagacatatgtgagactgggaagaaagagaggtttaattggacttacagttccacattcctggggaggtctcagaatcacggtgggaggcaaaaggcacttcttacatggtggcagcaagagaaaatgaggaataagcaaaagcagaaacccctgataaacccatcagatctcgtgagacttat

SEQ ID NO: 150733 - DNA, 462 bp, Homo sapiens
aagggatgagcctcagctgaggccgggcggggctgccctcctgtgggggccacacttgtagcccaggccaagacccaggccacgcatggaggaccaacccaaagtgctgcccgcctggccggtgtgggccgatgtcactccccagccccgacccagaatcggggactgggcccaacaacaaggtgcactcaagggggtgccacccgaacacagcacgttcgcaggcacccggggtcatcaggccacgttcgcaggcacccggggtcatcaggccatgttcgcaggcacccggggtcatcaggccacgttcgcaggcacccggggtcatcaggccacgttcgcaggcacccggggtcatcaggcctgagcccaaagtttagcagaaaggagaactgagacccagagagaatgagggacatctgagatcccagagaaaggcccagctcccagcccagccctccc

SEQ ID NO: 150734 - DNA, 492 bp, Homo sapiens
taaacattagtgttcttcctaacgatcaaatgagaccctgttgtctaccttttcaaaataaaaacgttctaacacagagtaaattgctcacttgcatggagtcacatcaacaccatgaaacctcagttccaagccggattgtaggtttctagccacttgttcagctggcattccacaacctagttatataatgaccagatccctctctcctaattacatgaccaggtactgtcacagatcactgaccagggttagggacccagggacccagggtgagagaaaggaaggtaaaaccatgagggcagagttgaaagaaaactacagctttctgaaacactgtgaaaccaaaaagactaagatgagcctttcccatgcaaggaggcagttgagaaaggaggagtattatagagttaattcctaggacaagatgtctaagtagaggatgttgggcagaacccgacgtagccaccaagatgactctgtaaagtcata

SEQ ID NO: 150735 - DNA, 332 bp, Homo sapiens
gtagtccccccagtttcacagctataagagcagcatgctttcagcgcctgtgaaagaaaaagcagagagaagcaacagggtatatgatgaacccatgaatgttaaagccatccatagatactgacttcattgcttaataagtctagctgaaaacaacagattgagatcatccaaaaagtgggtgatgcaagtagtttgcagtaagatcttatagggctgaaaataaactcttaaaaccaaatggccaaaactcccttccatggacaaagccccatactgataagatgctgtgaaaataatccaaagctgttgtacagctgttgtagtcccgg

SEQ ID NO: 150736 - DNA, 279 bp, Homo sapiens
ggtaagcccaccatgttgaagggctagtgaagctggagagcaggcagtgaagggtagagatggggaaggtgtttggaggttattctggttgtaacgggaagtggctacagaaataaagtaatttgattaaatctgtgattctcaaatgtttcggtttttttagcaggagaattctttagtcaaataacaagaatttcaacctacaactagataaaggtattgctctgactggttgggaagctagttaaagcccttctgaccctctctctgacctcttgg

SEQ ID NO: 150737 - DNA, 492 bp, Homo sapiens
caagcgattctcctgcctcagcctcccaagtagctgaaattaaaggcgtctaccaccacacctggctaatttttgtattttcagtgaaacccgtctctactaaaatataaaaaaatcagctgggcgtggtggtgggcgtctgtaatcccagctactcaggaggctgaggcacaagaattgcttgaacctgggaggtggaggttgcactgagccaagatcgtgccactgccttccagcttgggcagcaaagcaaaactctgtctccaaaaaaaaagagtcctttaactttccccacagcactacaatacaggggtgatggctaagtcattgtctcgtccagtgggagagccagggctcctgtagcagccacccagcctcctaatgccagtgacaggttgacccttttcgtttttgcagcacattggacctaggcagccagtgtagcctagagtgactcaggtccctttcccaagtgaccttcaatagctcaga

SEQ ID NO: 150738 - DNA, 422 bp, Homo sapiens
gggaggattgagaaaagggcattctgataggacaggaacaggacatgggcggggacaaataagagaataaaagctgcctcccccccaacccttctccacacggagccagcagaggcaacctgctggggtcctcttccgtggtggggaagctttgttcttttgctcttcacaatagctcttgctgctgctcaccctttgggtccttgtcttctttgagagctgtaacaccaggaaggtctggggctccattctcaaaatcagcaagaccacaatcccactggaaggaaccaactccggacccaccactccctcctattacaggcccactgcaggtgccttgctgagtctagtagagaatcctgcctgagccccggccaagagtgggagccagccaggagcgggggagggaaggcaagtgcgag

SEQ ID NO: 150739 - DNA, 251 bp, Homo sapiens
taatcattcaaagagagctagtgtaggccaaagaaagggcaataggctaaagtcagatacctgaggttcaatgttgggggaatgggcttatcacctaatatcaggagtcatctttaaagaattttcctctgctattatccagaactcttccttattgcttctcagaatttttttttttttaagagatgaggtctcaccatgttgcccaagctggtcttgaactcctgagcttaggcgatcctcctgcttca

SEQ ID NO: 150740 - DNA, 221 bp, Homo sapiens
ctgaggacttcctggaagaggtgacgtttgtgttaggtataattactacaggtaaatttctacaggtggaagtggtagggttttggcaggaaggggaaaaggcaagtaatggaggaagtgattctaggtgcaggaacaatttgaactaaggtgggaagggtccagggctgcacagagcagtaatgagaacagcttgtctgaatcagagggtcggtgggagt

SEQ ID NO: 150741 - DNA, 310 bp, Homo sapiens
ggcatcactgcactccagcctgtgtaacagagtgagacactatctcaaaaaaaaaaacacacacactcacaagacaaacaacaaaacaacataatatgaagatgggaagaagacagaggaggaaggaaacgaactatggtgtactgaaaagccagatcccaataccatctcagttaaactgagagacagagttagccccccattccccaccttttttttcaagacaaggtctggctctgtcgctcaggctggagtgcagtggtgcaatctcggctcactgcaacctccacctcctgggctcaggccatcc

SEQ ID NO: 150742 - DNA, 199 bp, Homo sapiens
acgcctgtaacattttacactcccattagcagtgtgtgagagttcctgtataatataaactagggttttcagctttctataaattaagagatttcagaggactttttttactgactctccagacattggcatagtattcagccttaaaaagaactgaatttctagccaggtgccatggctcacacctgtaatcccagca

SEQ ID NO: 150743 - DNA, 235 bp, Homo sapiens
ccacatggtggactccacatttgcctacagttccacaaagtgttgtttaaattcaaatcaacctgtatttactgtgccaactttatgttcactgctgtgccaggtacagaagaatattaaaaaatgtaacaagagcctcagaggaaatgtataactactgagtgcctacagccctttgttctacttaaggtacatttactcattcagttttcactagtatttatagaccctctac

SEQ ID NO: 150744 - DNA, 416 bp, Homo sapiens
cccaaatgcaccaggtgtcttccactttctaattgagcaaggcagactcttttccagccaacagtcttaaaatatttacccaaattttgggttcactggattactgctttaagctggtgagcaacccaactgaaggtcaatgtttgtttcctgaagttgtccaatggccgtgtggtactcagacctgaaaatgataacgttactccagattgcaaactccccaaggtgcatcctggagatggaagccagcccacaatattttctgatcggtcagcataagtgatcctctcttttgagttcaaggtgggctcagaattgaaactgtcttgagataaagcagatcagccccaattcacccctgggctctgagcagaggaatgtgaaaggcccctccagtcagggaaggcatctgctcc

SEQ ID NO: 150745 - DNA, 408 bp, Homo sapiens
tgaacctcaactctaccaactgtgaattctacattcagcaaacttagtttaatctgtgaagactaagtcattctcacatttctgggaattaaggaaatctaaaattaatgcatccatcattcaattctatgagctcccagttcgcctcgtcgccatgcctcggaaaattgaggaaatcaaggattttctgctcacagtccgatgaaaggatgccaaatccgtcaagatcaagaaaaataaggacaatgtgaagtttaaagtttgacacagcaaatacctttacaccctggtcatcactgacaaagagaaggcagataaactgtagtccctgccccctggtttggcagtgaaggaactaaaatgaaccagacacactgatttgtgctgtattaaaatactaaaaatcct

SEQ ID NO: 150746 - DNA, 319 bp, Homo sapiens
ctgagggcacccttgatgggtgctgcagtgatggggagccatggaaggcttcaagcagggaagtgatgtgggcaggtttccatcttattttctgtctctcgggcctgtggtgttaaaagcagcaagacaagatgggggcctggctagccgggactaagaagacagagagtagagaaatctgcccagagaggtgttctgcggaagtccacccatgcaaagccacagctgaactgtccagaaacccaaacatacagcaaccaccattctcaagcacaacgggagggtcacctctgaaaggccagcgccagggagaagtcac

SEQ ID NO: 150747 - DNA, 150 bp, Homo sapiens
acaaggaggggagagctttgtcagccaaagcctaggggtggaacgacaatttatgtttatttactcaggtgactcatgttagggtctcattaataatcccaccaatagagagggaggggctggggaacacacaattttaagtgtatctca

SEQ ID NO: 150748 - DNA, 316 bp, Homo sapiens
taaccagcagcagtcacttctctgcagaggagaagaggtgagagtagaggaaggcagaggcctggatccgggatgaactgctgggtgcagcccggggacgggagccacgcctgcctcattcaacatcacatgctggaatccaactttgggccaccgtggtcgcgcatggaatacaggagtggacggatgggcacctaacccatgtgattcctcccccacccaatgagcagaaaacatcagtgagggggaggacaggcgagccaaatacagggaggacagcacattttctggcactgaaaccggtgctggggtcact

SEQ ID NO: 150749 - DNA, 346 bp, Homo sapiens
gtgaatttgaagggtaccgttgctacaaatacattttaaaacacactaaacaataatcataaacaaatttaaataagtgctagttaatagtctgtcaaatggtaaatatacagtttatttttgtgaccagttttgcatttctagacatcaaggaatatctaaaataatggttatctgaaggatctttttacaaaaaagttgactatgaggttacaggctgtcctccttatccctctacacacttgtatcataacaccttacagcgtttatcaaatatctgtttcctcctgttaaactgtaagctcctcaagtctcagttctgctttgtttgtatatcactgacacc

SEQ ID NO: 150750 - DNA, 454 bp, Homo sapiens
cttatgttgtaaacctgtggtctgtgtttaagacattgaaaccattagaagtagttacattagagcttttttgtttgtgctttatttacttattagagatggggtctcactttgtcacccaggatggagtacagtggctattcacaagcgtggtcgtggggcactactacatcgtgagactcctgggctcaagagatcctcccgcctcagcttcctcagtagctaggactacaagttcacaccaccacacctggctggacctgttttagcttctcaaggagtaggacagagcctaaggagagagaagacaatgaataagaaaattagggctggacatggtagctcacatctgtaatcccagcattttgggaaattgaagcaggtggatagcttgagtccaggaattcaagaccagcctgggcaacatagagaaactttgtctctacaaaacata

SEQ ID NO: 150751 - DNA, 374 bp, Homo sapiens
caggaactcaccacagttccacccctctcccaggaactcaccacagttccagccctctcccacgaacacaccagcaccggtgcaaaaaagagctcgcatgttgtcatcttggaaacagtacagcgcgtggtggggtgggacctacgacaggagagtttggtggctgggggcagggagaggatgtggggtgggagtgcagaggagcaagagcaagtcctctgagacctggtcccgggatcattttgggggagctagtcctgtcatcttcctcctccccactgttcactgagcacttactaaatggcaagttttttacagatgtttttgagttaatctttttaacttttatggagcgctgttactatccctgtttt

SEQ ID NO: 150752 - DNA, 345 bp, Homo sapiens
atgtgtgtgggggtgtgcacactcgctgggagcagggaaccaggcacttcgggcacagggggcagcttgtgtcctggtcccaggacaggagggagatgttatattgaggatatggagggagggctgtgtgaccagagcacagtgtaagcgggagatctgagagaggaggaaggcaggggctaggccacacagaaccctgtagccacatctgggatgttggccttcattctgagtgcaaaaggaagctgtgactgttaattttatgtgtcaacttggctcagccatgtgccagttgttcggtcaaccaccagtctaaatgttgccatgaagatattttttagatga

SEQ ID NO: 150753 - DNA, 465 bp, Homo sapiens
gtatatttgatccttgcagtgtcgtttactggtcctctatctcttgagtttcctgaaaagggaggttatctctagagttggattaaattcaggttcagtaatttgggcaagagtacttcataggcgggtctgtgtgcttcacataaaatcacatcaggaagcatacggtgttggactgtagtagatggtagcattaatggctccctcttaccccagcccattttttctattttgggtaaaggaattctgtttttatcagtcagctgtagctcaatctgagatgggtatgtaggaggagtaagaaattaagcttcattgttttaagccaatgagattttggaattgctcgttaccacagtataacctagcctatcctaactgatagacaagtctagaatgtggctcatcctacagggcaagcgacctggtttcttcaaaaagtcagtggcataaaaaatgttaatt

SEQ ID NO: 150754 - DNA, 174 bp, Homo sapiens
  misc_feature (148)..(148): n is a, c, g, or t
cttttacagcgaggtcattttggaaaagagcccggaatgccgcccatcccccaagcctgagagcacttcaagagtttgtaaaataaaaagcaacaggaaaccagaaacgcagcaacgtctgcatcgtgggaaggtgaagagcttcccntaaggatgacccgtccaatgccggtc

SEQ ID NO: 150755 - DNA, 307 bp, Homo sapiens
tgtcccacggaaacagttgtgccctgcgtgggcctggcagctgctcctgcagaagccacaccatgctcagagtggctcaggcagggtcctaggaccacagacctttcttcattagtggtgctttgcaggatggaggggacttgctcagatggagccagagccaggaaagcataagccaccctttctaacacatcctcatccccacacacccctgaggcggaggctgatggagggtagcagccacacctcaagtgcaggtcaggttcccgaacacagagctggaagccaaggctgatggagtgattcc

SEQ ID NO: 150756 - DNA, 301 bp, Homo sapiens
gatttatttatttcactgacgataatgtcttcaaggttcatccatgttgcggcctgcatcagaagtgcctgtttgtttttgttgtttttttttgtttggttttattttgttttgttttgcgttttcatggagtcttactctgtcgcaccggctggagtgcagtggcacaatctgggctcactacaacctccgcctcccgggttcgagcgattcttgtgcctcagcttcctgagtagctgagattagaggtgcatgccaccacaccagctaatttttgtatttttagtagagatggggtttg

SEQ ID NO: 150757 - DNA, 300 bp, Homo sapiens
aaagggacaattctcatttcaacaattcattaaggacacttagctaagtaaaatttagagcacaaggtgctgatcatcctcaagatgaatggtaaggagaaaagtggacacagttaaactgtcttttaatgccctcaactctcctgggctcaaaatcccagaaccaacgtacttctctttcattttgccaacacccacttcctctttctttcctcgggaccgtggaaatgaagtctgagtctcaacaaggtaatggctgccaacttcagagaggttttgtttttgtacttttcttttttg

SEQ ID NO: 150758 - DNA, 191 bp, Homo sapiens
tggattgggcctgaggtgatttgaagctcctgtcttggagtttaacttagttataacaaacactgagttaatcctatgcaggagacacaaagataattaatatatggtctctgtgcttgaagagacgctaattttctgtggttgaagagatgctgtgaattgtgtgatagtggcagctctcaaaaggacaa

SEQ ID NO: 150759 - DNA, 270 bp, Homo sapiens
aaaaaaaaaaatcctttagcaagtttttagaaagcagattggacctagaaatcatattcttgaaccatgttgctgtgcttgtagatccaggcaatgtttaacattacaggacagcatctaacctcataccttgaatatatgataggaatttaataaatattctggccgggggcagtggctcatgcctgtaatcccagcactttgggagtctgaggtgggcggattacttgaggtcaggagttcgcaacatggtgaaaccccgtctctact

SEQ ID NO: 150760 - DNA, 402 bp, Homo sapiens
ttagaaggtgtttctctcccacctgagcctttctctcaggaaaattctgacatatccttggactcagcacccaggtgatgggtctttgccacctatggcctgcctacatagaccattgtgaagtatagctgctttcaatacccacgtgatgtaaccgttcttccagggcactgccttctagggaaattgtgatgcatttctgtgtggatcacataggtgatgtgaatcttttcactggactgatccctgctcactgggggataacgatatgtattgctggtttcagcactgagctgatgtgattcttctcttctgcaagaaaactgacgtattgctgggcccaacaccaaggttattttgcctggcctgccctcaaaagacattgtgacatattgcagtgcc

SEQ ID NO: 150761 - DNA, 496 bp, Homo sapiens
gttatagatgttcaatcgagacagatccgctcaggaacatgtatgatcgacgaccgactattcactgaattttgtcttggacctatattttaattacaggccactctgagagtgaatcttaactagtttttttaaagggaagcatgttgacttatttcctaaggacattatgaagaaaaccagagacatttttaacctatgtaatcactgagttgccataggaaaaactgggtaattgaatatgattaaaagggagtatcttttaggtggttctataagcaagaaaattgccaccagggcaacagaaatacaggatgtaaataaaatcttcattaagcaaggtatatgtaaactctacaagtacggcaggttaatgaccataaggagagaatggccctcacctctggatgctgtggcagggacattgttacagatgatctggtttaaatggcagcatttgaaaataaaatgtaaacatgaggcagtaggagtagaa

SEQ ID NO: 150762 - DNA, 365 bp, Homo sapiens
tcatcatttggcatggaggagatgatggggttgatgattgctactgatttcaatttctttcaagatagctacagagacttacattaactgggtgctaaaatacaatgcataggtgaaggttagtgtagaaagagttggagtatatgttgtataccaacattttgctctgtaggtgcaaataatgcaagatgcttctgtgtgttatagctttattacttaagtgaattcattacataagaattctgaaatagattggattaaaacttatgggttacatgtttacaaatgataaaatagtcaatttggtggttctgattaattttctattagactaggaaaatactaagtttgtatagagtcacttt

SEQ ID NO: 150763 - DNA, 386 bp, Homo sapiens
ctgttagttacttaatactgccttgaattatgagaaagcctctatgctaaggatgacaatttttgtttgtacccctaatcacaaatgtctttgtgttttacttaatacattgaaggcatccttgatgttaggacatgtatattaatcttgcatttcggaatggccgaatagtgttgccttgtatacatgcaacatgctgtgtttagccattcctgtacacttaccttatttctttttcttttttctattataaacaagctgcaatcaaacatatattgcacacttatatgagtatgactgtaggataaatttctggaattgatatttctgtgtcatgaatatatgcattgtaatatttagtagttattgctctctagaaatttatc

SEQ ID NO: 150764 - DNA, 116 bp, Homo sapiens
tggtattaaaatgatgctgtccttatagaatgagttagggagtcaatccacatttgttaaaccctagatttcccaaacaaaattcatttcccaaggaatctttttctccacttttc

SEQ ID NO: 150765 - DNA, 538 bp, Homo sapiens
tggctcaggatacattgtccagatgttggcaaaataaaagccaaaaaggaatatttaaagtcggctgcttctcttgtgactccacagctcttttgccaaacatgcaagcttgtcttgttagaagctgaagcctgagccaaggtcttgggtggacaggacttgaaggaaactttgggccatattcaaacaatcttggactgagtagtggtcactaaattctccattagaatacagctattcacaaactcaagggaagtgaactgcgaagcaaaaactcagagcattagtattgggactttgtaaaatcagcctgcaaatctgaggaaccaaccatgctagtgtcaccaaaaggcatgaaggacatgtgggaggaagtaatgggattatcacctactatctgagacagaaggcatttttggagtctttaagactagaaggtaccttagagaccctctgctcccagttttccatatctatctctaccctggacttctgagctcagtcctctataaaagttggccagagacggtaacatcag

SEQ ID NO: 150766 - DNA, 826 bp, Homo sapiens
  misc_feature (22)..(22): n is a, c, g, or t
  misc_feature (25)..(25): n is a, c, g, or t
  misc_feature (36)..(36): n is a, c, g, or t
cctagcggactgactctcttanttnccaccgctacngatggaatctgactctgtcacccaagctggagtccagtggcatgatctgggctgactgcaatctccatctcccggcttcaacagattctactacctcagcatatagagtagctgggagtagaggtgtgtgacaccacacctggttaatttttgtattcttcatacagacagagtttgactatgttggccaggctggtctcaaactcctgacctcgtaatcctcccacatccgcctagcaaactgctgagatgagaggagtggcccactgcacccagcctactggtttatttttaaaaatagcaatttgggtcgggcgcagtgtgtctcgcctttctatatcaaccaacattctttctcgagtaggctaaggcaagagaatcgctggaacctgggaggcggaggttgcagtggcccgatactgcgccatggcctgaccaacagaacaagactccatctcaaataaattaataaatacgttagttaatcgaaaagtttaaaaagaaaacttcaaggacgttgcaggaatgcacgggaatgcttctctcattcctaaagatcagagcagaaacacagtaccatcaggttgagatacaggccattgtgaatctcttctcactgtgctcaactgacaccaaagaagggcaggtttccatgccgcccgttcatcatcaccgctctcgtcaagtataattgcagagtcatgactacacagagatctctcaacccaccaactgcgtccttacttgtatgagtgcagttgaaagaataaacagggcatttagcgaagta

SEQ ID NO: 150767 - DNA, 991 bp, Homo sapiens
  misc_feature (22)..(22): n is a, c, g, or t
  misc_feature (25)..(25): n is a, c, g, or t
  misc_feature (36)..(36): n is a, c, g, or t
cctagcggactgactctcttanttnccaccgctacngatggaatctgactctgtcacccaagctggagtccagtggcatgatctgggctgactgcaatctccatctcccggcttcaacagattctactacctcagcatatagagtagctgggagtagaggtgtgtgacaccacacctggttaatttttgtattcttcatacagacagagtttgactatgttggccaggctggtctcaaactcctgacctcgtaatcctcccacatccgcctagcaaactgctgagatgagaggagtggcccactgcacccagcctactggtttatttttaaaaatagcaatttgggtcgggcgcagtgtgtctcgcctttctatatcaaccaacattctttctcgagtctgatgacctgggatctcccagcactttgggaggacgaggccacaggattcctggaagttggagttcaagaccagcctgggcaacatgggaaaaccctgtctttactaaaaaggtaaaagttagctgggtatggtggcacgtgcctgttatcccagctactcgagaggctaaggcaagagaatcgctggaacctgggaggcggaggttgcagtggcccgatactgcgccatggcctgaccaacagaacaagactccatctcaaataaattaataaatacgttagttaatcgaaaagtttaaaaagaaaacttcaaggacgttgcaggaatgcacgggaatgcttctctcattcctaaagatcagagcagaaacacagtaccatcaggttgagatacaggccattgtgaatctcttctcactgtgctcaactgacaccaaagaagggcaggtttccatgccgcccgttcatcatcaccgctctcgtcaagtataattgcagagtcatgactacacagagatctctcaacccaccaactgcgtccttacttgtatgagtgcagttgaaagaataaacagggcatttagcgaagta

SEQ ID NO: 150768 - DNA, 466 bp, Homo sapiens
atgcggaattgctaactgcctgcagtgggcacactgacttcccttgtctgtttagaagaacctctcttaggaaacagcattgggttggccacagtttgcctactcttgagaagagactttgccccacaagtggtgaggatgccagaagcttgttctcttccataaaacaggccccaaagggcttcctcctggaagtggttaattaatcatactaccttatatgtttacaaagcaccaccccataaattaccacctcacagcaactctacaaggcaggcggggctgacatcttcccctcttctaaatgagggaactgaagccagatgaggtatctggagagtgagaggctgagctagaggtgggctccaggccttgtgcctccccagctctgcacactgcccctgccctgctgtgagtgtgacaggacattcctgccatgcatcccctcctggaggaggaggacaga

SEQ ID NO: 150769 - DNA, 319 bp, Homo sapiens
caggctggagtgcaacggcacgatctcaccttactgtaatgtccgcctcctggcttcaagcaattctcctgcctcagcctccagagtagctgggattacaggcgcctgccactcctggctaatttttgtatttttagtagagacagagtttcatcacgttggccaggctggtcttcaactcctgacctcaagtgatccgcctgcctcgatctttaacagtgccaggattacaggtgtgagctcccatgctcagcctttagttggttcactttgttgcggatctttctctccttcccacataggagtgctatgtgcgact

SEQ ID NO: 150770 - DNA, 545 bp, Homo sapiens
tgtgtccattcaccagcggcatgagtcgtggatgggggtgcgacttgtggaattggagaggaggggaactcaggagggaggcctaaagacacgtctaggtaaagagaccatggacaatgacaggctagggcaggacccaaggaaatggctgcaattcagtggaaaaagaagagggagtggtaagagctccttctcttttgcctctaaagaagcagaacagctaagggaaaaggtggcccacagtgttaaaacacagagaaaccacacagaatgtgggataatagatgctggagacttggaggggtgagagggtggcagggggtaagagtacttaatggtacaatgtacatcatgcgggtgatggttacactaaaaggccacacttcaccactgtgcaatatatccatgtaccaaaactgcacctataccccttaaacttatgcaaaaagcaaacaaacaaagagaaaccaaggcaagtggcagaaacaaaggctgagagctgagaaagtgagttcatgtgagtatggtaggcaggggccagaaag

SEQ ID NO: 150771 - DNA, 424 bp, Homo sapiens
ctcccagctttcacattgctcccttcaatctaggctcaacatggaagccagagagagcttcttacatgtaagtcagttcacatggctcctgtgttcacaaggtgtagtggctttcctctctctcacagtaaaagcctgcgaggccacatctacacagtggcctcacgggctttcgctcatctggtctgtgtgacatctctgacctcatcttttcttttactcactgtgattcacctgctccagccgcacttgtccttttgatgctctcaccccaggactttttttatttgctgttctctctgcctggagccttttcctcccacagggtctgcatcgcttagtccctcacctccttccagtctttgttcaaatgtcacttctctagtaaatgcttccctggtcactctgttttaaattgcagccc

SEQ ID NO: 150772 - DNA, 363 bp, Homo sapiens
tcactcttgctgtgtctgccccgcctctgagaagcctggcggcttcttagtgtggctcggtgtcttccacaaagaagacttccccgtccatcagggagaaacctagtggcggtccgcgtcatgattgtttccctctccacacctctttctggatgattgggcagctgtggtgatcctggagctctgggcttccatacctgtgtgggacagggaagctctctcggtctccatggcccaagtgatggctgcacgctcggtccaggaagaggcggaggcaagcccaccgctcctgacattggccttctaggaaaggcggtgttgcatcccacctgcacttcctctctgggtgggtcagaacataag

SEQ ID NO: 150773 - DNA, 469 bp, Homo sapiens
gtcaccaagatggtaaagtaggggacactagtcttcatccccagcaaaaaaattagagagagagaaagacagctattcaaacaccataatagccctgtgggagctcaagggcccatgtaagaagctgcagcaaaacggaacaaatggctggttatatcggcatacctaagatgcctacagatggctagtgacaaagaataaaggcaacagcctattggtgacagccgtggagtgggaacttccatggttcccagcagcctgcttcacagaagacaccagcatcttttgccactgaggtaaccaatagccatttccaccagggaaccccagagaggaaggcatggctccatattcccttgctcaagaagtagctgctgttgtaccaccccagaaccaaaaccaccacctctccaaaccttgcacattcccctaacccccaggtcacagtcacttcatgaatgtgcatact

SEQ ID NO: 150774 - DNA, 217 bp, Homo sapiens
caatagatgctaaaactattaggtgaaaagttttgggggatgagatagtacccatggtgccaaagcaccaatgaatggattacttcctgacataccttcgtaaggaggagatccagtggttatcttaactaagtgaccaaatccagcgtcatcagcagacggggcaaagtggcatgtgctttctggcatggcactatatgaatcacacaacattacc

SEQ ID NO: 150775 - DNA, 275 bp, Homo sapiens
taggtaagggtcttaaccaactgatgcctcagtttcttccacagagaatagttagagggatgctgtcatgaactaagggaagggcactgaatttttttttgccaatatcaaaagtgacatttccccatgatgttcaagactcaccaggtttctctctccacctgtacctacacccagctagatcttgtcgttaaagatgtatggagggaagaggtttcaatccttccctccttggcaacctacattgttaagtgactcaaagtcatgtgattttt

SEQ ID NO: 150776 - DNA, 159 bp, Homo sapiens
cgtcctctgtccccgtgttcgtgtgttcaccgtgtgcatgcgtgtatgtgcttgttttgatgcagggaccaccctcagctgaagactcccccaggtaagcttaatgggcagtctctgggcctggcccggctgggacctgccacaggccccccagggccc

SEQ ID NO: 150777 - DNA, 742 bp, Homo sapiens
accgctgcgtatattcaccccctcccctccatttaccgcccaacgccaacaaaaccttaattttatttcaccctaatggcaaaatggtcaataaaagcttccgagtctcttgctcttgctctccctgctcctctctcaccgggcagagaagtttattaccttaaggttgttcttgaacaaaagaggctgcacatattggatggctaagacagaaagatctcaccagtctggccttccgaagctgaaacaggctcacacagttgggaagaagaagaaccaagatataaactcagatttttttcttttttttttttttgagacagagtctcactcttgttgcccaggctggagtgcaatggtgtgatctcggctggagtgcaatggcgtgatctgagcatctcccgcgctcaaacgcttctcctgcctcagcctcctgagtagctgtgttataggcatgtgccaccacacctggctaattttttttttttgtatttatagtagagacggggtttcaccatgctggccaggctggtcccgaactcctgaccttaggtgattcccccgcctctgcctctcaaagtgctgggattacaggcgtgagccaccgtgcccagccaaaactcaggtatttttaagctccaaatccagttttttttccttttgttttggctacaccatgctacacattttatctaatgtatgttatggtcctaactataaagtcaagatgaataatgaaata

SEQ ID NO: 150778 - DNA, 726 bp, Homo sapiens
acagcatcgtgcccacaaccacaagaacagacagacttttaggattttatttcaccctaatggcaaaatggtcaataaaagcttccgagtctcttgctcttgctctccctgctcctctctcaccgggcagagaagtttattaccttaaggttgttcttgaacaaaagaggctgcacatattggatggctaagacagaaagatctcaccagtctggccttccgaagctgaaacaggctcacacagttgggaagaagaagaaccaagatataaactcagatttttttcttttttttttttttgagacagagtctcactcttgttgcccaggctggagtgcaatggtgtgatctcggctggagtgcaatggcgtgatctgagcatctcccgcgctcaaacgcttctcctgcctcagcctcctgagtagctgtgttataggcatgtgccaccacacctggctaattttttttttttgtatttatagtagagacggggtttcaccatgctggccaggctggtcccgaactcctgaccttaggtgattcccccgcctctgcctctcaaagtgctgggattacaggcgtgagccaccgtgcccagccaaaactcaggtatttttaagctccaaatccagttttttttccttttgttttggctacaccatgctacacattttatctaatgtatgttatggtcctaactataaagtcaagatgaataatgaaata

SEQ ID NO: 150779 - DNA, 338 bp, Homo sapiens
tgacaccaaaatgtatgtgtatttgtataggggaaagggaatgagttagcaattaggatcctgtgccttcatgaggtccctattaacgctcatcttatctcaataagattcctcgcttgccatccccaaatccccatcattttgcccaggtcagcctctcccttttgcagcgtcatgggacctattgatctctgaggccaacttcaacttgctggattacagccctccctcatctcttacagttagatactgtggcaggtttgatgaagaagcaagaccagaaaaaatactggttatatcatttaaaaaacaggaaaaaaggctaggcgtggtggctc

SEQ ID NO: 150780 - DNA, 253 bp, Homo sapiens
cctgttgggcagacccgctcatcaagcacaacacagttaccccttaggaagtgaacataaatcgatgttggttcctcttatcaagatccggctgagaacgagatgagcacaatgggaaactctttaaacttctgtccctttctcctcagcccaaactgcccattgtcgtagaagcaacattccattctcacccacagttcaacctccagaacatggaaatggcaggggccagccaatcacaggttacaaaccc

SEQ ID NO: 150781 - DNA, 289 bp, Homo sapiens
ggtggtgtgcagtcctgattagaagaacaatccaggacacttgaaatatagtttggaaaagtacagttaaggtcaccccattaacaagcggacagtcaggcctttagagaagaaagaccatgaggaatcccatatacctggagacaaaggaatggtttgattacttctagaccaagctcaagtggtggggaaattgacaatgttgtcaactgggtttgaaaacgcacttggccatctttctcagatgccctactcctctctatatagccttctttgccctgggtcagcc

SEQ ID NO: 150782 - DNA, 349 bp, Homo sapiens
tgcacaggattcccagagattgagcaaagtgctcataaacagggatttacaaacccacaaggagagaagtcactatgagtgaagaactagcaagataagaaatcagatttagaacatccctccccgaggtggcagatgttggactgtcagattcagaattgctatggactgaaccatgtccacctgaaatttgtatgttgaaaccctagctcccaatgtgactgtatctggagatagggtctttagggggtaattaaggttaaattgagttataatattggagccctaatctgaccagactgtagccttataacaagaggaagagagagagagagaactctctattatg

SEQ ID NO: 150783 - DNA, 416 bp, Homo sapiens
ggtgaccccaggtttacaggcgttgtcagtgacccgtgggtatgtgccatggttgaaaaagtacttctgagtgtcagaagagctggcttttcaggctctgccactaacaagctctgggacttcaagactaaatgaaagcattaggcactgtgttagttgttttacataacctcatttcattcttacaagcagtgaggcaggtgtatcacaggcattttttaaaaaatgatacaaaggctcggaggcataaatgctctgtttaagtgtaaaaagctaagagacatatttggaattcaaacctacaatggtctaccacattatactgtttcgcatgacttcccatgtgtaaaaatcttaaaatgaaagcaaacccaaaaatattgtacagcaaactgttgctgtatttttcaaaaatt

SEQ ID NO: 150784 - DNA, 429 bp, Homo sapiens
tccttccatacccattcacattactggaagcattgttcatgcacacataagtataatggccgctcttcttctgccaagatctgctctgaagaaaaggtttgatgcaatcaggcatcactaaggtttgtaagcatgacaagacttagtgctgccactagtctacagcatgaagaggcaatataccacagtgggaaagcagggccacgccttttacatgtaactgaactggccagtcacttgaccttgagcttcaaatcctgcatcatcactcaggatgcacttttcacttatacctttacctagaatgtaaactcgtaagtgtaggacctctgtgtctttaatgctactttctcagtgtccagagtggtgcttgacacatgggaggcaatcaacgaatatttattgaagaaatgaaataacgataactta

SEQ ID NO: 150785 - DNA, 529 bp, Homo sapiens
tcgatagagacagtgggtgctgtgagccattaccttcactgcttccccttttcccacatgcatatttacatcctcaaaattataatagatgaatcagacataatttgcttttatggaagtcatgtagttcacttagtgttttgtggccccacccttttaatttctccagcataaaaagtaaaaaatctgagcctcagtagttggtagtttctcgtatcccctggaaaaccttataaaacagtcacactggtgttctgtcctttatcacaggacctttaaagacaggttatatattttgaactccacaggtactccctcaagtttctttaaagcagtgagtctttaacctgctggaggttatggatcaatttcaaagaatctgttaacccactgaaataatatacaaaatttttttgcatgtatctatacattttcctttcctgatacagagtttacccctgacctcccattcatagtgggtttctctattcttagtggatgtgacaaaaacatcactaaccccaatatc

SEQ ID NO: 150786 - DNA, 197 bp, Homo sapiens
tgaaatgctaatgtgcagaagtcaaaatgattaggcttaaatgaaatgttggtgaaagatgaatatgagagaattcctggcctaatgggggaagacatgctaaaaaatattagatgatctttctgccttcaaatccatacaaagtgcctgtgtttgcaggcaaagctacacaggagaactgagcatgatgaaatgtg

SEQ ID NO: 150787 - DNA, 605 bp, Homo sapiens
ccccccaacacaaaggggcaacggtcaaagacaagactggaattgggccttgcgagctctgcctggcaaccttggctgtggaggccacagtggacagagttacccactctcttctgggcttgttcccaccatctgtggggtgggtgtatagggctggggctaagccagcttcagaagccccccaaccaccaccacaccatcaagtctctcaagtgggactgctgtgctgtggcacgcacacccacacacaagttgccaacagtttggaagttagccccagtttccaaatatgtcaacccaaaagccattcaggtaaatataagtgggagccactacaaagtgggactttatcaggcagatacagagaaccaaaaaatgaagttgctgaaagctgctgtggagatttaagtcttttgtttttaacggaggaagataatgaggcccaggaacacagcttcctagagtaagacagtgttccgtcctggcctccaggatgttcaacacctatcccaagcttctgagcattctgtcctcactggcttctctcagtgctatttccaaataatctagattgcaagttatcacaggccacattcctgaaaaaa

SEQ ID NO: 150788 - DNA, 703 bp, Homo sapiens
ctaggaatggctttcaattacaaactaaactgtctcatggcttttgcttctttcactctaaaatcatgatgattgatgattttttatgtatggccatgattgtaaatataaatattgttaacttagaaaggtttaatatttaaaattcatctaaagcactgatctctctctttttttttttttttttttttttttttgcggcagagtcttgctctgtcactcaggctgcagtgcagtggtgcaatcttggctcactacaacctctgcctcccaggctcaagcaattttcatgcttcagcctccctagtagctgggattacaggcatgcaccaccatacccagctaattttttgtatttttagtagagatgggtttcaccatgttagccaggctgctctcgaactcctggcctcaagtagatccacctgccttggcttcccaaagtgctgggattacaggcgtgagccaccacaccccgccatgatctcttgttatgcttgttactttcttggtatattttgatttggttcatgttacaattaaagttttggataattatcttttagataatatgtttaatgaacattcaaatatgtgattcagtcaagaattaccagaaatgtggaatttatctcatattttgaatttctttatgaaaagtgtcagtcatgtgtcattagagatactctattattgctaaact

SEQ ID NO: 150789 - DNA, 321 bp, Homo sapiens
tgccattaggatacgcagtgtcacaggaaccatcctaacctcccgcccttagtctccccttccccttccttgtaatgtttgacctcggcagtttcctttttccttctattaattacaacattctatcattctaaagtatatcttaagtaagccaaatgcttgcatttgagaaatatttattgagctggtgagtgttggacactatgctccaggctggggatgcaaagatggatgaatacgacccatgggctttgccctcagggagcttcttccagggtgtgagagaatggttggtatgtgtagatgcgtgcatacatctgt

SEQ ID NO: 150790 - DNA, 269 bp, Homo sapiens
ttccagtcagtgtctccacaaggttaagaatgtgtttgccagatgatctgggaagacctaccattaccttttgctagagggtccccatcccaccccaccttccagctccgaatttgccaagtggaagagcaggccctgggaagaaacaaaacaataaaaactactggatgatttctactgaagaaggctctgactcccccatgaacatctttctcatctcaaataaataaaatgcagcgggggcttgaactagccaccatatccctgag

SEQ ID NO: 150791 - DNA, 270 bp, Homo sapiens
aatgtacaattaagttttcttttctcttgggcatccattgtgtctttaatccttgttttctttcccaagtccccatcccaccccaccttccagctccgaatttgccaagtggaagagcaggccctgggaagaaacaaaacaataaaaactactggatgatttctactgaagaaggctctgactcccccatgaacatctttctcatctcaaataaataacgatgcggccagattcctcttattcatactcatatcccgctattatctccct

SEQ ID NO: 150792 - DNA, 430 bp, Homo sapiens
tttcaaagcaacatggcatggggaaggaggtcacaaagagacagtgagggaatcagtaagccacaaggttctaacagcccctggttccaaagggccctctccatggtgatgttttcaaaacatcaggcattactctccattctgttcttctcttcctgcaggtttactttagcacatacttacagtcacctcctatgggcataaggattaaataagaaatagcccacgctctcagggggcagttgccagagagtgggcagaagtgaccatagttcaaggcataaagttacgagtatcatcagggagcagacaaaagccaggaaaggtcagaggcaggtgacttcatttcttgctgcgggaattagggaggttgcaagaagggcaaatttgagcgggcactcatagagtgagtaagacttcaacagctggg

SEQ ID NO: 150793 - DNA, 484 bp, Homo sapiens
ggcatgtaaacaaaacagcactcaggaaattccaaagctgcatggttcactacacagtaaactcaagatctgagatctgagcttatgtaaattagccttgtatctggaataacagagctgtgggcaaatgaaatccagtttaatatgtcttattatcaggggacagtagcaatctaaactatctccttaaataatggaaagtttgcttaattggcaagaagaaattcatgtgagtaggcagaggagagaaagcaatagggataagacttagatttatttttaaatgagacaagataccattattccccagaattgcaagaagtaattgcagagtgggcatggctttcgctggagccttcccttagcagagggtgtcattgtgtaaagagaacttctaatagccccaattaaaaagccccctgtcctctcctgagaaacagaaatggaataagggaattctaattagagcagtgatgggggctgt

SEQ ID NO: 150794 - DNA, 344 bp, Homo sapiens
ccttggaaatcaagttcttgagcacttttgaaaacagactaatccaaaacatctgcaagaattttatctttaaaaacccaggtgtctaaaacataaggggaaaaatatacaaatgagactttgtcaaccaagtttttgaaaaacaggtttctagcagaaaaagaagcatctagaataaaatgcagctggctttatgaatctttattttccatggtgattcttcctttttggtcttcaacaaagaatggaatttctaggtgagtcttgtcagattttccaaaagtactattaaactaaaacgaggggattccaggcaagataacatctctgggaggctcaactct

SEQ ID NO: 150795 - DNA, 209 bp, Homo sapiens
tgatgggggttaaagtattactatgcaccagcacacattctctcaatcacattagactttaaaattccaaggtctggtttgccttttacaaggaataatattggtttagaatgctgctcaaagcctgctccacaaatctgagagaccaggttatagcacctcattttcctttgccactgccatgtcctcactctcccctcatgtaacta

SEQ ID NO: 150796 - DNA, 359 bp, Homo sapiens
caacaccatcactacctccaccatcaccaccaaccatcatcactacctccaccaacgttactaccaccaactatcctcttcatttccaccacctcctttctcatccctccatcacaatcaccaacagaaccatagctaccattaccattatcgaaaacaaaacaaccacataactcctgtcctcagaaggagaaaaaagaatacacatttgcaaattctgatctcaaggaatggctgtatttctcatttaatgcagcgcttactagatatactcagaatggtgcagcaggtcctgcggcacgtcctctgtagcacgcacagtcactacagcagtgtgggggcctcctccactggtggaa

SEQ ID NO: 150797 - DNA, 331 bp, Homo sapiens
gaacgagagcacaggtgcatcattaagtcgcctcaacaataattttttttgctgttgtttttgttttagagacgaggtatggctctatcgcctagagtgaagtggtgtgactttggctcactgcaacctctgcctcccagactcaagccatcctcccacttcagtctcccaaagtgctgggattacaggcgtgagccactgcgtctggcccattctcaagttttgttttgttttgttttagagacaaggtctcactctgttgtccaggctagagtgcagtgatatgatcacggctcactgcagcctggaactcctgagctcaagcgatctt

SEQ ID NO: 150798 - DNA, 278 bp, Homo sapiens
ataagtctccatttttatgggcatgcaatctgtgtctatatttacatatagacagtttatgttaattacaatttgtacatgtatggtatatatacattcactaagatgaatgtgttctaggcatttctgtgagcattatttttgttaaattcttttggggttggcaccaatatcactacttcagatatagaaactgaaacttggagaagttaaagggaatttatccttgcagatagctatgtaacattactgttcatctgcataaaaacaacctggta

SEQ ID NO: 150799 - DNA, 446 bp, Homo sapiens
gagctgagattgcaccactgcactccagcttgggcgacagagggagaccctgtctcaaaaaaaaaaaaggcttcctagtagtttctgaaaaaactgactgattgctagtgactcctgagtgagatatagtatgtctcagagagaaggaaagacctcttaaccaagctctgatgctggcattggaattatagctgactagtaggcttccatgacactgagggaattcctacgtgtatcaaccacaaattggtacattccttaaggacagccagcatcttatttatctttatctccctggctcccttacacacaggggttgtttattacccattaaagtaatgaatgcaggtagcaggggagtcaaatcttgacacatttcagagagttttctgacagagggtggtgactatgaattaatccagtgacagacaccaggattccagagg

SEQ ID NO: 150800 - DNA, 809 bp, Homo sapiens
gtcaaactagttttaccatttaatagatgcatggcctgaggaaatcactcagtccctctgagaaaactaagctcaattaaataggaataatactcatcccacagggttgtggggaatgagagtcaggtaaagcaccttgactaccttctgtgtcctgtttatcttagcttttcagttctatttaaaagtgtgagcctgcctataatagtgcaggggtctcttaacttacagtccatgaatggaatttcgaagattgaagaagcctttaaaattgtgtatttttgtggggcagaaggtccatgccaaccatcaaattttcaaaggtttcattttaaaatttaaaatccactgctgtaggcagagaatgactttatataggaggtctccgagaggaagcagtgtaaaattgtgtgtctaacatttataacagttggcaactgcagttgagtaatcttaatagtgattctgttaatttgactgagttctattttattgctgctctacgtttttatttgctcagggcaattttaagttgtggttatgggtcactgatttttatctccagcccacagaactaccattaaacagaaataagaaagcaagcggctttgggtccgttttagtctgaatatattattacgtgccttgggctttaaaaactgctatgtagagttagcagtttttaagatgaaaatcactagacagctcattggaataagggcttctccaaagaactctgtagggttatatctattgttactatttcattttattaagatatactgtatatttacatgtcttcatggttt

SEQ ID NO: 150801 - DNA, 305 bp, Homo sapiens
agagttgagtccaagagtggaggtgtcttgtgtccaacatgcagaattgttgagaatgggctaaggaaacaagattagggtacaagaaggctgcagaagcaccacaagaagctgagtgctgtggttgaagcacagtaatttcctatgcatcctgcctggggaagaaaaaaaaagttcactaagaaagagcacgagtgcaagagaagaatgtttccaagaatcattaacataaggaagccaaggagggaactaagagaaatccaattgttctatttggttaccattcaaaggcaaaccagtgatca

SEQ ID NO: 150802 - DNA, 407 bp, Homo sapiens
ccagcctctggtggctcctggtgttctttggctgtgtcacccccacctctgtctctgttttcacatgaccttctccctgtttgtccatctgtatcctcatatgggcttcgtattaaaaaaaacagttgttagatcagagcccaccctaatctaccatgagcccctcttcattgggtgggccaaagcaggtagatcacttgaggccaggagttggagaccaacctggtcaacatggtgaaaccccgtctctattaaaaatataaaaattagccggctgtggtggtgcgcgtctgtaatctcagctactcaggaggctgaggcaggagaattgcgtgaacccaggaggcggaggttgcagtgagccgagatcacaccactgcactccagcctgggcaacagagtgagac

SEQ ID NO: 150803 - DNA, 220 bp, Homo sapiens
ccgcccgcctcggcttcccaaagtgctgggattacaggtgtgagccaccacgcccggcctctgggttatatgataatcttttgaggaatggcaccattttatattcccaacattttagccaaataatctgactaaaaacaggcaaaagagctgaatagacatttctccagggaagatactcagatggccaataaacttatccaatatgctcaacctcttt

SEQ ID NO: 150804 - DNA, 471 bp, Homo sapiens
tttatcctgaatgtgccaatttaattatttgccaacatgttgccagacatgctccctagtctgtgctaaagcatttgttaccatgtactacattgaacatacttgaatgtttctgtcatgtttaccacccagatggtgagaatccaaggaaaggagacacttgtattaagttcacagtttatctgttcttggaaacatataactgcatgaagagatcaggatgaaaatatcgttatagttaccccagttacctcaaggtggaagtctgggtcagacaaccacggggacctgccattgcaaaacttctctgtatatgcctgggggacctggctgttctagtttttcaccatctttgacatctgcttgttctcacttggctcctgccttaccctcagggtctcaataatgacttcttgactttgacaactttgacaaaaatgcattcatcaaaattataataaaaaataaaat

SEQ ID NO: 150805 - DNA, 528 bp, Homo sapiens
gattctcctgcctcagcctcccaagtagctgggattataggcgcatgccgccacacccgactaattttttgtatttttagtagagtcagggtttcaccgtgttgcccaggctggtgtcgaactcctgacctcaggtgatctgcccacctcagcctcccgaagtgctgggattacaggtgtgagccaccgcacccggctctatttagctttttaaaaattatttcctttcaagggccctttaatatctatcaagctccctcccctaacaaaatgggctgtccctgcccaacaagtctgaaatagaccttaaaactgtgctgccttagtggtaagtaaggggtgggggttggacagtgaatcttaagatttcatccttcattcagtaagcatttgagtacctactgtgagcaggcattggggcggagcagcgagagccctgccgatgttgggttctcctcctattggggaaacttgatcacagatggaacacgtgcagattgattgatgagtgctgtggagaaagcagca

SEQ ID NO: 150806 - DNA, 126 bp, Homo sapiens
aattgagtctcagagaggtcaataagtggcagaggtgggatctaaattcaaattggtcccatattcagagcctaggctcatattccctgcacagtaacacagccccaaattcagtgccacatcccc

SEQ ID NO: 150807 - DNA, 217 bp, Homo sapiens
cgagatttttgtcaagcttgactgtgtatctgtcaggtttgtttataccgaggatcactgaagcactcataagggaaatgaaggtataaaaactgcctttttccttgctcccactaacaaatgtgagaaactggccttactttttttttttttttggagatggagttttgctcttgttgcccaggctggagtgcagtggtgcgatctcgtccccctg

SEQ ID NO: 150808 - DNA, 287 bp, Homo sapiens
attttaagattcattcatactaccaagtgtgcgtacaggcaatgacttctaagggctgtgtagtaccactgaagtacacccactacatcctgtccacgcccaggggtggacatccatgttgcccacaagtggttccttggcaaaggaacgccatgttgagagttgacttttaggcaggctggtggcctgacagggctgacgcatgatcaccagtcaatgagacactggtgagcccagcttggatgtgtccagctggagttaagtggctgtgacttcaggtacttaag

SEQ ID NO: 150809 - DNA, 145 bp, Homo sapiens
actagattaccagatctgcttgtagtttcccacagatgccatgccgtactctgggtggaacacccttctcttctttacctggttaactgctattcatcctcaagagttggcaaaatagagtgtagtagttaggggttcatgctct

SEQ ID NO: 150810 - DNA, 461 bp, Homo sapiens
cctgaggatccccatgccaataacctccaagggaatcacagtgattgtgataaaaagctgtgcttttcgagtagtatggtctttacatttttgtgttgtcccaaatgtttttggtcggttctgcataaatagtgataggttctgcctacatctgtgggggcaggattcatgaagcatggcagacattccaccagtcagagctatgaacacttctgaaccaatggggactagttttgatagcagtaaacccaaagtttttttcagtggtgttttagtctttttctgtttagtttttttcccggtatttttgcggtacagggaggtgaaatacaatactgtacttttgaatatatattgaataaatttggtaatcctgttggtaggtatatcctaaatatatattgatgtttagattgcctatgctgtctcacgtaatgaccggaaacccgaggagagagttg

SEQ ID NO: 150811 - DNA, 368 bp, Homo sapiens
cctggttgagtcttagggtcttgacagtgctgatggaaagatttcatgagtaccaagtagataaaggcatgatgccaaggacgaggattcccctgtaagtttcttaaaggtaggatggatacagtacctggcataaaacgtggaacagttaatgtatacgaagcttgtttaaatgaagataaagtggtcatgtggataaatggaggataaagtggaaaaaatatgggtaaattagaggaaagcactggcctagaggagaaaaagacacgtttgagtctttgccctgttgctgactttcgtgtatgctatccggcaagttacttcccttttctgggcttcagtttctctatctgtaaaaaggaggtact

SEQ ID NO: 150812 - DNA, 356 bp, Homo sapiens
tcaacctttgccaacttgcaatcgttcttcaatctgccccaactatttctagcaaattctttggctaatacagcatagaaaacacatcctatttgtcccagacttatttcattccagcttcaaggggtggacatttagcctaagagcattcatagagagtcagacttcagagaatatatttccctctgttaaatcgtatatgaaaccaagcttgctccgaggccgctggctgcaggaagcagtgacgaggatggagcttggcagatggttgtagctgtggtttcctggaggcctgtgtggggagatgattgtttgtatattggttttcatttatgtattggtcttattttcatctt

SEQ ID NO: 150813 - DNA, 528 bp, Homo sapiens
atccttcaaaaatataaaaaccatttttagctgggagaccaaataaaaacaggccacagccagactcggccctaagatgatagtttacctaccccatcctaaagtaaaaacaattatttacagtatctgaaatgacaactgtccacacaggcagtttaaaattgatctctcaggcaaaaatggaaaacaaaattaggttgcagaagtgacttctaacttaaaaatatgagcaaaatctgatatactgactactagagtttgatcctcaggtgatactggttcctctcctatcaataaaaggtgggtcatggtgagatattttttattttgcttttaaggttttgttttcaagtatattagattaaaaggataacttaatgaagttttacatttcctttgaaacagcattactgtttgcctgtaagtgttaagaacgggttaatgaataaaggaaaacagaactgaccactgctgactgggaagcccacatccctccacacttacccaaaggatcttaccagccgggag

SEQ ID NO: 150814 - DNA, 541 bp, Homo sapiens
ctagctctgagggtaggaggcgggagcaaaggcgattagcatgctgggtgctgtctgatgaatggctctctccttccccactcggcccatttctagagtgtgaactcagacaagtttcattctctccttggacttggttttctcatttgtaaagtgcaagtattaatcgtatctatctctcagatttttttcaggattaaacgatgagaaaatgcatgtgaggtacatgtttcagtgtgcagcgtgagcatctacctctcagggggactgcgaggagctggcccaacccagggcccagctgagcctccagaatcatctctgtctttcgcagtttgcaccagagccttgctcctgaggctgctcccaccagagaccaagagcagctgggacactgaagcagctcccttcctgggagatgctgagtgagtgagtgtaactcacaaacagctcatgttcctgcaaactgccttagaacccacagctgtctgagatggcccctcctgaccctgctccttcctccctgctcttctggccttgggat

SEQ ID NO: 150815 - DNA, 268 bp, Homo sapiens
gatttcaaaactgtgatggggataggtctgaaaaactcagacaaatatggcaaatatatgagaacagatttttttaaagtttgaagaacagactagaagaattctatagcataagaatttgaaaggaataatgtcttgaaaagattgagatgtttgcaaaaattctaaacataccaaaaaacttttaatattagttttctctgatgttaggattatgagtaatttcttttcaagtttatctgtctatatttttagctgtctacgcgtg

SEQ ID NO: 150816 - DNA, 245 bp, Homo sapiens
tccattttccacgaagagcttcctctgaccccccgcttcccgcgtcaatgtgtgtgctttgagcggggctgtcctcaccgcccagcttcaggggtaggggtggcacccaggcctggccactcaatcaccccatcctccttcctgcagcgataggctcaggaatggcgcttagatagaaactacgaccaaagaacccagtcccattacttacttacccagtaacactatggaaaatgcattttttt

SEQ ID NO: 150817 - DNA, 517 bp, Homo sapiens
atgattcacaagggtccaatgataagagtcatttgcagggtagaccctctggtccccgtcccttaccccttctcagattggtgaaatcctgctcacaagccctgaatgatatgctaccttctccatgctcccaacctattcctgccataaccatagcagagcagatgtgtggctaccaccccctaacacttccccacatctgtcaacaacagacaaccccagtagatcacagccctgctcaacccactccaggcagcactaccaaccacccagatctgccaccctggccagccacgtcggatcagaaatccttactatgcctgtggcactgagttcctcgagtaagaaacggtgtcttgggcatctttatgccaccaacctgtagcacagggctggcccatagcacacgctggtgaagggcctgctggatgaacactaaatacactctcatctttgggccacacgggcctccagcgcaatcggagtcagacgtggacacaggtgaggagccagagcc

SEQ ID NO: 150818 - DNA, 1388 bp, Homo sapiens
acgccgatgtgtggttccgcggcgcgctgggagtttgggtttggttggctgcagccagccagccgtgtaaaaactccaacgccgggcgccgcgggcagcacccacggagacccgcggggagctgctgcagctcctggcaactggtcaagcaggcagcgtccagcgcacccgcgaacaccaggtccggcagcatctgtcttttcccgcagcgtgcagcgcctgaccatgaggaacacaagcaaggaacttcagggcgccacgcaccgctacgctccctgcgattggtattaccacgtcccagtgaagcgctctgagaaggccgtggatgccccaccagcgtcccagatcccaggtctcagcaatttgggagactcacacagcgagaacctgcctgggactcggagatactggataaaagaaacagattcggaatatgtgaagctcgcgaaacaaggtggcaggcccgatttgttgaagcactttgcccctggaaccaggaaaggctctccagtggcctactccctgccagactggtatatccaccacagcaagccaccgacagccagccagcaagaagtgcgggctgtctccatgctggattacatggttcatgaagaatttaaccccgatcaagccaatggtagctatgcatccagaagagggcccttcgacttcgacacgaaaacagtttggcaaagagaggctgaggaacttgaaaaggagaaaaaaaagctgaggctaccggccattgactcaaagtatctgagcaaagcaggcaccccacttggccctaagaaccctgcaggaagtagactctccttcccccacgtgcctggtcaaaaaaacagttcacctaccaaattttccaaactcattagcaatggttataaggatgagtggttgcagcagcagcagcgagctgactcagacaagaggaccccgaagacctccagggcatcagtggtatctcagtccccacgagacctggaaggtccccaggatgcagccaggctccaggacgcagaggcttctgaaggtcctgaggacaccccaggcccagaagaatctgtatctgcatcaacaccagcagagctcaaataaatcctgatgcaatatgtatttaggataatttttaaatggctaaatatgacatgactgtattatagctatatttctgaggctttttttgtattttattaatatagactctcattgaataatttaccttgcagcagatttgacattgctgcatagaaggggcaggtgttggtttttgtttcttgcatttctctgggatgtgaaacacttggctaacaaacacaactaaggcctctggtaccctctgccctgctggcctggtgatgtcccagtgtctcagaactgatcac

SEQ ID NO: 150819 - DNA, 1184 bp, Homo sapiens
acgccgatgtgtggttccgcggcgcgctgggagtttgggtttggttggctgcagccagccagccgtgtaaaaactccaacgccgggcgccgcgggcagcacccacggagacccgcggggagctgattggtattaccacgtcccagtgaagcgctctgagaaggccgtggatgccccaccagcgtcccagatcccaggtctcagcaatttgggagactcacacagcgagaacctgcctgggactcggagatactggataaaagaaacagattcggaatatgtgaagctcgcgaaacaaggtggcaggcccgatttgttgaagcactttgcccctggaaccaggaaaggctctccagtggcctactccctgccagactggtatatccaccacagcaagccaccgacagccagccagcaagaagtgcgggctgtctccatgctggattacatggttcatgaagaatttaaccccgatcaagccaatggtagctatgcatccagaagagggcccttcgacttcgacacgaaaacagtttggcaaagagaggctgaggaacttgaaaaggagaaaaaaaagctgaggctaccggccattgactcaaagtatctgagcaaagcaggcaccccacttggccctaagaaccctgcaggaagtagactctccttcccccacgtcaatggttataaggatgagtggttgcagcagcagcagcgagctgactcagacaagaggaccccgaagacctccagggcatcagtggtatctcagtccccacgagacctggaaggtccccaggatgcagccaggctccaggacgcagaggcttctgaaggtcctgaggacaccccaggcccagaagaatctgtatctgcatcaacaccagcagagctcaaataaatcctgatgcaatatgtatttaggataatttttaaatggctaaatatgacatgactgtattatagctatatttctgaggctttttttgtattttattaatatagactctcattgaataatttaccttgcagcagatttgacattgctgcatagaaggggcaggtgttggtttttgtttcttgcatttctctgggatgtgaaacacttggctaacaaacacaactaaggcctctggtaccctctgccctgctggcctggtgatgtcccagtgtctcagaactgatcac

SEQ ID NO: 150820 - DNA, 317 bp, Homo sapiens
ctcccacccacttttctcaaggggggtgaccctcacaactgtctgcgatgggctctctcatgggcaaggtgtgtcccttcactggaagagtgtaaacacaagctgaacactcattttgtagggatgttatggaagcaatttgaggaccagctgggagtttgaatcacatatggggaacataacacaaaattttgtttatgagtttcaagaggtcgctgaccctttgaagccatccatagatgccctaaataattaagggcccctagaccagaagttctcaacttcagctgaatgttaccaaccactgggggagattt

SEQ ID NO: 150821 - DNA, 173 bp, Homo sapiens
aaatgaagcctgctccctaacaccctatcaaactggattaaaagaaggtttccgtatgcatagatttccttgaaaaatcaaggtttttctctcttttggcatgaaagctttcccctcatcggactgtccttacttagcaaatgaagagaattccaggcagtaaagtcatgacc

SEQ ID NO: 150822 - DNA, 1175 bp, Homo sapiens
cgtgacgtgtgtgggctcgtgttcctgtttacctcagggagaatgagaaacggttatgttaccccatcagtgagttctggctaagtaggaataaaagttgtcatagagacttttaggactaggacatttcatgaccgtgcttcgtttttgaataactgagaggggtgagagcggtggccccattcaaaggtcgtcagggatgaaggtaggcaaggacaagtcatgtgcagggcgccttagagggccttcagaagatggaaagtcgctcctggctgaacattcagatttgattctgtaaacagaattgaacataacttacaaagagactgagtcctgcagttggaagttgatgcttagattagtcgcctgtgttttcacagcttctaagtagtgtgttgtaattgtgtggcaaagtatgtgattacctggggggtccataattgctgacttgtgtttttacttgatgtatttgaaaacagttaggaaaatgattttgccaaagtgtgtcttaccttagttaagatgaaatgtaccttattgtgagtttctgaagattgcaaaagcttgtcagtttagtttttggggtcccattagtgagggcacccctctttaccttactcaaaccagctcttcacatgtattccaagaaactagagggcatgctaagaggtatttctcaacaaatggtttgtgctcagatgctgttgcttgtagctgaggaatttgactgcagactttcccagagccttggtgtcctgattgggcactgtgagagaggggctacagttggaccactctcaatcctgtttgacgctagaactctttttagcctattatgggtccgcagacttcctctgcaaagggccagagagcacgcatttggctttctgagccatatggtctcttgttgcaactactcaaggctgccatttcagcaagaaagtagccataggcgagtgggcctggctgtgttccagtaaaactctagttgtaaagactggcatctgaggacttcgcccatgggctgcaatttggtgactgatataacgtgggacttcattctctgagcacccgttggggagcactggcctaccacggctgcacagacagctttaaggaaaacagcagcagggcaagttttctgagctgcatgatgtggagcccgggagagccca

SEQ ID NO: 150823 - DNA, 483 bp, Homo sapiens
cacgcctattctccctctcgcctggcgagctcagcccatcctaaaagtcttagctattaaagcactgccgctctctgtaaatgctcctgacagttcagttttgcagctcaacaacctgggttcaaatctctgctctgccattgaccactgtgactctgctctggtcacatgcttgccatgtgactgtagcaagtgacctaacctcttagaattctacctcagtgtgggatgaaatgggatgatgcaaggaaactgttcaaagcagtgacaggcagatactaagcattcactctgcactgctgggatcttgcctgacttcacaggcagagttaggcagccctgccatacctccaccaccctgcatggccactgctcaggcctattgagatgcctgagtagtctctgggcagcgtctgcattgccatctttatactctcagaatccagtcccatccccagacttcatcatatgtaacgtatgaat

SEQ ID NO: 150824 - DNA, 220 bp, Homo sapiens
ctagcctataatggacacttttataaatacatgttgaatgagtaagttgacatgtatagcttcagacatctgagtaagagcaagatggatgcaagaacacattcaacgacacaggcatccttcatgcacaaaattcctgtcacgaactctccagacaagaaagatcatgaaaaataccacttattcttgataacagtagttcaagaaatcgttatccaga

SEQ ID NO: 150825 - DNA, 654 bp, Homo sapiens
ccatgtacatgtttgcatctatgatctcatttgatcctcttgccggccctctgtggcggatgttgttccatagcccagctccactcaccaaggatctgaatagcaaggaatgcaagcaacttgcccagggtcattgagagcgtgtggtggatgcaggatgcgtcttctgactcaaaatattatgctgcttctcttacacctgcctacatcttcgtaattcagcctgccagcgtggtagctacaatcttaggctctgagagaagctatattctgtattgacgtggttttgtcaatgtgtttgtgtgtgtgtcacttggtgtcaccttcccaaacctagtggcagtttctccctttaacttttctgccatcccagacccttgtagccaatgatgcaaaaaatcttaagtttttatttcaacttgccgtttctgtgttttctagagtatgctggagagtactcagaaggccctttaagctgcttgagaatcaattattttcacatcctctgcctttttctactctaggaatccttgtcagtgacaaggttttagcttgcctgcaggtactgcatcttccgtctgagtaaatagcaatgtcagaagagcagtgaatggcaaacatgccatctttctggtatttggagcccccagtgat

SEQ ID NO: 150826 - DNA, 200 bp, Homo sapiens
acaaaaccccatcctttcagcttccttctaattatttccatttctctcataggctcccagaaaacaagtgttagtaaatacagtcgctgctgctctgctcagatcagctttgattcccggctcctatttttcatacatgtagcgtttcctccctaactgccttagggtgcctttttgaataaacattgaattccaaccct

SEQ ID NO: 150827 - DNA, 455 bp, Homo sapiens
gggcttaggccgtgtcagtgtgtgttagcgcagtcattccaagaaagacatctaagctaagcatctaaaagcaggttgggtgtttctaagtgcctggtgtctgaaatgaactcttgtttaaatcttagtatgctcagctacttcttgacacagtagataagtttcagggtgaattctgttcagaattcctgaatattggtctgttctctccagctaactaagtgacgcttggggaatagccatgcagatagatggaaacccagttaacgggggcatgctccactgtaccaagaggaattataatgctcgtttgtacttctggcacttcatgacttttcttttacctaccccattccccgtgtgctctattccaagcgcaaaaatcttctagtaggctttcactaaggaaattccccaaaaacattttcccaaccattgagagttggtcatttact

SEQ ID NO: 150828 - DNA, 113 bp, Homo sapiens
ttttagttttctgaaacagaaacttcttgttctttaaagttcttgttcttcacaagttgttttatactgaggaaagaaaaaaacccagaacattgggttcagacctctccaga

SEQ ID NO: 150829 - DNA, 207 bp, Homo sapiens
tggggaggaagtccagccgtcaccggggcagtcttctgtttactcagcagaggaaagtccacaccggggaggcagcaggtgggacctgccggagaccaggatgggagatacctgggagacgcccaggaaatgcccggggcagtcaggagggctcctgcgcaccctggtggccccaggtcacacatggaactcatgaggaagtccccg

SEQ ID NO: 150830 - DNA, 1193 bp, Homo sapiens
cggcctcccaaagtgctgagattacaggcgtcagccaccacgcctggctgagtcattttaaaaacatttttctttggcctcctttagtttgagctctgtcaaagcagggtccatgttttactgacctgtctgtgtccctccagtagtaagaatcatgtatcaaaatagtgcacgctcagtaaaatgctttttgtggggtgtgcttcacataaaatacgaatactgctgtttactgtctcattgcttcacagacacgtgcagaagttatctttgtcgtgctcgtaagtaattgaaaattctttatttgaaaggtaaaatgtgactaaaagttcaagtcaatgcccgtataagttgtgatttggtgttctttcagaagaaaattttgtttatttttacaactaacattcattaagagtattacacataagtatggtatggaaagctttgaggctgtggtaagcaaagatgccttgatctgcaagcagcactctgtgccctaaactaatcctgacaggacaagagcctccaaagtcacaagggaaaccaccacaccacatggaagcacattttattattaagtcacaggaggatggaagtttccagaaggatccctccaagaaaagaaaaagaaacaaagtttctgatgtgtttgagtaaatcaagacggaatttacatttctggcagacagtgggcaaaaaattaagaaaaggatcaaataaaagacaacaacaaaaacaaagacaattattaactcagaccaaacaaaaactctactgaaaaaaaattagtcttaggacattagtggctcagttgcgcacaatatttacattaaaaatgatgtaagaactgagtcacaatttaaacaaaatttgttaaataaccaaattagaaaaatggagaagagaaagtttactttgtataatgttgtattcagactagaaaaagaaaaaattcatcgtatataataggaagtcaatgtcatgttttcaactagaaaaatcaaataactatatatgcatgtatttacatagaagtaaatacaattaaaagtgttggcattcaagaacataagaagtagagtgataaaaaagatgatgattctttgctattgggtggtatgactctcaatgttctatttcaatttttaaaccatacacatatattacagagacaaaactaaacattcagttag

SEQ ID NO: 150831 - DNA, 541 bp, Homo sapiens
ctaaattcagtgatgaatatccctgtaagatgcagaaaatggaaggaagatcatgtgaaaacaaagatggagattagagttatgctgccgcatgccaaagaacgtgagtggccagcagccagcaaaatctaaagagatgtggaacagattcttccttaaagcctgcaaaaggcaccaactctgttgacaccttgatgtcagaattctggcattcagaattgtcaaagagtaaattgctgctgttgttagccacagtttctggtgatgcattgtggaagtcctacaaaactaatacagatgtcacctgtatttttcaggactctacagagaaacaatcaatagtatacatatgtgtgtatactactggacatatatatatcttcaaattatttatttacttattataggaattggcttatgtgatcatggaggctgagttgtctcatgatctgccatgtgcaagctgaagactgccatgtacagccagtggtgtaattcagtctgagcctgaaggccaaagaaccaggagtgctgatgttca

SEQ ID NO: 150832 - DNA, 233 bp, Homo sapiens
tccacatccaccaccatcactaccatcactccactaccaccatcaccacctctaccaccaccacaaccaccacctccaccactaccacctccacctccaccaccaccatcactaccatcactccattaccacgatcaccacctctaccaccaccatcacctccactaccacctccacctccaccatcactaccatcatttcactaccaccaaccccgtgatcgtggggttgta

SEQ ID NO: 150833 - DNA, 623 bp, Homo sapiens
acaaagctgtaggacatttgagttagattgatgaattgttttgcctggtaattgagactgggaagtacacaggttttcttctaagagcttagagaattttgttacattagactcttgttatttgaataggttagaatacagagccaaagtaacctggtattggaggaacctggtgtattattttagtgggatgtggtgtgctaaccaatatattctaaaactttgctagttataattgtcaacatcctgtaatgggtgttttcttcctcttttcctccccctccttcttattgtatcttaccacaaatatgatcttaaagtggataggatctgcaactgactaaactgtgtgggccatttaggcgcttacagatatttccatagggttaatgttaaagattagttacagatcagtatagcttttgatttgtactatagtttcttgctgatgattacaatttcctctgtagctatcactttttatgcatacagtatttttagttttggaataagcagtgaattttacctctattttcatttagcaggcaatattgtgtattttgttgcatttttgcagtttggaaaaatttaggactatttgcaattataatggtgacaaatca

SEQ ID NO: 150834 - DNA, 601 bp, Homo sapiens
acaaagctgtaggacatttgagttagattgatgaattgttttgcctggtaattgagactgggaagtacacaggttttcttctaagagcttagagaattttgttacattagactcttgttatttgaataggttagaatacagagccaaagtaacctggtattggaggaacctggtgtattattttagtgggatgtggtgtgctaaccaatatattctaaaactttgctagttataattgtcaacatcctgtaatgggtgttttcttcctcttttcctccccctccttcttattgtatcttaccacaaatatgatcttaaagtggataggatctgcaactgactaaactgtgtgggccatttaggcgcttacagatatttccatagggttaatgttaaagattagttacagatcagtatagcttttgatttgtactatagtttcttgctgatgattacaatttcctctgtagctatcactttttatgcatacagtatttttagttttggaataagcagtgaattttacctctattttcatttagcaggcaatattgtgtattttgtttcctctgccctccgggaatcctcggaacagctatga

SEQ ID NO: 150835 - DNA, 739 bp, Homo sapiens
catattggccaacctggacttgaactcctgacttcagatgatccgcccacctcggcctcccaaagtgctgggattacaggcgtgagccaccatgcccaccatgcctaaaaatttttgtatttttagtgaagatggggtttcaccacattggccaggctagccttgaactcccaaactcaaatggtccacctgccttggcctcccaaagtgctgggattacaggcatgagccaccgtgcccagccaatgctatgctgcttctatgatgtcaactttttagcttccacatatgtgtgaaaacatgtggtatttatctttctgggcctgaatttacatcactcaacatcatgttctccaaagcttatctttatcttgccataaatgacagaattttattattttttatggttaaatagtgtacctttgtgtatgtatgccacattttctttaccattttctgttgatgaacacttagattggttccatatgttagctattgcaaatagtactataataaatataggagtgcagataggagttcaacacactgatttcctttcctttggatatacagctagtagtgggattgctggatcacttgaatgctgatatgcataagaggatctacactggagaaaaaccatggaagtgtggagattgtggtacatgcttcagtcagggctcacatcttcaaattcagtgtctgttctgtagagaaaccttaataatgtgatatatgt

SEQ ID NO: 150836 - DNA, 403 bp, Homo sapiens
tatgggacaggacacttgtggcagctggcgtagctggtggtctaatcttgacctttcaccctttccttgaagttccgagtcgggggtagcttccttttctcttcagctgtggttttcctgtgatgggtccctcccagttagtaatgagaggctgagagacaagttgtggtaactgcttcgtgggtagtggtctttcccggcccctgagtcattctaacttccatcctgctccgctgcggatgcacatagctgctttcctaggggcgagaggagatgaggggactgggcctgatgaccacaggcgctgccccttcatagcacattttattcctgaaggatcctaactggaaaagtacctctcgccgaaggggctgggtggttccttatcattttcaggcaaggc

SEQ ID NO: 150837 - DNA, 437 bp, Homo sapiens
ccccatcttgacttctcaaagtgttgggattgcaagtgtgagccaccaaacctagccagtcccatttctttttggtttcatttttcctgccttcttttgaactacttacatattttttgtgatttgattttgtttcccattttggacttactagctatatttctttgtttttaagtggttgctgtagcattttcagtattaatcttcaacttatcaaagtctatcttcaaatattaatctcactttacataaagtgtaagatccttacaaaactatacttccagttttccctcttttcctctgtgctgctattatatatttgaattttacatatagtataaaccccaaaatatattgttactatttttgcttttaaacaattaacttttaaaaagattataaacgagaaaagagagaactggaagtattaagcgtga

SEQ ID NO: 150838 - DNA, 332 bp, Homo sapiens
caaaaacctatggaatttttttcagcgagccttacaaagtactcctagaaaaggaaatgaaggccaataaagctttggaataatagtaaagggaaactggcctaatcagattccaaatataacgtgaaagtataataattaaaacagtgtggtaataaggctagaatcaacaattccgtatgggtaagaatttagtattatgattaaggatgacatcacaatttagagaggaaagacttatttcaaataatgtggggccaattagttgatttttaatttattgtttttaagttactgtcacatctataccaaaatacattccagataaacta

SEQ ID NO: 150839 - DNA, 364 bp, Homo sapiens
tgtcaggcgtctgggggaatctttgatgttcccagcaggcagggtccttgtggaaccagcattgggtttgtcccaaaagagcaggctatccatcccaggtgctctacttggagttttctgattacagtaggtgctctccgatcccacagaagaacccacagatgtttctctggtcactgcattccccctgtctgtctcccctacccatgtctggccagtggtcttcctctttggtcgtccttgtcctcctgacggcccagctaatgctggagataaagctggctgggtggtctatggcaccttctcttgcatgggagctaattgaagactgaagagaacacgtctaggcttttttcctctccag

SEQ ID NO: 150840 - DNA, 291 bp, Homo sapiens
tactgtcaactccagccaacagaggacaaaaccactgagcttctcaatgacactgtgcccctcacagatgcacttatccctttagtgaaggaagcgacctctcggccctcctgggatcatggtctgatggttggctcttctgatctttcataagagatccacactacatgcccactcttgagccttttgacctcctcaatattctgccaaggcagtaccagcatctccatttaacttacacgaggccattgttgtgctcaggccgcaaggagccatcccaatgtccgcaga

SEQ ID NO: 150841 - DNA, 305 bp, Homo sapiens
gctaaggcagagagttgcttgaacccgggaggtggaggttgtggtgagctgagatcgcaccactgcagtccagcttgggcaacagagcaagactccgtctcaaaaaaagaaaaaaaaatactgtactagaggtgtggtaccatatattagattaatattagaggtaaggactgattgaattcctatcaaaatgatgaattaacaggtagtcctgtggagtattgggaactttaataaatggttgtctgaatatggctatttaaattagttctatcttggatagttctatcttggataccttctta

SEQ ID NO: 150842 - DNA, 394 bp, Homo sapiens
cccactcacaaagtcttagctgcaatcgggcaccttttcccaacacctctagtcactcagtttttctccctcacctcaggtgtcagagctgggatgctgtcctgatgaccaaaagcttaggtggacacagagccctgggctccctcacgaggaattcactggggaacaaaaaagtgaggcactgaggacacctgcagtgtgagtccggacaggcacactgacacagcggaacagacgcggcagaaccgacacggcggaacggacgcggatgatgcagagcccctctcaggatggccagccattcctcccctgccagggcccaccacgcctcccatggagagacggtgtctgtttccctcctgtcggaatctggatggcccagagacgactctga

SEQ ID NO: 150843 - DNA, 266 bp, Homo sapiens
aaagctccattttgatgcaactagggaacttctgtcatccctcatccccagtcacagctattgaaggtggtggagtggtaactgacttccagagcagacacctgagtcctcatagtggggccaccattgggaaacaagcaagttttgtcccttggatcccagaacagcacaggaattggaagtatcaggtatctcaaaagacaggggtggggcagatgtgcttgagactcagggaaattaagcagcagaagccctaagatgagaca

SEQ ID NO: 150844 - DNA, 530 bp, Homo sapiens
taagtcaattactctcttttcttcataaattacacagtttcaggtagttctttatagaaaatgaaaattgactaacatagtatttaaaaaaattttagtcattctaataactgtatagtcttatcctattgtggctttaatttgaatttccttaatggcgaagaatgtcgaatatgtttttatgtagttattgccatttgtataccttttgtataccttctttagtaaggtgttctattttctagaagattattttcttacttttgagttctacgacttatataatattgatcaattcctcaaaatccacaaactaaactcactcaagatgaaatagacaatataaatacagctacaacttttgaattcatggtcaaatataattcatgaccaaagaaattgagttcgtggtttacaactttctgaaaaaactgtctttagatctagatgatttcatgtgtgaatcctgccatgtatttaagtagaaataacatttatcctacacagtctcttccaaaaaaaaaacagaa

SEQ ID NO: 150845 - DNA, 291 bp, Homo sapiens
tcctccctcctccatttttttaaactgcttttatctatgtatttaacatcctgagcacctgtgtgagattgcatttatgaaagagttctttagctaaaaaggcttttgaaatctcgtagtgggtaaagatgatgtttttctctataaatgttagggtcttaacttacgaacaagtgaaatgtgctgttacatcagtcactgaactttcccaagccaaaggctcaagacatgaagattcttttgactgcccgagcctcccagttctcaggagccatcctgctgaggctctgg

SEQ ID NO: 150846 - DNA, 432 bp, Homo sapiens
tcctcatctctctcccccttcagtattacatttctgtggctcaggcagtaaacgcgggattcctaaaagcactctgacaataaacaaaaagctttcctctgactttggtacagttcatttgatcttttcaaacattttgaatgagggacaaggtgtgttttgcgtggttagaacaagggccagtgggtccaaggtccacctggaccaatctttgcaggatacaggaagaaccttctaaccgtgcagtacaaaagtgagatgtcagggattttaggctttcggggctagtgggggttgtgtttgaggaacttgaggccatctaggtacatgcatggccttgagcaatggttctcagtcctgactcagtacatgcacttaggcatatacagatattcacacacatgcacactcacacacacatgcacatacaaa

SEQ ID NO: 150847 - DNA, 147 bp, Homo sapiens
gcacacacacgcacactctaataagagcaatctgggaatttccctctgtgtctgtcagtttgtaccttttagatttgccatctgtgataccaaattctccagcgttacaaaaaaaaaatctgaagtagataagagggtcaggagaga

SEQ ID NO: 150848 - DNA, 392 bp, Homo sapiens
tgcagtggcacatggagctggggggagcgtgcctcccataggaggtggtggcctggaggtaggtggtcccacagatggagaaggggggtagattgaagagagggagggaggaatttgacttggaggacccctgagtttctggcctgggaggccaggtgttcgggaaccctccctgaccacacagtcattgcctgttctgggccatcctcgtctgtatgtcccctggactgcagctgttggctgctctgaccctgagagccgatttggacaatgggagctgaggtgctggctgaggccatgccaggcttcctggaggtcgtcgctatttttagagtcttttattggggagtgggtttgtaatagtttcaggcttactaatagcaccaacaaca

SEQ ID NO: 150849 - DNA, 345 bp, Homo sapiens
  misc_feature (121)..(121): n is a, c, g, or t
gtgtgattcacttcggccgttacgtactgcaggattctgccaacaaggtgtcgccgaccaaatgtactgtcctggcatagagagcactgctttgtattccactgtagtaactaggacaacngctcaagagtgacagactactttgtcgtagctggtctcactgacacatctactcttttggatcaagaaataaatcgtttagatactaagtcaactggacctaaagctccaattacagacattgccattattatcaaatcagctggagaaacagtacctgaaggttacacctgtgtagaagccactccatcagctctccaagcaaacttgaactatggaagtctg

SEQ ID NO: 150850 - DNA, 611 bp, Homo sapiens
gacatttgcaaagccagtgtcttatatttataaaagctttagataggaactgctatttttctaaaattgttggtttaaaaataattgttacatttgtgcattttaaaagttgcttctaacacactttgggtatgcttgagctcagccttttcagcaaagtatacagacatttgggcatcagcctttttggtcttattctgtctcagacgatttatggattgtggatgtcagggatttgataagctcccattaaaatatgatgtggtttttaaaattgcttaaaatgccctttgaacctgttaaaatgtgctgccgtcatctgaattaagaaatttagctgccgggcgtgatggctcacgcctgtgatcccagcactttggaaggccaaggcgggtggatcacctgaggtcgggagttcaagaccagcctgaccagcataaagaaaccacgtctctactaaaaatacaaaaattagctgggcatggtggcgcatgcctgtaatcccagttacttgggaggctgaggcaggagaattgcttgaacccgggaggcgggggttgtgataagccgagatcgcgccattgcactccagcctgggcaacaagagcgaa

SEQ ID NO: 150851 - DNA, 235 bp, Homo sapiens
gtctctgtgtatgtaaagttcttggaacagtgcctggcaccacatagtacttaaccattgatactacgtatgtgtagaatgggcctagcaagatgcatcccaggttgcgaactactgacatagagtacctcttagcatagacttaacatagcatgtaacatatattacaacaatcactttctgtgacgtttcctaaaggttatggaagttttactccaacacttttcctgctgtc

SEQ ID NO: 150852 - DNA, 566 bp, Homo sapiens
ttttatagtgcaaatcagaatccttttagacatgcaattttatattgtgctgactaagccaaagtttgtacagtcatctgtatccttttactgtttttatcctctgacatgattttagataatgatgaaaaatagacctgccgaaaacaacaccaacatttctgaagagtgaattaatcccttcctgtttgcaatttgggtatcgttggtgacattatcacatatcttcaaacttggaagatgactgtggtatagcttcctgcctcctccaatacagcagccatcaatttagacaaaatacagacataattatgtccctgaaaaaacagaaaggatggtaaatttctcttacaagtgagtgaagacccaggcctcccaaatttagccagctttctcttgcagggactgattcttgcctcatctgtttctcccacagaaaacacatcctttgacaaaagtgagagagtgttttgtgggaaaaaaaaagagatccaagaattagcttactttgtgtgaaataatgccttcctcgactgcatgcatcactgagatattgatttatgttt

SEQ ID NO: 150853 - DNA, 914 bp, Homo sapiens
gggggaagaggtcttttattcacttcctggtgcaggcacatgtacctatatattgctctttctgtagccagattatttactcagtgtagtgtgtgtgcctatgctacacaagaggttagcaaccattttgtaaagggtcagacgggaaaaattttaggctttttgagccatacagtttgagtggctactactcaaatccgccatgttgagcaaaacagtcataaataggtctttacactgtgttccaataacattgtatttatggacgatgaaatttgactttcatctaatgtcccaagtggcccaaaagattaatcttcttttaatcttcctccctaaccatcaagaatgcaaagccccacgccttgtgtatgagtacacaccatatgtagcacaggaaaaaggacgtccttgggaaggataatcactgcattcaggggagtggccacccctgagaagagagagagagaatcaagttgaggggcacgaggggcttcagttatctctccagtggtttattcctcatgttggtcccagatacagaggtgtttgttgtacctttcagtaggtcagaaataaaacaaatttttaaatattaagtatttaagtatttaaagttttaatttatcggccgggtgcgatggctcactgggaggccaaggcaggcagatcgcctgaggctcaggaggtttgagaacccagtcctgaaattaccattaacggaagggccccggttttcgtaccaataccacacacactataactatagaccatcgaacacacttgttttcgcaggcgcctggtgcgccctaaagaaaaagtgtcttataacacaccactcgttatgaggacaggagaggggcccacatgtatatattaggtgaaacacatgggtacaaaacgtgctgttcata

SEQ ID NO: 150854 - DNA, 281 bp, Homo sapiens
ggctcctttaagtcattaataaccaattaatacttgtctctttctcggtgaggacatcagtacataataggtgtgatttatcactatttctatttcatattatggcttcatctagagatagtatgtttcagtgactaaagacatggatttctgagcagactgactgggtttgtgccctggcttcaccacttcccacctgtgtgattgtgggcaatttgctaacctctctgcactgtgctttactccagatctgcaagacagagccacatggccagtcccca

SEQ ID NO: 150855 - DNA, 308 bp, Homo sapiens
ctttgaacttcacatatttgggatccaggctttaatactgtcagctggtgaaaatatgggtgtagaagatatttttgtatgaacataaaaatttggaaattgagagtttttaaatattagttgaaaagtggacatacttgaaattccttaggttttaaagttaacactcgtttgtagataactagattgttgccattatactataccatcatttttacttgcatgcttatctccctactagcaggtatacaccttgaggacagaattgtctacctttttttcaggttctctaccacctaacatagtag

SEQ ID NO: 150856 - DNA, 532 bp, Homo sapiens
gtcttttgagaagtagcaaaggatagtgatgaggagtacagaatctggcaccagactacctgggtgtgaatcctgctatttactgggtgtgtaaacttatgtaacctctctgtgcctcaatttcttcatctttaaaatggagataattataccactttaaagggctactataaatagtaaattaatatatatgaaatattttgaaagaggtctgagaaatagttaagaatcacgtaaatgtttacggctagtattatttcttcctagcttcctttcacttgttctatttcaaataagacaggattttttttgtaattacgtttttctatttctgatacatacatgtaactcatttttatatattcgttttaaacttaattctgttgtggtcagattccatttgttcgaaatttcttgagaattgctgcatttggtcagttttcataaatattccatgaattctattaaataatgtgtattcttcaggtgttgaatatggatttccttagatgttcattaaattgagcttatg
